United States Patent Application Publication US 2024/0263153 A1 - sequence listing, part 4

SEQ ID NO: 8335 - protein, 456 aa, Unknown
  Description of Unknown: Integrase B8336 sequence
  PTHR30461:SF3,SM00857,G3DSA:1.10.10.2600,IPR036162,PF13408, IPR025827,G3DSA:3.40.50.1390,PS51737,IPR006119,IPR038109, PF07508,SSF53041,IPR011109,PTHR30461,Coil, PS51736,cd00338,PF00239
MRNKEIAPALVRVALYIRVSGEEQKIKGLSLEAQQERLEAYARERGWVIVGIYIDAAKTARKNIHKRTEFQRMMEAVKRDEVDILLFARLDRWFRSVADYYKVMEVLQAHNCDWKTTDEEYDTTTANGRLYINVKLSIAQNEADIDGERIDVVFDSKIAHGTVVSGSSPFGFRVSEEKRLEIVPEDAAIVQDAFNYFENTVSQRATTKYIREKYGVNWCYATFHRMLIEELYTGVYNRGGRYNANFCPAIIQREQFDRVQALLKKNVRRAPSGRVYIFTSVLTCEECRHKLNGYISQGIYYYRCNQHLQRGRCTHNHSVREDRVEQWLFDHLGEELERCKLEWEVQAAEKKRSVTSRDKAALKRKLTKLKELYVNELIDIDDYKKDYEIYTAALNQIPDTTQEAPPDFAAVEKLLQKDFRKIYDTLTREEKRTLWRSVIKEIRIDNDQNITGVVFG

SEQ ID NO: 8336 - protein, 456 aa, Unknown
  Description of Unknown: Integrase B8337 sequence
  PTHR30461:SF3,SM00857,G3DSA:1.10.10.2600,IPR036162,PF13408, IPR025827,G3DSA:3.40.50.1390,PS51737,IPR006119,IPR038109, PF07508,SSF53041,IPR011109,PTHR30461,Coil, PS51736,cd00338,PF00239
MRNKEIAPALVRVALYIRVSGEEQKIKGLSLEAQQERLEAYARERGWVIVGIYIDAAKTARKNIHKRTEFQRMMDSVKRDEVDILLFARLDRWFRSVADYYKVMEVLQAHNCDWKTTDEEYDTTTANGRLYINVKLSIAQNEADIDGERIDVVFDSKIAHGTVVSGSAPFGFRVNEEKRLEVVPEDAAIVQDAFNYFENTVSQRATVRYVRETYGVNWCDATFRRMLKEKLYTGVYDRGGRYNDQFCPAIISRQQFDRVQALLTRNVRSAPSGKVYIFTSILTCAECGHKLVGYKSSDYFYYRCNQHFQRGRCSHNHSAREDVVEAWLFDHLGEELERCQLKWDVEAAKKKASVARTDKAALKRKLTKLKELYVNDLIDIEDYKKDYQIYVSALNQIPEPAQEAPPDFAAVRRLLDNSFRTIYDTLTREEKRTLWRSVIKEIRIDNDQNITGVVFG

SEQ ID NO: 8337 - protein, 456 aa, Unknown
  Description of Unknown: Integrase B8338 sequence
  PTHR30461:SF3,SM00857,G3DSA:1.10.10.2600,IPR036162,PF13408, PS51737,IPR025827,G3DSA:3.40.50.1390,IPR006119,IPR038109, PF07508,IPR011109,SSF53041,PTHR30461,PS51736, cd00338,PF00239
MRNKEIAPALVRVALYIRVSGEEQKIKGLSLEAQQERLEAYARERGWVIVGIYIDAAKTARKNIHKRTEFQRMMDSVKRDEVDILLFARLDRWFRSVADYYKVMEILQAHNCDWKTTDEEYDTTTANGRLYINVKLSIAQNEADIDGERIDVVFDSKIAHGTVVSGSAPFGFRVNEEKRLEVVPEDAAIVQDAFNYFENTVSQRATVRYIRETYGVNWCDATFRRMLKEKLYTGVYDRGGRYNDQFCPAIISRQQFDRVQALLTRNVRSAPSGKVYIFTSILTCAECGHKLVGYKSSDYFYYRCNQHFQRGRCSHNHSAREDVVEQWLFEHLGEELERCQLEWDVEAAKKKTSVARTDKAALKRKLTKLKELYVNDLIDIEDYKKDYQIYVSALNQIPEPAQEAPPDFAAVRRLLDNSFRTIYDTLTREEKRTLWRSVIKEIRIDNDQNITGVVFG

SEQ ID NO: 8338 - protein, 456 aa, Unknown
  Description of Unknown: Integrase B8339 sequence
  PTHR30461:SF3,SM00857,G3DSA:1.10.10.2600,IPR036162,PF13408, IPR025827,PS51737,G3DSA:3.40.50.1390,IPR006119,IPR038109, PF07508,SSF53041,IPR011109,PF00239,PTHR30461, PS51736,Coil,cd00338
MRNKEIAPALVRVALYIRVSGEEQKIKGLSLEAQQERLEAYARERGWVIVGIYIDAAKTARKNIHKRTEFQRMMDSVKRDEVDILLFARLDRWFRSVADYYKVMEVLQAHNCDWKTTDEEYDTTTANGRLYINVKLSIAQNEADIDGERIDVVFDSKIAHGTVVSGSAPFGFRVNEEKRLEVVPEDAAIVQDAFNYFENTVSQRATVRYVRETYGVNWCDATFRRMLKEKLYTGVYDRGGRYNDQFCPVIINRQQFDRVQALLTRNVRSAPSGKVYIFTSILTCAECGHKLVGYKSSDYFYYRCNQHFQRGRCSHNHSAREDVVEAWLFDHLGEELERCQLEWDVEAAKKKASVARTDKAALKRKLTKLKELYVNDLIDIEDYKKDYQIYVSALNQIPEPAQEAPPDFAAVRRLLDNSFRTIYDTLTREEKRTLWRSVIKEIRIDNDQNITGVVFG

SEQ ID NO: 8339 - protein, 456 aa, Unknown
  Description of Unknown: Integrase B8340 sequence
  PTHR30461:SF3,SM00857,G3DSA:1.10.10.2600,IPR036162,PF13408, PS51737,G3DSA:3.40.50.1390,IPR025827,IPR006119,IPR038109, PF07508,SSF53041,IPR011109,PTHR30461,Coil, PS51736,cd00338,PF00239
MRNKEIAPALVRVALYIRVSGEEQKIKGLSLEAQQERLEAYARERGWVIVGIYIDAAKTARKNIHKRTEFQRMMDSVKRDEVDILLFARLDRWFRSVADYYKVMEILQAHNCDWKTTDEEYDTTTANGRLYINVKLSIAQNEADIDGERIDVVFDSKIAHGTVVSGSAPFGFRVNEEKRLEVVPEDAVIVQDAFNYFENTVSQRATVRYVRETYGVNWCDATFRRMLKEKLYTGVYDRGGRYNDQFCPAIINRQQFDRVQALLTRNVRSAPSGKVYIFTSILTCAECGHKLVGYKSSDYYYYRCNQHFQRGRCSHNHSAREDVVEQWLFEHLGEELERCQLEWDVEAAKKKASVARTDKAALKRKLTKLKELYVNDLIDIEDYKKDYQIYVSALNQIPEPAQEAPPDFAAVRRLLDNSFRTIYDTLTREEKRTLWRSVIKEIRIDNDQNITGVVFG

SEQ ID NO: 8340 - protein, 456 aa, Unknown
  Description of Unknown: Integrase B8341 sequence
  PTHR30461:SF3,SM00857,G3DSA:1.10.10.2600,IPR036162,PF13408, PS51737,G3DSA:3.40.50.1390,IPR025827,IPR006119,IPR038109, PF07508,IPR011109,SSF53041,PTHR30461,Coil, PS51736,cd00338,PF00239
MRNKEIAPALVRVALYIRVSGEEQKIKGLSLEAQQERLEAYARERGWVIVGIYIDAAKTARKNIHKRTEFQRMMDSVKRDEVDILLFARLDRWFRSVADYYKVMEILQAHNCDWKTTDEEYDTTTANGRLYINVKLSIAQNEADIDGERIDVVFDSKIAHGTVVSGSAPFGFRVNEEKRLEVVPEDAAIVQDAFNYFENTVSQRATVRYVRETYGVNWCDATFRRMLKEKLYTGVYDRGGRYNDQFCPAIINRQQFDRVQALLTRNVRSAPSGKVYIFTSILTCAECGHKLVGYKSSDYYYYRCNQHFQRGRCSHNHSAREDVVEQWLFEHLGEELERCQLEWDVEAAKKKASVARTDKAALKRKLTKLKELYVNDLIDIEDYKKDYQIYVSALNQIPEPAQEAPPDFAAVRRLLDNSFRTIYDTLTREEKRTLWRSVIKEIKIDNDQNITGVVFG

SEQ ID NO: 8341 - protein, 456 aa, Unknown
  Description of Unknown: Integrase B8342 sequence
  PTHR30461:SF3,SM00857,G3DSA:1.10.10.2600,IPR036162,PF13408, PS51737,IPR025827,G3DSA:3.40.50.1390,IPR006119,IPR038109, PF07508,IPR011109,SSF53041,PTHR30461,Coil, PS51736,cd00338,PF00239
MRNNEIVPALVRVALYIRVSGEEQKIKGLSLEAQQERLEAYARERGWVIVGIYIDAAKTARKNIHKRTEFQRMMDSVKRDEVDILLFARLDRWFRSVADYYKVMEILQAHNCDWKTTDEEYDTTTANGRLYINVKLSIAQNEADIDGERIDVVFDSKIAHGTVVSGSAPFGFRVNEEKRLEVVPEDAAIVQDAFNYFENTVSQRATVRYVRETYGVNWCDATFRRMLKEKLYTGVYDRGGRYNDQFCPAIINRQQFDRVQALLTRNVRSAPSGKVYIFTSILTCAECGHKLVGYKSSDYFYYRCNQHFQRGRCSHNHSAREDVVEAWLFDHLGEELERCQLEWDVEAAKKKASVARTDKAALKRKLTKLKELYVNDLIDIEDYKKDYQIYVSALNQIPEPAQEAPPDFAAVRRLLDNSFRTIYDTLTREEKRTLWRSVIKEIRIDNDQNITGVVFG

SEQ ID NO: 8342 - protein, 456 aa, Unknown
  Description of Unknown: Integrase B8343 sequence
  PTHR30461:SF3,SM00857,G3DSA:1.10.10.2600,IPR036162,PF13408, PS51737,G3DSA:3.40.50.1390,IPR025827,IPR006119,IPR038109, PF07508,IPR011109,SSF53041,PTHR30461,Coil, PS51736,cd00338,PF00239
MRNKEIAPALVRVALYIRVSGEEQKIKGLSLEAQQERLEAYARERGWVIVGIYIDAAKTARKNIHKRTEFQRMMDSVKRDEVDILLFARLDRWFRSVADYYKVMEILQAHNCDWKTTDEEYDTTTANGRLYINVKLSIAQNEADIDGERIDVVFDSKIAHGTVVSGSAPFGFRVNEEKRLEVVPEDAAIVQDAFNYFENTVSQRATVRYVRETYGVNWCDATFRRMLKEKLYTGVYDRGGRYNDQFCPAIINRQQFDRVQALLTRNVRSAPSGKVYIFTSILTCAECGHKLVGYKSSDYYYYRCNQHFQRGRCSHNHSAREDVVEAWLFDHLGEELERCQLEWDVEAAKKKASVARTDKAALKRKLTKLKELYVNDLIDIEDYKKDYQIYVSALNQIPEPAQEAPPDFAAVRRLLDNSFRTIYDTLTREEKRTLWRSVIKEIRIDNDQNITGVVFG

SEQ ID NO: 8343 - protein, 456 aa, Unknown
  Description of Unknown: Integrase B8344 sequence
  PTHR30461:SF3,SM00857,G3DSA:1.10.10.2600,IPR036162,PF13408, IPR025827,G3DSA:3.40.50.1390,PS51737,IPR006119,IPR038109, PF07508,IPR011109,SSF53041,PTHR30461,Coil, PS51736,cd00338,PF00239
MRNKEIAPALVRVALYIRVSGEEQKIKGLSLEAQQERLEAYARERGWVIVGIYIDAAKTARKNIHKRTEFQRMMDSVKRDEVDILLFARLDRWFRSVADYYKVMEVLQAHNCDWKTTDEEYDTTTANGRLYINVKLSIAQNEADIDGERIDVVFDSKIAHGTVVSGSAPFGFRVNEEKRLEVVPEDAAIVQDAFNYFENTVSQRATVRYVRETYGVNWCDATFRRMLKEKLYTGVYDRGGRYNDQFCPAIISRQQFDRVQALLTRNVRSAPSGKVYIFTSILTCAECGHKLVGYKSSDYFYYRCNQHFQRGRCSHNHSAREDVVEQWLFEHLGEELDRCQLEWDVEAAKKKASVARTDKAALKRKLTKLKELYVNDLIDIEDYKKDYQIYVSALNQIPEPAQEAPPDFAAVRRLLDNSFRTIYDTLTREEKRTLWRSVIKEIRIDNDQNITGVVFG

SEQ ID NO: 8344 - protein, 456 aa, Unknown
  Description of Unknown: Integrase B8345 sequence
  PTHR30461:SF3,SM00857,G3DSA:1.10.10.2600,IPR036162,PF13408, IPR025827,G3DSA:3.40.50.1390,PS51737,IPR006119,IPR038109, PF07508,IPR011109,SSF53041,PTHR30461,Coil, PS51736,cd00338,PF00239
MRNKEIAPALVRVALYIRVSGEEQKIKGLSLEAQQERLEAYARERGWVIVGIYIDAAKTARKNIHKRTEFQRMMDSVKRDEVDILLFARLDRWFRSVADYYKVMEILQAHNCDWKTTDEEYDTTTANGRLYINVKLSIAQNEADIDGERIDVVFDSKIAHGTVVSGSAPFGFRVNEEKRLEVVPEDAAIVQDAFNYFENTVSQRATVRYVRETYGVNWCDATFRRMLKEKLYTGVYDRGGRYNDQFCPAIIDRQQFDRVQALLTRNVRSAPSGKVYIFTSILTCAECGHKLVGYKSSDYYYYRCNQHFQRGRCSHNHSAREDVVEQWLFEHLGEELERCQLEWDVEAAKKKASVARTDKAALKRKLTKLKELYVNDLIDIEDYKKDYQIYVSALNQIPEPAQEAPPDFAAVRRLLDNSFRTIYDTLTREEKRTLWRSVIKEIKIDNDQNITGVVFG

SEQ ID NO: 8345 - protein, 456 aa, Unknown
  Description of Unknown: Integrase B8346 sequence
  SM00857,G3DSA:1.10.10.2600,IPR036162,PF13408,IPR025827, PS51737,G3DSA:3.40.50.1390,IPR006119,IPR038109,PF07508, IPR011109,SSF53041,PTHR30461,PS51736,cd00338, PF00239
MRNQNTSEVPIRAALYVRVSGEEQKIKGLSIEAQKERLVAYAKERGWIIAGLFVDAAKTARKNMHKRSEFQKMLDLVRADGVDMLLFCRLDRWFRSVRDYYKVMEVLETHSCQWKTTDEEYDTTTANGRLYINVKLSIAQNEADICGERIHVVFDSKIQHGTVLSGKCPFWLRINNERRYELIPENAAIIQDAFNHFESTTSQRATIRYIRETYDVNWCEATFRRMLRDKLTIGVYDKNGRYNDDFCPPVISKEQFEHVQELLRRNSRHNPAGRVYIFTGILVCEECRHNLVGYYSRGYIYYRCSQHFQRGRCTHNHSAREDVIEAWLFDHLGEEIEKYEVAWNVQAAERKRTAASIDRSVLRRKLTKLKDLYMNDLIDIDEYKKDYETYTAALSALEEPEEEKHIDLSGVRRIISHDFREIYDSLTREEKRTLWKNTLKEIRVNNANEITGISFF

SEQ ID NO: 8346 - protein, 456 aa, Unknown
  Description of Unknown: Integrase B8347 sequence
  PTHR30461:SF3,SM00857,G3DSA:1.10.10.2600,IPR036162,PF13408, IPR025827,PS51737,G3DSA:3.40.50.1390,IPR006119,IPR038109, PF07508,SSF53041,IPR011109,PTHR30461,Coil, PS51736,cd00338,PF00239
MRNKEIAPALVRVALYIRVSGEEQKIKGLSLEAQQERLEAYARERGWVIVGIYIDAAKTARKNIHKRTEFQRMMDSVKRDEVDILLFARLDRWFRSVADYYKVMEILQAHNCDWKTTDEEYDTTTANGRLYINVKLSIAQNEADIDGERIDVVFDSKIAHGTVVSGSAPFGFRVNEEKRLEVVPEDAAIVQDAFNYFENTVSQRATVRYIRETYGVNWCDATFRRMLKEKLYTGVYDRGGRYNDQFCPAIISRQQFDRVQALLTRNVRSAPSGKVYIFTSILTCAECGHKLVGYKSSDYFYYRCNQHFQRGRCSHNHSAREDVVEQWLFEHLGEELDRCQLEWDVEAAKKKASVARTDKAALKRKLTKLKELYVNDLIDIEDYKKDYQIYVSALNQIPEPAQEAPPDFAAVRRLLDNSFRTIYDTLTREEKRTLWRSVIKEIRIDNDQNITGVVFG

SEQ ID NO: 8347 - protein, 456 aa, Unknown
  Description of Unknown: Integrase B8348 sequence
  PTHR30461:SF3,SM00857,G3DSA:1.10.10.2600,IPR036162,PF13408, IPR025827,G3DSA:3.40.50.1390,PS51737,IPR006119,IPR038109, PF07508,SSF53041,IPR011109,PTHR30461,Coil, PS51736,cd00338,PF00239
MRNKEIAPALVRVALYIRVSGEEQKIKGLSLEAQQERLEAYARERGWVIVGIYIDAAKTARKNIHKRTEFQRMMDSVKRDEVDILLFARLDRWFRSVADYYKVMEILQAHNCDWKTTDEEYDTTTANGRLYINVKLSIAQNEADIDGERIDVVFDSKIAHGTVVSGSAPFGFRVNEEKRLEVVPEDAAIVQDAFNYFENTVSQRATVRYVRETYGVNWCDATFRRMLKEKLYTGVYDRGGRYNDQFCPAIIDRQQFDRVQALLTRNVRSAPSGKVYIFTSILTCAECGHKLVGYKSSDYFYYRCNQHFQRGRCSHNHSAREDVVEQWLFEHLGEELDRCQLEWDVEAAKKKASVARTDKAALKRKLTKLKELYVNDLIDIEDYKKDYQIYVSALNQIPEPAQEAPPDFAAVRRLLDNSFRTIYDTLTREEKRTLWRSVIKEIRIDNDQNITGVVFG

SEQ ID NO: 8348 - protein, 456 aa, Unknown
  Description of Unknown: Integrase B8349 sequence
  PTHR30461:SF3,SM00857,G3DSA:1.10.10.2600,IPR036162,PF13408, IPR025827,G3DSA:3.40.50.1390,PS51737,IPR006119,IPR038109, PF07508,SSF53041,IPR011109,PTHR30461,Coil, PS51736,cd00338,PF00239
MRNKEIAPALVRVALYIRVSGEEQKIKGLSLEAQQERLEAYARERGWVIVGIYIDAAKTARKNIHKRTEFQRMMEAVKRDEVDILLFARLDRWFRSVADYYKVMEILQAHNCDWKTTDEEYDTTTANGRLYINVKLSIAQNEADIDGERIDVVFDSKIAHGTVVSGSAPFGFRVNEEKRLEVVPEDAAIVQDAFNYFENTVSQRATVRYVRETYGVNWCDATFRRMLKEKLYTGVYDRGGRYNDQFCPAIIDRQQFDRVQALLTRNVRSAPSGKVYIFTSILTCAECGHKLVGYKSSDYFYYRCNQHFQRGRCSHNHSAREDVVEQWLFEHLGEELDRCQLEWDVEAAKKKASVARTDKAALKRKLTKLKELYVNDLIDIEDYKKDYQIYVSALNQIPEPAQEAPPDFAAVRRLLDNSFRTIYDTLTREEKRTLWRSVIKEIRIDNDQNITGVVFG

SEQ ID NO: 8349 - protein, 456 aa, Unknown
  Description of Unknown: Integrase B8350 sequence
  PTHR30461:SF3,SM00857,G3DSA:1.10.10.2600,IPR036162,PF13408, IPR025827,PS51737,G3DSA:3.40.50.1390,IPR006119,IPR038109, PF07508,IPR011109,SSF53041,PF00239,PTHR30461, PS51736,Coil,cd00338
MRNKEIAPALVRVALYIRVSGEEQKIKGLSLEAQQERLEAYARERGWVIVGIYIDAAKTARKNIHKRTEFQRMMDSVKRDEVDILLFARLDRWFRSVADYYKVMEVLQAHNCDWKTTDEEYDTTTANGRLYINVKLSIAQNEADIDGERIDVVFDSKIAHGTVVSGSAPFGFRVNEEKRLEVVPEDAAIVQDAFNYFENTVSQRATVRYVRETYGVNWCDATFRRMLKEKLYTGVYDRGGRYNDQFCPVIINRQQFDRVQALLTRDVRSAPSGKVYIFTSILTCAECGHKLVGYKSSDYFYYRCNQHFQRGRCSHNHSAREDVVEAWLFDHLGEELERCQLEWDVEAAKKKASVARTDKAALKRKLTKLKELYVNDLIDIEDYKKDYQIYVSALNQIPEPAQEAPPDFAAVRRLLDNSFRTIYDTLTREEKRTLWRSVIKEIRIDNDQNITGVVFG

SEQ ID NO: 8350 - protein, 456 aa, Unknown
  Description of Unknown: Integrase B8351 sequence
  PTHR30461:SF3,SM00857,G3DSA:1.10.10.2600,IPR036162,PF13408, IPR025827,PS51737,G3DSA:3.40.50.1390,IPR006119,IPR038109, PF07508,IPR011109,SSF53041,PTHR30461,Coil, PS51736,cd00338,PF00239
MRNKEIAPALVRVALYIRVSGEEQKIKGLSLEAQQERLEAYARERGWVIVGIYIDAAKTARKNIHKRTEFQRMMEAVKRDEVDILLFARLDRWFRSVADYYKVMEILQAHNCDWKTTDEEYDTTTANGRLYINVKLSIAQNEADIDGERIDVVFDSKIAHGTVVSGSAPFGFRVNEEKRLEVVPEDAAIVQDAFNYFKNTVSQRATVRYVRETYGVNWCDATFRRMLKEKLYTGVYDRGGRYNDQFCPAIINRQQFDRVQALLTRNVRSAPSGKVYIFTSILTCAECGHKLVGYKSSDYFYYRCNQHFQRGRCCHNHSAREDVVEAWLFDHLGEELERCQLEWDVEAAKKKASVARTDKAALKRKLTKLKELYVNDLIDIEDYKKDYQIYVSALNQIPEPAQEAPPDFAAVRRLLDNSFRTIYDTLTREEKRTLWRSVIKEIRIDNDQNITGVVFG

SEQ ID NO: 8351 - protein, 456 aa, Unknown
  Description of Unknown: Integrase B8352 sequence
  PTHR30461:SF3,SM00857,G3DSA:1.10.10.2600,IPR036162,PF13408, PS51737,G3DSA:3.40.50.1390,IPR025827,IPR006119,IPR038109, PF07508,IPR011109,SSF53041,PTHR30461,Coil, PS51736,cd00338,PF00239
MRSKEIAPALVRVALYIRVSGEEQKIKGLSLEAQQERLEAYARERGWVIVGIYIDAAKTARKNIHKRTEFQRMMEAVKRDEVDILLFARLDRWFRSVADYYKVMEILQAHNCDWKTTDEEYDTTTANGRLYINVKLSIAQNEADIDGERIDVVFDSKIAHGTVVSGSAPFGFRVNEEKRLEVVPEDAAIVQDAFNYFENTVSQRATVRYVRETYGVNWCDATFRRMLKEKLYTGVYDRGGRYNDQFCPAIINRQQFDRVQALLTRNVRSAPSGKVYIFTSILACAECGHKLVGYKSSDYFYYRCNQHFQRGRCSHNHSAREDVVEAWLFDHLGEELERCQLEWDVEAAKKKASVARTDKAALKRKLTKLKELYVNDLIDIEDYKKDYQIYVSALNQIPEPAQEAPPDFAAVRRLLDNSFRTIYDTLTREEKRTLWRSVIKEIRIDNDQNITGVVFG

SEQ ID NO: 8352 - protein, 456 aa, Unknown
  Description of Unknown: Integrase B8353 sequence
  PTHR30461:SF3,SM00857,G3DSA:1.10.10.2600,IPR036162,PF13408, IPR025827,G3DSA:3.40.50.1390,PS51737,IPR006119,IPR038109, PF07508,IPR011109,SSF53041,PTHR30461,Coil, PS51736,cd00338,PF00239
MRNKEIAPALVRVALYIRVSGEEQKIKGLSLEAQQERLEAYARERGWVIVGIYIDAAKTARKNIHKRTEFQRMMDSVKRDEVDILLFARLDRWFRSVADYYKVMEILQAHNCDWKTTDEEYDTTTANGRLYINVKLSIAQNEADIDGERIDVVFDSKIAHGTVVSGSAPFGFRVNEEKRLEVVPEDAAIVQDAFNYFENTVSQRATVRYVRETYGVNWCDATFRRMLKEKLYTGVYDRGGRYNDQFCPAIISRQQFDRVQALLTRNVRSAPSGKVYIFTSILTCAECGHKLVGYKSSDYYYYRCNQHFQRGRCSHNHSAREDVVEQWLFEHLGEELERCQLEWGVEAAKKKASVARTDKAALKRKLTKLKELYVNDLIDIEDYKKDYQIYVSALNQIPEPAQEAPPDFAAVRRLLDNSFRTIYDTLTREEKRTLWRSVIKEIRIDNDQNITGVVFG

SEQ ID NO: 8353 - protein, 456 aa, Unknown
  Description of Unknown: Integrase B8354 sequence
  PTHR30461:SF3,SM00857,G3DSA:1.10.10.2600,IPR036162,PF13408, PS51737,G3DSA:3.40.50.1390,IPR025827,IPR006119,IPR038109, PF07508,IPR011109,SSF53041,PTHR30461,Coil, PS51736,cd00338,PF00239
MRNKEIAPALVRVALYIRVSGEEQKIKGLSLEAQQERLEAYARERGWVIVGIYIDAAKTARKNIHKRTEFQRMMEAVKRDEVDILLFARLDRWFRSVADYYKVMEILQAHNCDWKTTDEEYDTTTANGRLYINVKLSIAQNEADIDGERIDVVFDSKIAHGTVVSGSAPFGFRVNEEKRLEVVPEDAAIVQDAFNYFENTVSQRATVRYVRETYGVNWCDATFRRMLKEKLYTGVYDRGGRYNDQFCPAIINRQQFDRVQALLTRNVRSAPSGKVYIFTSILTCAECGHKLVGYKSSDYYYYRCNQHFQRGRCSHNHSAREDVVEQWLFEHLGEELERCQLEWDVEAAKKKASVARTDKAALKRKLTKLKELYVNDLIDIEDYKKDYQIYVSALNQIPEPAQEAPPDFAAVRRLLDNSFRTIYDTLTREEKRTLWRSVIKEIRIDNDQNITGVVFG

SEQ ID NO: 8354 - protein, 456 aa, Unknown
  Description of Unknown: Integrase B8355 sequence
  PTHR30461:SF3,SM00857,G3DSA:1.10.10.2600,IPR036162,PF13408, IPR025827,G3DSA:3.40.50.1390,PS51737,IPR006119,IPR038109, PF07508,IPR011109,SSF53041,PTHR30461,Coil, PS51736,cd00338,PF00239
MRNKEIAPALVRVALYIRVSGEEQKIKGLSLEAQQERLEAYARERGWVIVGIYIDAAKTARKNIHKRTEFQRMMDSVKRDEVDILLFARLDRWFRSVADYYKVMEILQAHNCDWKTTDEEYDTTTANGRLYINVKLSIAQNEADIDGERIDVVFDSKIAHGTVVSGSAPFGFRVNEEKRLEVVPEDAAIVQDAFNYFENTVSQRATVRYIRETYGVNWCDATFRRMLKEKLYTGVYDRGGRYNDKFCPVIISRQQFDRVQALLTRNVRSAPSGKVYIFTSILTCAECGHKLVGYKSSDYFYYRCNQHFQRGRCSHNHSAREDVVEAWLFDHLGEELERCQLEWDVEAAKKKASVARTDKAALKRKLTKLKELYVNDLIDIEDYKKDYQIYVSALNQIPEPAQEAPPDFAAVRRLLDNSFRTIYDTLTREEKRTLWRSVIKEIKIDNDQNITGVVFG

SEQ ID NO: 8355 - protein, 456 aa, Unknown
  Description of Unknown: Integrase B8356 sequence
  PTHR30461:SF3,SM00857,G3DSA:1.10.10.2600,IPR036162,PF13408, IPR025827,G3DSA:3.40.50.1390,PS51737,IPR006119,IPR038109, PF07508,SSF53041,IPR011109,PTHR30461,Coil, PS51736,cd00338,PF00239
MRNKEIAPALVRVALYIRVSGEEQKIKGLSLEAQQERLEAYARERGWVIVGIYIDAAKTARKNIHKRTEFQRMMDSVKRDEVDILLFARLDRWFRSVADYYKVMEILQAHNCDWKTTDEEYDTTTANGRLYINVKLSIAQNEADIDGERIDVVFDSKIAHGTVVSGSSPFGFRVSEEKRLEIVPEDAAIVQDAFNYFENTVSQRATTKYIREKYGVNWCYATFHRMLIEELYTGVYNRGGRYNANFCPAIIQREQFDRVQALLKKNVRRAPSGRVYIFTSVLTCEECRHKLNGYISQGIYYYRCNQHLQRGRCTHNHSVREDRVEQWLFDHLGEELERCKLEWEVQAAEKKRSVTSRDKAALKRKLTKLKELYVNELIDIDDYKKDYEIYTAALNQIPDTTQEAPPDFSAVEKLLQKDFRKIYDTLTREEKRTLWRSVIKEIRIDNDQNITGVVFG

SEQ ID NO: 8356 - protein, 456 aa, Unknown
  Description of Unknown: Integrase B8357 sequence
  PTHR30461:SF3,SM00857,G3DSA:1.10.10.2600,IPR036162,PF13408, IPR025827,G3DSA:3.40.50.1390,PS51737,IPR006119,IPR038109, PF07508,IPR011109,SSF53041,PTHR30461,Coil, PS51736,cd00338,PF00239
MRNKEIAPALVRVALYIRVSGEEQKIKGLSLEAQQERLEAYARERGWVIVGIYIDAAKTARKNIHKRTEFQRMMDSVKRDEVDILLFARLDRWFRSVADYYKVMEILQAHNCDWKTTDEEYDTTTANGRLYINVKLSIAQNEADIDGERIDVVFDSKIAHGTVVSGSAPFGFRVNEEKRLEVVPEDAAIVQDAFNYFESTVSQRATVRYVRETYGVNWCDATFRRMLKEKLYTGVYDRGGRYNDQFCPAIINRQQFDRVQALLTRNVRSAPSGKVYIFTSILACAECGHKLVGYKSSDYFYYRCNQHFQRGRCSHNHSAREDVVEAWLFDHLGEELERCQLEWDVEAAKKKASVARTDKAALKRKLTKLKELYVNDLIDIEDYKKDYQIYVSALNQIPEPAQEAPPDFAAVRRLLDNSFRTIYDTLTREEKRALWRSVIKEIRIDNDQNITGVVFG

SEQ ID NO: 8357 - protein, 456 aa, Unknown
  Description of Unknown: Integrase B8358 sequence
  PTHR30461:SF3,SM00857,G3DSA:1.10.10.2600,IPR036162,PF13408, IPR025827,G3DSA:3.40.50.1390,PS51737,IPR006119,IPR038109, PF07508,IPR011109,SSF53041,PTHR30461,Coil, PS51736,cd00338,PF00239
MRNKEIAPALVRVALYIRVSGEEQKIKGLSLEAQQERLEAYAREHGWVIVGIYIDAAKTARKNIHKRTEFQRMMEAVKRDEVDILLFARLDRWFRSVADYYKVMEVLQAHNCDWKTTDEEYDTTTANGRLYINVKLSIAQNEADIDGERIDVVFDSKIAHGTVVSGSAPFGFRVNEEKRLEVVPEDAAIVQDAFNYFENTVSQRATVRYVRETYGVNWCDATFRRMLKEKLYTGVYDRGGRYNDQFCPAIISRQQFDRVQALLTRNVRSAPSGKVYIFTSILTCAECGHKLVGYKSSDYFYYRCNQHFQRGRCSHNHSAREDVVEQWLFEHLGEELDRCQLEWDVEAAKKKASVARTDKAALKRKLTKLKELYVNDLIDIEDYKKDYQIYVSALNQIPEPAQEAPPDFAAVRRLLDNSFRTIYDTLTREEKRTLWRSVIKEIRIDNDQNITGAVFG

SEQ ID NO: 8358 - protein, 456 aa, Unknown
  Description of Unknown: Integrase B8359 sequence
  PTHR30461:SF3,SM00857,G3DSA:1.10.10.2600,IPR036162,PF13408, IPR025827,G3DSA:3.40.50.1390,PS51737,IPR006119,IPR038109, PF07508,IPR011109,SSF53041,PTHR30461,Coil, PS51736,cd00338,PF00239
MRNKEIAPALVRVALYIRVSGEEQKIKGLSLEAQQERLEAYARERGWVIVGIYIDAAKTARKNIHKRTEFQRMMGSVKRDEVDILLFARLDRWFRSVADYYKVMEVLQTHNCDWKTTDEEYDTTTANGRLYINVKLSIAQNEADIDGERIDVVFDSKIAHGTVVSGSAPFGFRVNEEKRLEVVPEDAAIVQDAFNYFENTVSQRATVRYVRETYGVNWCDATFRRMLKEKLYTGVYDRGGRYNDQFCPAIIDRQQFDRVQALLTRNVRSAPSGKVYIFTSILTCAECGHKLVGYKSSDYFYYRCNQHFQRGRCSHNHSAREDVVEQWLFEHLGEELDRCQLEWDVEAAKKKASVARTDKAALKRKLTKLKELYVNDLIDIEDYKKDYQIYVSALNQIPEPAQEAPPDFAAVRRLLDNSFRTIYDTLTREEKRTLWRSVIKEIRIDNDQNITGVVFG

SEQ ID NO: 8359 - protein, 456 aa, Unknown
  Description of Unknown: Integrase B8360 sequence
  PTHR30461:SF3,SM00857,G3DSA:1.10.10.2600,IPR036162,PF13408, IPR025827,G3DSA:3.40.50.1390,PS51737,IPR006119,IPR038109, PF07508,SSF53041,IPR011109,PTHR30461,Coil, PS51736,cd00338,PF00239
MRNKEIAPALVRVALYIRVSGEEQKIKGLSLEAQQERLEAYARERGWVIVGIYIDAAKTARKNIHKRTEFQRMMDSVKRDEVDILLFARLDRWFRSVADYYKVMEILQAHNCDWKTTDEEYDTTTANGRLYINVKLSIAQNEADIDGERIDVVFDSKIAHGTVVSGSAPFGFRVNEEKRLEVVPEDAAIVQDAFNYFENTVSQRATVRYVRETYGVNWCDATFRRMLKEKLYTGVYDRGGRYNDQFCPAIIDRQQFDRVQALLTRNVRSAPSGKVYIFTSILTCAECGHKLVGYKSSDYYYYRCNQHFQRGRCSHNHSAREDVVEAWLFDHLGEELERCQLEWDVEAAKKKASVARTDKAALKRKLTKLKELYVNDLIDIEDYKKDYQIYVSALNQIPEPAQEAPPDFAAVRRLLDNSFRTIYDTLTREEKRTLWRSVIKEIRIDNDQNITGVVFG

SEQ ID NO: 8360 - protein, 456 aa, Unknown
  Description of Unknown: Integrase B8361 sequence
  PTHR30461:SF3,SM00857,G3DSA:1.10.10.2600,IPR036162,PF13408, IPR025827,G3DSA:3.40.50.1390,PS51737,IPR006119,IPR038109, PF07508,IPR011109,SSF53041,PTHR30461,Coil, PS51736,cd00338,PF00239
MRNKEIAPALVRVALYIRVSGEEQKIKGLSLEAQQERLEAYARERGWVIVGIYIDAAKTARKNIHKRTEFQRMMDSVKRDEVDILLFARLDRWFRSVADYYKVMEVLQAHNCDWKTTDEEYDTTTANGRLYINVKLSIAQNEADIDGERIDVVFDSKIAHGTVVSGSAPFGFRVNEEKRLEVVPEDAAIVQDAFNYFENTVSQRATVRYVRETYGVNWCDATFRRMLKEKLYTGVYDRGGRYNDQFCPAIIDRQQFDRVQALLTRNVRSAPSGKVYIFTSILTCAECGHKLVGYKSSDYFYYRCNQHFQRGRCSHNHSAREDVVEAWLFDHLWEELERCQLEWDVEAAKKKASVARTDKAALKRKLTKLKELYVNDLIDIEDYKKDYQIYVSALNQIPEPAQEAPPDFAAVRRLLDNSFRTIYDTLTREEKRTLWRSVIKEIRIDNDQNITGVVFG

SEQ ID NO: 8361 - protein, 456 aa, Unknown
  Description of Unknown: Integrase B8362 sequence
  PTHR30461:SF3,SM00857,G3DSA:1.10.10.2600,IPR036162,PF13408, IPR025827,G3DSA:3.40.50.1390,PS51737,IPR006119,IPR038109, PF07508,SSF53041,IPR011109,PTHR30461,PS51736, cd00338,PF00239
MYKKELAPDLVRVALYIRVSGEEQKIKGLSLEAQQERLEAYARERGWVIVGIYIDAAKTARKNIHKRTEFQRMMDSVKRDEVDILLFARLDRWFRSVADYYKVMEVLQAHNCDWKTTDEEYDTTTANGRLYINVKLSIAQNEADIDGERIDVVFDSKIAHGTVVSGSAPFGFRVNEEKRLEVVPEDAAIVQDAFNYFENTVSQRATVRYVRETYGVNWCDATFRRMLKEKLYTGVYDRGGRYNDKFCPAIINRQQFDRVQALLERNARSVPSGKVYIFTSILTCAECGHKLVGYKSSDYYYYRCNQHFQRGRCSHNHSAREDVVEKWLFEHLAEELECCQLEWEVAAAKKKASVARTDKAALKRKLTKLKELYVNDLIDIEDYKRDYQIYTAALKQIPEPSIEPPPDFAAVRRLLDNDFKTIYENLTREEKRTLWRSVIKEIRIDNDQNITGVVFG

SEQ ID NO: 8362 - protein, 456 aa, Unknown
  Description of Unknown: Integrase B8363 sequence
  PTHR30461:SF3,SM00857,G3DSA:1.10.10.2600,IPR036162,PF13408, PS51737,G3DSA:3.40.50.1390,IPR025827,IPR006119,IPR038109, PF07508,SSF53041,IPR011109,PF00239,PTHR30461, PS51736,Coil,cd00338
MRNKEIAPALVRVALYIRVSGEEQKIKGLSLEAQQERLEAYARERGWVIVGIYIDAAKTARKNIHKRTEFQRMMDSVKRDEVDILLFARLDRWFRSVADYYKVMEVLQAHNCDWKTTDEEYDTTTANGRLYINVKLSIAQNEADIDGERIDVVFDSKIAHGTVVSGSAPFGFRVNEEKRLEVVPEDAAIVQDAFNYFESTVSQRATVRYVRETYGVNWCDATFRRMLKEKLYTGVYDRGGRYNDQFCPAIINRQQFDRVQALLTRNVRSAPSGKVYIFTSILTCAECGHKLVGYKSSDYFYYRCNQHFQRGRCSHNHSAREDVVETWLFDHLGEELERCQLEWDVEAAKKKASVARTDKAALKRKLTKLKELYVNDLIDIEDYKKDYQIYVSALNQIPEPAQEAPPDFAAVRRLLDNSFRTIYDTLTREEKRTLWRSVIKEIRIDNDQNITGVVFG

SEQ ID NO: 8363 - protein, 456 aa, Unknown
  Description of Unknown: Integrase B8364 sequence
  PTHR30461:SF3,SM00857,G3DSA:1.10.10.2600,IPR036162,PF13408, IPR025827,G3DSA:3.40.50.1390,PS51737,IPR006119,IPR038109, PF07508,IPR011109,SSF53041,PF00239,PTHR30461, PS51736,Coil,cd00338
MKRAVAYGRYSTDMQREESIDAQFRAIGDYCQRNEIELVSTYADEGISGTTDNRPEFQRMIKDAELGAFDYVIVHKLDRFSRSKYDSAIYKRKLKLLNVQLLSVLENLDGSPESLILESVLEGMSEYYSRNLSREVKKGMRENALKCKFNGGTPPLGYDVDENKNYVINAHEAEAIKLIFDMFTKNYSYSQMMRKLNDLGYKTKRGREFTRNSFYEILNNERYVGTYFYSKEDYDGFKGKRNYHKKRNKNNMIRIENGVPAIIDKETWAKAQEKLKNNRNLNRTNKNGRFYLLKGLLFCGECGSPMSGNMQSNNQGNRYYYYKCNRKSRTHKCHAPVVRAEKIEKEVLDCFEDVIFTKTNKDAVIDSMLKFLDKETDTTDHKKSLEKELAVVEKQIDNILDAIMSGISSPSVNDKLKELETKKETLKASISRCNIIGSIINSVGEKSSALFLYGNV

SEQ ID NO: 8364 - protein, 456 aa, Unknown
  Description of Unknown: Integrase B8365 sequence
  PTHR30461:SF3,SM00857,G3DSA:1.10.10.2600,IPR036162,PF13408, IPR025827,PS51737,G3DSA:3.40.50.1390,IPR006119,IPR038109, PF07508,SSF53041,IPR011109,PTHR30461,Coil, PS51736,cd00338,PF00239
MRNKEIAPALVRVALYIRVSGEEQKIKGLSLEAQQERLEAYARERGWVIVGIYIDAAKTARKNIHKRTEFQRMMDSVKRDEVDILLFARLDRWFRSVADYYKVMEILQAHNCGWKTTDEEYDTTTANGRLYINVKLSIAQNEADIDGERIDVVFDSKIAHGTVVSGSAPFGFRVNEEKRLEVVPEDAAIVQDAFNYFENTVSQRATVRYVRETYGVNWCDATFRRMLKEKLYTGVYDRGGRYNDQFCPAIIDRQQFDRVQALLTRNVRSAPSGKVYIFTSILTCAECGHKLVGYKSSDYYYYRCNQHFQRGRCSHNHSAREDVVEAWLFDHLGEELERCQLEWSVEAAKKKASIARTDKAALKRKLTKLKELYVNDLIDIEDYKKDYQIYVSALNQIPEPAQEAPPDFAAVRRLLDNSFRTIYDTLTREEKRTLWRSVIKEIRIDNDQNITGVVFG

SEQ ID NO: 8365 - protein, 456 aa, Unknown
  Description of Unknown: Integrase B8366 sequence
  PTHR30461:SF3,SM00857,G3DSA:1.10.10.2600,IPR036162,PF13408, PS51737,G3DSA:3.40.50.1390,IPR025827,IPR006119,IPR038109, PF07508,IPR011109,SSF53041,PTHR30461,Coil, PS51736,cd00338,PF00239
MRNKEIAPALVRVALYIRVSGEEQKIKGLSLEAQQERLEAYARERGWVIVGIYIDAAKTARKNIHKRTEFQRMMEAVKRDEVDILLFARLDRWFRSVADYYKVMEILQAHNCDWKTTDEEYDTTTANGRLYINVKLSIAQNEADIDGERIDVVFDSKIAHGTVVSGSAPFGFRVNEEKRLEVVPEDAAIVQDAFNYFENTVSQRATVRYVRETYGVNWCDATFRRMLKEKLYTGVYDRGGRYNDQFCPAIINRQQFDRVQALLTRNVRSSPSGKVYIFTSILTCAECGHKLVGYKSSDYYYYRCNQHFQRGRCSHNHSAREDVVEAWLFDHLGEELERCQLEWDVEAAKKKASVARTDKAALKRKLTKLKELYVNDLIDIEDYKKDYQIYVSALNQIPEPAQEAPPDFAAVRRLLDNSFRTIYDTLTREEKRTLWRSVIKEIRIDNDQNITGVVFG

SEQ ID NO: 8366 - protein, 456 aa, Unknown
  Description of Unknown: Integrase B8367 sequence
  PTHR30461:SF3,SM00857,G3DSA:1.10.10.2600,IPR036162,PF13408, PS51737,G3DSA:3.40.50.1390,IPR025827,IPR006119,IPR038109, PF07508,IPR011109,SSF53041,PTHR30461,Coil, PS51736,cd00338,PF00239
MRNKEIAPALVRVALYIRVSGEEQKIKGLSLEAQQERLEAYARERGWVIVGIYIDAAKTARKNIHKRTEFQRMMEAVKRDEVDILLFARLDRWFRSVADYYKVMEILQAHNCDWKTTDEEYDTTTANGRLYINVKLSIAQNEADIDGERIDVVFDSKIAHGTVVSGSAPFGFRVNEEKRLEVVPEDAAIVQDAFNYFENTVSQRATVRYVRETYGVNWCDATFRRMLKEKLYTGVYDRGGRYNDQFCPAIINRQQFDRVQALLTRNVRSAPSGKVYIFTSILACAECGHKLVGYKSSDYFYYRCNQHFQRGRCSHNHSAREDVVEAWLFDHLGEELERCQLEWDVEAAKKKASVARTDKAALKRKLTKLKELYVNDLIDIEDYKKDYQIYVSALNQIPEPAQEAPPDFAAVRRLLDNSFRTIYDTLTREEKRTLWRSVIKEIRIDNDQNITGVVFG

SEQ ID NO: 8367 - protein, 456 aa, Unknown
  Description of Unknown: Integrase B8368 sequence
  PTHR30461:SF3,SM00857,G3DSA:1.10.10.2600,IPR036162,PF13408, IPR025827,G3DSA:3.40.50.1390,PS51737,IPR006119,IPR038109, PF07508,IPR011109,SSF53041,PTHR30461,PS51736, cd00338,PF00239
MRNQNTSEVPIRAALYVRVSGEEQKIKGLSIEAQKERLVAYAKERGWIIVGLFVDAAKTARKNMHKRSEFQKMLDLVRADGVDMLLFCRLDRWFRSVRDYYKVMEVLETHNCQWKTTDEEYDTTTANGRLYINVKLSIAQNEADICGERIHVVFDSKIQHGTVLSGKCPFWLRINDERRYELIPENAAIIQDAFNHFENTTSQRATIRYIRETYDVNWCEATFRRMLRDKLTIGVYDKNGRYNDDFCPPVISKEQFEHVQELLRRNSRHNPAGRVYIFTGILVCEECRHNLVGYYSRGYIYYRCSQHFQRGRCTHNHSAREDVIEAWLFDHLGEEIEKYEVAWNVQAAERKRTASSIDRSVLRRKLTKLKDLYMNDLIDIDEYKKDYETYTAALSALEEPEEEKHIDLSGVRRIISHDFREIYDSLTREEKRTLWKNTLKEIRVNNANEITGISFF

SEQ ID NO: 8368 - protein, 456 aa, Unknown
  Description of Unknown: Integrase B8369 sequence
  PTHR30461:SF3,SM00857,G3DSA:1.10.10.2600,IPR036162,PF13408, PS51737,G3DSA:3.40.50.1390,IPR025827,IPR006119,IPR038109, PF07508,IPR011109,SSF53041,PTHR30461,Coil, PS51736,cd00338,PF00239
MRNREIAPALVRVALYIRVSGEEQKIKGLSLEAQQERLEAYARERGWVIVGIYIDAAKTARKNIHKRTEFQRMMDSVKRDEVDILLFARLDRWFRSVADYYKVMEILQAHNCDWKTTDEEYDTTTANGRLYINVKLSIAQNEADIDGERIDVVFDSKIAHGTVVSGSAPFGFRVNEEKRLEVVPEDAAIVQDAFNYFENTVSQRATVRYVRETYGVNWCDATFRRMLKEKLYTGVYDRGGRYNDQFCPAIINRQQFDRVQALLTRNVRSAPSGKVYIFTSILTCAECGHKLVGYKSSDYFYYRCNQHFQRGRCCHNHSAREDVVEQWLFEHLGEELDRCQLEWDVEAAKKKASVARTDKAALKRKLTKLKELYVNDLIDIEDYKKDYQIYVSALNQIPEPAQEAPPDFAAVRRLLDNSFRTIYDTLTREEKRTLWRSVIKEIRIDNDQNITGVVFG

SEQ ID NO: 8369 - protein, 456 aa, Unknown
  Description of Unknown: Integrase B8370 sequence
  PTHR30461:SF3,SM00857,G3DSA:1.10.10.2600,IPR036162,PF13408, PS51737,G3DSA:3.40.50.1390,IPR025827,IPR006119,IPR038109, PF07508,SSF53041,IPR011109,PTHR30461,Coil, PS51736,cd00338,PF00239
MRNKEIAPALVRVALYIRVSGEEQKIKGLSLEAQQERLEAYARERGWVIVGIYIDAAKTARKNIHKRTEFQRMMDSVKRDEVDILLFARLDRWFRSVADYYKVMEILQAHNCDWKTTDEEYDTTTANGRLYINVKLSIAQNEADIDGERIDVVFDSKIAHGTVVSGSAPFGFRVNEEKRLEVVPEDAAIVQDAFNYFESTVSQRATVRYVRETYGVNWCDATFRRMLKEKLYTGVYDRGGRYNDQFCPAIISRQQFDRVQALLTRNVRSAPSGKVYIFTSILTCAECGHKLVGYKSSDYFYYRCNQHFQRGRCSHNHSAREDVVEAWLFDHLGEELERCQLEWDVEAAKKKASIARTDKAALKRKLTKLKELYVNDLIDIEDYKKDYQIYVSALNQIPEPAQEAPPDFAAVRRLLDNSFRTIYDTLTREEKRTLWRSVIKEIRIDNDQNITGVVFG

SEQ ID NO: 8370 - protein, 456 aa, Unknown
  Description of Unknown: Integrase B8371 sequence
  PTHR30461:SF3,SM00857,G3DSA:1.10.10.2600,IPR036162,PF13408, IPR025827,G3DSA:3.40.50.1390,PS51737,IPR006119,IPR038109, PF07508,SSF53041,IPR011109,PTHR30461,PS51736, cd00338,PF00239
MRNKEIAPALVRVALYIRVSGEEQKIKGLSLEAQQERLEAYARERGWVIVGIYIDAAKTARKNIHKRTEFQRMMDSVKRDEVDILLFARLDRWFRSVADYYKVMEVLQAHNCDWKTTDEEYDTTTANGRLYINVKLSIAQNEADIDGERIDVVFDSKIAHGTVVSGSAPFGFRVNEEKRLEVVPEDAAIVQDAFNYFENTVSQRATVRYVRETYGVNWCDATFRRMLKEKLYTGVYARGGRYNDQFCPAIIDRQQFDRVQTLLTRNVRSAPSGKVYIFTSILTCAECGHKLVGYKSSDYYYYRCNQHFKRGRCSHNHSAREDVVEQWLFEHLGEELERCQLEWDVEAAKKKTSVARTDKAALKRKLTKLKELYVNDLIDIEDYKKDYQIYVSALNQIPEPAQEAPPDFAAVRRLLDNSFRTIYDTLTREEKRTLWRSVIKEIRIDNDQNITGVVFG

SEQ ID NO: 8371 - protein, 456 aa, Unknown
  Description of Unknown: Integrase B8372 sequence
  PTHR30461:SF3,SM00857,G3DSA:1.10.10.2600,IPR036162,PF13408, PS51737,G3DSA:3.40.50.1390,IPR025827,IPR006119,IPR038109, PF07508,IPR011109,SSF53041,PTHR30461,Coil, PS51736,cd00338,PF00239
MRNKEIAPALVRVALYIRVSGEEQKIKGLSLEAQQERLEAYARERGWVIVGIYIDAAKTARKNIHKRTEFQRMMDSVKRDEVDILLFARLDRWFRSVADYYKVMEILQAHNCDWKTTDEEYDTTTANGRLYINVKLSIAQNEADIDGERIDVVFDSKIAHGTVVSGSAPFGFRVNEEKRLEVIPEDAAIVQDAFNYFENTVSQRATVRYIRETYGVNWCDATFRRMLKEKLYTGVYDRGGRYNDQFCPAIINRQQFDRVQALLTRNVRSAPSGKVYIFTSILTCAECGHKLVGYKSSDYFYYRCNQHFQRGRCSHNHSAREDVVEAWLFDHLGEELEHCQLEWDVEAAKKKASVARTDKAALKRKLTKLKELYVNDLIDIEDYKKDYQIYVSALNQIPEPAQEAPPDFAAVRRLLDNNFRTIYDTLTREEKRTLWRSVIKEIRIDNDQNITGVVFG

SEQ ID NO: 8372 - protein, 456 aa, Unknown
  Description of Unknown: Integrase B8373 sequence
  PTHR30461:SF3,SM00857,G3DSA:1.10.10.2600,IPR036162,PF13408, IPR025827,PS51737,G3DSA:3.40.50.1390,IPR006119,IPR038109, PF07508,SSF53041,IPR011109,PTHR30461,Coil, PS51736,cd00338,PF00239
MRNKEIAPALVRVALYIRVSGEEQKIKGLSLEAQQERLEAYARERGWVIVGIYIDAAKTARKNIHKRTEFQRMMDSVKRDEVDILLFARLDRWFRSVADYYKVMEILQAHSCDWKTTDEEYDTTTANGRLYINVKLSIAQNEADIDGERIDVVFDSKIAHGTVVSGSAPFGFRVNEEKRLEVVPEDAAIVQDAFNYFENTVSQRATVRYVRETYGVNWCDATFRRMLKEKLYTGVYDRGGRYNDQFCPAIIDRQQFDRVQALLTRNVRSAPSGKVYIFTSILTCAECGHKLVGYKSSDYFYYRCNQHFQRGRCSHNHSAREDVVEQWLFEHLGEELERCQLEWDVEAAKKKASVARTDKAALKRKLTKLKELYVNDLIDIEDYKKDYQIYVSALNQIPEPAQEAPPDFAAVRRLLDNSFRTIYDTLTREEKRTLWRSVIKEIRIDNDQNITGVVFG

SEQ ID NO: 8373 - protein, 456 aa, Unknown
  Description of Unknown: Integrase B8374 sequence
  PTHR30461:SF3,SM00857,G3DSA:1.10.10.2600,IPR036162,PF13408, IPR025827,G3DSA:3.40.50.1390,PS51737,IPR006119,IPR038109, PF07508,SSF53041,IPR011109,PTHR30461,Coil, PS51736,cd00338,PF00239
MRNKEIAPALVRVALYIRVSGEEQKIKGLSLEAQQERLEAYARERGWVIVGIYIDAAKTARKNIHKRTEFQRMMDSVKRDEVDILLFARLDRWFRSVADYYKVMEILQAHNCDWKTTDEEYDTTTANGRLYINVKLSIAQNEADIDGERIDVVFDSKIAHGTVVSGSAPFGFRVNEEKRLEVVPEDAAIVQDAFNYFENTVSQRATVRYVRETYGVNWCDATFRRMLKEKLYTGVYDRGGRYNDQFCPAIIDGQQFDRVQALLTRNVRSAPSGKVYIFTSILTCAECGHKLVGYKSSDYFYYRCNQHFQRGRCSHNHSAREDVVEAWLFDHLGEELERCQLEWDVEAAKKKASVARTDKAALKRKLTKLKELYVNDLIDIEDYKKDYQIYVSALNQIPEPAQEAPPDFAAVRRLLDNSFRTIYDTLTREEKRTLWRSVIKEIRIDNDQNITGVVFG

SEQ ID NO: 8374 - protein, 456 aa, Unknown
  Description of Unknown: Integrase B8375 sequence
  PTHR30461:SF3,SM00857,G3DSA:1.10.10.2600,IPR036162,PF13408, PS51737,IPR025827,G3DSA:3.40.50.1390,IPR006119,IPR038109, PF07508,IPR011109,SSF53041,PTHR30461,PS51736, cd00338,PF00239
MRNKEIAPALVRVALYIRVSGEEQKIKGLSLEAQQERLEAYARERGWVIVGIYIDAAKTARKNIHKRTEFQRMMDSVKRDEVDILLFARLDRWFRSVADYYKIMEILQAHNCDWKTTDEEYDTTTANGRLYINVKLSIAQNEADIDGERIDVVFDSKIAHGTVVSGSAPFGFRVNEEKRLEVVPEDAAIVQDAFNYFESTVSQRATVRYVRETYGVNWCDATFRRMLKEKLYTGVYDRGGRYNDQFCPAIIDRQQFDRVQALLTRNVRSAPSGKVYIFTSILTCAECGHKLVGYKSSDYFYYRCNQHFQRGRCSHNHSAREDVVEQWLFEHLGEELDRCQLEWDVEAAKKKSSVARTDKAALKRKLTKLKELYVNDLIDIEDYKKDCQIYVSALNQIPEPAQEAPPDFAAVRRLLDNSFRTIYDTLTREEKRTLWRSVIKEIRIDNDQNITGVVFG

SEQ ID NO: 8375 - protein, 456 aa, Unknown
  Description of Unknown: Integrase B8376 sequence
  PTHR30461:SF3,SM00857,G3DSA:1.10.10.2600,IPR036162,PF13408, IPR025827,PS51737,G3DSA:3.40.50.1390,IPR006119,IPR038109, PF07508,SSF53041,IPR011109,PTHR30461,Coil, PS51736,cd00338,PF00239
MRNKEIAPALVRVALYIRVSGEEQKIKGLSLEAQQERLEAYARERGWVIVGIYIDAAKTARKNIHKRTEFQRMMDSVKRDEVDILLFARLDRWFRSVADYYKVMEILQAHNCDWKTTDEEYDTTTANGRLYINVKLSIAQNEADIDGERIDVVFDSKIAHGTVVSGSAPFGFRVNEEKRLEVVPEDAAIVQDAFNYFENTVSQRATVRYIRETYGVNWCDATFRRMLKEKLYTGVYDRGGRYNDQFCPAIISRQQFDRVQALLTRNVRSAPSGKVYIFTSILTCAECGHKLVGYKSSDYFYYRCNQHFQRGRCSHNHSAREDVVEQWLFEHLGEELDRCQLEWDVEAAKKKASVARTDKAALKRKLTKLKELYVNDLIDIEDYKKDYQIYVSALNQIPEPAQEAPPNFAAVRRLLDNSFRTIYDTLTREEKRTLWRSVIKEIRIDNDQNITGVVFG

SEQ ID NO: 8376 - protein, 456 aa, Unknown
  Description of Unknown: Integrase B8377 sequence
  PTHR30461:SF3,IPR036162,PS51737,IPR011109,PTHR30461, PS00397,PF00239,G3DSA:1.10.10.2600,IPR006119,SSF53041, SM00857,IPR025827,IPR038109,PS51736,cd03768, IPR006118,PF13408,G3DSA:3.40.50.1390,Coil
MDKNKKITVPGLLRTAIYIRVSTDQQAKNGDSIGEQTETLTTYVNGRDDLILSGMYIDDGISGQKINRDGFTRLIGDVCAGRIDLIVFTKLDRWFRSLRHYLNVQATLEEHGVNWISVSQPFFDTSTPQGRAFIANSMAFAELEAQNDSERIRAVFDHKYKHGEVLSGKVPLGFSIVDKHLSPNDDAAKVLAIFQRFSRSGSLNDTVRFIESEYGIVMSISNLKKAILANAKYIGIFRDNTNYCPAIIPQELFDDVQRKLTFNVKISQKHTYIFSGLVRCACCGSAASGFQHRSSHSGVVYRYSAYRCRQAFAVKRCHNKKIFIEKSLETYVLQHIKPELQKAIISYEVAAAPAADQKQKRALITRKIEKLKELYVNDLISLEEYKVDKAAYTAQLDELPAEASPEKDLTALRRFLALDLDAVYTSMTPEEKRYLWRSVIKEIRVDEQRNVTIIFL

SEQ ID NO: 8377 - protein, 456 aa, Unknown
  Description of Unknown: Integrase B8378 sequence
  PTHR30461:SF3,SM00857,G3DSA:1.10.10.2600,IPR036162,PF13408, IPR025827,G3DSA:3.40.50.1390,PS51737,IPR006119,IPR038109, PF07508,SSF53041,IPR011109,PTHR30461,Coil, PS51736,cd00338,PF00239
MRNKEIAPALVRVALYIRVSGEEQKIKGLSLEAQQERLEAYARERGWVIVGIYIDAAKTARKNIHKRTEFQRMMDSVKRDEVDILLFARLDRWFRSVADYYKVMEILQAHNCDWKTTDEEYDTTTANGRLYINVKLSIAQNEADIDGERIDVVFDSKIAHGTVVSGSAPFGFRVNEEKRLEVVPEDAAIVQDAFNYFENTVSQRATVRYVRETYGVNWCDATFRRMLKEKLYTGVYDRGGRYNDQFCPAIINRQQFDRVQSLLTRNVRSAPSGKVYIFTSILTCAECGHKLVGYKSSDYFYYRCNQHFQRGRCSHNHSAREDVVEQWLFEHLGEELERCQLEWDVEAAKKKASVARTDKAALKRKLTKLKELYVNDLIDIEDYKKDYQIYVSALNQIPEPAQEAPPDFAAVRRLLDNSFRTIYDTLTREEKRTLWRSVIKEIRIDNDQNITGVVFG

SEQ ID NO: 8378 - protein, 456 aa, Unknown
  Description of Unknown: Integrase B8379 sequence
  PTHR30461:SF3,SM00857,G3DSA:1.10.10.2600,IPR036162,PF13408, PS51737,IPR025827,G3DSA:3.40.50.1390,IPR006119,IPR038109, PF07508,IPR011109,SSF53041,PTHR30461,Coil, PS51736,cd00338,PF00239
MYKKELAPDLVRVALYIRVSGEEQKIKGLSLEAQQERLEAYARERGWVIVGIYIDAAKTARKNIHKRTEFQRMMDSVKRDEVDILLFARLDRWFRSVADYYKVMEILQAHNCDWKTTDEEYDTTTANGRLYINVKLSIAQNEADIDGERIDVVFDSKIAHGTVVSGSAPFGFRVNEEKRLEVVPEDAAIVQDAFNYFENTVSQRATVRYVRETYGVNWCDATFRRMLKEKLYTGVYDRGGRYNDQFCPAIINRQQFDRVQALLTRNVRSAPSGKVYIFTSILTCAECGHKLVGYKSSDYYYYRCNQHFQRGRCSHNHSAREDVVEQWLFEHLGEELERCQLEWGVEAAKKKASVARTDKAALKRKLTKLKELYVNDLIDIEDYKKDYQIYVSALNQIPEPAQEAPPDFAAVRRLLDNSFRTIYDTLTREEKRTLWRSVIKEIRIDNDQNITGVVFG

SEQ ID NO: 8379 - protein, 456 aa, Unknown
  Description of Unknown: Integrase B8380 sequence
  PTHR30461:SF3,SM00857,G3DSA:1.10.10.2600,IPR036162,PF13408, PS51737,IPR025827,G3DSA:3.40.50.1390,IPR006119,IPR038109, PF07508,IPR011109,SSF53041,PTHR30461,Coil, PS51736,cd00338,PF00239
MRNKEIAPALVRVALYIRVSGEEQKIKGLSLEAQQERLEAYARERGWVIVGIYIDAAKTARKNIHKRTEFQRMMDSVKRDEVDILLFARLDRWFRSVADYYKVMEILQAHNCDWKTTDEEYDTTTANGRLYINVKLSIAQNEADIDGERIDVVFDSKIAHGTVVSGSAPFGFRVNEEKRLEVVPEDAAIVQDAFNYFENTVSQRATVRYVRETYGVNWCDATFRRMLKEKLYTGVYDRGGRYNDQFCPAIINRQQFDRVQALLTRNVRSAPSGKVYIFTSILTCAECGHKLVGYKSSDYYYYRCNQHFQRGRCSHNHSAREDVVEQWLFEHLAEELERCQLEWDVEAAKKKASVARTDKAALKRKLTKLKELYVNDLIDIEDYKKDYQIYVSALNQIPEPAQEAPPDFAAVRRLLDNSFRTIYDTLTREEKRTLWRSVIKEIRIDNDQNITGVVFG

SEQ ID NO: 8380 - protein, 456 aa, Unknown
  Description of Unknown: Integrase B8381 sequence
  PTHR30461:SF3,SM00857,G3DSA:1.10.10.2600,IPR036162,PF13408, IPR025827,G3DSA:3.40.50.1390,PS51737,IPR006119,IPR038109, PF07508,SSF53041,IPR011109,PF00239,PTHR30461, PS51736,Coil,cd00338
MRNKEIAPALVRVALYIRVSGEEQKIKGLSLEAQQERLEAYARERGWVIVGIYIDAAKTARKNIHKRTEFQRMMDSVKRDEVDILLFARLDRWFRSVADYYKVMEILQAHNCDWKTTDEEYDTTTANGRLYINVKLSIAQNEADIDGERIDVVFDSKIAHGTVVSGSAPFGFRVNEEKRLEVVPEDAAIVQDAFNYFENTVSQRATVRYVRETYGVNWCDATFRRMLKEKLYTGVYDRGGRYNDQFCPAIIDRQQFDRVQALLTRNVRSAPSGKVYIFTSILTCAECGHKLVGYKSSDYYYYRCNQHFQRGRCSHNHSAREDVVEQWLFEHLGEELERCQLEWGVEAAKKKVSIARTDKAALKRKLTKLKELYVNDLIDIEDYKKDYQIYVSALNQIPEPAQEAPPDFAAVRRLLDNSFRTIYDTLTREEKRTLWRSVIKEIRIDNDQNITGVVFG

SEQ ID NO: 8381 - protein, 456 aa, Unknown
  Description of Unknown: Integrase B8382 sequence
  PTHR30461:SF3,SM00857,G3DSA:1.10.10.2600,IPR036162,PF13408, IPR025827,G3DSA:3.40.50.1390,PS51737,IPR006119,IPR038109, PF07508,SSF53041,IPR011109,PTHR30461,Coil, PS51736,cd00338,PF00239
MRNKEIAPALVRVALYIRVSGEEQKIKGLSLEAQQERLEAYARERGWVIVGIYIDAAKTARKNIHKRTEFQRMMDSVKRDEVDILLFARLDRWFRSVADYYKVMEILQAHNCDWKTTDEEYDTTTANGRLYINVKLSIAQNEADIDGERIDVVFDSKIAHGTVVSGSAPFGFRVNEEKRLEVVPEDAAIVQNAFNYFENTVSQRATVRYVRETYGVNWCGATFRRMLKEKLYTGVYDRGGRYNDQFCPAIINRQQFDRVQALLTRNVRSAPSGKVYIFTSILTCAECGHKLVGYKSSDYFYYRCNQHFQRGRCSHNHSAREDVVEQWLFEHLGEELDRCQLEWDVEAAKKKASVARTDKAALKRKLTKLKELYVNDLIDIEDYKKDYQIYVSALNQIPEPAQEAPPDFAAVRRLLDNSFRTIYDTLTREEKRTLWRSVIKEIRIDNDQNITGVVFG

SEQ ID NO: 8382 - protein, 456 aa, Unknown
  Description of Unknown: Integrase B8383 sequence
  PTHR30461:SF3,SM00857,G3DSA:1.10.10.2600,IPR036162,PF13408, IPR025827,G3DSA:3.40.50.1390,PS51737,IPR006119,IPR038109, PF07508,SSF53041,IPR011109,PTHR30461,PS51736, cd00338,PF00239
MRNKEIAPALVRVALYIRVSGEEQKIKGLSLEAQQERLEAYARERGWVIVGIYIDAAKTARKNIHKRTEFQRMMDSVKRDEVDILLFARLDRWFRSVADYYKVMEILQAHNCDWKTTDEEYDTTTANGRLYINVKLSIAQNEADIDGERIDVVFDSKIAHGTVVSGSAPFGFRVNEEKRLEVVPEDAAIVQDAFNYFESTVSQRATVRYVRETYGVNWCDATFRRMLKEKLYTGVYDRGGRYNDQFCPAIINRQQFDRVQALLTRNVRSAPSGKVYIFTSILTCAECGHKLVGYKSSDYFYYRCNQHFQRGRCSHNHSAREDVVEQWLFEHLGEELERCQLEWDVEAAKKKASVARTDKAALKLKLTKLKELYVNDLIDIEDYKKDYQIYVSALNQIPEPAQEAPPDFAAVRRLLDNSFRTIYDTLTREEKRTLWRSVIKEIRIDNDQNITGVVFG

SEQ ID NO: 8383 - protein, 456 aa, Unknown
  Description of Unknown: Integrase B8384 sequence
  PTHR30461:SF3,SM00857,G3DSA:1.10.10.2600,IPR036162,PF13408, IPR025827,G3DSA:3.40.50.1390,PS51737,IPR006119,IPR038109, PF07508,IPR011109,SSF53041,PTHR30461,PS51736, cd00338,PF00239
MRNKEIAPALVRVALYIRVSGEEQKIKGLSLEAQQERLEAYARERGWVIVGIYIDAAKTARKNIHKRTEFQRMMDSVKRDEVDILLFARLDRWFRSVADYYKVMEILQAHNCDWKTTDEEYDTTTANGRLYINVKLSIAQNEADIDGERIDVVFDSKIAHGTVVSGSAPFGFRVNEEKRLEVVPEDAAIVQDAFNYFENTVSQRATVRYVRETYGVNWCDATFRRMLKEKLYTGVYDRGGRYNDQFCPAIISRQQFDRVQALLTRNVRSAPSGKVYIFTSILTCAECGHKLVGYKSSDYYYYRCNQHFQRGRCSHNHSAREDVVEQWLFEHLGEELERCQLEWDVEAAKKKASVARTGKAALKRKLTKLKELYVNDLIDIEDYKKDYQIYVSALNQIPEPAQEAPPDFAAVRRLLDNSFRTIYDTLTREEKRTLWRSVIKEIKIDNDQNITGVVFG

SEQ ID NO: 8384 - protein, 456 aa, Unknown
  Description of Unknown: Integrase B8385 sequence
  PTHR30461:SF3,SM00857,G3DSA:1.10.10.2600,IPR036162,PF13408, IPR025827,G3DSA:3.40.50.1390,PS51737,IPR006119,IPR038109, PF07508,SSF53041,IPR011109,PTHR30461,Coil, PS51736,cd00338,PF00239
MYKKELAPDLVRVALYIRVSGEEQKIKGLSLEAQQERLEAYARERGWVIVGIYIDAAKTARKNIHKRTEFQRMMDSVKRDEVDILLFARLDRWFRSVADYYKVMEILQAHNCDWKTTDEEYDTTTANGRLYINVKLSIAQNEADIDGERIDVVFDSKIAHGTVVSGSAPFGFRVNEEKRLEVVPEDAAIVQDAFNYFENTVSQRATVRYVRETYGVNWCDATFRRMLKEKLYTGVYDRGGRYNDQFCPAIIDRQQFDRVQALLTRNVRSAPSGKVYIFTSILTCAECGHKLVGYKSSDYYYYRCNQHFQRGRCSHNHSAREDVVEVWLFDHLGEELERCQLEWDVEAAKKKASVARTDKAALKRKLTKLKELYVNDLIDIEDYKKDYQIYVSALNQIPEPAQEAPPDFAAVRRLLDNSFRTIYDTLTREEKRTLWRSVIKEIRIDNDQNITGVVFG

SEQ ID NO: 8385 - protein, 455 aa, Unknown
  Description of Unknown: Integrase B8386 sequence
  SM00857,IPR006118,G3DSA:1.10.10.2600,IPR036162,PF13408, PS51737,IPR025827,G3DSA:3.40.50.1390,IPR006119,IPR038109, IPR011109,SSF53041,PF00239,PTHR30461,PS00397, PS51736,Coil,cd00338
MECVAYIRVSTERQAEEGYGLESQKRDIDEYCRKHQLIIKEYYVDAGLSGMEMSKRVELQRLISDMAKIDVIVVYKLDRLARDTVDALYMIEKIFTPKGICVESVHDFARYETPQDKFQTQVMAAVAEYDRNTMMLRMRGGMLERVKRGFWMGGGNLPFCYSYDKELGILIPIPERAETARNALELYINGYSDGRIARICHYSGEPVARKILTSVVNIGMIPYKGKVYQGKHEPIFDIERYELAQEIRKSRHDAKSWIAHPTNLLTGLCYCGVCGCAMRYQKWGQKEDSPRKIYCCSKNIDLDYLPNYNHDCDSKPQWASDIEKQVEKQMLEISVNLSKYKPKEKETKLQIMQSQLSREKNKLKRLYILYAEGNDTVIELIKQAEEEVKRITAAIEEESKAAKNTQKKEFVYDNIKKLADVWDKIDKQTKNKILKTIISKIVIVNDNIEIQLKNF

SEQ ID NO: 8386 - protein, 455 aa, Unknown
  Description of Unknown: Integrase B8387 sequence
  PTHR30461:SF3,IPR036162,PS51737,IPR011109,PTHR30461, PS00397,PF00239,G3DSA:1.10.10.2600,IPR006119,SSF53041, cd00338,SM00857,IPR025827,IPR038109,PS51736, IPR006118,PF13408,G3DSA:3.40.50.1390,PF07508,Coil
MANEIKQVALYIRVSTDQQAKHGDSLDEQQHTLNEYVRQQGNMRVFKTYIDDGISGQKLYRDEFQKLLDDVKKGKIDTILFTKLDRWFRNLRHYLNIQEILDKNNVTWLAVTQPFFNTETAMGRSFVNQSMGFAELEAQMTSERIRAVFDNKIRKGEVVSGKVPLGYDIKDKHLVPNEKAEIVKEIFQYYLETGSMRATVRHLENHFSMTRDYQSVRQMLTNRKYIGELRDNKNFCEPIVDRDVFERVQLQLSKNIRMNKKRDYMFTGLLVCSECGCNYSATAVISRYVRKDGTTNPNERHLYRCTKNRNNVKKCSNKKGIYETTLENFLLENIEKQAEELSVRMQKEPAVKKTKNINDKIKKKIDRLKKAYLNDVITLEEYKEDREELEALLIPEQDNKIAKIDLSSLHNYSTAEFREGYKQLTISEKSSLWRQVIKNIVVYPDGNLKINFLGY

SEQ ID NO: 8387 - protein, 455 aa, Unknown
  Description of Unknown: Integrase B8388 sequence
  PTHR30461:SF3,IPR036162,PS51737,IPR011109,PTHR30461, PS00397,PF00239,G3DSA:1.10.10.2600,IPR006119,SSF53041, SM00857,IPR025827,IPR038109,PS51736,cd03768, IPR006118,PF13408,G3DSA:3.40.50.1390,PF07508,Coil
MTKDNRKTALYIRVSTDFQAEEGYSIDAQKEKLEQFCKLKDIKNYEFYIDGGWSGSNIDRPQMKQMMSDIKEGMIASVIVYKLDRLSRSQKDTVFLLEDIFIPNNCNFISLNENFDTTTPYGKAMIGILSVFAQLERENIRERTRMGMYERVKEGLWMGGGRVPYGYSYDANKNILVKNADADNVGKIFDLYIQGYSACYIAKLFNLCNDSQVRNILKRKTYLGKIEYKGEVFDGKHIPLVSQEIYDKAQEELSKRTSKDQQKNVYLLTGLIKCGVCGASMRYQKWGKHVKIYCYSQQSSKPKLIRDLNCDNYKNDSDEIEKAVIDDLLRRTENIVGVKDVKNTSISAINILSNKKKTIEEKIKKLYNLCLTMDDDLLKETISECKAELDEINKQIEREKVIGDTINKINEKHNTINNLKSNWDNMTHMEKRTAVKICIKEIIINKDAIDIVYNF

SEQ ID NO: 8388 - protein, 455 aa, Unknown
  Description of Unknown: Integrase B8389 sequence
  SM00857,IPR006118,G3DSA:1.10.10.2600,IPR036162,PF13408, PS51737,G3DSA:3.40.50.1390,IPR025827,IPR006119,IPR038109, IPR011109,SSF53041,PF00239,PTHR30461,PS00397, PS51736,Coil,cd00338
MECVAYIRVSTERQAEEGYGLESQKRDIDEYCRKHQLIIKEYYVDAGLSGMEMSKRVELQRLISDMAKIDVIVVYKLDRLARDTVDALYMIEKIFTPKGICVESVHDFARYETPQDKFQTQVMAAVAEYDRNTMMLRMRGGMLERVKRGFWMGGGNLPFCYSYDKELGILVPIPERAETARNALELYINGYSDGRIARICHYSGEPVTRKILTSVVNIGMIPYKGKVYQGKHEPIFDIERYELAQEIRKSRHDAKSWIAHPTNLLTGLCYCGVCGCAMRYQKWGQKEDSPRKIYCCSKNIDLDYLPNYNHDCDSKPQWASDIEKQVEKQMLEISVNLSKYKPKEKETKLQIMQSQLSREKNKLKRLYILYAEGNDTVIELIKQAEEEVKRITAAIEEESKAAKNTQKKEFVYDNIKKLADVWDKIDKQTKNKILKTIISKIVIVNDNIEIQLKNF

SEQ ID NO: 8389 - protein, 455 aa, Unknown
  Description of Unknown: Integrase B8390 sequence
  PTHR30461:SF3,IPR036162,PS51737,IPR011109,PTHR30461, PS00397,PF00239,G3DSA:1.10.10.2600,IPR006119,SSF53041, cd00338,SM00857,IPR025827,IPR038109,PS51736, IPR006118,PF13408,G3DSA:3.40.50.1390,PF07508,Coil
MANEIKQVALYIRVSTDQQAKHGDSLDEQQHTLNEYVRQQGNMRVFKTYIDDGISGQKLYRDEFQKLLDDVKKGRIDTILFTKLDRWFRNLRHYLNIQEILDKNNVTWLAVTQPFFNTETAMGRSFVNQSMGFAELEAQMTSERIRAVFDNKIRKGEVVSGKVPLGYEIKDKHLVPNEKAEIVKEIFQYYLETGSMRATVRHLENHFSMTRDYQSVRQMLTNRKYIGELRDNKNFCKPIIDRDVFERVQLQLSKNIRMNKKRDYMFTGLLVCSECGCNYSATAVISRYVRKDGTTNPNERHLYRCTKNRNNAKKCSNKKGIYETTLENFLLENIEKQAEELSVKMQQEPEVKKTKNTNDKIKKKIDRLKKAYLNEVITLEEYKKDREELEALLIPERDNKIAKIDLNSLHNYSTAEFRDGYKQLTISEKSSLWRQVIKNIVVYPDGNLKINFLGY

SEQ ID NO: 8390 - protein, 455 aa, Unknown
  Description of Unknown: Integrase B8391 sequence
  PTHR30461:SF3,IPR036162,PS51737,IPR011109,PTHR30461, PS00397,PF00239,G3DSA:1.10.10.2600,IPR006119,SSF53041, SM00857,IPR025827,IPR038109,PS51736,cd03768, IPR006118,PF13408,G3DSA:3.40.50.1390,PF07508,Coil
MTKDNRKTALYIRVSTDFQAEEGYSIDAQKEKLEQFCKLKDIKNYEFYIDGGWSGSNIDRPQMKQMVSDIKEGMIDSVIVYKLDRLSRSQKDTVFLLEDIFIPNNCNFISLNENFDTTTPYGKAMIGILSVFAQLERENIRERTRMGMYERVKEGLWMGGGRVPYGYNYDSNKNILVPNADADNVRKIFDLYLQGYSACYISKLFNLCNDSQVRNILKRKTYLGKIEYKGEVFDGKHIPLISQEIYDKAQEELSKRTSKDQQKNAYLLTGLIKCGVCGASMRYQKWGKHVKIHCYSQQSSKPKLIRDPNCDNYKNDSDEIEKAVIDDLLRRTENIVGVKDVKNTSISAISILNNKKKTIEEKIKKLYNLCLTMDDDLLKETISECKTELDEINKQIEREKAIGDTINKINEKHNTINNLKGNWDNMTHMEKRTAVKICIKEIIINKDAIDIVYNF

SEQ ID NO: 8391 - protein, 455 aa, Unknown
  Description of Unknown: Integrase B8392 sequence
  PTHR30461:SF3,SM00857,IPR006118,G3DSA:1.10.10.2600,IPR036162, PF13408,IPR025827,G3DSA:3.40.50.1390,PS00397,IPR006119, IPR038109,SSF53041,PTHR30461,Coil,PS51736, cd00338,PF00239
MKECVAYIRVSTEKQAEEGHGLDSQRRDIENYCRKNGLLISDWYEDDGYTGSNMNRPALQSLVTDCTKKRVKCVVAFKLDRLSRSMVDGIYLIERVFQPNDVEFLCVHDSVSYDSPMEQAYTQMMAVFAQLDKNTMMLRMRGGMLERVKKGYWQGGGNPPYCYEYSKEKGILIPIPERAEQANKALDLFIDGYSDERIMRTLGYKTEGAVRSILTSVVNIGMIPYKGNVYQGLHEPIFDKKKFELAQKLRASRRNARLYLHNEPKLLTGLCYCGICGCKMRYQKWTHGNYKIYCCSRSKGLEHIPNYNPNCNNTLEWAEDIEKQVEDKILKISVNLSNHKPKEKKNKLDIMGKQLDKEKNKLKRLYGLYADGNDMVIEMIKDLEGNISALEEQIKEERKRSSDNQKSFVYENIKNLADIWENIDKTRKNKILKSIVEKIVIVNGNVEIQLKNFFH

SEQ ID NO: 8392 - protein, 455 aa, Unknown
  Description of Unknown: Integrase B8393 sequence
  SM00857,IPR036162,PF13408,PS51737,G3DSA:3.40.50.1390, IPR025827,IPR006119,IPR011109,SSF53041,PTHR30461, Coil,PS51736,cd00338,PF00239
MEKKIRCAIYDRVSHELQVERGHSLEAQKELLTQYAVSQGYEIVGYYEDEGISARKKMGDRKELLRLLEDVKKDKVDIILVTKLDRWFRSVKDYHNTQAILDNHNCSWRTILEDYDSSTADGQLKINIMLSVSQNEADRTSERIKTVFDYKKRHKKAISGSIPFGYMIDDEKNVIKNPDQSEIVEAAFKKYLSTFNKWGTLDYLRDIYGDDAPTENQLLAMFEHPAYIGTLFGIEGFCEPYINAEQREKILAVKSQRKRVMTGTVYLFSSMIVCPWCGKKLSGLSGKYHRKDGGVTIHPAYRCSKYYMGEGRHPHPSLSERKIEDYLRANLFRLIHERIYDIEQEAKDKPRQRKNRIKSIQLEMQRLNFLFQKGRIGTDYYDKNYTALEEEIKLLQEESKVVQIQQLRKMIDIGESNWLGMYDALDRQHKKAFWKGIIKEIYIDKEKHITKVIFL

SEQ ID NO: 8393 - protein, 455 aa, Unknown
  Description of Unknown: Integrase B8394 sequence
  PTHR30461:SF3,SM00857,G3DSA:1.10.10.2600,IPR036162, PF13408,IPR025827,G3DSA:3.40.50.1390,IPR006119, IPR038109,SSF53041,PTHR30461,PS51736, cd00338,PF00239
MTKTSKRIRCAIYDRVSTDMQVKDGLSLDAQREALTAYAVSHGYEIVGVYSDEGLTARKKLQNRKNLIRLLNDVKADKIDLILVARLDRWFRNVKDYHNTQAILEAHGCNWKTIYEEYDTTTSNGRFAINIMLSVNENECDRDSERIRSVFEYKKLQKQNLCGKPAYGYKMDAQKHLVKDPATKHIVEDIFDHYFTTFSKKETISYILSKYSDNAPTMYQVNRILSSDVYTGKKYGIPDYCEAYITPDQFRKIAETSDSKIIPHQTEPFLFSSMIRCPICGKFMSGFVKRQHLKNGEKSEYKRYRCSAKFVEYHNGACISESVIEQYLLDHIVEQLSYDMMEAKKKEQSAPLNRSRGIRQEIDRLNHMYQKGRISDAYYDEQYNALNERLQNALASENIVSIEAYRPICDLLSDSWQDVYRELDAAHKKAFWRSIIKEIHVDPETRKISGFRLNA

SEQ ID NO: 8394 - protein, 455 aa, Unknown
  Description of Unknown: Integrase B8395 sequence
  SM00857,IPR006118,G3DSA:1.10.10.2600,IPR036162,PF13408, IPR025827,PS51737,G3DSA:3.40.50.1390,IPR006119,IPR038109, IPR011109,SSF53041,PF00239,PTHR30461,PS00397, PS51736,Coil,cd00338
MECVAYIRVSTERQAEEGYGLESQKRDIDEYCRKHQLIIKEYYVDAGLSGMEMSKRVELQRLISDMAKIDVIVVYKLDRLARDTVDALYMIEKIFTPKGICVESVHDFARYETPQDKFQTQVMAAVAEYDRNTMMLRMRGGMLERVKRGFWMGGGNLPFCYSYDKELGILVPIPERAETARNALELYINGYSDGRIARICHYSGEPVARKILTSVVNIGMIPYKGKVYQGKHEPIFDIERYELAQEIRKSRHDAKSWIAHPTNLLTGLCYCGVCGCAMRYQKWGQKEDSPRKIYCCSKNIDLDYLPNYNHDCDSKPQWASDIEKQVEKQMLEISVNLSKYKPKEKETKLQIMQSQLSREKNKLKRLYILYAEGNDTVIELIKQSEEEVKRITAAIEEESKAAKNTQKKEFVYDNIKKLADVWDKIDKQTKNKILKTIISKIVIVNDNIEIQLKNF

SEQ ID NO: 8395 - protein, 455 aa, Unknown
  Description of Unknown: Integrase B8396 sequence
  PTHR30461:SF3,IPR036162,PS51737,IPR011109,PTHR30461, PS00397,PF00239,G3DSA:1.10.10.2600,IPR006119,SSF53041, SM00857,IPR025827,IPR038109,PS51736,cd03768, IPR006118,PF13408,G3DSA:3.40.50.1390,PF07508,Coil
MTKDNRKTALYIRVSTDFQAEEGYSIDAQKEKLEQFCKLKDIKNYEFYIDGGWSGSNIDRPQMKQMMSDIKEGMIDSVIVYKLDRLSRSQKDTVFLLEDIFIPNNCNFISLNENFDTTTPYGKAMIGILSVFAQLERENIRERTRMGMYERVKAGLWMGGGKVPYGYSYDANKNILVTNADADNVRKIFDLYIQGYSACYIAKLFNLCNDSQVRNILKRKTYLGKIEYNGEVFDGKHTPLISQETYDKAQEELSKRTSKDQQKNVYLLTGLIKCGVCGASMRYQKWGKHVKIYCYSQQSSKPKLIRNPNCDNYKNDSDEIEKAVIDDLLRRTENIVGVKDVKNTSISAISILNNKKKTIEEKIKKLYNLCLTMDDDLLKETISECKAELDEINKQIEREKVIGDTINKINEKHNTINNLKSNWDNMTHMEKRMAVKICIKEIIINKDAIDIVYNF

SEQ ID NO: 8396 - protein, 455 aa, Unknown
  Description of Unknown: Integrase B8397 sequence
  PTHR30461:SF3,IPR036162,PS51737,IPR011109,PTHR30461, PS00397,PF00239,G3DSA:1.10.10.2600,IPR006119,SSF53041, cd00338,SM00857,IPR025827,IPR038109,PS51736, IPR006118,PF13408,G3DSA:3.40.50.1390,Coil
MKTVACYCRVSTEEQVKYGFSIQAQKDSLTKYCKENDYKYDVYIDEGISASSMKKRKALQEMLEKSIAYDMILFTKLDRLSRNVLDANNINKILQDNHCTMKAIDEDDVDTSTADGMFMFNLKVSLAQREIGKTSERIRFVFKNKREKGEVTSGTPKYGYKIKDKKFVIDSEEAENIRNLYKYFISVNGDHKKTYSYFVKHFPGKGKDALFNYLRETAYIGKYKLYRKNVYLDNYIPPIMDKELFNEVQNLLPRVEKVLKKENIPSIFAGMLYCYYCKSRLVRKVDYRSKNKIINYFCDKQYKYKVGINEKQCQNSKVISDKSVEEYLINNLKYLCKQYISKSIIKTKPKPQKNNIKINSLKNKLSKLKDLYLDDLISKEDYKQDYIKINKEILKLEEEQKEKPQKDFTYLNELINKDIPDIYNTFNIDEKRKFWLKIIDKIYIKEGKIKEVTFL

SEQ ID NO: 8397 - protein, 455 aa, Unknown
  Description of Unknown: Integrase B8398 sequence
  PTHR30461:SF3,SM00857,G3DSA:1.10.10.2600,IPR036162,PF13408, PS51737,G3DSA:3.40.50.1390,IPR025827,IPR006119,IPR038109, PF07508,IPR011109,SSF53041,PTHR30461,Coil, PS51736,cd00338,PF00239
MVDEYIDRAISGKTDNRPSFQRLIKDSEKGHFDAVIMYTLDRFARNRYDSAIYKAKLKRNGVKIFYAKQPMPDTPEGIILESVLEGYAEYYSENLARSIKRGMKENALHAIAMGSPVLGYRVGSNRQYEIDPVGAKAVTAIFNMYADGVSRTQIVKWLNEQGFKTARGNAFSKNSLSKILRNQKYIGVYKYDDVVLEGAVPAIIDKALFEKVQNTLKHNYTSRAKSKATEDYLLTSKVFCGKCGEPLLGESGTSKTGRIYRYYKCGNRKKRKGCTKKIEKKEWLEQTVVKFAVQQVLTDENIDKIATKAMALIEKEFKDTSVLTGLQERLKETNKRIQNIMAAIEQGIITATTKERLEDLEEERRNLETQIAKEETKKPLLTKERIVFWLESFRKGNIKNIEYQRRIIDTLVNSVFVYDEGEKGRKLVLTFNISGNNTFTLKSSDIESSAPPSPL

SEQ ID NO: 8398 - protein, 455 aa, Unknown
  Description of Unknown: Integrase B8399 sequence
  PTHR30461:SF3,IPR036162,PS51737,IPR011109,PTHR30461, PS00397,PF00239,G3DSA:1.10.10.2600,IPR006119,SSF53041, cd00338,SM00857,IPR025827,IPR038109,PS51736, IPR006118,PF13408,G3DSA:3.40.50.1390,PF07508,Coil
MANEIKQVALYIRVSTDQQAKHGDSLDEQQHTLNEYVRQQGNMRVFKTYIDDGISGQKLYRDEFQKLLDDVKKGRIDTILFTKLDRWFRNLRHYLNIQEILDKNNVTWLAVTQPFFNTETAMGRSFVNQSMGFAELEAQMTSERIRAVFDNKIRKGEVVSGKVPLGYEIKDKHLVPNEKAEIVKEIFQYYLETGSMRATVRHLENHFSMTRDYQSVRQMLTNRKYIGELRDNKNFCEPIIDRDVFERVQLQLSKNIRMNKKRDYMFTGLLVCSECGCNYSATAVISRYVRKDGTTNPNERHLYRCTKNRNNVKKCSNKKGIYETTLENFLLENIEKQAEELSVKMQQEPEVKKTKNTNDKIKKKIDRLKKAYLNEVITLEEYKKDREELEALLIPERDNKIAKIDLNSLHNYSTAEFRDGYKQLTISEKSSLWRQVIKNIVVYPDGNLKINFLGY

SEQ ID NO: 8399 - protein, 455 aa, Unknown
  Description of Unknown: Integrase B8400 sequence
  PTHR30461:SF3,IPR036162,PS51737,IPR011109,PTHR30461, PS00397,PF00239,G3DSA:1.10.10.2600,IPR006119,SSF53041, SM00857,IPR025827,IPR038109,PS51736,cd03768, IPR006118,PF13408,G3DSA:3.40.50.1390,PF07508,Coil
MTKDNRKTALYIRVSTDFQAEEGYSIDAQKEKLEQFCKLKDIKNYEFYIDGGWSGSNIDRPQMKQMMSDIKEGMIDSVIVYKLDRLSRSQKDTVFLLEDIFIPNNCNFISLNENFDTTTPYGKAMIGILSVFAQLERENIRERTRMGMYERVKAGLWMGGGKVPYGYSYDANKNILVTNADADNVRKIFDLYIQGYSACYIAKLFNLCNDSQVRNILKRKTYLGKIEYNGEVFDGKHTPLISQEIYDKAQEELSKRTSKDQQKDVYLLTGLIKCGVCGASMRYQKWGKHVKIYCYSQQSSKPKLIRDPNCDNYKNDSDEIEKAVIDDLLRRTENIVGVKDVKNTSISAISILNNKKKTIEEKIKKLYNLCLTMDDDLLKETISECKTELDEINKQIEREKVIGDTINKINEKHNTINNLKSNWDNMPYMERRMAIKICIKEIIINKDAIDIVYNF

SEQ ID NO: 8400 - protein, 455 aa, Unknown
  Description of Unknown: Integrase B8401 sequence
  SM00857,IPR006118,G3DSA:1.10.10.2600,IPR036162,PF13408, IPR025827,G3DSA:3.40.50.1390,PS00397,PS51737,IPR006119, IPR038109,IPR011109,SSF53041,PTHR30461,Coil, PS51736,cd00338,PF00239
MECVAYIRVSTERQAEEGYGLESQKRDIDEYCRKHQLIIKEYYVDAGLSGMEMSKRVELQRLISDMAKIGIIVVYKLDRLARDTVDALYMIGKIFTPKGICVESVHDFARYETPQDKFQTQVMAAVAEYDRNTMMLRMRGGMLERVKRGFWMGGGNLPFCYSYDKELGILVPIPERAETARNALELYINGYSDGRIARICHYSGEPVARKILTSVVNIGMIPYKGKVYQGKHKPIFDIERYELAQEIRKSRHDAKSWIAHPTNLLTGLCYCGVCGCAMRYQKWGQKEDSPRKIYCCSKNIDLDYLPNYNHDCDSKPQWASDIEKQVEKQMLEISVNLSKYKPKEKETKLQIMQSQLSREKNKLKRLYILYAEGNDTVIELIKQTEEEVKRITAAIEEESKATKNTQKKEFVYDNIKKLADVWNKIDKQAKNKIFKTIISKIVIVNDNIEIQLKNF

SEQ ID NO: 8401 - protein, 455 aa, Unknown
  Description of Unknown: Integrase B8402 sequence
  PTHR30461:SF3,SM00857,G3DSA:1.10.10.2600,IPR036162,PF13408, IPR025827,G3DSA:3.40.50.1390,IPR006119,IPR038109,SSF53041, PTHR30461,PS51736,cd00338,PF00239
MTKTSKRIRCAIYDRVSTDMQVKDGLSLDAQREALTAYAVSHGYEIVGVYSDEGLTARKKLQNRKNLIRLLNDVKADKIDLILVARLDRWFRNVKDYHNTQAILEAHGCNWKTIYEEYDTTTSNGRFAINIMLSVNENECDRDSERIRSVFEYKKLQKQNLCGKPAYGYKMDAQKHLVKDPATKHIVEDIFDHYFTTFSKKETISYILSKYSDHAPTMYQVNRILSSDVYTGKKYGIPDYCEAYITLDQFRKIAETSDSKIIPHQTEPFLFSSMIRCPICGKFMSGFVKRQYLKNGEKSEYKRYRCSAKFVEYHNGACISESVIEQYLLDHIVEQLSYDMMEAKKKEQSAPLNRSRGIRQEIDRLNHMYQKGRISDAYYDEQYNALNERLQNALTSENIVSIEAYRPICDLLSDSWQDVYRELDAAHKKAFWRSIIKEIHVDPETRKISGFRLNA

SEQ ID NO: 8402 - protein, 455 aa, Unknown
  Description of Unknown: Integrase B8403 sequence
  PTHR30461:SF3,cd00338,SM00857,G3DSA:1.10.10.2600, IPR036162,PS51737,G3DSA:3.40.50.1390,IPR006119, IPR038109,IPR011109,SSF53041,PTHR30461, PS51736,Coil,PF00239
MKKIRCAIYDRVSTEIQATSGLSLDTQKELLTEYAKSHGYEIVGYYADEGLTARKKLQNRKDFQRLLGDIQNDKIDLVLVTKLDRWFRNVRDYHNTQAILEEHHCNWKTILEDYDTSTADGQLKINIMLAVAQNESDRTSERIKVVFEHKKRNGEHLTGAAPYGYITVNKKLVKDPATEHIVNDLFRYYFLTFSKRQTILYITEKYGDAAPTVYQANRILKNETYAGKYQDNLDYCEPYISLKQFETINDISATKIHPTTYQVYLFSQLLICPACGAHLTGYVKKQQLKDGSISLYKRYKCPIKFSKIDHKGKYVCITESVIENYMLEHVYPELQNQLYKIQTTKDKHAKKKDATASIRAEMDRLNLMFRKGRISEDAYDTEYDVLEKKLKTEQERNKIVSVDDYAHIREEFSGNWKDIYQKLDDTHKRAFWRRTIKEIRFDENTHKISGFKFLI

SEQ ID NO: 8403 - protein, 455 aa, Unknown
  Description of Unknown: Integrase B8404 sequence
  PTHR30461:SF3,cd00338,SM00857,G3DSA:1.10.10.2600,IPR036162, PS51737,G3DSA:3.40.50.1390,IPR006119,IPR038109,IPR011109, SSF53041,PTHR30461,PS51736,Coil,PF00239
MKKIRCAIYDRVSTEIQATSGLSLDTQKELLTEYAKSHGYEIVGYYADEGLTARKKLQNRKDFQRLLGDIQNDKIDLVLVTKLDRWFRNVRDYHNTQAILEEHHCNWKTILEDYDTSTADGQLKINIMLAVAQNESDRTSERIKVVFEHKKRNGEHLTGAAPYGYITVNKKLVKDPATEHIVNDLFRYYFLTFSKRQTILYITEKYGDAAPTVYQANRILKNETYAGKYQDNLDYCEPYISLKQFETINDISATKIHPTTYQVYLFSQLLICPACGAHLTGYVKKQQLKDGSISLYKRYKCPIKFSKIDHKGKYVCITESVIEDYMLEHVYPELQNQLYKIQTTKDKHAKKKDATASIRAEMDRLNLMFRKGRISEDAYDTEYDVLEKKLKTEQERNKIVSVDDYAHIREEFSGNWKDIYQKLDDTHKRAFWRRTIKEIRFDENTHKISGFKFLI

SEQ ID NO: 8404 - protein, 455 aa, Unknown
  Description of Unknown: Integrase B8405 sequence
  PTHR30461:SF3,IPR036162,PS51737,IPR011109,PTHR30461, PS00397,PF00239,G3DSA:1.10.10.2600,IPR006119,SSF53041, cd00338,SM00857,IPR025827,IPR038109, PS51736,IPR006118,PF13408,G3DSA:3.40.50.1390,PF07508,Coil
MANEIKQVALYIRVSTDQQAKHGDSLDEQQHTLNEYVRQQGNMRVFKTYIDDGISGQKLYRDEFQKLLDDVKKGRIDTILFTKLDRWFRNLRHYLNIQEILDKNNVTWLAVTQPFFNTETAMGRSFVNQSMGFAELEAQMTSERIRAVFDNKIRKGEVVSGKVPLGYDIKDKHLVPNEKAKIVKEIFQYYLETGSMRATVRHLENHFSMTRDYQSVRQMLTNRKYIGELRDNKNFCEPIIDRDIFERVQLQLSKNIRMNKKRDYMFTGLLVCSECGCNYSATAVISRYVRKDGTTNPNERHLYRCTKNRNNAKKCSNKKGIYETTLENFLLENIEKQAEELSVKMQQEPEVKKTKNTNDKIKKKIDRLKKAYLNEVITLEEYKKDREELEALLIPERDNKIAKIDLNSLHNYSTAEFRDGYKQLTISEKSSLWRQVIKNIVVYPDGNLKINFIGY

SEQ ID NO: 8405 - protein, 455 aa, Unknown
  Description of Unknown: Integrase B8406 sequence
  PTHR30461:SF3,IPR036162,PS51737,IPR011109,PTHR30461, PS00397,PF00239,G3DSA:1.10.10.2600,IPR006119,SSF53041, cd00338,SM00857,IPR025827,IPR038109,PS51736, IPR006118,PF13408,G3DSA:3.40.50.1390,Coil
MKTVACYCRVSTEEQVKYGFSIQAQKDALTNYCKENDYKYDVYIDEGISASSMKKRKALQEMLEKSVAYDMILFTKLDRLSRNVLDANNINKILQDNHCTMKAIDEDDVDTSTADGMFMFNLKVSLAQREIGKTSERIRFVFKNKREKGEVTSGTPKYGYKIKDKKFVIDSEEAENIRNLYKYFISVNGDHKKTYSYFVKHFPGKGKDALFNYLRETAYIGKYKLYRKNVYLDNYIPPIMDKELFNEVQNLLPRVEKVLKKENIPSIFAGMLYCYYCKSRLVRKVDYRSKNKIINYFCDKQYKYKVGINEKQCQNSKVISDKSVEEYLINNLKYLCKPYISKSIIKTKPKPQKNNIKINSLKNKLSKLKDLYLDDLISKEDYKQDYIKINKEILKLEEEQKEKPQKDFTYLNELINKDIPDIYNTFNIDEKRKIWLKIIDKIYVKDGKIKEVTFL

SEQ ID NO: 8406 - protein, 455 aa, Unknown
  Description of Unknown: Integrase B8407 sequence
  IPR036162,PS51737,IPR011109,PTHR30461,PS00397, PF00239,G3DSA:1.10.10.2600,IPR006119,SSF53041,cd00338, SM00857,IPR025827,IPR038109,PS51736,IPR006118, PF13408,G3DSA:3.40.50.1390,PF07508,Coil
MKYVACYCRVSTDEQVKFGFSIQAQKDALEKYCKENGYKYEFYIDEGISASSMKKRKALNEMLSKSSTFDMVLFTKLDRLSRNVLDANNINKLLMDNNCTMKAIDEDDIDTSTADGTFIFNLKVSLAQREIGKTSERINFVFKNKREKGEITSGTKKYGYDIVDKHFVVNEKEAENIKNLYKEFINNNGNLKETYKYFIQHFEGKGYDAMSNYLKETAYIGKYKLYRKNIYINNYIPAILDVEIWEKVQNLRKKKTVGRKITYPDLFSGLIYCHNCGNRLAKKTDYRVKNIVVRYVCDNSYRYKVGIDEKHCTNNKVIKEKDIENYLLNNLDKELSNFIAKVSVIPNTKKINNTPKIKSLEKKINKLKDLYLDDLINKETYAKDYKKYTSELLSLKNTTTQEPLKKDYSHLKQILNSDYKKIYNELNKTNKKKFWFSFINKIYVENGEIKEITFL

SEQ ID NO: 8407 - protein, 455 aa, Unknown
  Description of Unknown: Integrase B8408 sequence
  PTHR30461:SF3,IPR036162,PS51737,IPR011109,PTHR30461, PS00397,PF00239,G3DSA:1.10.10.2600,IPR006119,SSF53041, SM00857,IPR025827,IPR038109,PS51736,cd03768, IPR006118,PF13408,G3DSA:3.40.50.1390,PF07508,Coil
MTKDNRKTALYIRVSTDFQAEEGYSIDAQKEKLEQFCKLKDIKNYEFYIDGGWSGSNIDRPQMKQMMSDIKEGMIDSVIVYKLDRLSRSQKDTVFLLEDIFIPNNCSFISLNENFDTTTPYGKAMIGILSVFAQLERENIRERTRMGMYERVKEGLWMGGGRVPYGYNYDSNKNILVPNADADNVRKIFDLYLQGYSACYIAKLFNLCNDSQVRNILKRKTYLGKIEYNGEVFDGKHTPLISQEIYDKAQEELSKRTSKDQQKNVYLLTGLIKCGVCGASMRYQKWGKHVKIYCYSQQSSKPKLIRDLNCDNYKNDSDEIEKAVIDDLLRRTENIVGVKDVKNTSISAISILNNKKKTIEEKIKKLYNLCLTMDDDLLKETISECKAELDEINKQIEREKVIGDTINKINEKHNTINNLKSNWDNMTYMEKRTAVKICIKEIIINKDAIDIVYNF

SEQ ID NO: 8408 - protein, 455 aa, Unknown
  Description of Unknown: Integrase B8409 sequence
  PTHR30461:SF3,IPR036162,PS51737,IPR011109,PTHR30461, PS00397,PF00239,G3DSA:1.10.10.2600,IPR006119,SSF53041, cd00338,SM00857,IPR025827,IPR038109,PS51736, IPR006118,PF13408,G3DSA:3.40.50.1390,Coil
MKTVACYCRVSTEEQVKYGFSIQAQKDALTKYCKENDYKYDFYIDEGISASSMKKRKALQEMLEKSVAYDMILFTKLDRLSRNVLDANNINKILQDNNCTMKAIDEDDVDTSTADGMFMFNLKVSLAQREIGKTSERIKFVFKNKREKGEVTSGTTKYGYKIKDKKFVVDPEEAENIRNLYKYFISVNGDHKKTYSYFVKHFPGKGQDALFNYLRETAYIGKYKLYRKNVYLDNYIPPIMDKELFDEVQNLLPRVEKVFKKENIPSIFAGMLYCYYCKSRLVRKVDYRSKNKIINYFCDKQYKYKVGINEKQCQNSKVISDKSVEEYLINNLKELCKQYISKSTIKTKPKPQKNNIKINSLKNKLSKLKDLYLDDLINKEEYKQDYIRITKEILELEEAQKEEPQKDFTYLNELINKDIPDIYNTFNIDEKRKFWLKIIDKIYIKEGKIKEVTFL

SEQ ID NO: 8409 - protein, 455 aa, Unknown
  Description of Unknown: Integrase B8410 sequence
  PTHR30461:SF3,IPR036162,PS51737,IPR011109,PTHR30461, PS00397,PF00239,G3DSA:1.10.10.2600,IPR006119,SSF53041, cd00338,SM00857,IPR025827,IPR038109,PS51736, IPR006118,PF13408,G3DSA:3.40.50.1390,PF07508,Coil
MANEIKQVALYIRVSTDQQAKHGDSLDEQQHTLNEYVRQQGNMRVFKTYIDDGISGQKLYRDEFQKLLDDVKKGRIDTILFTKLDRWFRNLRHYLNIQEILDKNNVTWLAVTQPFFNTETAMGRSFVNQSMGFAELEAQMTSERIRAVFDNKIRKGEVVSGKVPLGYEIKDKHLVPNEKAEIVKEIFQYYLETGSMRATVRHLENHFSMTRDYQSVRQMLTNRKYIGELRDNKNFCKPIIDRDVFERVQLQLSKNIRMNKKRDYMFTGLLVCSECGCNYSATAVISRYVRKDGTTNPNERHLYRCTKNRNNAKKCSNKKGIYETTLENFLLENIEKQAEELSVKMQQEPEVKKTKNTNDKIKKKIDRLKKAYLNEVITLEEYKKDRKELEALLIPERDNKIAKIDLNSLHNYSTAEFRDGYKQLTISEKSSLWRQVIKNIVVYPDGNLKINFIGY

SEQ ID NO: 8410 - protein, 455 aa, Unknown
  Description of Unknown: Integrase B8411 sequence
  PTHR30461:SF3,cd00338,SM00857,G3DSA:1.10.10.2600,IPR036162, PF13408,PS51737,G3DSA:3.40.50.1390,IPR025827,IPR006119, IPR038109,IPR011109,SSF53041,PTHR30461,PS51736, Coil,PF00239
MQDVVRVALYPRVSTEEQVLNGYSLDAQEEELIKYANDRGYKIVGIYRDEGFSARKPVLKRKVMQELLHDVEAGKIDLIIFTKLDRWFRSIRDYYAVQTILDKHKVAWKTTLEDYQTETADGRLKVNIMLSVAENEADRTSERIRFVFNSRIQNGEYVYGGVATPYGYTVEIIDGVRKLVKDPETVDAMAAFWDKMIKYRNTRRAGRETNLEFGLSRAHKSWMATVRNEVYAGTLRGVQDFCESYISREDWQSLQNPKRMIKSAQGGRFYLFVGLLRCPVCGNTLKATYKTYPNDRTKEYYGYRCNAKSLGYCTYGRQLSERKVEKYLLANVRGELDNYIWEIRESAKKKRRPKIDISKLQEQLRRLNNVYMSGNIEDGEYNEQAAVIKAMIAKANNDEEKKDNLAELEGLREYLYGDFLEVYKGMTREEKQRFWNSIIEEIRLDDNKISRIIFK

SEQ ID NO: 8411 - protein, 455 aa, Unknown
  Description of Unknown: Integrase B8412 sequence
  PTHR30461:SF3,SM00857,G3DSA:1.10.10.2600,IPR036162,PF13408, IPR025827,G3DSA:3.40.50.1390,IPR006119,IPR038109,SSF53041, PTHR30461,PS51736,cd00338,PF00239
MTKTSKRIRCAIYDRVSTDMQVKDGLSLDAQREALTAYAVSHGYEIVGVYSDEGLTARKKLQNRKNLIRLLNDVKADKIDLILVARLDRWFRNVKDYHNTQAILEAHGCNWKTIYEEYDTTTSNGRFAINIMLSVNENECDRDSERIRSVFEYKKLQKQNLCGKPAYGYKMDAQKHLVKDPATKHIVEDIFDHYFTTFSKKETVSYILSKYGNHAPTMYQVNRILSSDVYTGKKYEIPDYCEAYITPDQFRKIAETSDSKIIPHQTEPFLFSSMIRCPICGKFMSGFVKRQYLKNGEKSEYKRYRCSAKFVEYHNGACISESVIEQYLLDHIVEQLSYDMMEAKKKEQSAPLNRSRGIRQEIDRLNHMYQKGRISDAYYDEQYNALNERLQNALASENIVSIEAYRPICDLLSDSWQDVYRELDAAHKKAFWRSIIKEIHVDPETRKISGFQLNA

SEQ ID NO: 8412 - protein, 455 aa, Unknown
  Description of Unknown: Integrase B8413 sequence
  PTHR30461:SF3,IPR036162,PS51737,IPR011109, PTHR30461,PS00397,PF00239,G3DSA:1.10.10.2600, IPR006119,SSF53041,cd00338,SM00857,IPR025827,IPR038109 ,PS51736,IPR006118,PF13408,G3DSA:3.40.50.1390,Coil
MKTVACYCRVSTEEQVKYGFSIQAQKDALSKYCQENEYKYDFYIDEGISASSMKKRKALQKMLEKSIAYDMILFTKLDRLSRNVLDANNINKILQDNHCTMKAIDEDDVDTSTADGMFMFNLKVSLAQREIGKTSERIRFVFKNKREKGEVTSGTPKYGYKIKDKKFVIDSEEAENIRNLYKYFISVNGDHKKTYSYFVKHFPGKGKDALFNYLRETAYIGKYKLYRKNVYLDNYIPPIMDKELFNEVQNLLPRVEKVLKKENIPSIFAGMLYCYYCKSRLVRKVDYRSKNKIINYFCDKQYKYKVGINEKQCQNSKVISDKSVEEYLINNLKYLCKQYISKSIIKTKPKPQKNNIKINSLKNKLSKLKDLYLDDLISKEDYKQDYIKINKEILKLEEEQKEKPQKDFTYLNELINKDIPDIYNTFNIDEKRKFWLKIIDKIYIKEGKIKEVTFL

SEQ ID NO: 8413 - protein, 455 aa, Unknown
  Description of Unknown: Integrase B8414 sequence
  SM00857,IPR006118,G3DSA:1.10.10.2600,IPR036162,PF13408, PS51737,IPR025827,G3DSA:3.40.50.1390,Coil,IPR006119, IPR038109,IPR011109,SSF53041,PTHR30461,PS00397, PS51736,cd00338,PF00239
MECVAYIRVSTERQAEEGYGLESQKRDIDEYCRKHQLIIKEYYVDAGLSGMEMSKRVELQRLISDMAKIDVIVVYKLDRLARDTVDALYMIEKIFTPKGICVESVHDFARYETPQDKFQTQVMAAVAEYDRNTMMLRMRGGMLERVKRGFWMGGGNLPFCYSYDKELGILIPIPERAETARNALELYINGYSDGRIARICHYSGEPVARKILTSVVNIGMIPYKGKVYQGKHEPIFDIERYELAQEIRKSRHDAKSWIAHPTNLLTGLCYCGVCGCAMRYQKWGQKEDSPRKIYCCSKNIDLDYLPNYNHDCDSKPQWASDIEKQVEKQMLEISVNLSKYKPKEKETKLQIMQSQLSREKNKLKRLYILYAEGNDTVIELIKQAEEEVKRITAAIEEESKATKNTQKKEFVYDNIKKLADVWDKIDKQTKNKILKTIISKIVIVNDNIEIQLKNF

SEQ ID NO: 8414 - protein, 455 aa, Unknown
  Description of Unknown: Integrase B8415 sequence
  PTHR30461:SF3,cd00338,SM00857,IPR006118,IPR036162, PF13408,IPR025827,G3DSA:3.40.50.1390,PS51737,IPR006119, IPR011109,SSF53041,PTHR30461,PS00397,PS51736, Coil,PF00239
MAEKEEQKRLDKEGKKRAAIYVRVSTAEQRDHGLSVDSQIDALQKYCRENGLEVAGIYNDAGISARKKYKARPALLQLIEDCQNKKVDIILFTKLDRWFRSVADYYEVQSQLDAAKVPWRAIWEDYETETSAGVFKVNIMLSIAQAESDRTSERIRAVNEYRKSQGYIIVGKMPLGYIRTSASTIDFDPQTKEAMQAFFDTYLNTYSPVQAMDAAAEKGLKMSRKTAHFLLDKEPYYGTYYGVSVPGYITPAQHELIQQARQHYPRQPKADRVYIFTGLIFCASCGARMGSKCTCYTSYGKPKEKLYYQCRMRTVRRGECKNAAFIMEHNLESYMIDHLEELIVDYNASVQKLAAKAKSTEGKIEKIKGRLERLKDIYLDGDMSRAEYLEKTKELKAQLAELESLAAPALPVSQMPDNWKEIYEQLSRQGKRDFWHRVVRRIEIKRHSVDKVYFV

SEQ ID NO: 8415 - protein, 455 aa, Unknown
  Description of Unknown: Integrase B8416 sequence
  PTHR30461:SF3,cd00338,SM00857,G3DSA:1.10.10.2600,IPR036162, PS51737,G3DSA:3.40.50.1390,IPR006119,IPR038109,IPR011109, SSF53041,PTHR30461,PS51736,Coil,PF00239
MKKIRCAIYDRVSTEIQATSGLSLDTQKELLTEYAESHGYEIVGYYADEGLTARKKLQNRKDFQRLLGDIQNDKIDLVLVTKLDRWFRNVRDYHNTQAILEEHHCNWKTILEDYDTSTADGQLKINIMLAVAQNESDRTSERIKVVFEHKKRNGEHLTGAAPYGYITVNKKLVKDPATEHIVNDLFRYYFLTFSKRQTILYITEKYGDAAPTVYQANRILKNETYAGKYQDNLDYCEPYISLKQFETINDISATKIHPTTYQVYLFSQLLICPACGAHLTGYVKKQKLKDGSISLYKRYKCPIKFSKIDHKGKYVCITESVIENYMLEHVYPELQNQLYKIQTTKGKHAKKKDATASIRAEMDRLNLMFRKGRISEDAYDTEYDVLEKKLKTEQERNKIVSVDDYAHIREEFSGNWKDIYQKLDDTHKRAFWRRTIKEIRFDENTHKISGFKFLI

SEQ ID NO: 8416 - protein, 455 aa, Unknown
  Description of Unknown: Integrase B8417 sequence
  PTHR30461:SF3,IPR036162,PS51737,IPR011109,PTHR30461, PS00397,PF00239,G3DSA:1.10.10.2600,IPR006119,SSF53041, cd00338,SM00857,IPR025827,IPR038109, PS51736,IPR006118,PF13408,G3DSA:3.40.50.1390,Coil
MKTVACYCRVSTEEQVKYGFSIQAQKDSLTKYCKENDYKYDVYIDEGISASSMKKRKALQEMLEKSVAYDMILFTKLDRLSRNVLDANNINKILQDNHCTMKAIDEDDVDTSTADGMFMFNLKVSLAQREIGKTSERIRFVFKNKREKGEVTSGTPKYGYKIKDKKFVIDSEEAENIRNLYKYFISVNGDHKKTYSYFVKHFPGKGKDALFNYLRETAYIGKYKLYRKNVYLDNYIPPIMDKELFNEVQNLLPRVEKVLKKENIPSIFAGMLYCYYCKSRLVRKVDYRSKNKIINYFCDKQYKYKVGINEKQCQNSKVISDKSVEEYLINNLKYLCKQYISKSIIKTKPKPQKNNIKINSLKNKLSKLKDLYLDDLISKEDYKQDYIKINKEILKLEEEQKEKPQKDFTYLNELINKDIPDIYNTFNIDEKRKFWLKIIDKIYIKEGKIKEVTFL

SEQ ID NO: 8417 - protein, 455 aa, Unknown
  Description of Unknown: Integrase B8418 sequence
  PTHR30461:SF3,cd00338,SM00857,G3DSA:1.10.10.2600,IPR036162, PS51737,G3DSA:3.40.50.1390,IPR006119,IPR038109,IPR011109, SSF53041,PTHR30461,PS51736,Coil,PF00239
MKKIRCAIYDRVSTEIQATSGLSLDTQKELLTEYAKSHGYEIVGYYADEGLTARKKLQNRKDFQRLLGDIQNDKIDLVLVTKLDRWFRNVRDYHNTQAILEEHHCNWKTILEDYDTSTADGQLKINIMLAVAQNESDRTSERIKVVFEHKKRNGEHLTGAAPYGYITVNKKLVKDPATEHIVNDLFRYYFLTFSKRQTILYITEKYGDAAPTVYQANRILKNETYAGKYQDNLDYCEPYISLKQFETINDISATKIHPTTYQVYLFSQLLICPACGAHLTGYVKKQKLKDGSISLYKRYKCPIKFSKIDHKGKYVCITESVIENYMLEHVYPELQNQLYKIQTTKGKHAKKKDATASIREEMDRLNLMFRKGRISEDAYDTEYDVLEKKLKTEQERNKIVSVDDYAHIREEFSGNWKDIYQKLDDTHKRAFWRRTIKEIRFDENTHKISGFKFLI

SEQ ID NO: 8418 - protein, 455 aa, Unknown
  Description of Unknown: Integrase B8419 sequence
  PTHR30461:SF3,SM00857,G3DSA:1.10.10.2600,IPR036162,PF13408, IPR025827,G3DSA:3.40.50.1390,IPR006119,IPR038109,SSF53041, PTHR30461,PS51736,cd00338,PF00239
MTKTSKRIRCAIYDRVSTDMQVKDGLSLDAQREALTAYAVSHGYEIVGVYSDEGLTARKKLQNRKNLIRLLNDVKADKIDLILVARLDRWFRNVKDYHNTQAILEAHGCNWKTIYEEYDTTTSNGRFAINIMLSVNENECDRDSERIRSVFEYKKLQKQNLCGKPAYGYKMDAQKHLVKDPATKHIVEDIFDHYFTTFSKKETISYILSKYSDHAPTMYQVNRILSSDVYTGKKYGIPDYCEAYITPDQFRKIAETSDSKIIPHQTEPFLFSSMIRCPICEKFMSGFVKRQYLKNGEKSEYKRYRCSAKFVEYHNGACISESVIEQYLLDHIVEQLSYDMMEAKKKEQSAPLNRSRGIRQEIDRLNHMYQKGRISDAYYDEQYNALNERLQNALASENIVSIEAYRPICDLLSDSWQDVYRELDAAHKKAFWRSIIKEIHVDPETRKISGFRLNA

SEQ ID NO: 8419 - protein, 455 aa, Unknown
  Description of Unknown: Integrase B8420 sequence
  SM00857,IPR006118,G3DSA:1.10.10.2600,IPR036162,PF13408, PS51737,IPR025827,G3DSA:3.40.50.1390,Coil,IPR006119, IPR038109,SSF53041,IPR011109,PTHR30461,PS00397, PS51736,cd00338,PF00239
MECVAYIRVSTERQAEEGYGLESQKRDIDEYCRKHQLIIKEYYVDAGLSGMEMSKRVELQRLISDMAKIEVIVVYKLDRLARDTVDALYMIGKIFTPKGICVESVHDFARYETPQDKFQTQVMAAVAEYDRNTMMLRMRGGMLERVKRGFWMGGGNLPFCYSYDKELGILVPIPERAETARNALELYINGYSDGHIARICHYSGEPVAKKILTSVVNIGMIPYKGKVYQGKHKPIFDIERYELAQEIRKSRHDAKSWIAHPTNLLTGLCYCGVCGCAMRYQKWGQKEDSPRKIYCCSKNIDLDYLPNYNHDCDSKPQWASDIEEQVEKQMLEISVNLSKYKPKEKETKLQIMQSQLSREKNKLKRLYILYAEGNDTVIELIKQTEEEVKRITAAIEEESKATKKTQKKEFVYDNIKKLADVWNKIDKQAKNKIFKTIISKIVIANDNIEIQLKNF

SEQ ID NO: 8420 - protein, 455 aa, Unknown
  Description of Unknown: Integrase B8421 sequence
  PTHR30461:SF3,IPR036162,PS51737,IPR011109,PTHR30461, PS00397,PF00239,G3DSA:1.10.10.2600,IPR006119,SSF53041, cd00338,SM00857,IPR025827,IPR038109,PS51736, IPR006118,PF13408,G3DSA:3.40.50.1390,PF07508,Coil
MKQKDRIKTVALYIRVSTDRQAKEGDSLEAQEKALTDYAKKNKYKIYDTYIDGGESGQKLKRTNLQRMLKDLETGHIDLILMTKLDRWFRNIADFYKVIEILKKNNVAWKTIWEDYDTTTASGEFWLNMSLSLGQMEAKRTGERIISVFDHKFRVQKTVCSGKVPYGYKISDDKKIIIDPETAPHIQGLFDQYLLTNNLSKTVRWFQQNCSQKSYDSIKIYLKNTAYIGRYVRKSTGEVLEDFCPQIVEDDVFYRVQELFKNNIKEIKHKNTDPYIFSRLIKCGQCGRKMAGRYASKNNTHYYRCKRANENNYCSNKYNVPEKRIEEFVIKNIFTQFEQKKLKIDEVNQKEKKINIDSIKRKMNKLSELYLNDMIDIDFYTDQYSSLKKILEENEKNKDIDKTKSNLKKIQKYLSSDIFKTYDKLNNQEKRELWGSIIETIEIKSKNEFEINFLI

SEQ ID NO: 8421 - protein, 455 aa, Unknown
  Description of Unknown: Integrase B8422 sequence
  SM00857,IPR006118,G3DSA:1.10.10.2600,IPR036162,PF13408, PS51737,G3DSA:3.40.50.1390,IPR025827,IPR006119,IPR038109, IPR011109,SSF53041,PF00239,PTHR30461,PS00397, PS51736,Coil,cd00338
MECVAYIRVSTERQAEEGYGLESQKRDIDEYCRKHQLIIKEYYVDAGLSGMEMSKRVELQRLISDMAKIDVIVVYKLDRLARDTVDALYMIEKIFTPKGICVESVHDFARYETPQDKFQTQVMAAVAEYDRNTMMLRMRGGMLERVKRGFWMGGGNLPFCYSYDKELGILVPIPERAETARNALELYINGYSDGRIARICHYSGEPVTRKILTSVVNIGMIPYKGKVYQGKHEPIFDIERYELAQEIRKSRHDAKSWIAHPTNLLTGLCYCGVCGCAMRYQKWGQKEDSPRKIYCCSKNIDLDYLPNYNHDCDSKPQWASDIEKQAEKQMLEISVNLSKYKPKEKETKLQIMQSQLSREKNKLKRLYILYSEGNDTVIELIKQAEEEVKRITAAIEEESKAAKNTQKKEFVYDNIKKLADVWDKIDKQTKNKILKTIISKIVIANDNIEIQLKNF

SEQ ID NO: 8422 - protein, 455 aa, Unknown
  Description of Unknown: Integrase B8423 sequence
  PTHR30461:SF3,IPR036162,PS51737,IPR011109,PTHR30461, PS00397,PF00239,G3DSA:1.10.10.2600,IPR006119,SSF53041, SM00857,IPR025827,IPR038109,PS51736,cd03768, IPR006118,PF13408,G3DSA:3.40.50.1390,PF07508,Coil
MTKDNRKTALYIRVSTDFQAEEGYSIDAQKEKLEQFCKLKDIKNYEFYIDGGWSGSNIDRPQMKQMMSDIKEGMIDSVIVYKLDRLSRSQKDTVFLLEDIFIPNNCNFISLNENFDTTTPYGKAMIGILSVFAQLERENIRERTRMGMYERVKAGLWMGGGKVPYGYSYDANKNILVTNADADNVRKIFDLYIQGYSACYIAKLFNLCNDSQVRNILKRKTYLGKIEYNGEVFDGKHTPLISQETYDKAQEELSKRTSKDQQKNVYLLTGLIKCGVCGASMRYQKWGKHVKIYCYSQQSSKPKLIRNPNCDNYKNDSDEIEKAVIDDLLRRTENIVGVKDVKDTSISAISILNNKKKTIEEKIKKLYNLCLTMDDDLLKETISECKTELDEINKQIEREKVIGDTINKINEKHNTINNLKSNWDNMTYMERRMAIKICIKEIIINKDAIDIVYNF

SEQ ID NO: 8423 - protein, 455 aa, Unknown
  Description of Unknown: Integrase B8424 sequence
  PTHR30461:SF3,IPR036162,PS51737,IPR011109,PTHR30461, PS00397,PF00239,G3DSA:1.10.10.2600,IPR006119,SSF53041, cd00338,SM00857,IPR025827,IPR038109,PS51736, IPR006118,PF13408,G3DSA:3.40.50.1390,Coil
MKYVACYCRVSTDEQARFGFSIQAQKDALEKYCKENGYKYEFYIDEGISASSMKKRKALNEMLSKSSTFDMVLFTKLDRLSRNVLDANNINKLLIDNNCTMKAIDEDDIDTSTADGTFIFNLKVSLAQREIGKTSERINFVFKNKREKGEITSGTKKYGYDIVDKHFVVNEKEAENIKNLYKEFINNNGNLKETYKYFIQHFEGKGYDAMSNYLKETAYIGKYKLYRKNIYIDNYIPAILDIEIWEKVQNLRKKKTVGRKITYPDLFSGLIYCRNCGNRLAKKTDYRVKNIVVRYVCDNSYRYKVGIDEKHCTNNKVIKEKDIENYLLNNLDKELSNFIAKVSVIPNTKKINNTPKIKSLEKKINKLKDLYLDDLINKETYAKDYKKYTSELLSLKNTTTQEPLKKDYSHLKQILNSDYKKIYNELNKTNKKKFWFSFINKIYVENGEIKEITFL

SEQ ID NO: 8424 - protein, 455 aa, Unknown
  Description of Unknown: Integrase B8425 sequence
  PTHR30461:SF3,G3DSA:1.10.10.2600,IPR036162,PF13408,PS51737, IPR025827,G3DSA:3.40.50.1390,IPR006119,IPR038109,PF07508, IPR011109,SSF53041,PTHR30461,Coil,cd00338, PF00239
MVVYKTDRFARNKYDSAVYKRELKRNGIQIFYAAEAIPDGPEGIILESLMEGLAEYYSAELAQKIKRGMRENALKCQSTGSGRPLGYRVDEQKRFQIDPESAQTVQTIFEQYIKGESNAAICELLNSRGLRTAQGKPFNKNSINRIIKNRKYIGEYRYHDIVVEGGMPAIISKDTFNLAQAEMERRRTRKAPKSPKAEYLLAGRLFCGHCKGPMQGVSGTGKSGNKWYYYYCGNTRGKNKTCDKKQVSRDRLERAVVDFTVRYILQEEVLEELARKVHAAQERQNDTASEIAFYEKKLADNKKSIANVLRAIESGAATQTLPARLQELENEQAVILGELSFIKGKRLAFTEDQILFALMKHLEPYPGESEQDYRRRIISDFVSEVYLYDDRLLIYFNISSEDGKLKSADLSNIEGGEFDEGLTSSTNLIAGRTPEVTIVVLPYGFVLATQIKDRL

SEQ ID NO: 8425 - protein, 455 aa, Unknown
  Description of Unknown: Integrase B8426 sequence
  PTHR30461:SF3,SM00857,IPR006118,G3DSA:1.10.10.2600,IPR036162, PF13408,IPR025827,G3DSA:3.40.50.1390,PS00397,IPR006119, IPR038109,SSF53041,PTHR30461,Coil,PS51736, cd00338,PF00239
MKECVAYIRVSTEKQAEEGHGLDSQRRDIENYCRKNGLLISDWYEDDGYTGSNMNRPALQSLVTDCTKKRVKCVVAFKLDRLSRSMVDGIYLIERVFQPNDVEFLCVHDSVSYDSPMEQAYTQMMAVFAQLDKNTMMLRMRGGMLERVKKGYWKGGGNPPYCYEYSKEKDILIPIPERAEQANKALDLFIDGYSDKRIMSILGYKTERVVRNILTGVVNVGMISYKGNVYQGLHEPIFDKKKFELAQKLRASRRNAKMYLHNEPKLLTGLCYCGICGCKMRYQKWTHGNYKIYCYSRIKGVEHIPNYNPNCNNTIEWAEDIEKQVEDKILKISVNLSNHKPKEKKNKLDIMGKQLDKEKTKLKRLYGLYADGNDMVIEMIKDLEGNISALEEQIKEERKRSSDNQKSFVYENIKNLADIWEKIDKTRKNKILKSIIEKIVIVNGNVEIQLKNFFH

SEQ ID NO: 8426 - protein, 454 aa, Unknown
  Description of Unknown: Integrase B8427 sequence
  PTHR30461:SF3,IPR036162,PS51737,IPR011109,PTHR30461, PS00397,PF00239,G3DSA:1.10.10.2600,IPR006119,SSF53041, cd00338,SM00857,IPR025827,IPR038109,PS51736, IPR006118,PF13408,G3DSA:3.40.50.1390,Coil
MECVAYLRVSTEKQAEEGNGLDSQKRDIENYCRKNQLIISDWYEDDGFTGSNMNRPALQRLINDCSKKKLKCVVAFKLDRLSRSMVDGIYLIERVFIPNGVDFRCVHDSVSYDSPMEQAYTQMMAVFAQLDKNTMLLRMRGGMLERVKQGYWMGGGNTPYCYRYSKEDGILVPIPERKEMALRAMNLYISGYSDVRIQKLIGFKSEFVTRQVLTSPVNIGMIPYKGKLYKGRHEPIFDIKVFELAQELRKTRKQSKSFCVNHENQLLTGLCYCGVCGCKMRYQKWTHGKHKIYCYSRDNGMSYLPNYNPNCNNSLEWAEDIEKQVEDEILKISLNLSSHKPKERESCLDILSKQLQKEKTKLKRLYTLYAEGNDTVLEMIKETESGIDELKLKIQNEMKNPDNSQKKEFVYDNIKKLADVWEHIDKQNKNRILKTIISKIIIVNGNIEIQLKKF

SEQ ID NO: 8427 - protein, 454 aa, Unknown
  Description of Unknown: Integrase B8428 sequence
  PTHR30461:SF3,cd00338,SM00857,G3DSA:1.10.10.2600,IPR036162, PF13408,IPR025827,G3DSA:3.40.50.1390,PS51737,IPR006119, IPR038109,SSF53041,IPR011109,PTHR30461,PS51736, Coil,PF00239
MECVAYMRVSTEKQAEEGNGLESQKRDIELYCRKNELIISDWYIDDGYTGANMNRPELQRLINDCGRKRVKCVVAFKLDRLSRSMVDGIYMIERVFQPNNVQFKCVHDSISYDSPMEQAYTQMMAVFAQLDKNTMMLRMRGGMLERVKQGYWMGGGNTPYCYTYSKEKGILIPIPERAEQANKAIDLFIAGNSDVAIQRILGYTSELVVRSILTGVVNIGMIPYKGNIYQGLHEPIFDKDKFEMAQQIRKSRRSKKSYCQNLTPNMLTGLCYCGVCGCKMRYQKWTNGVRKIYCCSRNKDLYYLPNFNNDCDNSIEWADNIENIVESEMLKISVNLSKYKPKEKENKIDIMQSQLDKEKSKLKRLYELYADGNDTVLDMIKDQESKVKNLDDSIKEEQKSGDNNPKKQFVYENIKKLADVWDDIDKPAKNKILKTIIDKIIIVNGNVEIQLKNF

SEQ ID NO: 8428 - protein, 454 aa, Unknown
  Description of Unknown: Integrase B8429 sequence
  PTHR30461:SF3,SM00857,G3DSA:1.10.10.2600,IPR036162,PF13408, IPR025827,G3DSA:3.40.50.1390,PS51737,IPR006119,IPR038109, IPR011109,SSF53041,PF00239,PTHR30461,PS51736, Coil,cd00338
METIIKKAACYCRVSHEEQKLHGLSIEAQKEDLKQYCKRNNYKIYKFYIDEGLTAKNTKRQGLQNLLSDLDKFDIVLFTKLDRLSRNIIDANLLDQQFKSNNVCMKAIFEDDIDTSTADGKFTFNLKLSLAERELDKTSERIKDVFRYKIERNEVISGSVPKGYKIVDKKLAIDENTAWVVKKSFDLVEELMSARAAFIQINNVYNQPTSFRSFNKLLKNIIYTGTYKSKNYYKENYCEPIISLEQFSNVQRILKNNKQYVSNNRKETYIFSGLLKCAHCGYKIVGHYSNRSGKNVIKTYRCNRYSIYKDCDQKKSINEKKLEKVLLNCIVEEYKNYLYSFDVSSKKSSSTDISQNKAKIQKKIDKLRELYLNDLISLEDYKKDYAIFNQALEEIKNKEVAKVAPKDADKLLSILDNIEDIYYNLDATERKRFWTSFIDVISIDGNYNIDIKFL

SEQ ID NO: 8429 - protein, 454 aa, Unknown
  Description of Unknown: Integrase B8430 sequence
  PTHR30461:SF3,IPR036162,PS51737,IPR011109,PTHR30461, PS00397,PF00239,G3DSA:1.10.10.2600,IPR006119,SSF53041, cd00338,SM00857,IPR025827,IPR038109,PS51736, IPR006118,PF13408,G3DSA:3.40.50.1390,Coil
MECVAYLRVSTEKQAEEGNGLDSQKRDIENYCRKNQLIISDWYEDDGFTGSNMNRPALQRLINDCSKKKLKCVVAFKLDRLSRSMVDGIYLIERVFIPNGVDFRCVHDSVSYDSPMEQAYTQMMAVFAQLDKNTMLLRMRGGMLERVKQGYWMGGGNTPYCYRYSKEDGILVPIPERKEMALRAMNLYISGYSDVRIQKLIGFKSEFVTRQVLTSPVNIGMIPYKGKLYKGRHEPIFDIKVFELAQELRKTRKQSKSFCVNHENQLLTGLCYCGVCGCKMRYQKWTHGKHKIYCYSRDNGMSYLPNYNPNCSNSLEWAEDIEKQVEDEILKISLNLSSHKPKERESCLDILSKQLQKEKTKLKRLYTLYAEGNDTVLEMIKETESGIDELKLKIQNEMKNPDNSQKKEFVYDNIKKLADVWEHIDKQNKNRILKTIISKIIIVNGNIEIQLKKF

SEQ ID NO: 8430 - protein, 454 aa, Unknown
  Description of Unknown: Integrase B8431 sequence
  PTHR30461:SF3,IPR036162,PS51737,IPR011109,PTHR30461, PS00397,PF00239,G3DSA:1.10.10.2600,IPR006119,SSF53041, cd00338,SM00857,IPR025827,IPR038109,PS51736, IPR006118,PF13408,G3DSA:3.40.50.1390,Coil
MECVAYLRVSTEKQAEEGNGLDSQKRDIENYCRKNQLIISDWYEDDGFTGSNMNRPALQRLINDCSKKKLKCVVAFKLDRLSRSMVDGIYLIERVFIPNGVDFRCVHDSVSYDSPMEQAYTQMMAVFAQLDKNTMLLRMRGGMLERVKQGYWMGGGNTPYCYRYSKEDGILVPIPERKEMALRAMNLYISGYSDVRIQKLIGFKSEFVTRQVLTSPVNIGMIPYKGKLYKGRHEPIFDIKVFELAQELRKTRKQSKSFCVNHENQLLTGLCYCGVCGCKMRYQKWTHGKHKIYCYSRDNGMSYLPNYNPNCNNSLEWAEDIEKQVEDEILKISLNLSSHKPKERESCLDILSKQLQKEKTKLKRLYTLYAEGNDTVLEMIKETESGIDELKLKIQNEMKSPDNSQKKEFVYDNIKKLADVWEHIDKQNKNRILKTIISKIIIVNGNIEIQLKKF

SEQ ID NO: 8431 - protein, 454 aa, Unknown
  Description of Unknown: Integrase B8432 sequence
  PTHR30461:SF3,IPR036162,PS51737,IPR011109,PTHR30461, PS00397,PF00239,G3DSA:1.10.10.2600,IPR006119,SSF53041, cd00338,SM00857,IPR025827,IPR038109,PS51736, IPR006118,PF13408,G3DSA:3.40.50.1390,Coil
MECVAYLRVSTEKQAEEGYGLELQRISITDYCRKNELIISDWYIDDGYTGSNMDRPQLQRLIRDCSKKRIKCLVAFKLDRISRSMVDGIYMIERVFQPNGVDFRCVYDSVSYDSPMEQAYTQMMAVFAQLDKNTMMMRMRGGRLERVKKGYWYGGGNRPYCYDYSREKGILVPIPERAEQANRALDLFLQGYSDERIMKICGYSSELLVRHILTGVVNIGMIPYKGEVYKGLHEPIFDERKFELAQEYRKTRRKTKTACFSMETNLLTGLCYCGICGCKMRYQKWTNGNHKIYCYSHDRSLKKLPNHNPGCDNTLEWAKDIEKQVEEEILKISLNISSYQKTQKESELEITKKALEKNKAKLKRLYNFYAEGNDTIVDSIRETEDEINKQKEVIFELQKSEGNKQSKEIVYDKIKSLADVWPHIDKTSKNVILKTIISKIVIVKGNVEIQLKEF

SEQ ID NO: 8432 - protein, 454 aa, Unknown
  Description of Unknown: Integrase B8433 sequence
  PTHR30461:SF3,SM00857,G3DSA:1.10.10.2600,IPR036162,PF13408, IPR025827,G3DSA:3.40.50.1390,IPR006119,IPR038109,SSF53041, PTHR30461,Coil,PS51736,cd00338,PF00239
MECVAYMRVSTEKQAEEGNGLESQKRDIELYCRKNELIISDWYIDDGYTGANMNRPELQRLINDCGRKRVKCVVAFKLDRLSRSMVDGIYMIERVFQPNNVQFKCVHDSISYDSPMEQAYTQMMAVFAQLDKNTMMLRMRGGMLERVKQGYWMGGGNTPYCYTYSKEKGILIPITERAEQANKAMDLFIAGNSDVAIQKILGYKSEFVVRNILTGVVNIGMIPYKGNVYQGLHEPIFDKEKFEMAQQLRKTRRKTKSYCQNLTPNMLTGLCYCGVCGCKMRYQKWTNGVRKIYCCSRNKDLYYLPNFNHDCDNSIEWADKIEHIVESKMLKISVNLSKYKPKAKENKIDIMQSQLDKEKLKLKRLYELYADGNDTVLDMIKEHESKIKDLNDSIKEEQKSGNDSPKKQFVYESIKKLADVWDDIDKPAKNKILKTIIDKIVIVNGNVEIQLKNF

SEQ ID NO: 8433 - protein, 454 aa, Unknown
  Description of Unknown: Integrase B8434 sequence
  PTHR30461:SF3,IPR036162,PS51737,IPR011109,PTHR30461, PS00397,PF00239,G3DSA:1.10.10.2600,IPR006119,SSF53041, cd00338,SM00857,IPR025827,IPR038109, PS51736,IPR006118,PF13408,G3DSA:3.40.50.1390,Coil
MECVAYLRVSTEKQAEEGNGLDSQKRDIENYCRKNQLIISDWYEDDGFTGSNMNRPALQRLINDCSKKKLKCVVAFKLDRLSRSMVDGIYLIERVFIPNGVDFRCVHDSVSYDSPMEQAYTQMMAVFAQLDKNTMLLRMRGGMLERVKQGYWMGGGNTPYCYRYSKEDGILVPIPERKEMALRAMNLYISGYSDVRIQKLIGFKSEFVTRQVLTSPVNIGMIPYKGKLYKGRHEPIFDIKVFELAQELRKTRKQSKRFCVNHENQLLTGLCYCGVCGCKMRYQKWTHGKHKIYCYSRDNGMSYLPNYNPNCNNSLEWAEDIEKQVEDEILKISLNLSSHKPKERESCLDILSKQLQKEKTKLKRLYTLYAEGNDTVLEMIKETESGIDELKLKIQNEMKNPDNSQKKEFVYDNIKKLADVWEHIDKQNKNRILKTIISKIIIVNGNIEIQLKKF

SEQ ID NO: 8434 - protein, 454 aa, Unknown
  Description of Unknown: Integrase B8435 sequence
  PTHR30461:SF3,IPR036162,PS51737,IPR011109,PTHR30461, PS00397,PF00239,G3DSA:1.10.10.2600,IPR006119,SSF53041, cd00338,SM00857,IPR025827,IPR038109,PS51736, IPR006118,PF13408,G3DSA:3.40.50.1390,Coil
MECVAYLRVSTEKQAEEGNGLDSQKRDIENYCRKNQLIISDWYEDDGFTGSNMNRPALQRLINDCSKKKLKCVVAFKLDRLSRSMVDGIYLIERVFIPNGVDFRCVHDSVSYDSPMEQAYTQMMAVFAQLDKNTMLLRMRGGMLERVKQGYWMGGGNTPYCYRYSKEDGILVPIPERKEMALRAMNLYISGYSDVRIQKLIGFKSEFVTRQVLTSPVNIGMIPYKGKLYKGRHEPIFDIKVFELAQELRKTRKQSKSFCVNHENQLLTGLCYCGVCGCKMRYQKWTHGKHKIYCYSRDNGMSYLPNYNPNCSNSLEWAEDIEKQVEDEILKISLNLSSHKPKERESCLDILSKQLQKEKTKLKRLYTLYAEGNDTVLEMIKETESGIDELKLKIQNEMKSPDNSQKKEFVYDNIKKLADVWEHIDKQNKNRILKTIISKIIIVNGNIEIQLKKF

SEQ ID NO: 8435 - protein, 454 aa, Unknown
  Description of Unknown: Integrase B8436 sequence
  PTHR30461:SF3,IPR036162,PS51737,IPR011109,PTHR30461, PS00397,PF00239,G3DSA:1.10.10.2600,IPR006119,SSF53041, cd00338,SM00857,IPR025827,IPR038109,PS51736, IPR006118,PF13408,G3DSA:3.40.50.1390,Coil
MECVAYLRVSTEKQAEEGNGLDSQKRDIENYCRKNQLIISDWYEDDGFTGSNMNRPALQRLINDCSKKKLKCVVAFKLDRLSRSMVDGIYLIERVFIPNGVDFRCVHDSVSYDSPMEQAYTQMMAVFAQLDKNTMLLRMRGGMLERVKQGYWMGGGNTPYCYRYSKEDGILVPIPERKEMALRAMNLYISGYSDVRIQKLIGFKSEFVTRQVLTSPVNIGMIPYKGKLYRGRHEPIFDIKVFELAQELRKTRKQSKSFCVNHENQLLTGLCYCGVCGCKMRYQKWTHGKHKIYCYSRDNGMSYLPNYNPNCSNSLEWAEDIEKQVEDEILKISLNLSSHKPKERESCLDILSKQLQKEKTKLKRLYTLYAEGNDTVLEMIKETESGIDELKLKIQNEMKSPDNSQKKEFVYDNIKKLADVWEHIDKQNKNRILKTIISKIIIVNGNIEIQLKKF

SEQ ID NO: 8436 - protein, 454 aa, Unknown
  Description of Unknown: Integrase B8437 sequence
  PTHR30461:SF3,IPR036162,PS51737,IPR011109,PTHR30461, PS00397,PF00239,G3DSA:1.10.10.2600,IPR006119,SSF53041, cd00338,SM00857,IPR025827,IPR038109,PS51736, IPR006118,PF13408,G3DSA:3.40.50.1390,Coil
MECVAYLRVSTEKQAEEGNGLDSQRRDIENYCRKNELIIKNWYEDDGFTGSNMNRPGLQRLINDCTRKRIKCVVAFKLDRLSRSMVDGIYLIERIFIPNGVEFKCVHDSVSYDSPMEQAYTQMMAVFAQLDKNTMLLRMRGGMLERVKHGFWMGGGNLPYCYDYDKEQGILVPIPERTEQARQALDLYLSGYSDAKIRDILGYTSERVVRNILTSPVNIGMIPYKGSVYRGKHEPIFEMERFEVAQEMRKSRRQHKLQNINQPAHLLTGLCYCGVCGCKMRYQKWTHGKHKIYCCSRNAGCSHLPNYNPNCDNSLEWADDIEKQVEEQILKISLNLSSYKPKERETRLEILQKQYDKEKIKLKRLYSLYADGNDTVLEMIQESESKLSEIKEQIDRETENTEYTQKKEYVYEKIKRLADVWDHIDKPDKNKILKSIISKIVIVNGNVEIQLKRF

SEQ ID NO: 8437 - protein, 454 aa, Unknown
  Description of Unknown: Integrase B8438 sequence
  PTHR30461:SF3,IPR036162,PS51737,IPR011109,PTHR30461, PS00397,PF00239,G3DSA:1.10.10.2600,IPR006119,SSF53041, cd00338,SM00857,IPR025827,IPR038109,PS51736, IPR006118,PF13408,G3DSA:3.40.50.1390,Coil
MECVAYLRVSTEKQAEEGNGLGSQRRDIENYCRKNELIIKNWYEDDGFTGSNMNRPGLQRLINDCTRKRIKCVVAFKLDRLSRSMVDGIYLIERIFIPNGVEFKCVHDSVSYDSPMEQAYTQMMAVFAQLDKNTMLLRMRGGMLERVKQGFWMGGGNLPYCYDYDKEQGILVPVPERAEQARQALDLYLSGYSDAKIRDILGYTSERVVRNILTSPVNIGMIPYKGSVYRGKHEPIFEMERFEVAQEMRKSRRQHKLQNINQPAHLLTGLCYCGVCGCKMRYQKWTHGKHKIYCCSRNAGCSHLPNYNPNCDNSLEWADDIENQVEEQILKISLNLSSYKPKEKETRLEILQKQYDKEKIKLKRLYSLYADGNDTVLEMIQESESKLSEIKEQIDRETENTEYTQKKEYVYEKIKRLADVWDHIDKPDKNKILKSIISKIVIVNGNVEIQLKRF

SEQ ID NO: 8438 - protein, 454 aa, Unknown
  Description of Unknown: Integrase B8439 sequence
  PTHR30461:SF3,IPR036162,PS51737,IPR011109,PTHR30461, PS00397,PF00239,G3DSA:1.10.10.2600,IPR006119,SSF53041, cd00338,SM00857,IPR025827,IPR038109,PS51736, IPR006118,PF13408,G3DSA:3.40.50.1390,Coil
MECVAYLRVSTEKQAEEGNGLDSQKRDIENYCRKNQLIISDWYEDDGFTGSNMNRPALQRLINDCSKKKLKCVVAFKLDRLSRSMVDGIYLIERVFIPNGVDFRCVHDSVSYDSPMEQAYTQMMAVFAQLDKNTMLLRMRGGMLERVKQGYWMGGGNTPYCYRYSKEDGILVPIPERKEMALRAMNLYISGYSDVRIQKLIGFKSEFVTRQVLTSPVNIGMIPYKGKLYKGRHEPIFDIKVFELAQELRKTRKQSKSFCVNHENQLLTGLCYCGVCGCKMRYQKWTHGKHKIYCYSRDNGMSYLPNYNPNCNNSLEWAEDIEKQVEDKILKISLNLSSHKPKERESCLDILSKQLQKEKTKLKRLYTLYAEGNDTVLEMIKETESGIDELKLKIQNEMKNPDNSQKKEFVYDNIKKLADVWEHIDKQNKNRILKTIISKIIIVNGNIEIQLKKF

SEQ ID NO: 8439 - protein, 454 aa, Unknown
  Description of Unknown: Integrase B8440 sequence
  PTHR30461:SF3,IPR036162,PS51737,IPR011109,PTHR30461, PS00397,PF00239,G3DSA:1.10.10.2600,IPR006119,SSF53041, cd00338,SM00857,IPR025827,IPR038109,PS51736, IPR006118,PF13408,G3DSA:3.40.50.1390,Coil
MECVAYLRVSTEKQAEEGYGLDLQRISITDYCRKNELIISDWYIDDGYTGSNMDRPQLQRLIRDCSKKRIKCLVAFKLDRISRSMVDGIYLIERVFQPNGVDFRCVHDSVSYDSPMEQAYTQMMAVFAQLDKNTMMMRMCGGRLERVKKGYWYGGGNRPYCYDYSREKGILVPIPERAEQANRALDLFLQGYSDERIMKICGYSSELLVRHILTGVVNIGMIPYKGEVYKGLHEPIFDERKFELAQEYRKTRRKTKTACFSMETNLLTGLCYCGICGCKMRYQKWTNGNHKIYCYSHDRSLKKLPNHNPECDNTLEWAKDIEKQVEEEILKISLNISSYQKTQKESELEITKKALEKNKAKLKRLYNFYAEGNDTIVDSIRETENEINKQKEVIFELQKSEGNKQSKEIVYDKIKSLADVWPHIDKTSKNVILKTIISKIVIVKGNVEIQLKEF

SEQ ID NO: 8440 - protein, 454 aa, Unknown
  Description of Unknown: Integrase B8441 sequence
  SM00857,G3DSA:1.10.10.2600,IPR036162,PF13408,IPR025827, G3DSA:3.40.50.1390,IPR006119,IPR038109,SSF53041,PF00239, PTHR30461,PS51736,Coil,cd00338
MECVAYMRVSTEKQAEEGNGLESQKRDIELYCRKNELIISDWYIDDGYTGANMNRPELQRLINDCGRKRVKCVVAFKLDRLSRSMVDGIYMIERVFQPNNVQFKCVHDSISYDSPMEQAYTQMMAVFAQLDKNTMMLRMRGGMLERVKQGYWMGGGNTPYCYTYSKEKGILIPIQERAEQANKAMDLFIAGNSDVAIQRILGYTSELVVRSILTGVVNIGMIPYKGNIYQGLHEPIFDKDKFEMAQQIRKSRRSKKSYCQNLTPNMLTGLCYCGICGCKMRYQKWTNGVRKIYCCSRNKDLYYLPNFNNDCDNSIEWADNIENIVESEMLKISVNLSKYKPKEKENKIDIMQSQLDKEKSKLKRLYELYADGNDTVLDMIKDQESKVKNLDDSIKEEQKSGDNNPKKQFVYENIKKIADVWDDIDKPAKNKILKTIIDKIIIVNGNVEIQLKNF

SEQ ID NO: 8441 - protein, 454 aa, Unknown
  Description of Unknown: Integrase B8442 sequence
  PTHR30461:SF3,IPR036162,PS51737,IPR011109, PTHR30461,PS00397,PF00239,G3DSA:1.10.10.2600, IPR006119,SSF53041,cd00338,SM00857,IPR025827,IPR038109 ,PS51736,IPR006118,PF13408,G3DSA:3.40.50.1390,Coil
MECVAYLRVSTEKQAEEGNGLDSQRRDIENYCRKNELIIKNWYEDDGFTGSNMNRPGLQRLINDCTRKRIKCVVAFKLDRLSRSMVDGIYLIERIFIPNGVEFKCVHDSVSYDSPMEQAYTQMMAVFAQLDKNTMLLRMRGGMLERVKQGFWMGGGNLPYCYDYDRERGILIPIPERAEQARQALDLYLSGYSDAKIRDILGYTSEMVVRSILTSPVNIGMIPYKGSIYQGKHEPIFETERFKAAQEMRKSRRQHKLQSINHPAHLLTGLCYCGVCGCKMRYQKWTHGKHKIYCCSRNTGCSHLPNYNPNCDNSLEWADDIENQVEEQILKISLNLSSYKPKERETRLEILQKQYDKEKTKLKRLYSLYADGNDAVLEMIQESESKLSEIKEQIDRETENTEYTQKKEYVYEKIKKLADVWDHIDKPDKNKILKSIISKIVIVNGNVEIQLKRF

SEQ ID NO: 8442 - protein, 454 aa, Unknown
  Description of Unknown: Integrase B8443 sequence
  PTHR30461:SF3,IPR036162,PS51737,IPR011109,PTHR30461, PS00397,PF00239,G3DSA:1.10.10.2600,IPR006119,SSF53041, cd00338,SM00857,IPR025827,IPR038109,PS51736, IPR006118,PF13408,G3DSA:3.40.50.1390,Coil
MECVAYLRVSTEKQAEEGNGLDSQKRDIENYCRKNQLIISDWYEDDGFTGSNMNRPALQRLINDCSKKKLKCVVAFKLDRLSRSMVDGIYLIERVFIPNGVDFRCVHDSVSYDSPMEQAYTQMMAVFAQLDKNTMLLRMRGGMLERVKQGYWMGGGNTPYCYRYSKEDGILVPIPERKEMALRAMNLYISGYSDVRIQKLIGFKSEFVTRQVLTSPVNIGMIPYKGKLYKGRHEPIFDIKVFELAQELRKTRKQSKSFCVNHENQLLTGLCYCGVCGCKMRYQKWTHGKHKIYCYSRDNGMSYLPNYNPNCSNSLEWAEDIEKQVEDEILKISLNLSSHKPKERESCLDILSKQLQKEKTKLKRLYVLYAEGNDTVLEMIKETESGIDELKLKIQNEMKSPDNSQKKEFVYDNIKKLADVWEHIDKQNKNRILKTIISKIIIVNGNIEIQLKKF

SEQ ID NO: 8443 - protein, 454 aa, Unknown
  Description of Unknown: Integrase B8444 sequence
  PTHR30461:SF3,IPR036162,PS51737,IPR011109,PTHR30461, PS00397,PF00239,G3DSA:1.10.10.2600,IPR006119,SSF53041, cd00338,SM00857,IPR025827,IPR038109,PS51736, IPR006118,PF13408,G3DSA:3.40.50.1390,Coil
MECVAYLRVSTEKQAEEGNGLDSQKRDIENYCRKNQLIISDWYEDDGFTGSSMNRPALQRLINDCSKKKLKCVVAFKLDRLSRSMVDGIYLIERVFIPNGVDFRCVHDSVSYDSPMEQAYTQMMAVFAQLDKNTMLLRMRGGMLERVKQGYWMGGGNTPYCYRYSKEDGILVPIPERKEMALRAMNLYISGYSDVRIQKLIGFKSEFVTRQVLTSPVNIGMIPYKGKLYKGRHEPIFDIKVFELAQELRKTRKQSKSFCVNHENQLLTGLCYCGVCGCKMRYQKWTHGKHKIYCYSRDNGMSYLPNYNPNCNNSLEWAEDIEKQVEDKILKISLNLSSHKPKERESCLDILSKQLQKEKTKLKRLYTLYAEGNDTVLEMIKETESGIDELKLKIQNEMKNPDNSQKKEFVYDNIKKLADVWEHIDKQNKNRILKTIISKIIIVNGNIEIQLKKF

SEQ ID NO: 8444 - protein, 454 aa, Unknown
  Description of Unknown: Integrase B8445 sequence
  PTHR30461:SF3,cd00338,SM00857,G3DSA:1.10.10.2600,IPR036162, PF13408,IPR025827,PS51737,G3DSA:3.40.50.1390,IPR006119, IPR038109,IPR011109,SSF53041,PTHR30461,PS51736, Coil,PF00239
MECVAYMRVSTEKQAEEGNGLESQKRDIENYCKKNEYIITDYYIDDGYTGANMDRPELQRLISDCVAKRIKCVVAFKLDRLSRSMVDGIYLIERVFQPNSILFKCVHDSISYDSPMEQAYTQMMAVFAQLDKNTMLLRMRGGMLERVKQGYWMGGANTPYCYFYSKETGTLVPIPERKKQANEAIDLFLQGYSDAKICNMLGFKSEFVVRRLLTSKVNIGYIPYKGKIYKGRHEPIFDLDKFNLAQEVRKNRRTKKTTCINKEPNLLTGLCYCGVCGCAMRYQKWTHGKHKIYCMSRNKSMSYLPNYNSNCNNSLEWAVDIEKQVEEEIMKISLNLSSEKPVAKQSKIEILQSQIKKEENRRKRFFDLYADGNDDVLLSIKETNNTIKDLKEQLENEISNVNINKKKSIAYKNIKKIADVWDSIDKRDKNTILKSIIDKIVIVNGNIEIQLKNF

SEQ ID NO: 8445 - protein, 454 aa, Unknown
  Description of Unknown: Integrase B8446 sequence
  PTHR30461:SF3,SM00857,G3DSA:1.10.10.2600,IPR036162,PF13408, IPR025827,G3DSA:3.40.50.1390,PS51737,IPR006119,IPR038109, SSF53041,IPR011109,PF00239,PTHR30461,PS51736, Coil,cd00338
MNCVAYMRVSTEKQAEEGNGLDSQKRDIEIYCRKNELIISDWYIDDGYTGANTDRPALQRLITDCSKHRIKCIVAFKLDRLSRSMVDGIYLIERVFMPNQVEFKCVHDSVNYDSPMEQAYTQMMAVFAQLDKNTMLLRMRGGMLERVKKGYWMGGGNTPYCYRYDTESGILIPIPERAEQARQALEMFISGYSDEQIMKMFGYKSEFVVRRILTGVVNIGMIPYKGEVFQGLHDPIFDKNRFELAQEIRKSRRLTRTKCFDRETNLLTGLCYCGVCGCKMRYQKWTHGKHRIYCCSRNKDLNYIPNWSENCDNSLVWAIDIEKQVEKEILKISVNLSKSKPKEKKSKLEIMESQLDKEKVKLKRLYSLYADGNDTVLDMIKDLELKIDGMKLKIAEEAKSPLNTQKKEFVYENIKNLADMWGHIDKAKKNSVLKSIISKIVIVNNDIEIQLKNF

SEQ ID NO: 8446 - protein, 454 aa, Unknown
  Description of Unknown: Integrase B8447 sequence
  PTHR30461:SF3,IPR036162,PS51737,IPR011109,PTHR30461, PS00397,PF00239,G3DSA:1.10.10.2600,IPR006119,SSF53041, cd00338,SM00857,IPR025827,IPR038109,PS51736, IPR006118,PF13408,G3DSA:3.40.50.1390,Coil
MECVAYLRVSTEKQAEEGNGLDSQKRDIENYCRKNQLIISDWYEDDGFTGSNMNRPALQRLINDCSKKKLKCVVAFKLDRLSRSMVDGIYLIERVFIPNGVDFRCVHDSVSYDSPMEQAYTQMMAVFAQLDKNTMLLRMRGGMLERVKQGYWMGGGNTPYCYRYSKEDGILVPIPERKEMALRAMNLYISGYSDVRIQKLIGFKSEFVTRQVLTSPVNIGMIPYKGKLYRGRHEPIFDIKVFELAQELRKTRKQSKSFCVNHENQLLTGLCYCGVCGCKMRYQKWTHGKHKIYCYSRDNGMSYLPNYNPNCSNSLEWAEDIEKQVEDEILKISLNLSSHKPKERESCLDILSKQLQKEKTKLKRLYTLYAEGNDTVLEMIKETESGIDELKLKIQNEMKNPDNSQKKEFVYDNIKKLADVWEHIDKQNKNRILKTIISKIIIVNGNIEIQLKNF

SEQ ID NO: 8447 - protein, 454 aa, Unknown
  Description of Unknown: Integrase B8448 sequence
  PTHR30461:SF3,IPR036162,PS51737,IPR011109,PTHR30461, PS00397,PF00239,G3DSA:1.10.10.2600,IPR006119,SSF53041, cd00338,SM00857,IPR025827,IPR038109,PS51736, IPR006118,PF13408,G3DSA:3.40.50.1390,Coil
MECVAYLRVSTEKQAEEGNGLDSQKRDIENYCRKNQLIISDWYEDDGFTGSNMNRPALQRLINDCSKKKLKCVVAFKLDRLSRSMVDGIYLIERVFIPNGVDFRCVHDSVSYDSPMEQAYTQMMAVFAQLDKNTMLLRMRGGMLERVKQGYWMGGGNTPYCYRYSKEDGILVPIPERKEMALRAMNLYISGYSDVRIQKLIGFKSEFVTRQVLTSPVNIGMIPYKGKLYKGRHEPIFDIKVFELAQELRKTRKQSKSFCVNHENQLLTGLCYCGVCGCKMRYQKWTHGKHKIYCYSRDNGMSYLPNYNPNCCNSLEWAEDIEKQVEDEILKISLNLSSHKPKERESCLDILSKQLQKEKTKLKRLYTLYAEGNDTVLEMIKETESGIDELKLKIQNEMKNPDNSQKKEFVYDNIKKLADVWEHIDKQNKNRILKTIISKIIIVNGNIEIQLKKF

SEQ ID NO: 8448 - protein, 454 aa, Unknown
  Description of Unknown: Integrase B8449 sequence
  PTHR30461:SF3,IPR036162,PS51737,IPR011109,PTHR30461, PS00397,PF00239,G3DSA:1.10.10.2600,IPR006119,SSF53041, cd00338,SM00857,IPR025827,IPR038109,PS51736, IPR006118,PF13408,G3DSA:3.40.50.1390,Coil
MECVAYLRVSTEKQAEEGNGLDSQKRDIENYCRKNQLIISDWYEDDGFTGSNMNRPALQRLINDCSKKKLKCVVAFKLDRLSRSMVDGIYLIERVFIPNGVDFRCVHDSVSYDSPMEQAYTQMMAVFAQLDKNTMLLRMRGGMLERVKHGYWMGGGNTPYCYRYSKEDGILVPIPERKEMALRAMNLYISGYSDVRIQKLIGFKSEFVTRQVLTSPVNIGMIPYKGKLYKGRHEPIFDIKVFELAQELRKTRKQSKSFCVNHENQLLTGLCYCGVCGCKMRYQKWTHGKHKIYCYSRDNGMSYLPNYNPNCSNSLEWAEDIEKQVEDEILKISLNLSSHKPKERESCLDILSKQLQKEKTKLKRLYTLYAEGNDTVLEMIKETESGIDELKLKIQNEMKSPDNSQKKEFVYDNIKKLADVWEHIDKQNKNRILKTIISKIIIVNGNIEIQLKKF

SEQ ID NO: 8449 - protein, 454 aa, Unknown
  Description of Unknown: Integrase B8450 sequence
  PTHR30461:SF3,IPR036162,PS51737,IPR011109,PTHR30461, PS00397,PF00239,G3DSA:1.10.10.2600,IPR006119,SSF53041, cd00338,SM00857,IPR025827,IPR038109,PS51736, IPR006118,PF13408,G3DSA:3.40.50.1390,Coil
MECVAYLRVSTEKQAEEGNGLDSQKRDIENYCRKNQLIISDWYEDDGFTGSNMNRPALQRLINDCSKKKLKCVVAFKLDRLSRSMVDGIYLIERVFIPNGVDFRCVHDSVSYDSPMEQAYTQMMAVFAQLDKNTMLLRMRGGMLERVKQGYWMGGGNTPYCYRYSKEDGILVPIPERKEMALRAMNLYISGYSDVRIQKLIGFKSEFVTRQVLTSPVNIGMIPYKGKLYKGRHEPIFDIKVFELAQELRKTRKQSKSFCVNHENQLLTGLCYCGVCGCKMRYQKWTHGKHKIYCYSRDNGMSYLPNYNPNCSNSLEWAEDIEKQVEDEILKISLNLSSHKPKERESCLDILSKQFQKEKTKLKRLYTLYAEGNDTVLEMIKETESGIDELKLKIQNEMKNPDNSQKKEFVYDNIKKLADVWEHIDKQNKNRILKTIISKIIIVNGNIEIQLKKF

SEQ ID NO: 8450 - protein, 454 aa, Unknown
  Description of Unknown: Integrase B8451 sequence
  PTHR30461:SF3,IPR036162,PS51737,IPR011109,PTHR30461, PS00397,PF00239,G3DSA:1.10.10.2600,IPR006119,SSF53041, cd00338,SM00857,IPR025827,IPR038109,PS51736, IPR006118,PF13408,G3DSA:3.40.50.1390,Coil
MECVAYLRVSTEKQAEEGNGLDSQKRDIENYCRKNQLIISDWYEDDGFTGSNMNRPALQRLINDCSKKKLKCVVAFKLDRLSRSMVDGIYLIERVFIPNGVDFRCVHDSVSYDSPMEQAYTQMMAVFAQLDKNTMLLRMRGGMLERVKQGYWMGGGNTPYCYRYSKEDGILVPIPERKEMALRAMNLYISGYSDVRIQKLIGFKSEFVTRQVLTSPVNIGMIPYKGKLYRGRHEPIFDIKVFELAQELRKTRKQSKSFCVNHENQLLTGLCYCGVCGCKMRYQKWTHGKHKIYCYSRDNGMSYLPNYNPNCSNSLEWAEDIEKQVEDEILKISLNLSSHKPKERESCLDILSKQLQKEKTKLKRLYTLYAEGNDTVLEMIKETESGIDELKLKIQNEMKNPDNSQKKEFVYDNIKKLADVWEHIDKQNKNRILKTIISKIIIVNGNIEIQLKKF

SEQ ID NO: 8451 - protein, 454 aa, Unknown
  Description of Unknown: Integrase B8452 sequence
  PTHR30461:SF3,cd00338,SM00857,G3DSA:1.10.10.2600,IPR036162, PF13408,PS51737,IPR025827,G3DSA:3.40.50.1390,IPR006119, IPR038109,IPR011109,SSF53041,PTHR30461,PS51736, Coil,PF00239
MNCVAYMRVSTEKQAEEGNGLDSQKRDIEIYCRKNELIISDWYIDDGYTGANTDRPALQRLITDCSKHRIKCIVAFKLDRLSRSMVDGIYLIERVFMPNQVEFKCVHDSVSYDSPMEQAYTQMMAVFAQLDKNTMLLRMRGGMLERVKKGYWMGGGNTPYCYRYDTESGTLIPIPERAEQARQALEMFISGYSDEQIMKMFGYKSEFVVRRILTGVVNIGMIPYKGDVFQGLHDPIFDKNRFELAQEIRKSRRLTRTKCFDRETNLLTGLCYCGVCGCKMRYQKWTHGKHRIYCCSRNKDLNYIPNWSENCDNSLVWAIDIEKQVEKEILKISVNLSKSKPKEKKSKLEIMESQLDKEKVKLKRLYSLYADGNDTVLDMIKDLELKIDGMKMKIAEEAKSPLNTQKKEFVYENIKNLADMWGHIDKAKKNSVLKSIISKIVIVNNDIEIQLKNF

SEQ ID NO: 8452 - protein, 454 aa, Unknown
  Description of Unknown: Integrase B8453 sequence
  PTHR30461:SF3,SM00857,IPR006118,IPR036162,PF13408, IPR025827,G3DSA:3.40.50.1390,PS00397,IPR006119,SSF53041, PTHR30461,Coil,PS51736,cd00338,PF00239
MRDENLEGKRAALYIRVSTEEQALRGYSLEAQLADLEAFAKENFMVITDHYIDAGTTARKKLKNRKEFQRMLSDVRADRIDIILFIKLDRWFRNVADYYEVQKILDAHNVTWKCTQEFYDTTTANGRLNLNIKLSIAQDESDRTSERIKFVFENKVKNNEVISGSLHYGFCIKKENGKKVVGIDEQKMKIVGEAFDFFLSCNSMRRTCFYIYEKYGINWLPETFKRMIYDDMYAGIYKENEHYCPAAFSLDYLKKIRDRIPLQNFSRKNTYCYLFSGLVRCAMCGHAMTGNRHTRKKSVYAYYRCRQGHRLRGCTCTRGIREELIEQYLLDNLREEIKTQITEYAISKKNVQNPDGEKRKLKDKLKKLKDLYLNDLIDLSEYRKDYESYQAELKKLDSVKRPEMNTRRLQRLLNEDFVSAYEALDREHKRAFWRSIIKEIYINDKREIVRIVFL

SEQ ID NO: 8453 - protein, 454 aa, Unknown
  Description of Unknown: Integrase B8454 sequence
  PTHR30461:SF3,IPR036162,PS51737,IPR011109,PTHR30461, PS00397,PF00239,G3DSA:1.10.10.2600,IPR006119,SSF53041, cd00338,SM00857,IPR025827,IPR038109, PS51736,IPR006118,PF13408,G3DSA:3.40.50.1390,Coil
MECVAYLRVSTEKQAEEGNGLDSQKRDIENYCRKNQLIISDWYEDDGFTGSNMNRPALQRLINDCSKKKLKCVVAFKLDRLSRSMVDGIYLIERVFIPNGVDFRCVHDSVSYDSPMEQAYTQMMAVFAQLDKNTMLLRMRGGMLERVKQGYWMGGGNTPYCYRYSKEDGILVPIPERKEMALRAMNLYISGYSDVRIQKLIGFKSEFVTRQVLTSPVNIGMIPYKGKLYKGRHEPIFDIKVFELAQELRKTRKQSKSFCVNHENQLLTGLCYCGVCGCKMRYQKWTHGKHKIYCYSRDNGMSYLPNYNPNCSNSLEWAEDIEKQVEDEILKISLNLSSHKPKERESCLDILSKQLQKEKTKLKRLYALYAEGNDTVLEMIKETESGIDELKLKIQNEMKSPDNSQKKEFVYDNIKKLADVWEHIDKQNKNRILKTIISKIIIVNGNIEIQLKKF

SEQ ID NO: 8454 - protein, 454 aa, Unknown
  Description of Unknown: Integrase B8455 sequence
  PTHR30461:SF3,IPR036162,PS51737,IPR011109,PTHR30461, PS00397,PF00239,G3DSA:1.10.10.2600,IPR006119,SSF53041, cd00338,SM00857,IPR025827,IPR038109,PS51736, IPR006118,PF13408,G3DSA:3.40.50.1390,Coil
MECVAYLRVSTEKQAEEGYGLDLQRISITDYCRKNELIISDWYIDDGYTGSNMDRPQLQRLIRDCSKKRIKCLVAFKLDRISRSMVDGIYLIERVFQPNGVDFRCVHDSVSYDSPMEQAYTQMMAVFAQLDKNTMMMRMCGGRLERVKKGYWYGGGNRPYCYDYSREKGILVPIPERAEQANRALDLFLQGYSDERIMKICGYSSELLVRHILTGVVNIGMIPYKGEVYKGLHEPIFDERKFELAQEYRKTRRKTKTACFSMETNLLTGLCYCGICGCKMRYQKWTNGNHKIYCYSRDKGLDKLPNYNPECDNTLEWAKDIEKQVEEEILNISLNISSYQKTQKESELEITKKALEKNKAKLKRLYNFYAEGNDTIVDSIRETENEINKQKEVIFELQKSEVNKQSKEIVYDKIKSLADVWPHIDKTSKNVILKTIISKIVIVKGNVEIQLKEF

SEQ ID NO: 8455 - protein, 454 aa, Unknown
  Description of Unknown: Integrase B8456 sequence
  PTHR30461:SF3,IPR036162,PS51737,IPR011109,PTHR30461, PS00397,PF00239,G3DSA:1.10.10.2600,IPR006119,SSF53041, cd00338,SM00857,IPR025827,IPR038109,PS51736, IPR006118,PF13408,G3DSA:3.40.50.1390,Coil
MECVAYLRVSTEKQAEEGNGLDSQRRDIENYCRKNELIIKNWYEDDGFTGSNMNRPGLQRLINDCTKKRVKCVVAFKLDRLSRSMVDGIYLIERIFIPNGVEFKCVHDSVSYDSPMEQAYTQMMAVFAQLDKNTMLLRMRGGMLERVKQGFWMGGGNLPYCYNYDREQGILVPIPERAEQARQALDLYLSGYSDDKIRDILGYTSERVVRSILTSPVNIGMIPYKGNVYQGKHELIFEKEKFEAAQEMRKSRRQHKLQNINQPAHLLTGLCYCGVCGCKMRYQKWTHGKHKIYCCSRNAGCSHLPNYNPNCDNSLEWADDIENQVEEQILKISLNLSSYKPKEKETRLEILQKQYDKEKTKLKRLYSLYADGNDTVLEMIQESESKLSEIKEQIDRETENTEYTQKKEYVYEKIKRLADVWDHIDKPDKNKILKSIISKIVIVNGNVEIQLKRF

SEQ ID NO: 8456 - protein, 454 aa, Unknown
  Description of Unknown: Integrase B8457 sequence
  PTHR30461:SF3,SM00857,G3DSA:1.10.10.2600,IPR036162,PF13408, IPR025827,G3DSA:3.40.50.1390,IPR006119,IPR038109,SSF53041, PF00239,PTHR30461,PS51736,Coil,cd00338
MECVAYMRVSTEKQAVEGNGLDSQKRDIENYCRKNELVITDWYIDDGYTGTNMDRPELQRLVNDCGRKRIGCVVAFKLDRLSRNMIDGIYLIEKVFQKYNVVFKCVHDSVSYDSPMEQAYTQMIAVFAQLDKNTMMLRMRGGMLERVKQGYWMGGGNLPYCYSYSKEQGILMPIPERKEQANKALDLFISGYSDEKIYKTLGYTSEMVVRSILTGIVNVGMIPYKGNVYQGKHEPIFDKARFELAQELRKSRRKTKATCLTKKPNLLTGLCYCGVCGCAMRYQKWGSDKHKIYCMSRNKSMSYLPNHNPDCNNSLEWADDIEKQVEEEMLKISLDLSSYKPKEKATKLEIMQSQLEKEQIKLKRLYSLYADGNDTVLEMIKELEKQIKDMKDNITAESKNAVNVQKKEFVYENIKKLADIWDNIDKKQKNMILKTIIDKIVIVNGNIEIQLKNF

SEQ ID NO: 8457 - protein, 454 aa, Unknown
  Description of Unknown: Integrase B8458 sequence
  PTHR30461:SF3,cd00338,SM00857,G3DSA:1.10.10.2600,IPR036162, PF13408,IPR025827,G3DSA:3.40.50.1390,PS51737,IPR006119, IPR038109,SSF53041,IPR011109,PTHR30461, PS51736,Coil,PF00239
MECVAYMRVSTEKQAEEGNGLESQKRDIELYCRKNELIILDWYIDDGYTGANMNRPELQRLINDCSRKRVKCVVAFKLDRLSRSMVDGIYMIERVFQPNNIIFKCVHDSVSYDSPMEQAYTQMMAVFAQLDKNTMLLRMRGGMLERVKQGYWMGGGNTPYCYSYSKEKGILIPIPERADQANRAMDLFIAGNSDLAIQRILGYSTERVVRSILTGVVNIGKIPYKGNVYQGMHEPIFDEERFELAQQIRKTRRKTKSYCQNLTPNMLTGLCYCGVCGCKMRYQKWTNGVKKIYCCSRSKDLYYLPNYNHDCNNSIEWADNIESIVESEMLKISVNLSKYKPREKENKIDIMLSQLEKEKLKLKRLYELYADGNDTVLEMIKSQETKIIELKKSIKEEKKSDVSTPKKQFVYENIKKLADGGEDIDKPSKNKILKTIIDKIIIVNGNVEIQLKNF

SEQ ID NO: 8458 - protein, 454 aa, Unknown
  Description of Unknown: Integrase B8459 sequence
  PTHR30461:SF3,IPR036162,PS51737,IPR011109,PTHR30461, PS00397,PF00239,G3DSA:1.10.10.2600,IPR006119,SSF53041, cd00338,SM00857,IPR025827,IPR038109,PS51736, IPR006118,PF13408,G3DSA:3.40.50.1390,Coil
MECVAYLRVSTEKQAEEGNGLDSQKRDIENYCRKNQLIISDWYEDDGFTGSNMNRPALQRLINDCSKKKLKCVVAFKLDRLSRSMVDGIYLIERVFIPNGVDFRCVHDSVSYDSPMEQAYTQMMAVFAQLDKNTMLLRMRGGMLERVKQGYWMGGGNTPYCYRYSKEDGILVPIPERKEMALRAMNLYISGYSDVRIQKLIGFKSEFVTRQVLTSPVNIGMIPYKGKLYRGRHEPIFDIKVFELAQELRKTRKQSKSFCVNHENQLLTGLCYCGVCGCKMRYQKWTHGKHKIYCYSRDNGMSYLPNYNPNCSNSLEWAEDIEKQVEDEILKISLNLSSHKPKERESCLDILSKQLQKEKTKLKRLYTLYAEGNDTVLEMIKETESGIDELKLKIQNEMKNPDNSQKKEFVYDNIKKLADVWEHIDKQSKNRILKTIISKIIIVNGNIEIQLKKF

SEQ ID NO: 8459 - protein, 454 aa, Unknown
  Description of Unknown: Integrase B8460 sequence
  PTHR30461:SF3,SM00857,G3DSA:1.10.10.2600,IPR036162,PF13408, IPR025827,PS51737,G3DSA:3.40.50.1390,IPR006119,IPR038109, SSF53041,IPR011109,PF00239,PTHR30461,PS51736, Coil,cd00338
MECVAYMRVSTEKQAEEGNGLESQKRDIELYCRKNELIISDWYIDDGYTGANMNRPELQRLINDCGRKRVKCVVAFKLDRLSRSMVDGIYMIERVFQPNNVQFKCVHDSISYDSPMEQAYTQMMAVFAQLDKNTMMLRMRGGMLERVKQGYWMGGGNKPYCYTYSKEKGILIPIPERAEQANKAMDLFIAGNSDAAIQRILGYTSELVVRSILTGVVNIGMIPYKGNIYQGLHEPIFDKEKFEMAQQIRKSRRSKKSYCQNLTPNMLTGLCYCGVCGCKMRYQKWTNGVRKIYCCSRNKDLYYLPNFNNDCNNSIEWADNIENIVESEMLKISVNLSKYKPKEKENKIDIMQSQLDKEKSKLKRLYELYADGNDTVLDMIKDQESKIKNLDDSIKEEQKSGDNNPKKQFVYENIKKLADVWDDIDKPAKNKILKTIIDKIIIVNGNVEIQLKNF

SEQ ID NO: 8460 - protein, 454 aa, Unknown
  Description of Unknown: Integrase B8461 sequence
  PTHR30461:SF3,cd00338,SM00857,G3DSA:1.10.10.2600,IPR036162, PF13408,IPR025827,G3DSA:3.40.50.1390,IPR006119,IPR038109, SSF53041,PTHR30461,PS51736,Coil,PF00239
MECVAYMRVSTEKQAVEGNGLDSQKRDIENYCRKNELVITDWYIDDGYTGTNMDRPELQRLVNDCGRKRIGCVVAFKLDRLSRNMIDGIYLIEKVFQKYNVVFKCVHDSVSYDSPMEQAYTQMMAVFAQLDKNTMMLRMRGGMLERVKQGYWMGGGNLPYCYSYSKEQGILMPIPERKEQANKALDLFISGYSDEKIYKTLGYTSEMVVRSILTGIVNVGMIPYKGNVYQGKHEPIFDKARFELAQELRKSRRKTKATCLTKEPNLLTGLCYCGVCGCAMRYQKWGSDKHKIYCMSRNKSMSYLPNHNPDCNNSLEWADDIEKQVEEEMLKISLDLSSYKPKEKATKLEIMQSQLEKEQIKLKRLYSLYADGNDTVLEMIKELEKQIKDMKDNITAESKNAVNVQKKEFVYENIKKLADIWDNIDKKQKNMILKTIIDKIVIVNGNIEIQLKNF

SEQ ID NO: 8461 - protein, 454 aa, Unknown
  Description of Unknown: Integrase B8462 sequence
  PTHR30461:SF3,IPR036162,PS51737,IPR011109,PTHR30461, PS00397,PF00239,G3DSA:1.10.10.2600,IPR006119,SSF53041, cd00338,SM00857,IPR025827,IPR038109, PS51736,IPR006118,PF13408,G3DSA:3.40.50.1390,Coil
MECVAYLRVSTEKQAEEGNGLDSQKRDIENYCRKNQLIISDWYEDDGFTGSNMNRPALQRLINDCSKKKLKCVVAFKLDRLSRSMVDGIYLIERVFIPNGVDFRCVHDSVSYDSPMEQAYTQMMAVFAQLDKNTMLLRMRGGMLERVKQGYWMGGGNTPYCYRYSKEDGILVPIPERKEMALRAMNLYISGYSDVRIQKLIGFKSEFVTRQVLTSPVNIGMIPYKGKLYKGRHEPIFDIKVFELAQELRKTRKQSKSFCVNHENQLLTGLCYCGVCGCKMRYQKWTHGKHKIYCYSRDNGMSYLPNYNPNCNNSLEWAEDIEKQVEDEILKISLNLSSHKPKERESCLDILSKQLQKEKTKLKRLYTLYAEGNDTVLEMIKETESGIDELKLKIQNEMKNPDNSQKKEFVYDNIKKLADVWEHIDKQSKNRILKTIISKIIIVNGNIEIQLKKF

SEQ ID NO: 8462 - protein, 454 aa, Unknown
  Description of Unknown: Integrase B8463 sequence
  PTHR30461:SF3,IPR036162,PS51737,IPR011109,PTHR30461, PS00397,PF00239,G3DSA:1.10.10.2600,IPR006119,SSF53041, cd00338,SM00857,IPR025827,IPR038109,PS51736, IPR006118,PF13408,G3DSA:3.40.50.1390,Coil
MECVAYLRVSTEKQAEEGNGLDSQKRDIENYCRKNQLIISEWYEDDGFTGSNMNRPALQRLINDCSKKKLKCVVAFKLDRLSRSMVDGIYLIERVFIPNGVDFRCVHDSVSYDSPMEQAYTQMMAVFAQLDKNTMLLRMRGGMLERVKQGYWMGGGNTPYCYRYSKEDGILVPIPERKEMALRAMNLYISGYSDVRIQKLIGFKSEFVTRQVLTSPVNIGMIPYKGKLYKGRHEPIFDIKVFELAQELRKTRKQSKSFCVNHENQLLTGLCYCGVCGCKMRYQKWTHGKHKIYCYSRDNGMSYLPNYNPNCSNSLEWAEDIEKQVEDEILKISLNLSSHKPKERESCLDILSKQLQKEKTKLKRLYVLYAEGNDTVLEMIKETESGIDELKLKIQNEMKSPDNSQKKEFVYDNIKKLADVWEHIDKQNKNRILKTIISKIIIVNGNIEIQLKKF

SEQ ID NO: 8463 - protein, 454 aa, Unknown
  Description of Unknown: Integrase B8464 sequence
  PTHR30461:SF3,IPR036162,PS51737,IPR011109,PTHR30461, PS00397,PF00239,G3DSA:1.10.10.2600,IPR006119,SSF53041, cd00338,SM00857,IPR025827,IPR038109,PS51736, IPR006118,PF13408,G3DSA:3.40.50.1390,Coil
MECVAYLRVSTEKQAEEGNGLDSQKRDIENYCRKNQLIISDWYEDDGFTGSNMNRPALQRLINDCSKKKLKCVVAFKLDRLSRSMVDGIYLIERVFIPNGVDFRCVHDSVSYDSPMEQAYTQMMAVFAQLDKNTMLLRMRGGMLERVKQGYWMGGGNTPYCYRYSKEDGILVPIPERKEMALRAMNLYISGYSDVRIQKLIGFKSEFVTRQVLTSPVNIGMIPYKGKLYKGRHEPIFDIKVFELAQELRKTRKQGKSFCVNHENQLLTGLCYCGVCGCKMRYQKWTHGKHKIYCYSRDNGMSYLPNYNPNCNNSLEWAEDIEKQVEDEILKISLNLSSHKPKERESCLDILSKQLQKEKTKLKRLYTLYAEGNDTVLEMIKETESGIDELKLKIQNEMKNPDNSQKKEFVYDNIKKLADVWEHIDKQNKNRILKTIISKIIIVNGNIEIQLKKF

SEQ ID NO: 8464 - protein, 454 aa, Unknown
  Description of Unknown: Integrase B8465 sequence
  PTHR30461:SF3,SM00857,IPR006118,IPR036162,PF13408, IPR025827,G3DSA:3.40.50.1390,IPR006119,SSF53041,PTHR30461, PS00397,PS51736,cd00338,PF00239
MKDENLEGKIAALYIRVSTEEQALRGYSLEAQLADLEAFAKEHFMIVVDRYIDAGTTARKKLKNRKEFQRMLSDVRADRIDIILFIKLDRWFRNVADYYEVQKILDAHNVTWKCTQEFYDTTTANGRLNLNIKLSIAQDESDRTSERIKFVFENKVKNNEVISGSLHYGFCIKKENGKKVVGIDEQKMKIVGEAFDFFLSCNSMRRTCFYIYEKYGVNWLPETFKRMIYDDMYAGIYRENEHYCPAAFSLDYLKKIRDRIPLQNFSRKNTYCYLFSGLIRCAMCGHAMTGNRHTRKKSVYAYYRCRQGHRLRGCTCTRGIREELIEQYLLDNLRKEIKTQITEYTISKKNVQNPGGEKRKLKDKLKKLKDLYLNDLIDLCEYRKDYESYQAELKKLDSVKRPEMNTRRLQRLLNEDFVSAYETLDREHKRAFWRSIIKEIYINDKREIVRIVFL

SEQ ID NO: 8465 - protein, 454 aa, Unknown
  Description of Unknown: Integrase B8466 sequence
  PTHR30461:SF3,SM00857,G3DSA:1.10.10.2600,IPR036162, PF13408,IPR025827,PS51737,G3DSA:3.40.50.1390, IPR006119,IPR038109,SSF53041,IPR011109, PF00239,PTHR30461,PS51736,Coil,cd00338
MSVVLRAALYPRVSTSVVLRAALYPRVSTEEQKKFGLSIHDQQNDLEEYAKAHNMKVVGVFQDAGFSARKKIEKRPAMLQLLEAVKRDEVDIILVTKLDRWFRNIGEYYKVQEILEAHNVSWKTIYEDYDTSTAAGRLKINIMLSVAQDEADRASERIKKVLDAKKDRNEVCTGHLPKGYKIEGKFAVIDKEAEPVIRRYFSTFLETGSITKAMDAVPELKLKYQTASQMLDNTGYMGDWHGIKLPPYLTPQEFQRVQDLRTRVTRKSPYNRTYIFSGLIVCGECGRRMTGHPSPRPSGACSYSYYCQGSAQRKGCNNGNFTVEWKIEDYLLSTIDEQIQIKLQAKPRQEPKVNQDVQLKALQKKLSKLSELYIDDMISKSDYSKKYAELTAQMDEITQVKSQSRAPEEIATLFSAGWQEIYKQLNKENKQAFWKLKIKEIRLYKDRRIEFDFL

SEQ ID NO: 8466 - protein, 454 aa, Unknown
  Description of Unknown: Integrase B8467 sequence
  PTHR30461:SF3,IPR036162,PS51737,IPR011109,PTHR30461, PS00397,PF00239,G3DSA:1.10.10.2600,IPR006119,SSF53041, cd00338,SM00857,IPR025827,IPR038109,PS51736, IPR006118,PF13408,G3DSA:3.40.50.1390,Coil
MECVAYLRVSTEKQAEEGNGLDSQKRDIENYCRKNQLIISDWYEDDGFTGSNMNRPALQRLINDCSKKKLKCVVAFKLDRLSRSMVDGIYLIERVFIPNGVDFRCVHDSVSYDSPMEQAYTQMMAVFAQLDKNTMLLRMRGGMLERVKQGYWMGGGNTPYCYRYSKEDGILVPIPERKEMALRAMNLYISGYSDVRIQKLIGFKSEFVTRQVLTSPVNIGMIPYKGKLYKGRHEPIFDIKVFELAQELRKTRKQSKSFCVNHENQLLTGLCYCGVCGCKMRYQKWTHGKHKIYCYSRDNGMSYLPNYNPNCSNSLEWAEDIEKQVEDEILKISLNLSSHKPKERESCLDILSKQLQKEKTKLKRLYTLYAEGNDTVLEMIKETESGIDELKLKIQNEMKSPDNSQKKEFVYDNIKKLADVWELIDKQNKNRILKTIISKIIIVNGNIEIQLKKF

SEQ ID NO: 8467 - protein, 454 aa, Unknown
  Description of Unknown: Integrase B8468 sequence
  PTHR30461:SF3,cd00338,SM00857,G3DSA:1.10.10.2600,IPR036162, PF13408,PS51737,G3DSA:3.40.50.1390,IPR025827,IPR006119, IPR038109,IPR011109,SSF53041,PTHR30461,PS51736, Coil,PF00239
MNCVAYMRVSTEKQAEEGNGLDSQKRDIEIYCRKNELIISDWYIDDGYTGANTNRPALQRLITDCSKHRIKCIVAFKLDRLSRSMVDGIYLIERVFMPNQVEFKCVHDSVSYDSPMEQAYTQMMAVFAQLDKNTMLLRMRGGMLERVKKGYWMGGGNTPYCYRYDTESGILIPIPERAEQARQALEMFISGYSDEQIMKIFGYKSEFVVRRILTGVVNIGMIPYKGEVFQGLHDPIFDKNRFELAQEIRKSRRLTRTKCFDRETNLLTGLCYCGVCGCKMRYQKWTHGKHRIYCCSRNKDLNYIPNWSENCDNSLVWAIDIENQVEKEILKISVNLSKSKPKEKKSKLEIMESQLDKEKVKLKRLYSLYADGNDTVLDMIKDLELKIDGMKLKIAEEAKSPLNTQKKEFVYENIKNLADMWGHIDKAKKNSVLKSIISKIVIVNNDIEIQLKNF

SEQ ID NO: 8468 - protein, 454 aa, Unknown
  Description of Unknown: Integrase B8469 sequence
  PTHR30461:SF3,IPR036162,PS51737,IPR011109,PTHR30461, PS00397,PF00239,G3DSA:1.10.10.2600,IPR006119,SSF53041, cd00338,SM00857,IPR025827,IPR038109,PS51736, IPR006118,PF13408,G3DSA:3.40.50.1390,Coil
MECVAYLRVSTEKQAEEGNGLDSQRRDIENYCRKNELIIKNWYEDDGFTGSNMNRPGLQRLINDCTRKRIKCVVAFKLDRLSRSMVDGIYLIERIFIPNGVEFKCVHDSVSYDSPMEQAYTQMMAVFAQLDKNTMLLRMRGGMLERVKQGFWMGGGNLPYCYDYDREQGILVPIPERAEQARQALNLYLSGYSDAKIRDILGYTSERVVRNILTSPVNIGMIPYKGSVYRGKHEPIFEMERFEVAQEMRKSRRQHKLQNINQPAHLLTGLCYCGVCGCKMRYQKWTHGKYKIYCCSRNAGCSHLPNYNPNCDNSLEWADDIEKQVEEQILKISLNLSSYKPKEKETRLEILQKQYDKEKIKLKRLYSLYADGNDTVLEMIQESESKLSEIKEQIDREAENTEYTQKKEYVYEKIKRLADVWDHIDKPDKNKILKSIISKIVIVNGNVEIQLKRF

SEQ ID NO: 8469 - protein, 454 aa, Unknown
  Description of Unknown: Integrase B8470 sequence
  PTHR30461:SF3,IPR036162,PS51737,IPR011109,PTHR30461, PS00397,PF00239,G3DSA:1.10.10.2600,IPR006119,SSF53041, cd00338,SM00857,IPR025827,IPR038109,PS51736, IPR006118,PF13408,G3DSA:3.40.50.1390,Coil
MAKTKRCAIYIRVSTEEQFINGLSLQAQQKALTEYATTNNYTIVDVYADEGISARKSMKHRKELLRLLDDVKHNKIDMILVTKLDRWFRNIKDYNVTEEILQAHNCNWKTIFENYDSSTANGQMVINIMLSVNQAECDRTSERIKAVFDYKRSQGKVVSGMAAPYGYKVVDGYIQKDLEVAPIIEDAYDYYFKCFSQRKVLEYIQDKYGDKAPTVYKLDKLFKNEKYAGKFQDNLNFCEPYISPSQFERIQMISQSKTYTRQHNHTFIFSSLLKCPVCKSSLSGFIKKQTLKDGTVAEYYRYRCSNKLSYHSGGPCITESIVEKYMIENVFQNLKKEYIDFNVKRKAVKKKKDNSKKITEELERLNSMYQKGRISEAFYDSEYERLQAELNKTNDIATITVIERYSELLGKFSGNWLSLYNKLDNQHKNTFWKSIIQEIYFDENNKLSGFKFLI

SEQ ID NO: 8470 - protein, 454 aa, Unknown
  Description of Unknown: Integrase B8471 sequence
  PTHR30461:SF3,IPR036162,PS51737,IPR011109,PTHR30461, PS00397,PF00239,G3DSA:1.10.10.2600,IPR006119,SSF53041, cd00338,SM00857,IPR025827,IPR038109,PS51736, IPR006118,PF13408,G3DSA:3.40.50.1390,Coil
MECVAYLRVSTEKQAEEGNGLDSQKRDIENYCRKNQLIISDWYEDDGFTGSNMNRPALQRLINDCSKKKLKCVVAFKLDRLSRSMVDGIYLIERVFIPNGVDFRCVHDSVSYDSPMEQAYTQMMAVFAQLDKNTMLLRMRGGMLERVKQGYWMGGGNTPYCYRYSKEDGILVPIPERKEMALRAMNLYISGYSDVRIHKLIGFKSEFVTRQVLTSPVNIGMIPYKGKLYKGRHEPIFDIKVFELAQELRKTRKQSKSFCVNHENQLLTGLCYCGVCGCKMRYQKWTHGKHKIYCYSRDNGMSYLPNYNPNCNNSLEWAEDIEKQVEDEILKISLNLSSHKPKERESCLDILSKQLQKEKTKLKRLYTLYAEGNDTVLEMIKETESGIDELKLKIQNEMKSPDNSQKKEFVYDNIKKLADVWEHIDKQNKNRILKTIISKIIIVNGNIEIQLKKF

SEQ ID NO: 8471 - protein, 454 aa, Unknown
  Description of Unknown: Integrase B8472 sequence
  PTHR30461:SF3,SM00857,G3DSA:1.10.10.2600,IPR036162,PF13408, IPR025827,G3DSA:3.40.50.1390,IPR006119,IPR038109,SSF53041, PF00239,PTHR30461,PS51736,Coil,cd00338
MECVAYMRVSTEKQAEEGNGLESQKRDIELYCRKNELIISDWYIDDGYTGANMNRPELQRLINDCGRKRVKCVVAFKLDRLSRSMVDGIYMIERVFQPNNVQFKCVHDSISYDSPMEQAYTQMMAVFAQLDKNTMMLRMRGGMLERVKQGYWMGGGNTPYCYTYSKEKGILIPIPERAEQANKAMDLFIAGNSDVSIQIILGYTSELVVRSILTSVVNIGMIPYKGNIYQGLHEPIFDKQKFEMAQQIRKSRRSKKSYCQNLTPNMLTGLCYCGVCGCKMRYQKWTNGVRKIYCCSRNKDLYYLPNFNKDCDNSIEWADNIENIVESEMLKISVNLSKYKPKEKENKIDIMQSQLDKEKSKLKRLYELYADGNDTVLDMIKDQESKIKNLDDSIKEEQKSGDNNPKKQFVYENIKKLADVWDGIDKPAKNKILKTIIDKIVIVNGNVEIQLKNF

SEQ ID NO: 8472 - protein, 454 aa, Unknown
  Description of Unknown: Integrase B8473 sequence
  PTHR30461:SF3,IPR036162,PS51737,IPR011109,PTHR30461, PS00397,PF00239,G3DSA:1.10.10.2600,IPR006119,SSF53041, cd00338,SM00857,IPR025827,IPR038109, PS51736,IPR006118,PF13408,G3DSA:3.40.50.1390,Coil
MECVAYLRVSTEKQAEEGNGLDSQRRDIENYCRKNELIIKNWYEDDGFTGSNMNRPGLQRLINDCTRKRIKCVVAFKLDRLSRSMVDGIYLIERIFIPNGVEFKCVHDSVSYDSPMEQAYTQMMAVFAQLDKNTMLLRMRGGMLERVKQGFWMGGGNLPYCYDYDREKGILVPIPERAEQARQALNLYLSGYSDAKIRDILGYTSERVVRNILTSPVNIGMIPYKGSVYRGKHEPIFEMERFEVAQEMRKSRRQHKLQNINQPAHLLTGLCYCGVCGCKMRYQKWTHGKHKIYCCSRNAGCSHLPNYNPNCDNSLEWADDIEKQVEEQILKISLNLSSYKPKERETRLEILQKQYDKEKTKLKRLYSLYADGNDTVLEMIQESESKLSEIKEQIDRETENTEYTQKKEYVYEKIKRLADVWDHIDKPDKNKILKSIISKIVIVNGNVEIQLKRF

SEQ ID NO: 8473 - protein, 454 aa, Unknown
  Description of Unknown: Integrase B8474 sequence
  PTHR30461:SF3,IPR036162,PS51737,IPR011109,PTHR30461, PS00397,PF00239,G3DSA:1.10.10.2600,IPR006119,SSF53041, cd00338,SM00857,IPR025827,IPR038109,PS51736, IPR006118,PF13408,G3DSA:3.40.50.1390,Coil
MECVAYLRVSTEKQAEEGNGLDSQRRDIENYCRKNELIIKNWYEDDGFTGSNMNRPGLQRLINDCTRKRVKCVVAFKLDRLSRSMVDGIYLIERIFIPNGVEFKCVHDSVSYDSPMEQAYTQMMAVFAQLDKNTMLLRMRGGMLERVKQGFWMGGGNLPYCYNYDREQGILVPIPERAEQARQALDLYLSGYSDAKIRDVLGYTSERVVRNILTSPVNIGMIPYKGSVYRGKHEPIFEMERFEVAQEMRKSRRQHKLQNINQPAHLLTGLCYCGVCGCKMRYQKWTHGKHKIYCCSRNAGCSHLPNYNPNCDNSLEWADDIEKQVEEQILKISLNLSSYKPKEKETRLEILQKQYDKEKTKLKRLYSLYADGNDTVLEMIQESESKLSETKEQLDRETENTEYTQKKKYVYEKIKRLADVWDRIDKPDKNKILKSIISKIVIVNGNVEIQLKRF

SEQ ID NO: 8474 - protein, 454 aa, Unknown
  Description of Unknown: Integrase B8475 sequence
  PTHR30461:SF3,SM00857,G3DSA:1.10.10.2600,IPR036162,PF13408, PS51737,G3DSA:3.40.50.1390,IPR025827,IPR006119,IPR038109, SSF53041,IPR011109,PF00239,PTHR30461,PS51736, Coil,cd00338
MECVAYMRVSTEKQAEEGNGLESQKRDIELYCRKNELIISDWYIDDGYTGANMNRPELQRLINDCDRKRVKCVVAFKLDRLSRSMVDGIYMIERVFQPNNVQFKCVHDSISYDSPMEQAYTQMMAVFAQLDKNTMMLRMRGGMLERVKQGYWMGGGNTPYCYTYSKEKGILIPIPERAEQANKAIDLFIAGNSDVAIQRILGYTSELVVRSILTGVVNIGMIPYKGNIYQGLHEPIFDKDKFEMAQQIRKSRRSKKSYCQNLTPNMLTGLCYCGVCGCKMRYQKWTNGVRKIYCCSRNKDLYYLPNFNNDCDNSIEWADNIENIVESEMLKISVNLSKYKPKEKENKIDIMQSQLDKEKSKLKRLYELYADGNDTVLDMIKDQESKVKNLDDSIKEEQKSGDNNPKKQFVYENIKKLADVWDDIDKPAKNKILKTIIDKIIIVNGNVEIQLKNF

SEQ ID NO: 8475 - protein, 454 aa, Unknown
  Description of Unknown: Integrase B8476 sequence
  PTHR30461:SF3,IPR036162,PS51737,IPR011109,PTHR30461, PS00397,PF00239,G3DSA:1.10.10.2600,IPR006119,SSF53041, cd00338,SM00857,IPR025827,IPR038109,PS51736, IPR006118,PF13408,G3DSA:3.40.50.1390,Coil
MECVAYLRVSTEKQAEEGNGLDSQKRDIENYCRKNQLIISDWYEDDGFTGSNMNRPALQRLINDCSKKKLKCVVAFKLDRLSRSMVDGIYLIERVFIPNGVDFRCVHDSVSYDSPMEQAYTQMMAVFAQLDKNTMLLRMRGGMLERVKQGYWMGGGNTPYCYRYSKEDGILVPIPERKEMALRAMNLYISGYSDVRIQKLIGFKSEFVTRQVLTSPVNIGMIPYKGKLYKGRHEPIFDIKVFELAQELRKTRKQSKSFCVNHENQLLTGLCYCGVCGCKMRYQKWTHGKHKIYCYSRDNGMSYLPNYNPNCSNSLEWAEDIEKQVEDEILKISLNLSSHKPKERESCLDILSKQLQKEKTKLKRLYTLYAEGNDTVLEMIKETESGIDELKIKIQNEMKNPDNSQKKEFVYDNIKKLADVWEHIDKQNKNRILKTIISKIIIVNGNIEIQLKKF

SEQ ID NO: 8476 - protein, 454 aa, Unknown
  Description of Unknown: Integrase B8477 sequence
  PTHR30461:SF3,cd00338,SM00857,G3DSA:1.10.10.2600,IPR036162, PF13408,IPR025827,G3DSA:3.40.50.1390,PS51737,IPR006119, IPR038109,SSF53041,IPR011109,PTHR30461,PS51736, Coil,PF00239
MNCVAYMRVSTEKQAEEGNGLDSQKRDIEIYCRKNELIISDWYIDDGYTGANTDRPALQRLITDCSKHRIKCIVAFKLDRLSRSMVDGIYLIERVFMPNQVEFKCVHDSVNYDSPMEQAYTQMMAVFAQLDKNTMLLRMRGGMLERVKKGYWMGGGNTPYCYRYDTESGILIPIPERAEQARQALEMFISGYSDEQIMKMFGYKSEFVVRRILTGVVNIGMIPYKGEVFKGLHDPIFDKNRFELAQEIRKSRRLTRTKCFDRETNLLTGLCYCGVCGCKMRYQKWTHGKHRIYCCSRNKDLNYIPNWSENCDNSLVWAIDIEKQVEKEILKISVNLSKSKPKEKKSKLEIMESQLDKEKVKLKRLYSLYADGNDTVLDMIKDLELKIDGMKLKIAEEAKNPLNTQKKEFVYENIKNLADMWGHIDKAKKNSVLKSIISKIVIVNNDIEIQLKNF

SEQ ID NO: 8477 - protein, 454 aa, Unknown
  Description of Unknown: Integrase B8478 sequence
  PTHR30461:SF3,IPR036162,PS51737,IPR011109,PTHR30461, PS00397,PF00239,G3DSA:1.10.10.2600,IPR006119,SSF53041, cd00338,SM00857,IPR025827,IPR038109,PS51736, IPR006118,PF13408,G3DSA:3.40.50.1390,Coil
MECVAYLRVSTEKQAEEGNGLDSQRRDIENYCRKNELIIKNWYEDDGFTGSNMNRPGLQRLINDCTRKRIKCVVAFKLDRLSRSMVDGIYLIERIFIPNGVEFKCVHDSVSYDSPMEQAYTQMMAVFAQLDKNTMLLRMRGGMLERVKQGFWMGGGNLPYCYDYDREQGILVPIPERAEQARQALNLYLSGYSDAKIRDILGYTSERVVRNILTSPVNIGMIPYKGSVYRGKHEPIFEMERFEVAQEMRKSRRQHKLQNINQPAHLLTGLCYCGVCGCKMRYQKWTHGKHKIYCCSRNAGCSHLPNYNPNCDNSLEWADDIENQVEEQILKISLNLSSYKPKEKETRLEILQKQYDKEKIKLKRLYSLYADGNDTVLEMIQESESKLSEIKEQIDRETENTEYTQKKEYVYEKIKRLADVWDHIDKPDKNKILKSIISKIVIVNGNVEIQLKRF

SEQ ID NO: 8478 - protein, 454 aa, Unknown
  Description of Unknown: Integrase B8479 sequence
  PTHR30461:SF3,cd00338,SM00857,G3DSA:1.10.10.2600,IPR036162, PF13408,PS51737,G3DSA:3.40.50.1390,IPR025827,IPR006119, IPR038109,SSF53041,IPR011109,PTHR30461,PS51736, Coil,PF00239
MECVAYMRVSTEKQAEEGNGLESQKRDIELYCRKNELIISDWYIDDGYTGANMNRPELQRLINDCGRKRVKCVVAFKLDRLSRSMVDGIYMIERVFQPNNVQFKCVHDSISYDSPMEQAYTQMMAVFAQLDKNTMMLRMRGGMLERVKQGYWMGGGNTPYCYTYSKEKGILIPIPERAEQANKAIDLFIAGNSDVAIQRILGYTSELVVRSILTGVVNIGMIPYKGNIYQGLHEPIFDKDKFEMAQQIRKSRRSKKSYCQNLTPNMLTGLCYCGVCGCKMRYQKWTNGVRKIYCCSRNKDLYYLPNFNNDCDNSIEWADNIENIVESEMLKISVNLSKYNPKEKENKIDIMQSQLDKEKSKLKRLYELYADGNDTVLDMIKDQESKVKNLDDSIKEEQKSGDNNTKKQFVYENIKKLADVWDDIDKPAKNKILKTIIDKIIIVNGNVEIQLKNF

SEQ ID NO: 8479 - protein, 454 aa, Unknown
  Description of Unknown: Integrase B8480 sequence
  PTHR30461:SF3,IPR036162,PS51737,IPR011109,PTHR30461, PS00397,PF00239,G3DSA:1.10.10.2600,IPR006119,SSF53041, cd00338,SM00857,IPR025827,IPR038109,PS51736, IPR006118,PF13408,G3DSA:3.40.50.1390,Coil
MECVAYLRVSTEKQAEEGYGLDLQRISITDYCRKNELIISDWYIDDGYTGSNMDRPQLQRLIRDCSKKRIKCLVAFKLDRISRSMVDGIYMIERVFQPNGVDFRCVHDSVSYDSPMEQAYTQMMAVFAQLDKNTMMMRMRGGRLERVKKGYWYGGGNRPYCYDYSKEKGILIPIPERAEQANRALDLFLQGYSDERIMKICGYSSELLVRHILTGTVNIGMIPYKGEIYKGLHEPIFDKRKFELAQEYRKSRRKAKTACFSIETNLLTGLCYCGVCGCKMRYQKWTNGNHKIYCYSRDKGLDKLPNYNPECDNTLEWAKDIEKQVEEEILKISLNISSYQKTQKESELEITKKALEKNKAKLKRLYNFYAEGNDTIVDSIRETENEINKQKEVIFELQKSEANKQSKEIVYDKIKSLADVWPHIDKTSKNVILKTIISKIVIVKGNVEIQLKEF

SEQ ID NO: 8480 - protein, 454 aa, Unknown
  Description of Unknown: Integrase B8481 sequence
  PTHR30461:SF3,IPR036162,PS51737,IPR011109,PTHR30461, PS00397,PF00239,G3DSA:1.10.10.2600,IPR006119,SSF53041, cd00338,SM00857,IPR025827,IPR038109,PS51736, IPR006118,PF13408,G3DSA:3.40.50.1390,Coil
MECVAYLRVSTEKQAEEGNGLDSQRRDIENYCRKNELIIKNWYEDDGFTGSNMNRPGLQRLINDCTRKRIKCVVAFKLDRLSRSMVDGIYLIERIFIPNGVEFKCVHDSVSYDSPMEQAYTQMMAVFAQLDKNTMLLRMRGGMLERVKQGFWMGGGNLPYCYDYDKEQGILVPIPERTEQARQALDLYLSGYSDAKIRDILGYTSERVVRNILTSPVNIGMIPYKGSVYRGKHEPIFEMERFEVAQEMRKSRRQHKLQNINQPAHLLTGLCYCGVCGCKMRYQKWTHGKHKIYCCSRNAGCSHLPNYNPNCDNSLEWADDIEKQVEEQILKISLNLSSYKPKERETRLEILQKQYDKEKTKLKRLYSLYADGNDTVLEMIQESESKLSEIKEQVDRETENTEYTQKKEYVYEKIKRLADVWDHIDKPDKNKILKSIISKIVIVNGNVEIQLKRF

SEQ ID NO: 8481 - protein, 454 aa, Unknown
  Description of Unknown: Integrase B8482 sequence
  PTHR30461:SF3,SM00857,G3DSA:1.10.10.2600,IPR036162,PF13408, IPR025827,G3DSA:3.40.50.1390,IPR006119,IPR038109,SSF53041, PF00239,PTHR30461,PS51736,Coil,cd00338
MECVAYMRVSTEKQAEEGNGLESQKRDIELYCRKNELIISDWYIDDGYTGANMNRPELQRLINDCGRKRVKCVVAFKLDRLSRSMVDGIYMIERVFQPNNVQFKCVHDSISYDSPMEQAYTQMMAVFAQLDKNTMMLRMRGGMLERVKQGYWMGGGNTPYCYTYSKEKGILIPIPERAEQANKAMDLFIAGNSDVSIQRILGYTSELVVRSILTSVVNIGMIPYKGNIYQGLHEPIFDKQKFEMAQQIRKSRRSKKSYCQNLTPNMLTGLCYCGVCGCKMRYQKWTNGVRKIYCCSRNKDLYYLPNFNKDCDNSIEWADNIENIVESEMLKISVNLSKYKPKEKENKIDIMQSQLDKEKSKLKRLYELYADGNDTVLDMIKDQESKIKNLDDSIKEEQKSGDNNPKKQFVYENIKKLADVWDGIDKPAKNKILKTIIDKIVIVNGNVEIQLKNF

SEQ ID NO: 8482 - protein, 454 aa, Unknown
  Description of Unknown: Integrase B8483 sequence
  PTHR30461:SF3,IPR036162,PS51737,IPR011109,PTHR30461, PS00397,PF00239,G3DSA:1.10.10.2600,IPR006119,SSF53041, cd00338,SM00857,IPR025827,IPR038109, PS51736,IPR006118,PF13408,G3DSA:3.40.50.1390,Coil
MECVAYLRVSTEKQAEEGNGLDSQKRDIENYCRKNQLIISDWYEDDGFTGSNMNRPALQRLINDCSKKKLKCVVAFKLDRLSRSMVDGIYLIERVFIPNGVDFRCVHDSVSYDSPMEQAYTQMMAVFAQLDKNTMLLRMRGGMLERVKQGYWMGGGNTPYCYRYSKEDGILVPIPERKEMALRAMNLYISGYSDVRIQKLIGFKSEFVTRQVLTSPVNIGMIPYKGNLYKGRHEPIFDIKVFELAQELRKTRKQSKRFCVNHENQLLTGLCYCGVCGCKMRYQKWTHGKHKIYCYSRDNGMSYLPNYNPNCNNSLEWAEDIEKQVEDEILKISLNLSSHKPKERESCLDILSKQLQKEKTKLKRLYTLYADGNDTVLEMIKETESGIDELKLKIQNEMKNPDNSQKKEFVYDNIKKLADVWEHIDKQSKNRILKTIISKIIIVNGNIEIQLKKF

SEQ ID NO: 8483 - protein, 454 aa, Unknown
  Description of Unknown: Integrase B8484 sequence
  PTHR30461:SF3,cd00338,SM00857,G3DSA:1.10.10.2600,IPR036162, PF13408,PS51737,IPR025827,G3DSA:3.40.50.1390,IPR006119, IPR038109,PF07508,IPR011109,SSF53041,PTHR30461, PS51736,Coil,PF00239
MDEYIDRAISGKTDNRPSFQRLIKDSEKGHFDAVIMYTLDRFARNRYDSAIYKAKLKRNGVKIFYAKQPMPDTPEGIILESVLEGYAEYYSENLARSIKRGMKENALHGIAMGSPVLGYKIGNDRQYEIDPVGAKAVRTIFTMYAEGKSKTQIVNWLNEHGFKTSRGNAFNKNSLSRILRNDKYIGVYRYDDVVLEDAVPPIIDKTLFDKVQATFRHNYTARAKAKAIEDYLLTTKVFCGHCGEPMVGESGTSKTGKVHRYYKCVNRKRKHNCEKKVEKKEWLERTVVEFTVQQVLTDENIEKISTRAMELIEKELQDTSVLIGLQERLKETNKRIKNLMSAIEQGIITPTTKERLEELEEERRDLEGQIAREEMKKPLLTKERIMYWLESFKRGDIEDVEYQRRIIDTLVNSVYVYDDGDKGRKLVLTFNISGNNTLTISSSDIERTAPFWNI

SEQ ID NO: 8484 - protein, 454 aa, Unknown
  Description of Unknown: Integrase B8485 sequence
  PTHR30461:SF3,IPR036162,PS51737,IPR011109,PTHR30461, PS00397,PF00239,G3DSA:1.10.10.2600,IPR006119,SSF53041, cd00338,SM00857,IPR025827,IPR038109,PS51736, IPR006118,PF13408,G3DSA:3.40.50.1390,Coil
MECVAYLRVSTEKQAEEGNGLESQKRDIENYCRKNQLIISDWYEDDGFTGSNMNRPALQRLINDCSKKKIKCVVAFKLDRLSRSMVDGIYLIERVFIPNGVDFRCVHDSVSYDSPMEQAYTQMMAVFAQLDKNTMLLRMRGGMLERVKQGYWMGGGNTPYCYRYSKEDGILVPIPERKEMALRAMNLYISGYSDIRIQKLIGFKSEFVTRQVLTSPVNIGMIPYKGKLYKGRHEPIFDIKVFELAQELRKTRKQSKSFCVNHENQLLTGLCYCGVCGCKMRYQKWTHGKHKIYCYSRDNGMSYLPNYNPNCSNSLEWAEDIEKQVEDEILKISLNLSSHKPKERESCLDILSKQLQKEKTKLKRLYTLYAEGNDTVLEMIKETESGIDELKLKIQNEMKSPDNSQKKEFVYDNIKKLADVWEHIDKQNKNRILKTIISKIIIVNGNIEIQLKKF

SEQ ID NO: 8485 - protein, 454 aa, Unknown
  Description of Unknown: Integrase B8486 sequence
  PTHR30461:SF3,IPR036162,PS51737,IPR011109,PTHR30461, PS00397,PF00239,G3DSA:1.10.10.2600,IPR006119,SSF53041, cd00338,SM00857,IPR025827,IPR038109,PS51736, IPR006118,PF13408,G3DSA:3.40.50.1390,PF07508,Coil
MECVAYLRVSTEKQAEEGNGLDSQRRDIENYCRKNELIIKNWYEDDGFTGSNMNRPGLQRLINDCTRKRVKCVVAFKLDRLSRSMVDGIYLIERIFIPNGVEFKCVHDSVSYDSPMEQAYTQMMAVFAQLDKNTMLLRMRGGMLERVKQGFWMGGGNLPYCYDYDREQGILIPIPERAEQARQALDLYLSGYSDAKIRDILGYTSEMVVRSILTSPVNIGMIPYKGSIYQGKHEPIFETERFEAAQEMRKSRRQHKIQSINHPAHLLTGLCYCGVCGCKMRYQKWTHGKHKIYCCSRNTGCSHLPNYNPNCDNSLEWADDIENQVEEQILKISINLSSYKPKERETRLEILQKQYDKEKTKLKRLYSLYADGNDAVLEMIQESESKLSEIKEQIDRETENAEYTQKKEYVYEKIKRLADVWDHIDKPDKNKILKSIISKIVIVNGNVEIQLKRF

SEQ ID NO: 8486 - protein, 454 aa, Unknown
  Description of Unknown: Integrase B8487 sequence
  PTHR30461:SF3,IPR036162,PS51737,IPR011109,PTHR30461, PS00397,PF00239,G3DSA:1.10.10.2600,IPR006119,SSF53041, cd00338,SM00857,IPR025827,IPR038109,PS51736, IPR006118,PF13408,G3DSA:3.40.50.1390,Coil
MECVAYLRVSTEKQAEEGYGLDLQRISITDYCRKNELIISDWYIDDGYTGSNMDRPQLQRLIRDCSKKRIKCLVAFKLDRISRSMVDGIYMIERVFQPNGVDFRCVHDSVSYDSPMEQAYTQMMAVFAQLDKNTMMMRMRGGRLERVKKGYWYGGGNRPYCYDYSKEKGILIPIPERAEQANRALDLFLQGYSDERIMKICGYSSELLVRHILTGTVNIGMIPYKGEIYKGLHEPIFDKRKFELAQEYRKSRRKAKTACFSIETNLLTGLCYCGVCGCKMRYQKWTNGNHKIYCYSRDKGLDKLPNYNPECDNTLEWAKDIEKQVEEEILKISLNISSYQKTQKESELEITKKALEKNKAKLKRLYNFYAEGNDTIVDSIRETENEINKQKEVIFELQKSEANKKSKEIVYDKIKSLADVWPHIDKTSKNVILKTIISKIVIVKGNVEIQLKEF

SEQ ID NO: 8487 - protein, 454 aa, Unknown
  Description of Unknown: Integrase B8488 sequence
  PTHR30461:SF3,IPR036162,PS51737,IPR011109,PTHR30461, PS00397,PF00239,G3DSA:1.10.10.2600,IPR006119,SSF53041, cd00338,SM00857,IPR025827,IPR038109,PS51736, IPR006118,PF13408,G3DSA:3.40.50.1390,Coil
MECVAYLRVSTEKQAEEGYGLDLQRISITDYCRKNELIISDWYIDDGYTGSNMDRPQLQRLIRDCSKKRIKCLVAFKLDRISRSMVDGIYMIERVFQPNGVDFRCVHDSVSYDSPMEQAYTQMMAVFAQLDKNTMMMRMRGGRLERVKKGYWYGGGNRPYCYDYSKEKGILIPIPERAEQANRALDLFLQGYSDERIMKICGYSSELLVRHILTGTVNIGMIPYKGEIYKGLHEPIFDKRKFELAQEYRKSRRKAKTACFSIETNLLTGLCYCGVCGCKMRYQKWTNGNHKIYCYSRDKGLDKLPNYNPECDNTLEWAKDIEKQVEKEILKISLNISSYQKTQKESELEITKKAMEKNKAKLKRLYNFYAEGNDTIVDSIRETENEINKQKEVIFELQKSEGNKQSKEIVYDKIKSLADVWPHIDKTSKNVILKTIISKIVIVKGNVEIQLKEF

SEQ ID NO: 8488 - protein, 454 aa, Unknown
  Description of Unknown: Integrase B8489 sequence
  PTHR30461:SF3,IPR036162,PS51737,IPR011109,PTHR30461, PS00397,PF00239,G3DSA:1.10.10.2600,IPR006119,SSF53041, SM00857,IPR025827,IPR038109,PS51736,cd03768, IPR006118,PF13408,G3DSA:3.40.50.1390,PF07508
MIKTGCYVRVSTENQLENYSIDEQTERLKAYCKAKDMPIIKFYTDGGYSGGNLNRPALRQLISDINDGLINTVVVYKLDRLSRSQKDTLTLIEDEFLSHNVDFISVCENFDTSTAFGRAAIGILSVFAQLEKDQITERFTMGRIGRAKEGYYHGGAIAPTGYDYVDGNLIVNEYEAMQVRELYERFAKGYSMYNCWLYMQSHYTTKYGSWKSETLVQKILSNDIYIGKVKFKGVSYEGKHTPIIPDELFYKVQRMLKERRSSSNSRSPFRSNTLLSGLIYCGNCGARYHGEHGNYACYSRTKGTKKYVIDPTCKNKKWKIEELDQIVINYVCSLQFDSKDLVSARPQKKIEFGGRIREIDRQINRLLDLYQVGSIPIEIISQKVDALTQEKDGLIAAETSSHTALQIDDMIKARDKFAYLIQNGTLEEKRSCLSVIIKKIVITNENVNILLNEL

SEQ ID NO: 8489 - protein, 454 aa, Unknown
  Description of Unknown: Integrase B8490 sequence
  PTHR30461:SF3,cd00338,SM00857,G3DSA:1.10.10.2600,IPR036162, PF13408,PS51737,G3DSA:3.40.50.1390,IPR025827,IPR006119, IPR038109,IPR011109,SSF53041,PTHR30461,PS51736, Coil,PF00239
MECVVYMRVSTEKQAEEGNGLESQKRDIENYCKKNEYAITDYYIDDGYTGANMDRPELQRLISDCVAKRIKCVVAFKLDRLSRSMVDGIYMIERVFQPNSILFKCVHDSISYDSPMEQAYTQMMAVFAQLDKNTMLLRMRGGMLERVKQGYWMGGGNTPYCYSYSKETGTLVPIPERKKQANEAIDLFLQGYSDVKIRDMLGFKSEMVVRSLLASPVNIGYIPYKGKIYKGKHEPIFELDKFNLAQEVRKNRRKKKTTCINKEPNLLTGLCYCGVCGCSMRYQKWTHGKHKIYCCSRDKSMSYLPNYDANCNNSLEWAVDIEKQVEEEIMKISLNLSSEKPVAKQSKIEILQSQIKKEENRRKRFFNLYADGNDDALLSIKEINNTIKSLKEQLETERSNTNLNRKKSVTYKNIKKIADVWDSIDKRDKNTILKSIIDKIVIVNGNIEIQLKNF

SEQ ID NO: 8490 - protein, 454 aa, Unknown
  Description of Unknown: Integrase B8491 sequence
  PTHR30461:SF3,IPR036162,PS51737,IPR011109,PTHR30461, PS00397,PF00239,G3DSA:1.10.10.2600,IPR006119,SSF53041, cd00338,SM00857,IPR025827,IPR038109,PS51736, IPR006118,PF13408,G3DSA:3.40.50.1390,Coil
MECVAYLRVSTEKQAEEGYGLDLQRISITDYCRKNELIISDWYIDDGYTGSNMDRPQLQRLIRDCSKKRIKCLVAFKLDRISRSMVDGIYMIERVFQPNGVDFRCVYDSVSYDSPMEQAYTQMMAVFAQLDKNTMMMRMRGGRLERVKKGYWYGGGNRPYCYDYSREKGILVPIPERAEQANRALDLFLQGYSDERIMKICGYSSELLVRHILTGVVNIGMIPYKGEIYKGLHEPIFDERKFELAQEYRKTRRKTKTACFSMETNLLTGLCYCGICGCKMRYQKWTNGKHKIYCYSHDRSLKKLPNHNPECDNTLEWAKDIEKQVEEEILKISLNISSYQKTQKESELEITKKALEKNKAKLKRLYNFYAEGNDTIVDSIRETEDEINKQKEVIFELQKSEGNKQSKEIVYDKIKSLADVWPHIDKTSKNVILKTIISKIVIVKGNVEIQLKEF

SEQ ID NO: 8491 - protein, 454 aa, Unknown
  Description of Unknown: Integrase B8492 sequence
  PTHR30461:SF3,IPR036162,PS51737,IPR011109,PTHR30461, PS00397,PF00239,G3DSA:1.10.10.2600,IPR006119,SSF53041, cd00338,SM00857,IPR025827,IPR038109,PS51736, IPR006118,PF13408,G3DSA:3.40.50.1390,Coil
MECVAYLRVSTEKQAEEGNGLDSQKRDIENYCRKNQLIISDWYEDDGFTGSNMNRPALQRLINDCSKKKLKCVVAFKLDRLSRSMVDGIYLIERVFIPNGVDFRCVHDSVSYDSPMEQAYTQMMAVFAQLDKNTMLLRMRGGMLERVKQGYWMGGGNTPYCYRYSKEDGILVPIPERKEMALRAMNLYISGYSDVRIQKLIGFKSEFVTRQVLTSPVNIGMIPYKGKLYKGRHEPIFDIKIFELAQELRKTRKQSKSFCVNHENQLLTGLCYCGVCGCKMRYQKWTHGKHKIYCYSRDNGMSYLPNYNPNCNNSLEWAEDIEKQVEDEILKISLNLSSHKPKERESCLDILSKQLQKEKTKLKRLYTLYAEGNDTVLEMIKETESGIDELKLKIQNEMKNPDNSQKKEFVYDNIKKLADVWEHIDKQSKNRILKTIISKIIIVNGNIEIQLKKF

SEQ ID NO: 8492 - protein, 453 aa, Unknown
  Description of Unknown: Integrase B8493 sequence
  PTHR30461:SF3,SM00857,G3DSA:1.10.10.2600,IPR036162,PF13408, IPR025827,G3DSA:3.40.50.1390,IPR006119,IPR038109,SSF53041, PTHR30461,Coil,PS51736,cd00338,PF00239
MECVAYMRVSTEKQAVEGNGLDSQKRDIENYCRKNELIISDWYIDDGYTGTNMDRPELQRLVNDCSRKRVSCVVAFKLDRLSRNMIDGIYLIEKVFQKYNVMFKCVHDSVSYNSPMEQAYTQMMAVFAQLDKNTMMLRMRGGMLERVKQGYWFGGGNLPYCYSYSKEQGILIPIPERAEQARKALELFISGYSDAKIKEICGFKSEIVTRSILTSVVNVGMIPYKGKVYRGRHEAVFDKDRFELALELRRSRRSAKVSCITEPNLLTGLCYCGVCGCKMRYQKWGSEKHKIYCCSRDKKLSYLPNYNANCDNSLEWADEIEKQIEEEILKISLDLSSYKPKEKATKLEIMQSQLEKEQIKLKRLYNLYADGNNTVLEMIKELETQIKEMKSNIATESKNAINTQKKEFVYENIKKLADIWDNIDKKQKNMILKTIIDKIIIVNGNIEIQLKNF

SEQ ID NO: 8493 - protein, 453 aa, Unknown
  Description of Unknown: Integrase B8494 sequence
  SM00857,IPR006118,G3DSA:1.10.10.2600,IPR036162, PS51737,G3DSA:3.40.50.1390,Coil,IPR006119, IPR038109,SSF53041,IPR011109,PTHR30461, PS00397,PS51736,cd00338,PF00239
MECVAYIRVSTERQVEEGYGLESQKRDIEEYCKKNEMLITDWYIDAGLSGMDMSKRVELQRLISDVSKINNIVVYKLDRLARDSVDALYMIEKLFTPKGVRVNSVHDFARYETPQDKFQTHIMAAVAEYDRNTMLLRMRGGMLERVKNGYWMGGGNTPYCYQYDKNLGYLVPIPERAEQANRAMDLFIEGMSDVKIQRLLGYKSEFVVRNILTGVVNIGYIPYKGGTYKGLHESIFEHDKFYLAQELRKSRHKQHIYSFTEPHLLTGLCYCKTCGCKMRYQKITGMGVHKIYCCSHDKYLDYLPNYNADCDNPGAWASDIEKAFEHEILDISINLSQYKPKAKETKLQILTNQLEKQKSKLKRLYTLYAEGNDMVLDMIKTLETEIRETTEKISTERNNGQHEQKKEFVYENIKKLADIWDGISKSQKNSILKTIIDKVIVGKDDIEIQLKNF

SEQ ID NO: 8494 - protein, 453 aa, Unknown
  Description of Unknown: Integrase B8495 sequence
  SM00857,G3DSA:1.10.10.2600,IPR036162,PF13408,IPR025827, G3DSA:3.40.50.1390,PS51737,IPR006119,IPR038109,IPR011109, SSF53041,PTHR30461,Coil,PS51736,cd00338, PF00239
MECVAYMRVSTEKQAEEGNGLDSQKRDIELFCRKNELVVADWYVDDGYTGANMDRPELQRLINDCIKKRVKCVVAFKLDRLSRSMIDGLYIIERVFQPNHVLFKCVHDSVSYDSPMEQAYTQMMAVFAQLDKNTMMLRMRGGMLERIKQGYWIGGANTPYCYNYSKEKGILIPIPERKEQANRALDMFISGYSDLYIKESLGFHSEVLVRNVLTGVVNIGMIPYKGNIYQGLHEPIFDKERFELAQEIRKSRRKNKTACHTDANLLTGLCYCGVCGCKMRYQKWTHGKHKIYCCSRDKAMKYLPNFNPDCNNSLEWASDIEKQVESEILKISLNLSECKPIEKQSKLEIMQSQFEKEQVKLKRLYVLYSDGNDTVLEMIKNTEKSISEMKVKITEEEKNERNSQKKEVVYENIKKLADVWAHIDKKEKNNILKSIISRIVIVNGDVEIQLKNF

SEQ ID NO: 8495 - protein, 453 aa, Unknown
  Description of Unknown: Integrase B8496 sequence
  PTHR30461:SF3,SM00857,G3DSA:1.10.10.2600,IPR036162,PF13408, IPR025827,G3DSA:3.40.50.1390,PS51737,IPR006119,IPR038109, SSF53041,IPR011109,PTHR30461,Coil,PS51736, cd00338,PF00239
MECVAYMRVSTEKQAEEGNGLDSQKRDIELFCRKNELVVSDWYVDDGYTGANMDRPELQRLINDCIKKRVKCVVAFKLDRLSRSMIDGLYIIERVFQPNQVLFKCVHDSVSYDSPMEQAYTQMMAVFAQLDKNTMMLRMRGGMLERIKQGYWIGGANTPYCYNYSKEKGILVPIPERKEQANRALDMFIGGYSDLYIKESLGFHSEVLVRNVLTGVVNIGMIPYKGNVYQGLHEPIFDKERFELAQEIRKSRRKNKTACHTDANLLTGLCYCGVCGCKMRYQKWTHGKHKIYCCSRDKAMKYLPNFNPDCNNSLEWAADIEKQVESEILKISLNLSECKPIEKQSKLEIMQSQFEKEQVKLKRLYVLYSDGNDTVLEMIKNTEKSISEMKVKITEEEKNERNSQKKEVVYENIKKLADVWAHIDKKEKNNILKSIISRIVIVNGDVEIQLKNF

SEQ ID NO: 8496 - protein, 453 aa, Unknown
  Description of Unknown: Integrase B8497 sequence
  PTHR30461:SF3,SM00857,G3DSA:1.10.10.2600,IPR036162,PF13408, IPR025827,G3DSA:3.40.50.1390,IPR006119,IPR038109,SSF53041, PF00239,PTHR30461,PS51736,Coil,cd00338
MKCVAYMRVSTEKQAEEGNGLESQKRDIENYCRKNELIIADWYVDEGYTGSNMNRPELQRLITDCSRKKVNCVVAFKLDRISRSMVDGIYIIEKVFQSNNVAFKCVHDSISYDSPMEQAYTQMMAVFAQLDKNTMMLRMRGGMLERIKQGYWWGGGNTPYCYRYDKEQGILIPIQERAEQARKALELFISGYSDAKIKEICGFKSELVTRKVLTGVVNIGMIPYKGNIYQGKHKPIFDKDRFELAQELRKSRCSAKISCFTEPNLLTGLCYCGVCGCKMRYQKWSNGNHKIYCCSRNKGLKYLPNYNPNCNNSLEWADDIEKQVTDEILKISLNLSSYKPKAKETKLEIMQSQLEREQTKLKRLYSLYADGNDTVLEMIKDLESQISKTKEDISVESKNAINTQKKEFTYQNIKKLADVWDNIDKKQKNFILKTIIDKVIIVNGNVEIQLKNF

SEQ ID NO: 8497 - protein, 453 aa, Unknown
  Description of Unknown: Integrase B8498 sequence
  PTHR30461:SF3,SM00857,G3DSA:1.10.10.2600,IPR036162,PF13408, IPR025827,G3DSA:3.40.50.1390,IPR006119,IPR038109,SSF53041, PTHR30461,Coil,PS51736,cd00338, PF00239
MECVAYMRVSTEKQAVEGNGLDSQKRDIENYCRKNELVITDWYIDDGYTGTNMDRPELQRLVNDCSRKRVSCVVAFKLDRLSRNMIDGIYLIEKVFQKYNVVFKCVHDSVNYDSPMEQAYTQMMAVFAQLDKNTMMLRMRGGMLERIKQGYWMGGGNLPYCYSYSKEQGILIPIPERAEQARKGLELFISGYSDAKIKEICGFKSELVTRSILTGAVNIGMIPYKGKIYQGKHEPIFDKDRFNLGLELRKSRCSAKTYCITEPNLLTGLCYCGICGCKMRYQKWGSKKHKIYCCSRNKSLSYLPNYNASCNNSLEWADEIEKQVEEEILKISLDLSSYKPKEKATKLEIMQSQLEKEQIKLKRLYNLYADGNDTVLEMIKELESQIKEMKSNIAAESKNAINTQKKEFVYENIKKLADIWDKVDKKQKNLILKTIIDKIVIVNGNIEIQLKNF

SEQ ID NO: 8498 - protein, 453 aa, Unknown
  Description of Unknown: Integrase B8499 sequence
  PTHR30461:SF3,IPR036162,PS51737,IPR011109,PTHR30461, PS00397,PF00239,G3DSA:1.10.10.2600,IPR006119,SSF53041, SM00857,IPR025827,IPR038109,PS51736,cd03768, IPR006118,PF13408,G3DSA:3.40.50.1390,PF07508,Coil
MIKGACYVRVSTDNQLENYSIEEQTDRLKAYCKAKDIQIVKIYTDGGYSGGNINRPALQQMLQDIGKGLIDSVIVYKLDRLSRSQKDTLMLIEDCFLAKNVDFVSVNENFDTSTPFGRAMIGILSVFAQLEKDQITERFTMGRIGRAKNGYFHGGGNAPTGYDYIDGELIINDYEALQVKDLYNRFLKGYSIHNCWQYMHQKYGGWSNEVSVRNVLKNELYIGKVKFKGVAYQGNHQPIISEEIFRQVQDLFNSSRRTSDTFKRSPFKANTLLSSLVYCGKCGARFHGEHGNYSCYSRTKGDKKYIVDPNCKNKKWKIEELNKLVLDYITRLDFSKLQNSHPAPVPVTDYSLRLTEIDKQIEKLIDLYQVSGIPLESIQKKMDALTKEKEALLNVSKPKNVPITTLAEMITARDTLMSLADTGSLDEKRACLTMIIDRITIDDDNVNIKLKHL

SEQ ID NO: 8499 - protein, 453 aa, Unknown
  Description of Unknown: Integrase B8500 sequence
  PTHR30461:SF3,SM00857,G3DSA:1.10.10.2600,IPR036162,PF13408, IPR025827,G3DSA:3.40.50.1390,IPR006119,IPR038109,SSF53041, PF00239,PTHR30461,PS51736,Coil,cd00338
MECVAYMRVSTEKQAVEGNGLDSQKRDIENYCRKNELVITDWYIDDGYTGTNMDRPELQRLVNDCSRKRVGCVVAFKLDRLSRNMIDGIYLIEKVFQKYNVMFKCVHDSVNYDSPMEQAYTQMMAVFAQLDKNTMMLRMRGGMLERVKQGYWFGGGNLPYCYSYSKEQGILIPIPEHAEQARKGLELFISGYSDVKIKEICGFRSELVTRSILTSVVNIGMIPYKGKTYQGKHEAIFDKDRFELGLELRKSRCSAKTYCITEPNLLTGLCYCGICGCKMRYQKWGSKKHKIYCCSRNKSLSYLPNYNASCNNSLEWADEIEKQVEEEILKISLDLSSYKPKEKATKLEIMQSQLEKEQTKLKRLYNLYADGNDTVLEMIKELESQIKETKSNIAAESKNAINTQKKEFVYENIKKLADVWDNIDKKQKNMILKTIIDKIVIVNGNIEIQLKNF

SEQ ID NO: 8500 - protein, 453 aa, Unknown
  Description of Unknown: Integrase B8501 sequence
  PTHR30461:SF3,SM00857,G3DSA:1.10.10.2600,IPR036162,PF13408, IPR025827,G3DSA:3.40.50.1390,IPR006119,IPR038109,SSF53041, PTHR30461,Coil,PS51736,cd00338, PF00239
MECVAYMRVSTEKQAVEGNGLDSQKRDIENYCRKNELVITDWYIDDGYTGANMDRPGLQRLVNDCSRKRVSCVVAFKLDRLSRNMIDGIYLIEKVFQKCNVVFKCVHDSVSYDSPMEQAYTQMMAVFAQLDKNTMMLRMRGGMLERIKQGYWMGGGNLPYCYSYSKEQGILIPIPERAEQARKALELFISGYSDVKIKEICGFKSELVTRNILTGIVNIGMIPYKGKIYQGKHEPIFDKGRFNLAQELRKARAKSRATCQTEPNLLTGLCYCGVCGCAMRYQKWTHEKQKIYCMSRNKSMSYLPNYNANCNNSLEWADDIEKQVEKEILKISLNLSSYKPKEKATKLEIMQSQLDKEQTKLKRLYNLYADGNDTVLEMIKESESLVKTMKANVLSESKSTANTQKKEFVYENIKKLADVWDNIDKKKKNMILKTIIDKIVIVNGNIEIQLKNF

SEQ ID NO: 8501 - protein, 453 aa, Unknown
  Description of Unknown: Integrase B8502 sequence
  PTHR30461:SF3,SM00857,G3DSA:1.10.10.2600,IPR036162,PF13408, IPR025827,G3DSA:3.40.50.1390,PS51737,IPR006119,IPR038109, PF07508,SSF53041,IPR011109,PTHR30461,PS51736, cd00338,PF00239
MSAGKKPLRVAAYCRVSTDGDDQANSFESQQRYFRAYIAQQPHWELAGIFADEGLSGTSTKKRLAFQRMIACARAGTLDLIVTKEISRFARNTLDSIYYTRELKRLGVGVLFLSDNLCTLDGDAELRLAILSSIAQEESRRTSERVKWGQRRRMEQGVVFGRDLLGYDVRGGMLYVNEAGAQTVREIFRKCVDEGKGAHTIARELNEAGIPAARGGAWRSSVILRILRNEKYCGDLVQKKTYTPDYLTHEKKYNHGQEDYIIVREHHAPIIPRATFESAGRILDQRAAAPTGQRKYSRRYPLSGKLRCGICGTVCAARKKTRRDGTDAISWRCGNAVKYGRPHTDTDGRCRGCTGESLRNEDALRILEQVWASLPLDRDSIAADVLAAVRAVTPHEQGDALESEITAMLRGDAALTAQLLAQMTVYDRTHVTLTLRGFPGKWCFARTQKAASP

SEQ ID NO: 8502 - protein, 453 aa, Unknown
  Description of Unknown: Integrase B8503 sequence
  PTHR30461:SF3,SM00857,G3DSA:1.10.10.2600,IPR036162,PF13408, IPR025827,G3DSA:3.40.50.1390,IPR006119,IPR038109,SSF53041, PTHR30461,Coil,PS51736,cd00338,PF00239
MECVAYMRVSTEKQAVEGNGLDSQKRDIENYCRKNELVITDWYIDDGYTGTNMDRPELQRLVNDCGRKRIGCVVAFKLDRLSRNMIDGIYLIEKVFQKYDVVFKCVHDSVNYDSPMEQAYTQMMAVFAQLDKNTMMLRMRGGMLERVKQGYWFGGGNLPYCYSYSKDQGILIPIPEHAEQARKGLELFISGYSDAKIKEICGFRSELVTRSILTSVVNIGMIPYKGKTYQGKHEAVFDKDRFELGLELRKTRCSAKTYCITEPNLLTGLCYCGICGCKMRYQKWGSKKHKIYCCSRNKSLSYLPNYNASCNNSLEWADEIEKQVEEEILKISLDLSSYKPKEKATKLEIMQSQLEKEQIKLKRLYNLYADGNDTVLEMIKELESQIKEMKSNIAAESKNEINTQKKEFVYENIKKLADIWDKVDKKQKNMILKTIIDRIVIVNGNIEIQLKNF

SEQ ID NO: 8503 - protein, 453 aa, Unknown
  Description of Unknown: Integrase B8504 sequence
  PTHR30461:SF3,SM00857,G3DSA:1.10.10.2600,IPR036162,PF13408, IPR025827,G3DSA:3.40.50.1390,PS51737,IPR006119,IPR038109, SSF53041,IPR011109,PTHR30461,Coil, PS51736,cd00338,PF00239
MECVAYMRVSTEKQAEEGNGLDSQKRDIELFCRKNELVVADWYVDDGYTGANMDRPELQRLINDCIKKRVKCVVAFKLDRLSRSMIDGLYIIERVFQPNQVLFKCVHDSVSYDSPMEQAYTQMMAVFAQLDKNTMMLRMRGGMLERIKQGYWIGGANTPYCYNYSKEKGILIPIPERKEQANRALDMFIGGYSDLYIKESLGFHSEVLVRNVLTGVVNIGMIPYKGNVYQGLHEPIFDKERFELAQEIRKSRRKNKTACHTDANLLTGLCYCGVCGCKMRYQKWTHGKHKIYCCSRDKAMKYLPNFNPDCNNSLEWAADIEKQVESEILKISLNLSECKPIEKQSKLEIMQSQFEKEQVKLKRLYVLYSDGNDTVLEMIKNTEKSISEMKVKITEEEKNERNSQKKEVVYENIKKLADVWAHIDKKEKNNILKSIISRIVIVNGDVEIQLKNF

SEQ ID NO: 8504 - protein, 453 aa, Unknown
  Description of Unknown: Integrase B8505 sequence
  PTHR30461:SF3,cd00338,SM00857,G3DSA:1.10.10.2600,IPR036162, PF13408,IPR025827,G3DSA:3.40.50.1390,IPR006119,IPR038109, SSF53041,PTHR30461,PS51736,Coil,PF00239
MECVAYMRVSTEKQAEEGNGLDSQRRDIENYCRKNELVITDWYIDDGYTGANMDRPELQRLVSDCDRKRVGYVVAFKLDRISRSMVDGIYLIERVFLKNNVEFKCVHDSISYDNPMEQAYTQMMAVFAQLDKNTMLLRMRGGMLERVKQGYWMGGGNLPYCYTYSKDTGTLIPIPERKEQANKAMDLFLQGYSDVKIRDMLGFKSEFVVKQVLTSPVNIGMIPYKGNIYQGLHKPIFNNEVFEKAQQFRAIRKNKRASCHNIQTNLLTGLCYCGICGCAMRYQKWTHGKHKIYCCSRNKDLHYLPNHNPNCNNTLEWASDIEKAVEDEILLISANISEYKPRVKESKLEILQGQLEKEQTKRKRLYNLYAEGNDDVISMIKEIEKVIEDIRKQIKEESAIETNKTRQNVFKNIKNLADIWEDIDKKQKNTLLKSIIEKIVISNGNIEIKLKDF

SEQ ID NO: 8505 - protein, 453 aa, Unknown
  Description of Unknown: Integrase B8506 sequence
  PTHR30461:SF3,SM00857,G3DSA:1.10.10.2600,IPR036162,PF13408, IPR025827,G3DSA:3.40.50.1390,IPR006119,IPR038109,SSF53041, PTHR30461,Coil,PS51736,cd00338, PF00239
MECVAYMRVSTEKQAVEGNGLDSQKRDIENYCRKNELVITDWYIDDGYTGANMDRPGLQRLVNDCSRKRVSCVVAFKLDRLSRNMIDGIYLIEKVFQKCNVVFKCVHDSVNYDSPMEQAYTQMMAVFAQLDKNTMMLRMRGGMLERIKQGYWMGGGNLPYCYSYSKEQGILIPIPERAEQARKALELFISGYSDVKIKEICGFKSELVTRNILTGIVNIGMIPYKGKIYQGKHEPVFDKGRFNLAQELRKTRAKSRATCQTEPNLLTGLCYCGVCGCAMRYQKWTNGEHKIYCMSRNKSMSYLPNYNADCNNSLEWADDIERQVEEEILKISLNLSSYKPKEKATKLEIMQSQLDKEQTKLKRLYSLYADGNDTVLEMIKESEVLIKTMKANVLSESKNAADTQKKEFVYENIKKLADVWDNIDKKKKNMILKTIIDKIVIVNGNIEIQLKNF

SEQ ID NO: 8506 - protein, 453 aa, Unknown
  Description of Unknown: Integrase B8507 sequence
  PTHR30461:SF3,SM00857,G3DSA:1.10.10.2600,IPR036162,PF13408, IPR025827,G3DSA:3.40.50.1390,IPR006119,IPR038109,SSF53041, PTHR30461,Coil,PS51736,cd00338,PF00239
MECVAYMRVSTEKQAVEGNGLDSQKRDIENYCRKNELVITDWYIDDGYTGANMDRPGLQRLVNDCSRKRVSCVVAFKLDRLSRNMIDGIYLIEKVFQKCNVTFKCVHDSVNYDSPMEQAYTQMMAVFAQLDKNTMMLRMRGGMLERIKQGYWMGGGNLPYCYSYSKEQGILIPIPERAEQARKALELFISGYSDVKIKEICGFKSELVTRNILTGIVNIGMIPYKGKIYQGRHEPIFDKGRFNLAQELRKTRAKSRATCQTEPNLLTGLCYCGVCGCAMRYQKWTHEKQKIYCMSRNKSMSYLPNYNANCNNSLEWADDIEKQVEKEILKISLNLSSYKPKEKATKLEIMQSQLDKEQTKLKRLYNLYADGNDTVLEMIKESESLIKTMKANVLSESKSTANTQKKEFVYENIKKLADVWNNIDKKKKNMILKTIIDKIVIVNGNIEIQLKNF

SEQ ID NO: 8507 - protein, 453 aa, Unknown
  Description of Unknown: Integrase B8508 sequence
  PTHR30461:SF3,SM00857,G3DSA:1.10.10.2600,IPR036162,PF13408, IPR025827,G3DSA:3.40.50.1390,IPR006119,IPR038109,SSF53041, PTHR30461,Coil,PS51736,cd00338, PF00239
MKCVAYMRVSTEKQAEEGNGLESQKRDIENYCRKNELIIADWYVDEGYTGSNMNRPELQRLITDCSRKKVNCVVAFKLDRISRSMVDGIYIIEKVFQSNNVAFKCVHDSISYDSPMEQAYTQMMAVFAQLDKNTMMLRMRGGMLERIKQGYWWGGGNTPYCYRYDKEQGILIPIQERAEQARKALELFISGYSDAKIKEICGFKSELVTRKVLTGVVNIGMIPYKGNIYQGKHKPIFDKDRFELAQELRKSRCSAKISCFTEPNLLTGLCYCGVCGCKMRYQKWSNGNHKIYCCSRNKGLKYLPNYNPNCNNSLEWADDIEKQVTDEILKISLNLSSYKPKAKETKLEIMQSQLEREQTKLKRLYSLYADGNDTVLEMIKDLESQISKAKEDISVESKNAINTQKKEFTYQNIKKLADVWDNIDKKQKNFILKTIIDKVIIVNGNVEIQLKNF

SEQ ID NO: 8508 - protein, 453 aa, Unknown
  Description of Unknown: Integrase B8509 sequence
  PTHR30461:SF3,IPR036162,PS51737,IPR011109,PTHR30461, PS00397,PF00239,G3DSA:1.10.10.2600,IPR006119,SSF53041, SM00857,IPR025827,IPR038109,PS51736,cd03768, IPR006118,PF13408,G3DSA:3.40.50.1390,PF07508,Coil
MIKGACYVRVSTDNQLENYSIEEQTDRLKAYCKAKDIQIVKIYTDGGYSGGNINRPALQQMLQDIGKGLIDSVIVYKLDRLSRSQKDTLMLIEDCFLAKNVDFVSVNENFDTSTPFGRAMIGILSVFAQLEKDQITERFTMGRIGRAKNGYFHGGGNTPTGYDYIDGELIINDYEALQVKDLYNRFLKGYSIHNCWQYMHQKYGGWSNEVSVRNVLKNELYIGKVKFKGVAYQGNHQPIISEEIFRQVQDLFNSSRRTSDTFKRSPFKANTLLSSLVYCGKCGARFHGEHGNYSCYSRTKGDKKYIVDPNCKNKKWKIEELNKLVLDYITRLDFSKLQNSHPAPVPVTDYSLRLTEIDKQIEKLIDLYQVSGIPLESIQKKMDALTKEKEALLNVSKPKNVPITTLAEMITARDTLMSLADTGSLDEKRACLTMIIDRITIDDDNVNIKLKHL

SEQ ID NO: 8509 - protein, 453 aa, Unknown
  Description of Unknown: Integrase B8510 sequence
  PTHR30461:SF3,SM00857,G3DSA:1.10.10.2600,IPR036162,PF13408, IPR025827,G3DSA:3.40.50.1390,PS51737,IPR006119,IPR038109, SSF53041,IPR011109,PF00239,PTHR30461,PS51736, Coil,cd00338
MECVAYMRVSTEKQAEEGNGLDSQKRDIELFCRKNELVVSDWYVDDGYTGANMDRPELQRLINDCIKKRVKCVVAFKLDRLSRSMIDGLYIIERVFQPNQVLFKCVHDSVSYDSPMEQAYTQMMAVFAQLDKNTMMLRMRGGMLERIKQGYWIGGANTPYCYNYSKEKGILIPIPERKEQANRAIDMFIGGYSDLYIKESLGFHSEVLVRNVLTGVVNIGMIPYKGNVYQGLHEPIFDKERFELAQEIRKSRRKNKTACHTDANLLTGLCYCGVCGCKMRYQKWTHGKHKIYCCSRDKAMKYLPNFNPNCNNSLEWAADIEKQVESEILKISLNLSECKPIEKQSKLEIMQSQFEKEQVKLKRLYVLYSDGNDTVLEMIKNTEKSISDMKEKITEEEKNERNSQKKEVVYENIKKLADVWAHIDKKEKNNILKSIISRIVIVNGDVEIQLKNF

SEQ ID NO: 8510 - protein, 453 aa, Unknown
  Description of Unknown: Integrase B8511 sequence
  PTHR30461:SF3,SM00857,IPR006118,G3DSA:1.10.10.2600,IPR036162, PS51737,PS00397,G3DSA:3.40.50.1390,IPR006119,IPR038109, IPR011109,SSF53041,PTHR30461,Coil,PS51736, cd00338,PF00239
MECVAYIRVSTERQVEEGYGLESQKRDIEDYCKKNEMLITDWYIDAGLSGMDMSKRVELQRLISDISKINDIVVYKLDRLARDSVDALYMIEKLFTPKGVRVNSVHDFARYETPQDKFQTHIMAAVAEYDRNTMLLRMRGGMLERVKNGYWMGGGNTPYCYRYDKNLGYLVPIPERAEQANRAMDLFIDGMSDVKIQRLLGYKSEFVVRNILTGVVNIGYIPYKGGTYKGLHESIFESDKFYLAQELRKSRRKQHTYSLTEPHLLTGLCYCKTCGCKMRYQKITGMGIHKIYCCSHSKYLDYLPNYNADCDNPGAWASDIEKAFEHEILDISINLSQYKPKAKETKLQILTKQLEKQKAKLKRLYTLYAEGNDMVLDMIKTLEAEIKETTEKISAERKNGQHEQKKEFVYENIKKLADIWDGISKSQKNSILKTIIDKVIVGKDDIEIQLKNF

SEQ ID NO: 8511 - protein, 453 aa, Unknown
  Description of Unknown: Integrase B8512 sequence
  PTHR30461:SF3,cd00338,SM00857,G3DSA:1.10.10.2600,IPR036162, PF13408,PS51737,IPR025827,G3DSA:3.40.50.1390,IPR006119, IPR038109,IPR011109,SSF53041,PTHR30461,PS51736, Coil,PF00239
MECVAYMRVSTEKQAEEGNGLDSQRRDIENYCRKNELVITDWYIDDGYTGANMDRPELQRLVSDCERKRVSYVVAFKLDRISRSMVDGIYLIERVFLKNNVEFKCVHDSISYDNPMEQAYTQMMAVFAQLDKNTMLLRMRGGMLERVKQGYWMGGGNLPYCYTYSKDTGTLIPIPERKEQANKAMDLFLQGYSDVKIRDMLGFKSEFVVKQVLTSPVNIGMIPYKGNIYHGLHEPIFNKEVFEKAQQFRAIRKNKRASCHNIQTNLLTGLCYCGICGCAMRYQKWTHGKHKIYCCSRNKDLHYLPNHNPNCNNTLEWASDIEKAVEDEILLISANISDYKPRVKESKLEILQGQLEKEQTKRKRLYNLYAEGNDDVISMIKEIEKVIEDIRKQIKEESAIETNKTRQNVFKNIKNLADIWEDIDKKQKNMLLKSIIEKIVISNGNIEIKLKDF

SEQ ID NO: 8512 - protein, 453 aa, Unknown
  Description of Unknown: Integrase B8513 sequence
  PTHR30461:SF3,SM00857,G3DSA:1.10.10.2600,IPR036162,PF13408, IPR025827,G3DSA:3.40.50.1390,IPR006119,IPR038109,SSF53041, PTHR30461,Coil,PS51736,cd00338,PF00239
MECVAYMRVSTEKQAVEGNGLDSQKRDIENYCRKNELVITDWYIDDGYTGTNMDRPELQRLVNDCSRKRISCVVAFKLDRLSRNMIDGIYIIEKVFQKYNVVFKCVHDSVNYDSPMEQAYTQMMAVFAQLDKNTMMLRMRGGMLERVKQGYWFGGGNLPYCYSYSKDQGILIPIPEHAEQARKGLELFISGYSDAKIKEICGFRSELVTRSILTSVVNIGMIPYKGKIYQGKHEAVFDKDRFELGLELRKSRCSAKTYCITEPNLLTGLCYCGICGCKMRYQKWGSEKHKIYCCSRNKSLSYLPNYNASCNNSLEWADEIEKQVEEEILKISLDLSSYKPKEKATKLEIMQSQLEKEQIKLKRLYNLYADGNDTVLEMIKELESQIKEMKSNIAAESKNAINTQKKEFVYENIKKLADIWDKVDKKQKNMILKTIIDRIVIVNGNIEIQLKNF

SEQ ID NO: 8513 - protein, 453 aa, Unknown
  Description of Unknown: Integrase B8514 sequence
  PTHR30461:SF3,cd00338,SM00857,G3DSA:1.10.10.2600,IPR036162, PF13408,IPR025827,G3DSA:3.40.50.1390,IPR006119,IPR038109, SSF53041,PTHR30461,PS51736,Coil, PF00239
MECVAYMRVSTEKQAEEGNGLESQKRDILDYCSKNKLIVTDWYVDDGYTGANMNRPELQRLVADCKHKRIYCVVAFKLDRLSRNMIDGLYMIEKIFQPNGVQFKCVHDSVSYDSPMEQAYTQMMAVFAQLDKNTMMLRMRGGMLERVKQGYWMGGGNLPYCYSYDKDSGILIPIPERKVQANKALELYIKGYSDIKICKICGYKGEKVVRQILTTPVNIGMIPYKGKIYQGLHEPIFNKEQFELAQQLRKSRSCNKASCITEPNLLTGLCYCGVCGCAMRYQKWTHGKHKIYCMSRNKAMSYLPNHNPDCNNSLEWADDIEEQVEKEMLKISLDLSSYKPKEKETKLDIMQSQLDKEQAKLKRLYGLYADGNDTVLSMIKELEANISAIKENISEEWKNFSVKQKNTIVYDEIKKLADVWDSIDKKQKNMILKTIIDKIIIVNGNIEIQLKNF

SEQ ID NO: 8514 - protein, 453 aa, Unknown
  Description of Unknown: Integrase B8515 sequence
  PTHR30461:SF3,SM00857,IPR006118,G3DSA:1.10.10.2600,IPR036162, PS51737,G3DSA:3.40.50.1390,Coil,IPR006119,IPR038109, SSF53041,IPR011109,PTHR30461,PS00397,PS51736, cd00338,PF00239
MECVAYIRVSTERQVEEGYGLESQKRDIEEYCKKNEMLITDWYIDAGLSGMDMSKRVELQRLISDISKINNIVVYKLDRLARDSVDALYMIEKLFTPKGVRVNSVHDFARYETPQDKFQTHIMAAVAEYDRNTMLLRMRGGMLERVKNGYWMGGGNTPYCYRYDKNLGYLVPIPERAEQANRAMDLFIGGMSDVKIQRLLGYKSEFVVRNILTGVVNIGYIPYKGGTYKGLHEPIFEHDKFYLAQELRKSRRKQHVYSFTEPHLLTGLCYCKTCGCKMRYQKITGMGIHKIYCCSHDKYLDYLPNYNTDCDNPGAWASDIEIAFEHEILGISINLSQYKPKAKETKLQILTNQLEKQKSKLKRLYILYAEGNDMVLDMIKTLETEIRETTEKISAERKNGQHEQKKEFVYENIKKLADIWDGISKSQKNSILKTIIDKVIVGKDDIEIQLKNF

SEQ ID NO: 8515 - protein, 453 aa, Unknown
  Description of Unknown: Integrase B8516 sequence
  PTHR30461:SF3,IPR036162,PS51737,IPR011109,PTHR30461, PS00397,PF00239,G3DSA:1.10.10.2600,IPR006119,SSF53041, SM00857,IPR025827,IPR038109,PS51736,cd03768, IPR006118,PF13408,G3DSA:3.40.50.1390,PF07508,Coil
MIKGACYVRVSTDNQLENYSIEEQTDRLKAYCKAKDIQIVKIYTDGGYSGGNVNRPALQQMLQDIDKGLIDSVIVYKLDRLSRSQKDTLMLIEDCFLAKNVDFVSVNENFDTSTPFGRAMIGILSVFAQLEKDQITERFTMGRIGRAKNGYFHGGGNAPTGYDYIDGELVINDYEAIQVKDLYNRFLKGYPIHNCWQYMQQKYGGWSNEVSVRNVLKNELYIGKVKFKGVAYQGNHQPIISEETFQQVQDLFSSSRRASDTFKRSPFKASTLLSSLVYCGKCGARFHGEHGNYSCYSRTKGDKKYIVDPNCKNKKWKIEELDRLVLDYIMRLDFSKLKSGHPVPVPVTDYSIRLNEIDKQIGKLIDLYQVSGIPIETIQEKMDVLNKEKEALLNISKPKNVPVTTLAEMITARDTLMSLSDTGSLDEKRACLTMIIDRIIIDDDNVNIKLKQL

SEQ ID NO: 8516 - protein, 453 aa, Unknown
  Description of Unknown: Integrase B8517 sequence
  PTHR30461:SF3,cd00338,SM00857,G3DSA:1.10.10.2600,IPR036162, PF13408,PS51737,G3DSA:3.40.50.1390,IPR025827,IPR006119, IPR038109,IPR011109,SSF53041,PTHR30461,PS51736, Coil,PF00239
MECVAYMRVSTEKQAEEGNGLDSQRRDIENYCRKNELVITDWYIDDGYTGANMDRPELQRLVSDCDRKRVGYVVAFKLDRISRSMVDGIYLIERVFLKNNVEFKCVHDSISYDNPMEQAYTQMMAVFAQLDKNTMLLRMRGGMLERVKQGYWMGGGNLPYCYTYSKDTGTLIPIPERKEQANKAMDLFLQGYSDVKIRDMLGFKSEFVVKQVLTSPVNIGMIPYKGNIYHGLHEPIFNKEVFEKAQQFRAIRKNKRASCHNIQTNLLTGLCYCGICGCAMRYQKWTHGKHKIYCCSRNKDLHYLPNHNPNCNNTLEWASDIEKAVEDEILLISANISDYKPRVKESKLEILQGQLEKEQTKRKRLYNLYAEGNDDVISMIKEIEKVIEDIRKQIKEESAIETNKTRQNVFKNIKNLADIWEDIDKKQKNMLLKSIIEKIVISNGNIEIKLKDF

SEQ ID NO: 8517 - protein, 453 aa, Unknown
  Description of Unknown: Integrase B8518 sequence
  PTHR30461:SF3,SM00857,G3DSA:1.10.10.2600,IPR036162,PF13408, IPR025827,G3DSA:3.40.50.1390,IPR006119,IPR038109,SSF53041, PTHR30461,Coil,PS51736,cd00338,PF00239
MECVAYMRVSTEKQAVEGNGLDSQKRDIENYCRKNELVITDWYIDDGYTGTNMDRPELQRLVNDCSRKRVSCVVAFKLDRLSRNMIDGIYLIEKVFQKYNVVFKCVHDSVNYDSPMEQAYTQMMAVFAQLDKNTMMLRMRGGMLERIKQGYWMGGGNLPYCYSYSKEQGILIPIPERAEQARKGLELFISGYSDAKIKEICGFKSELVTRSILTGVVNIGMIPYKGKIYQGKHEPIFDKDRFNLGLELRKSRCSAKTYCITEPNLLTGLCYCGICGCKMRYQKWGSEKHKIYCCSRNKSLSYLPNYNASCNNSLEWADEIEKQVEEEILKISLDLSSYKPKEKATKLEIMQSQLEKEQIKLKRLYNLYADENDTVLEMIKELEAQIKEMKLNIAAESKNAINTQKKEFVYENIKKLADIWDKVDKKQKNLILKTIIDKIVIVNGNIEIQLKNF

SEQ ID NO: 8518 - protein, 453 aa, Unknown
  Description of Unknown: Integrase B8519 sequence
  PTHR30461:SF3,SM00857,G3DSA:1.10.10.2600,IPR036162,PF13408, PS51737,IPR025827,G3DSA:3.40.50.1390,IPR006119,IPR038109, IPR011109,SSF53041,PTHR30461,Coil, PS51736,cd00338,PF00239
MECVAYMRVSTEKQAEEGNGLDSQKRDIELFCRKNELVVADWYVDDGYTGANMDRPELQRLINDCIKKRIKCVVAFKLDRLSRSMIDGLYIIERVFQPNQVLFKCVHDSVSYDSPMEQAYTQMMAVFAQLDKNTMMLRMRGGMLERIKQGYWIGGANTPYCYNYSKEKGILIPIPERKEQANRALDMFIGGYSDLYIKESLGFHSEVLVRNVLTGVVNIGMIPYKGNVYQGLHEPIFDKERFELAQEIRKSRRKNKTACHTDANLLTGLCYCGVCGCKMRYQKWTHGKHKIYCCSRDKAMKYLPNFNPNCNNSLEWAADIEKQVESEILKISLNLSECKPIEKQSKLEIMQSQFEKEQVKLKRLYVLYSDGNDTVLEMIKSTEKSISEMKVKITEEEKNERNSQKKEVVYENIKKLADVWAHIDKKEKNNILKSIISRIVIVNGDVEIQLKNF

SEQ ID NO: 8519 - protein, 453 aa, Unknown
  Description of Unknown: Integrase B8520 sequence
  SM00857,G3DSA:1.10.10.2600,IPR036162,PF13408,IPR025827, G3DSA:3.40.50.1390,PS51737,IPR006119,IPR038109,IPR011109, SSF53041,PTHR30461,Coil,PS51736,cd00338, PF00239
MECVAYMRVSTEKQAEEGNGLDSQKRDIELFCRKNELVVADWYVDDGYTGANMDRPELQRLINDCIKKRVKCVVSFKLDRLSRSMIDGLYIIERVFQPNQVLFKCVHDSVSYDSPMEQAYTQMMAVFAQLDKNTMMLRMRGGMLERIKQGYWIGGANTPYCYNYSKEKGILIPIPERKEQANRALDMFIGGYSDLYIKESLGFHSEVLVRNVLTGVVNIGMIPYKGNVYQGLHEPIFDKERFELAQEIRKSRRKNKTACHTDANLLTGLCYCGVCGCKMRYQKWTHGKHKIYCCSRDKAMKYLPNFNPDCNNSLEWAADIEKQVESEILKISLNLSECKPIEKQSKLEIMQSQFEKEQVKLKRLYVLYSDGNDTVLEMIKNTEKIISEMKVKITEEEKNERNSQKKEVVYENIKKLADVWAHIDKKEKNNILKSIISRIVIVNGDVEIQLKNF

SEQ ID NO: 8520 - protein, 453 aa, Unknown
  Description of Unknown: Integrase B8521 sequence
  PTHR30461:SF3,IPR036162,PS51737,IPR011109,PTHR30461, PS00397,PF00239,G3DSA:1.10.10.2600,IPR006119,SSF53041, SM00857,IPR025827,IPR038109,PS51736,cd03768, IPR006118,PF13408,G3DSA:3.40.50.1390,PF07508,Coil
MIKGACYVRVSTDNQLENYSIEEQTDRLKAYCKAKDIQIVKIYTDGGYSGGNVNRPALQQMLQDIGKGLIDSVIVYKLDRLSRSQKDTLMLIEDCFLAKNVDFVSVNENFDTSTPFGRAMIGILSVFAQLEKDQITERFTMGRIGRAKNGYFHGGGNAPTGYDYIDGELIINDYEALQVKDLYNRFLKGYSIHNCWQYMHQKYGGWSNEVSVRNVLKNELYVGKVKFKGVAYQGNHQPIISEEIFRQVQDLFNSSRRTSDTFKRSPFKANTLLSSLVYCGKCGARFHGEHGNYSCYSRTKGDKKYIVDPNCKNKKWKIEELNKLVLDYITRLDFSKLQNSHPAPVPVTDYSLRLTEIDKQIEKLIDLYQVSGIPLESIQKKMDALTKEKEALLNVSKPKNVPITTLTEMITARDTLMSLADTGSLDEKRACLTMIIDRITIDDDNVNIKLKHL

SEQ ID NO: 8521 - protein, 453 aa, Unknown
  Description of Unknown: Integrase B8522 sequence
  PTHR30461:SF3,SM00857,G3DSA:1.10.10.2600,IPR036162,PF13408, IPR025827,G3DSA:3.40.50.1390,IPR006119,IPR038109,SSF53041, PTHR30461,Coil,PS51736,cd00338,PF00239
MECVAYMRVSTEKQAVEGNGLDSQKRDIENYCRKNELVITDWYIDDGYTGANMDRPGLQRLVNDCSRKRVSCVVAFKLDRLSRNMIDGIYLIEKVFQKCNVTFKCVHDSVNYDSPMEQAYTQMMAVFAQLDKNTMMLRMRGGMLERIKQGYWMGGGNLPYCYSYNKEQGILIPIPERAEQARKALELFISGYSDVKIKEICGFKSELVTRNILTGIVNIGMIPYKGKIYQGKHEPIFDKGRFNLAQELRKTRAKSRATCQTEPNLLTGLCYCGVCGCAMRYQKWTNGEHKIYCMSRNKSMSHLPNYNANCDNSLEWADDIEKQVEEEILKISLNLSSYKPKEKATKLEIMQSQLDKEQTKLKRLYNLYADGNDTVLEMIKESESLIKTMKANVLSESKNAADTQKKEFVYENIKKLADVWDNIDKKKKNMILKTIIDKIVIVNGNIEIQLKNF

SEQ ID NO: 8522 - protein, 453 aa, Unknown
  Description of Unknown: Integrase B8523 sequence
  PTHR30461:SF3,SM00857,G3DSA:1.10.10.2600,IPR036162,PF13408, IPR025827,G3DSA:3.40.50.1390,IPR006119,IPR038109,SSF53041, PTHR30461,Coil,PS51736,cd00338, PF00239
MECVAYMRVSTEKQAVEGNGLDSQKRDIENYCRKNELVITDWYIDDGYTGTNMDRPELQRLVNDCSRKRVSCVVAFKLDRLSRNMIDGIYLIEKVFQKYNVVFKCVHDSVNYDSPMEQAYTQMMAVFAQLDKNTMMLRMRGGMLERIKQGYWMGGGNLPYCYSYSKEQGILIPIPERAEQARKGLELFISGYSDAKIKEICGFKSELVTRSILTGVVNIGMIPYKGKIYQGKHEPIFDKDRFNLGLELRKSRCSAKTYCITEPNLLTGLCYCGICGCKMRYQKWGSEKHKIYCCSRNKSLSYLPNYNASCNNSLEWADEIEKQVEEEILKISLDLSSYKPKEKATKLEIMQSQLEKEQIKLKRLYNLYADGNDTVLEMIKELEAQIKEMKLNIAAESKNAINTQKKEFVYENIKKLADIWDKVDKKQKNLILKTIIDKIVIVNGNIEIQLKNF

SEQ ID NO: 8523 - protein, 453 aa, Unknown
  Description of Unknown: Integrase B8524 sequence
  PTHR30461:SF3,IPR036162,PS51737,IPR011109,PTHR30461, PS00397,PF00239,G3DSA:1.10.10.2600,IPR006119,SSF53041, SM00857,IPR025827,IPR038109,PS51736,cd03768, IPR006118,PF13408,G3DSA:3.40.50.1390,PF07508,Coil
MIKGACYVRVSTDNQLENYSIEEQTDRLKAYCKAKDIQIVKIYTDGGYSGGNVNRPALQQMLQDIGKGLIDSVIVYKLDRLSRSQKDTLMLIEDCFLAKNVDFVSVNENFDTSTPFGRAMIGILSVFAQLEKDQITERFTMGRIGRAKNGYFHGGGNAPTGYDYIDGELIINDYEALQVKDLYNRFLKGYSIHNCWQYMQQKYGGWSSEVLVRNVLRNELYIGKVKFKGVAYQGNHQPIISEDLFRQVQDLFNSSKRSSNTFKRSPFKASTLLSSIVYCGKCGARFHGEHGNYSCYSRTKGDKKYIVDPNCKNKKWKIEELDRLVLDYITRLDFSKLHNSHPVQIPSTDYSFRLAEIDKQIGKLIDLYQVSGISLETIQEKMNALNKEKEALLIISKPKNVPVTTLAEMITARDTLMSLSDSGSLDEKRACLTMIIDRIIIDDDNVNIKLKQL

SEQ ID NO: 8524 - protein, 453 aa, Unknown
  Description of Unknown: Integrase B8525 sequence
  PTHR30461:SF3,SM00857,G3DSA:1.10.10.2600,IPR036162,PF13408, IPR025827,G3DSA:3.40.50.1390,IPR006119,IPR038109,SSF53041, PTHR30461,Coil,PS51736,cd00338,PF00239
MECVAYMRVSTEKQAVEGNGLDSQKRDIENYCRKNELVITDWYIDDGYTGANMDRPGLQRLVNDCSRKRISCVVAFKLDRLSRNMIDGIYLIEKVFQKCNVTFKCVHDSVNYDSPMEQAYTQMMAVFAQLDKNTMMLRMRGGMLERIKQGYWMGGGNLPYCYSYSKEQGILIPIPERAEQARKALELFISGYSDVKIKEICGFKSELVTRNILTGIVNIGMIPYKGKIYQGKHEPIFDKGRFNLAQELRKTRAKSRATCQTEPNLLTGLCYCGVCGCAMRYQKWTNGEHKIYCMSRNKSMSYLPNYNANCDNSLEWADDIEKQVEKEILKISLNLSSYKPKEKATKLEIMQSQLDKEQTKLKRLYNLYADGNDTVLEMIKESESLIKTMKANVLSESKSTANTQKKEFVYENIKKLADVWDNIDKKKKNMILKTIIDKIVIVNGNIEIQLKNF

SEQ ID NO: 8525 - protein, 453 aa, Unknown
  Description of Unknown: Integrase B8526 sequence
  PTHR30461:SF3,cd00338,SM00857,G3DSA:1.10.10.2600,IPR036162, PF13408,PS51737,G3DSA:3.40.50.1390,IPR025827,IPR006119, IPR038109,SSF53041,IPR011109,PTHR30461, PS51736,Coil,PF00239
MECVAYMRVSTEKQAEEGNGLDSQRRDIENYCRKNELVITDWYIDDGYTGANMDRPELQRLVSDCDRKRVGYVVAFKLDRISRSMVDGIYLIERVFLKNNVEFKCVHDSICYDNPMEQAYTQMMAVFAQLDKNTMLLRMRGGMLERVKQGYWMGGGNLPYCYTYSKDTGTLIPIPERKEQANKAMDLFLQGYSDVKIRDMLGFKSEFVVKQVLTSPVNIGMIPYKGNIYQGLHEPIFNKEVFEKAQQFRAIRKNKRASCHNIQTNLLTGLCYCGICGCAMRYQKWTHGKHKIYCCSRNKDLHYLPNHNPNCNNTLEWASDIEKAVEDEILLISANISDYKPRVKESKLEILQGQLEKEQTKRKRLYNLYAEGNDDVISMIKEIEKVIEDIRKQIREESAIETNKTRQNVFKNIKNLADIWEDIDKKQKNMLLKSIIEKIVISNGNIEIKLKDF

SEQ ID NO: 8526 - protein, 453 aa, Unknown
  Description of Unknown: Integrase B8527 sequence
  PTHR30461:SF3,SM00857,IPR006118,G3DSA:1.10.10.2600,IPR036162, PS51737,G3DSA:3.40.50.1390,Coil,IPR006119,IPR038109, IPR011109,SSF53041,PTHR30461,PS00397,PS51736, cd00338,PF00239
MECVAYIRVSTERQVEEGYGLESQKRDIEEYCKKNEMLITDWYIDAGLSGMDMTKRVELQRLISDISKINDIVVYKLDRLARDSVDALYMIEKLFTPKGVRVNSVHDFARYETPQDKFQTHIMAAVAEYDRNTMLLRMRGGMLERVKNGYWMGGGNTPYCYQYDKNLGYLVPIPERAEQANRAMDLFIEGMSDVKIQRLLGYKSEFVVRNILTGVVNIGYIPYKGGTYKGLHEPIFEHDKFYLAQELRKSRRKQHVYSFTEPHLLTGLCYCKTCGCKMRYQKITGMGIHKIYCCSHDKYLDYLPNYNTDCDNPGAWASDIEIAFEHEILGISINLSQYKPKAKETKLQILTNQLEKQKSKLKRLYTLYAEGNDMVLDMIKTLETEIRETTEKISAERKNGQHEQKKEFVYENIKKLADIWDGISKSQKNSILKTIIDKVIVGKDDIEIQLKNF

SEQ ID NO: 8527 - protein, 453 aa, Unknown
  Description of Unknown: Integrase B8528 sequence
  PTHR30461:SF3,SM00857,G3DSA:1.10.10.2600,IPR036162,PF13408, IPR025827,G3DSA:3.40.50.1390,IPR006119,IPR038109,SSF53041, PTHR30461,Coil,PS51736,cd00338,PF00239
MECVAYMRVSTEKQAEEGNGLESQKRDILDYCTKNELIVTDWYVDDGYTGANMNRPELQRLVADCKHKRISCVVAFKLDRLSRNMIDGLYMIEKIFQPNGVQFKCVHDSVSYDSPMEQAYTQMMAVFAQLDKNTMMLRMRGGMLERVKQGYWMGGGNLPYCYSYDKDSGILIPIPERKVQANKALELYIKGYSDIKICKICGYKGEKVVRQILTTPVNIGMIPYKGKIYQGLHEPIFNKEQFELAQQLRKSRSCNKASCITEPNLLTGLCYCGVCGCAMRYQKWTHGKHKIYCMSRNKAMSYLPNHNPACNNSLEWADDIEEQVEKEMLKISLDLSSYKPKEKETKLDIMQSQLDKEQAKLKRLYGLYADGNDTVLSMIKELEANISAIKENISEERKNFSVKQKNTIVYDEIKKLADVWDSIDKKQKNMILKTIIDKIIIVNGNIEIQLKNF

SEQ ID NO: 8528 - protein, 453 aa, Unknown
  Description of Unknown: Integrase B8529 sequence
  PTHR30461:SF3,SM00857,G3DSA:1.10.10.2600,IPR036162,PF13408, IPR025827,G3DSA:3.40.50.1390,PS51737,IPR006119,IPR038109, SSF53041,IPR011109,PTHR30461,Coil, PS51736,cd00338,PF00239
MECVAYMRVSTEKQAEEGNGLDSQKRDIELFCRKNELVVADWYVDDGYTGANMDRPELQRLINDCIKKRVKCVVAFKLDRLSRSMIDGLYIIERVFQPNQVLFKCVHDSVSYDSPMEQAYTQMMAVFAQLDKNTMMLRMRGGMLERIKQGYWIGGANTPYCYNYSKEKGILVPIPERKEQANRALDMFIGGYSDLYIKESLGFHSEVLVRNVLTGVVNIGMIPYKGNVYQGLHEPIFDKERFELAQEIRKSRRKNKTACHTDANLLTGLCYCGVCGCKMRYQKWTHGKHKIYCCSRDKAMKYLPNFNPDCNNSLEWAADIEKQVESEILKISLNLSECKPIEKQSKLEIMQSQFEKEQVKLKRLYVLYSDGNDTVLEMIKNTEKSISEMKVKITEEEKNERNSQKKEVVYENIKKLADVWAHIDKKEKNNILKSIISRIVIVNGDVEIQLKNF

SEQ ID NO: 8529 - protein, 453 aa, Unknown
  Description of Unknown: Integrase B8530 sequence
  PTHR30461:SF3,SM00857,G3DSA:1.10.10.2600,IPR036162,PF13408, PS51737,G3DSA:3.40.50.1390,IPR025827,IPR006119,IPR038109, PF07508,SSF53041,IPR011109,PTHR30461,PS51736, cd00338,PF00239
MSAGKKPLRVAAYCRVSTDGDDQANSFESQQRYFRAYIAQQPHWELAGIFADEGLSGTSTKKRLAFQRMIACARAGTLDLIVTKEISRFARNTLDSIYYTRELKRLGVGVLFLSDNLCTLDGDAELRLAILSSIAQEESRRTSERVKWGQKRRMEQGVVFGRDLLGYDVRGGALYVNEAGAQTVREIFRKCVDEGKGAHTIARELNAAGIPAARGGAWRSSVILRILRNEKYCGDLVQKKTYTPDYLTHEKKYNHGQEDYIIVREHHAPIIPRATFESAGRILDQRAAAPTGQRKYSRRYLLSGKLRCGICGAVCAARKKTRRDGTDAISWRCGNAVKYGRPHTDPDGRSRGCTGESLRDEDALQILTQVWSALPLERDVIAADVLAAVRAVTPHEQADAIASEIHAMLRGDAALSAQLLAQMTVYDRTHVTLTLRGFLGKWCFARTQKAASP

SEQ ID NO: 8530 - protein, 453 aa, Unknown
  Description of Unknown: Integrase B8531 sequence
  PTHR30461:SF3,SM00857,G3DSA:1.10.10.2600,IPR036162,PF13408, IPR025827,PS51737,G3DSA:3.40.50.1390,IPR006119,IPR038109, IPR011109,SSF53041,PF00239,PTHR30461,PS51736, Coil,cd00338
MECVAYMRVSTEKQAEEGNGLDSQKRDIELFCRKNELVVSDWYVDDGYTGANMDRPELQRLINDCIKKRVKCVVAFKLDRLSRSMIDGLYIIERVFQPNQVLFKCVHDSVSYDSPMEQAYTQMMAVFAQLDKNTMMLRMRGGMLERIKQGYWIGGANTPYCYNYSKEKGILIPIPERKEQANRALDMFIGGYSDLYIKESLGFHSEVLVRNVLTGVVNIGMIPYKGNVYQGLHEPIFDKERFELAQEIRKSRRKNKTACHTDANLLTGLCYCGVCGCKMRYQKWTHGKHKIYCCSRDKAMKYLPNFNPDCNNSLEWAADIEKQVESEILKISLNLSECKPIEKQSKLEIMQSQFEKEQVKLKRLYVLYSDGNDTVLEMIKNTEKSISEMKVKINEEEKNERNSQKKEVVYENIKKLADVWAHIDKKEKNNILKSIISRIVIVNGDVEIQLKNF

SEQ ID NO: 8531 - protein, 453 aa, Unknown
  Description of Unknown: Integrase B8532 sequence
  PTHR30461:SF3,SM00857,G3DSA:1.10.10.2600,IPR036162,PF13408, IPR025827,PS51737,G3DSA:3.40.50.1390,IPR006119,IPR038109, SSF53041,IPR011109,PTHR30461,Coil,PS51736, cd00338,PF00239
MECVAYMRVSTEKQAEEGNGLESQKRDILDYCSKNELIVTDWYVDDGYTGANMNRPELQRLVADCKHKRIYCVVAFKLDRLSRNMIDGLYMIEKIFQPNGVQFKCVHDSVSYDSPMEQAYTQMMAVFAQLDKNTMMLRMRGGMLERVKQGYWSGGGNLPYCYSYDKEQGILIPIPERAEQANKALELYIRGYSDVKICKICGYKGEKVVRQILTTPVNVGMIPYKGKIYQGLHEPIFNKEQFELAQQLRKSRSCNKASCITEPNLLTGLCYCGVCGCAMRYQKWTHGKHKIYCMSRNKAMSYLPNHNPDCNNSLEWADDIEEQVEKEMLKISLDLSSYKPKEKETKLDIMQSQLDKEQAKLKRLYGLYADGNDTVLSMIKELEANISAIKENISEERKNFSVKQKNTIVYDEIKKLADVWDSIDKKQKNMILKTIIDKIIIVNGNIEIQLKNF

SEQ ID NO: 8532 - protein, 453 aa, Unknown
  Description of Unknown: Integrase B8533 sequence
  PTHR30461:SF3,SM00857,G3DSA:1.10.10.2600,IPR036162,PF13408, PS51737,IPR025827,G3DSA:3.40.50.1390,IPR006119,IPR038109, PF07508,IPR011109,SSF53041,PTHR30461,Coil, PS51736,cd00338,PF00239
MECVAYMRVSTEKQVEEGNGLESQKRDILDYCSKNELIVTDWYIDDGYTGANMNRPELQRLISDCGKKKVKCVVAFKLDRISRSMIDGLYMIERIFQPNNVIFKCVHDSVSYNSPMEQAYTQMMAVFAQLDKNTMMLRMRGGMLERVKQGYWPGGGNTPYCYSYSKDQGILIPIPERAEQARKGLELYIKGYSDIKICKICGYKGEKVVRQILTSPVNIGMIPYKGKIYQGLHEPIFDKELFELAQQLRKSRSLNKASCITEPNLLTGLCYCGVCGCAMRYQKWTHGKHKIYCMSRNKSMSYLPNHNPDCNNSLEWADDIEEQVEREMLKISLDLSSYKPKEKETKLDIMQSQLDKEQTKLKRLYGLYADGNDTVLSMIKELEGNISAIKENIAEEQKNFSARQKNAIVYDEIKKLADVWGNIDKKQKNMILKTIIDKIIIVNGNIEIQLKSF

SEQ ID NO: 8533 - protein, 453 aa, Unknown
  Description of Unknown: Integrase B8534 sequence
  PTHR30461:SF3,SM00857,G3DSA:1.10.10.2600,IPR036162,PF13408, IPR025827,G3DSA:3.40.50.1390,IPR006119,IPR038109,SSF53041, PTHR30461,Coil,PS51736,cd00338,PF00239
MECVAYMRVSTEKQAVEGNGLDSQKRDIENYCRKNELVITDWYIDDGYTGTNMDRPELQRLVNDCSRKRVSCVVAFKLDRLSRNMIDGIYLIEKVFQKYNVVFKCVHDSVNYDSPMEQAYTQMMAVFAQLDKNTMLLRMRGGMLERIKQGYWMGGGNLPYCYSYSKEQGILIPIPERAEQARKGLELFISGYSDAKIKEICGFKSELVTRSILTGVVNIGMIPYKGKIYQGKHEPIFDKDRFNLGLELRKSRCSAKTYCITEPNLLTGLCYCGICGCKMRYQKWGSEKHKIYCCSRNKSLSYLPNYNASCNNSLEWADEIEKQVEEEILKISLDLSSYKPKEKATKLEIMQSQLEKEQIKLKRLYNLYADGNDTVLEMIKELEAQIKEMKLNIAAESKNAINTQKKEFVYENIKKLADIWDKVDKKQKNLILKTIIDKIVIVNGNIEIQLKNF

SEQ ID NO: 8534 - protein, 453 aa, Unknown
  Description of Unknown: Integrase B8535 sequence
  cd00338,SM00857,IPR006118,G3DSA:1.10.10.2600, IPR036162,PF13408,IPR025827,G3DSA:3.40.50.1390, IPR006119,IPR038109,SSF53041,PTHR30461, PS00397,PS51736,Coil,PF00239
MECVAYLRVSTEKQAEEGHGLESQKRDIENYCRKNELIIVDWYVDDGYTGSNMDRPEFQRLISDCYAKRVKCVVAYKLDRISRTMLDSIYVIERIFQPNNVRLECVHDAVNYNDPMQQAYTQMMAVFAQLDKNTMMLRMRGGILERVKKGYWPGGGIKPYCYRYDKEIGILIPIPERAERARQALDLFIQGYSDEKIMRMLGFRTEGVVRNILTGVVNIGKIKYKGNVYQGRHEPIFDVEKFNLGLEIRKTRSKARAYCRTEPNLLTGLCYCGVCGCKMRYQKWGSDRRKMYCCSRNRYLDYLPNYNHDCDNSVEWADKIEEQVESEILKISLNLSSYKPKEKATKLEIMQSQLDKSKTKLRRLYELYADGNDMVLDMISNLENEIEISKERIKEESKNIQKENKKEYVYENIKNLADVWDTIDKTKKNTILKSIISKVVVVNGNVDIQLKSF

SEQ ID NO: 8535 - protein, 453 aa, Unknown
  Description of Unknown: Integrase B8536 sequence
  PTHR30461:SF3,IPR036162,PS51737,IPR011109,PTHR30461, PS00397,PF00239,G3DSA:1.10.10.2600,IPR006119,SSF53041, SM00857,IPR025827,IPR038109,PS51736,cd03768, IPR006118,PF13408,G3DSA:3.40.50.1390,PF07508,Coil
MIKGACYVRVSTDNQLENYSIEEQTDRLKAYCKAKDIQIVKIYTDGGYSGGNINRPALQQMLQDIGKGLIDSVIVYKLDRLSRSQKDTLMLIEDCFLAKNVDFVSVNENFDTSTPFGRAMIGILSVFAQLEKDQITERFTMGRIGRAKNGYFHGGGNTPTGYDYIDGELIINDYEALQVKDLYNRFLKGYSIHNCWQYMHQKYGGWSNEVSVRNVLKNELYIGKVKFKGVAYQGNHQPIISEDLFRQVQDLFNSSKRSSNTFKRSPFKASTLLSSIVYCGKCGARFHGEHGNYSCYSRTKGDKKYIVDPNCKNKKWKIEELDKLVLDYITRLDFSKLQNSHPAPVPVTDYSLRLTEIDKQIEKLIDLYQVSGIPLESIQKKMDALTKEKEALLNVSKPKNVPITTLAEMITARDTLMSLADTGSLDEKRACLTMIIDRIIIDDDNVNIKLKQL

SEQ ID NO: 8536 - protein, 453 aa, Unknown
  Description of Unknown: Integrase B8537 sequence
  cd00338,SM00857,G3DSA:1.10.10.2600,IPR036162,PF13408, IPR025827,G3DSA:3.40.50.1390,PS51737,IPR006119,IPR038109, SSF53041,IPR011109,PTHR30461,PS51736,Coil, PF00239
MECVAYMRVSTEKQVEEGYGLESQQRDIKEYCQKNNMIISHWYIDAGLTGMEMSKRVALQELISDLKKIDKVVIYKLDRLSRDSVDALNMIEKIFVPRNVEVLSVHDFAKYKTPQDKFQTQIMAAVAEYDRNTMLLRMRGGMLERIKQGYWPGGGNTPYCYSYSKETGTLVPIPGRKKQANEAIDLFLQGYSDNKIRDMLGFKSEFVVRHILTSKVNIGYIPYKGKIYKGKHEPIFELDKFNLAQEVRKNRRKKKTTCISKEPNLLTGLCYCGVCGCAMRYQKWTHGKHKIYCMSRNKSMNYLPNYNADCNNSLEWAVDIEKQVEEEIIKISLNLSSEKPVAKQSKIEILQSQIKKEENRRKRLFNLYADGNDDVLVSIKEINNTIKDLEEQLENEISNANINKKKSITYKNIKKIADVWDSIDKRDKNTILKSIIDKIVIVNGNIEIQLKNF

SEQ ID NO: 8537 - protein, 453 aa, Unknown
  Description of Unknown: Integrase B8538 sequence
  SM00857,IPR006118,G3DSA:1.10.10.2600,IPR036162,PS51737, G3DSA:3.40.50.1390,Coil,IPR006119,IPR038109,SSF53041, IPR011109,PTHR30461,PS00397,PS51736,cd00338, PF00239
MECVAYIRVSTERQVEEGYGLESQKRDIEEYCKKNEMLITDWYIDAGLSGMDMSKRVELQRLISDISKINNIVVYKLDRLARDSVDALYMIEKLFTPKGVRVNSVHDFARYETPQDKFQTHIMAAVAEYDRNTMLLRMRGGMLERVKNGYWMGGGNTPYCYRYDKNLGYLVPIPERAEQANRAMDLFIDGMSDVKIQRLLGYKSEFVVRNILTGVVNIGYIPYKGGTYKGLHESIFEHDKFYLAQELRKSRRKQHIYSFTEPHLLTGLCYCKTCGCKMRYQKITGMGIHKIYCCSHDKYLDYLPNYNADCDNPGAWASDIEKAFEHEILDISINLSQYKPKAKETKLQILTNQLEKQKSKLKRLYTLYAEGNDMVLDMIKTLETEIRETTEKISAERKNGQHEQKKEFVYENIKKLADIWDGISKSQKNSILKTIIDKVIVGKDDIEIQLKNF

SEQ ID NO: 8538 - protein, 453 aa, Unknown
  Description of Unknown: Integrase B8539 sequence
  PTHR30461:SF3,SM00857,G3DSA:1.10.10.2600,IPR036162,PF13408, IPR025827,PS51737,G3DSA:3.40.50.1390,IPR006119,IPR038109, IPR011109,SSF53041,PTHR30461,Coil,PS51736, cd00338,PF00239
MECVAYMRVSTEKQAEEGNGLDSQKRDIELFCRKNELVVSDWYVDDGYTGANMDRPELQRLINDCIKKRVKCVVAFKLDRLSRSMIDGLYIIERVFQPNQVLFKCVHDSVSYDSPMEQAYTQMMAVFAQLDKNTMMLRMRGGMLERIKQGYWIGGANTPYCYNYSKEKGILIPIPERKEQANRALDMFIGGYSDLYIKESLGFHSEVLVRNVLTGVVNIGMIPYKGNVYQGLHEPIFDKERFELAQEIRKSRRKNKTACHTDANLLTGLCYCGVCGCKMRYQKWTHGKHKIYCCSRDKAMKYLPNFNPDCNNSLEWAADIEKQVESEILKISLNLSECKPIEKQSKLEIMQSQFEKEQVKLKRLYVLYSDGNDTVLEMIKNTEKSISEMKVKITEEEKNERNSQKKEVVYENIKKLADVWAHIDKKEKNNILKSIISRIVIVNGDVEIQLKNF

SEQ ID NO: 8539 - protein, 453 aa, Unknown
  Description of Unknown: Integrase B8540 sequence
  PTHR30461:SF3,SM00857,IPR006118,G3DSA:1.10.10.2600,IPR036162, PS51737,G3DSA:3.40.50.1390,Coil,IPR006119,IPR038109, SSF53041,IPR011109,PTHR30461,PS00397,PS51736, cd00338,PF00239
MECVAYIRVSTERQVEEGYGLESQKRDIEEYCKKNEMLITDWYIDAGLSGMDMSKRVELQRLISDISKINNIVVYKLDRLARDSVDALYMIEKLFTPKGVRVNSVHDFARYETPQDKFQTHIMAAVAEYDRNTMLLRMRGGMLERVKNGYWMGGGNTPYCYRYDKNLGYLVPIPERAEQANRAMDLFIGGMSDVKIQRLLGYKSEFVVRNILTGVVNIGYIPYKGGTYKGLHEPIFEHDKFYLAQELRKSRRKQHVYSFTEPHLLTGLCYCKTCGCKMRYQKITGMGIHKIYCCSHDKYLDYLPNYNTDCDNPGAWASDIEIAFEHEILGISINLSQYKPKAKETKLQILTNQLEKQKSKLKRLYTLYAEGNDMVLDMIKTLETEIRETTEKISAERKNGQHEQKKEFVYENIKKLADIWDGISKSQKNSILKTIIDKVIVGKDDIEIQLKNF

SEQ ID NO: 8540 - protein, 453 aa, Unknown
  Description of Unknown: Integrase B8541 sequence
  SM00857,IPR006118,G3DSA:1.10.10.2600,IPR036162,PS51737, G3DSA:3.40.50.1390,Coil,IPR006119,IPR038109,SSF53041, IPR011109,PTHR30461,PS00397,PS51736,cd00338, PF00239
MECVAYIRVSTERQVEEGYGLESQKRDIEEYCKKNEMLITDWYIDAGLSGMDMSKRVELQRLISDISKINNIVVYKLDRLARDSVDALYMIEKLFTPKGVRVNSVHDFARYETPQDKFQTHIMAAVAEYDRNTMLLRMRGGMLERVKNGYWMGGGNTPYCYRYDKNLGYLVPIPERAEQANRAMDLFIGGMSDVKIKRLLGYKSEFVVRNILTGVVNIGYIPYKGGTYKGLHEPIFEHDKFYLAQELRKSRRKQHVYSFTEPHLLTGLCYCKTCGCKMRYQKITGMGIHKIYCCSHDKYLDYLPNYNADCDNPGAWASDIEKAFEHEILDISINLSQYKPKAKETKLQILTNQLEKQKAKLKRLYTLYAEGNDMVLDMIKTLETEIRETTKKISTERKDGQHEQKKEFVYENIKKLADIWDGISKSQKNSILKTIIDKVIVGKDDIEIQLKNF

SEQ ID NO: 8541 - protein, 453 aa, Unknown
  Description of Unknown: Integrase B8542 sequence
  PTHR30461:SF3,SM00857,G3DSA:1.10.10.2600,IPR036162,PF13408, IPR025827,G3DSA:3.40.50.1390,IPR006119,IPR038109,SSF53041, PTHR30461,Coil,PS51736,cd00338,PF00239
MKCVAYMRVSTEKQAEEGNGLESQKRDIENYCRKNELIIADWYVDEGYTGSNMNRPELQRLITDCSRKKVNCVVAFKLDRISRSMVDGIYIIEKVFQSNNVAFKCVHDSISYDSPMEQAYTQMMAVFAQLDKNTMMLRMRGGMLERIKQGYWWGGGNTPYCYRYDKEQGILIPIQERAEQARKALELFISGYSDAKIKEICGFKSELVTRKVLTGVVNIGMIPYKGNIYQGKHKPIFDKDRFELAQELRKSRCSAKISCFTEPNLLTGLCYCGVCGCKMRYQKWSNGNHKIYCCSRNKGLKYLPNYNPNCNNSLEWADDIEKQVTDEILKISLNLSSYKPKAKETKLQIMQSQLEREQTKLKRLYSLYADGNDTVLEMIKDLESQISKTKEDISVESKNAINTQKKEFTYQNIKKLADVWDNIDKKQKNFILKTIIDKVIIVNGNVEIQLKNF

SEQ ID NO: 8542 - protein, 453 aa, Unknown
  Description of Unknown: Integrase B8543 sequence
  PTHR30461:SF3,cd00338,SM00857,G3DSA:1.10.10.2600,IPR036162, PF13408,IPR025827,G3DSA:3.40.50.1390,IPR006119,IPR038109, SSF53041,PTHR30461,PS51736,Coil, PF00239
MECVAYMRVSTEKQAVEGNGLDSQKRDIENYCRKNELVITDWYIDDGYTGTNMDRPELQRLVNDCSRKRVSCVVAFKLDRLSRNMIDGIYLIEKVFQKYNVVFKCVHDSVNYDSPMEQAYTQMMAVFAQLDKNTMMLRMRGGMLERIKQGYWMGGGNLPYCYSYSKEQGILIPIPERAEQARKGLELFISGYSDAKIKEICGFKSELVTRSILTGVVNIGMIPYKGKIYQGKHEPIFDKDRFNLGLELRKSRCSAKTYCITEPNLLTGLCYCGICGCKMRYQKWGSEKHKIYCCSRNKSLSYLPNYNASCNNSLEWADEIEKQVEEEILKISLDLSFYKPKEKATKLEIMQSQLDKEQTKLKRLYNLYADGNDTVLEMIKELEAQIKEMKANIAVESKNAINTQKKEFVYENIKKLADIWDKVDKKQKNLILKTIIDKIVIVNGNIEIQLKNF

SEQ ID NO: 8543 - protein, 453 aa, Unknown
  Description of Unknown: Integrase B8544 sequence
  SM00857,G3DSA:1.10.10.2600,IPR036162,PF13408,IPR025827, G3DSA:3.40.50.1390,PS51737,IPR006119,IPR038109,SSF53041, IPR011109,PTHR30461,Coil,PS51736,cd00338, PF00239
MECVAYMRVSTEKQAEEGNGLDSQKRDIQNYCRKNKLIITDWYIDDGYTGSNMDRPELQRLISDCSKKRVKCVVAFKLDRLSRSMIDGIYMIERIFQPNNIEFYCVHDSVSYDSPMEQAYTQMMAVFSQLDKNTMLLRMRGGMLERVKKGYWMGGGNTPYCYEYDKEQGILVPIPEKAEQARQALELFIDGYSDRSISDMLHFSSDIVVSRILTSPVNIGMIPYKGKMYQGLHQPVFQRDRFELAQEVRKSRRKNRTYRKTEPNLLTGLCYCGVCGCKMRYQKWGCEKQKIHCCSRDKYLQYLPNYNANCDNMAIWADEIEKQVEEEIIKISLNLSEYKPKQKESKIEIMQKNLNRERTKLKRLYNLYAEGNDTVLEMIKEIEKTIGESKKRIEEEYKNIGNTNKKEYVYENINSLADVWNTISKTGKNSILKSIVEKIVIVNGDVEIVLKNF

SEQ ID NO: 8544 - protein, 453 aa, Unknown
  Description of Unknown: Integrase B8545 sequence
  PTHR30461:SF3,SM00857,G3DSA:1.10.10.2600,IPR036162,PF13408, IPR025827,G3DSA:3.40.50.1390,IPR006119,IPR038109,SSF53041, PTHR30461,Coil,PS51736,cd00338,PF00239
MECVAYMRVSTEKQAVEGNGLDSQKRDIENYCRKNELVITDWYIDDGYTGTNMDRPELQRLVNDCSRKRVSCVVAFKLDRLSRNMIDGIYLIEKVFQKYNVVFKCVHDSVNYDSPMEQAYTQMMAVFAQLDKNTMMLRMRGGMLERIKQGYWMGGGNLPYCYSYSKEQGILIPIPERAEQARKGLELFISGYSDAKIKEICGFKSELVTRSILTGVVNIGMIPYKGKIYQGKHEPIFDKDRFNLGLELRKSRCSAKTYCITEPNLLTGLCYCGICGCKMRYQKWGSEKHKIYCCSRNKSLSYLPNYNASCNNSLEWADEIEKQVEEEILKISLDLSSYKPKEKATKLEIMQSQLDKEQTKLKRLYNLYADGNDTVLEMIKELEAQIKEMKANIAVESKNAINTQKKEFVYENIKKLADIWDKVDKKQKNLILKTIIDKIVIVNGNIEIQLKNF

SEQ ID NO: 8545 - protein, 453 aa, Unknown
  Description of Unknown: Integrase B8546 sequence
  SM00857,G3DSA:1.10.10.2600,IPR036162,PF13408, IPR025827,PS51737,G3DSA:3.40.50.1390,IPR006119, IPR038109,SSF53041,IPR011109,PTHR30461, Coil,PS51736,cd00338,PF00239
MECVAYMRVSTEKQAEEGNGLDSQKRDIQNYCRKNKLIITDWYIDDGYTGSNMDRPELQRLINDCSKKRVKCVVAFKLDRLSRSMIDGIYMIERIFQPNNIEFYCVHDSVSYDSPMEQAYTQMMAVFSQLDKNTMLLRMRGGMLERVKKGYWMGGGNTPYCYEYDKEQGILVPIPEKAEQARQALELFVDGYSDRSISDMLHFSSDIVVSRILTSPVNIGMIPYKGKMYQGRHQPVFQRDRFELAQEVRKSRRKNRTYRKTEPNLLTGLCYCGVCGCKMRYQKWGCEKQKIHCCSRDKYLQYLPNYSANCDNMAIWADEIEKQVEEEIIKISLNLSEYKPKQKESKIEIMQKNLNREKTKLKRLYNLYAEGNDTVLEMVKELEKTIGESKKRIEEEYKNIGNTNKKEYVYENIKSLADVWNTISKTGKNSILKSIVEKIVIVNGDVEIVLKNF

SEQ ID NO: 8546 - protein, 453 aa, Unknown
  Description of Unknown: Integrase B8547 sequence
  PTHR30461:SF3,SM00857,G3DSA:1.10.10.2600,IPR036162,PF13408, IPR025827,G3DSA:3.40.50.1390,IPR006119,IPR038109,SSF53041, PTHR30461,Coil,PS51736,cd00338,PF00239
MECVAYMRVSTEKQAVEGNGLDSQKRDIENYCRKNELVITDWYIDDGYTGTNMDRPELQRLVNDCSRKRVSCVVAFKLDRLSRNMIDGIYLIEKVFQKYNVVFKCVHDSVNYDSPMEQAYTQMMAVFAQLDKNTMMLRMRGGMLERIKQGYWMGGGNLPYCYSYSKEQGILIPIPERAEQARKGLELFISGYSDAKIKEICGFKSELVTRNILTGVVNIGMIPYKGKIYQGKHEPIFDKDRFNLGLELRKSRCSAKTYCITEPNLLTGLCYCGICGCKMRYQKWGSEKHKIYCCSRNKSLSYLPNYNASCNNSLEWADEIEKQVEEEILKISLDLSSYKPKEKATKLEIMQSQLEKEQIKLKRLYNLYADGNDTVLEMIKELEAQIKEMKLNITAESKNAINTQKKEFVYENIKKLADIWDKVDKKQKNLILKTIIDKIVIVNGNIEIQLKNF

SEQ ID NO: 8547 - protein, 453 aa, Unknown
  Description of Unknown: Integrase B8548 sequence
  SM00857,IPR006118,G3DSA:1.10.10.2600,IPR036162, PS51737,G3DSA:3.40.50.1390,Coil,IPR006119, IPR038109,IPR011109,SSF53041,PTHR30461, PS00397,PS51736,cd00338,PF00239
MECVAYIRVSTERQVEEGYGLESQKRDIEEYCKKNEMLITDWYIDAGLSGMDMSKRVELQRLISDISKINNIVVYKLDRLARDSVDALYMIEKLFTPKGVRVNSVHDFARYETPQDKFQTHIMAAVAEYDRNTMLLRMRGGMLERVKNGYWMGGGNTPYCYRYDKNLGYLVPIPERAEQANRAMDLFIDGMSDVKIQRLLGYKSEFVVRNILTGVVNIGYIPYKGGTYKGLHEPIFERDKFYLAQELRKSRRKQHVYSFTEPHLLTGLCYCKTCGCKMRYQKITGMGIHKIYCCSHDKYLDYLPNYNADCDNPGAWASDIEKAFEHEILDISINLSQYKPKAKETKLQILTNQLEKQKAKLKRLYTLYAEGNDMVLDMIKTLETEIRETTEKISTERKNGQHEQKKEFVYENIKKLADIWDGISKSQKNSILKTIIDKVIVGKDDIEIQLKNF

SEQ ID NO: 8548 - protein, 453 aa, Unknown
  Description of Unknown: Integrase B8549 sequence
  PTHR30461:SF3,SM00857,G3DSA:1.10.10.2600,IPR036162,PF13408, IPR025827,G3DSA:3.40.50.1390,IPR006119,IPR038109,SSF53041, PTHR30461,Coil,PS51736,cd00338,PF00239
MECVAYMRVSTEKQAVEGNGLDSQKRDIENYCRKNELVITDWYIDDGYTGANMDRPGLQRLVNDCSRKRVSCVVAFKLDRLSRNMIDGIYLIEKVFQKCNVTFKCVHDSVNYDSPMEQAYTQMMAVFAQLDKNTMMLRMRGGMLERIKQGYWMGGGNLPYCYSYSKEQGILIPIPERAEQARKALELFISGYSDVKIKEICGFKSELVTRNILTGIVNIGMIPYKGKIYQGKHEPIFGKGRFNLAQELRKTRAKSRATCQTEPNLLTGLCYCGVCGCAMRYQKWTNGEHKIYCMSRNKSMSYLPNYNANCNNSLEWADDIEKQVEKEVLKISLNLSSYKPKEKATKLEIMQSQLDKEQTKLKRLYNLYADGNDTVLEMIKESESLIKTMKANVLSESKSTANTQKKEFVYENIKKLADVWDNIDKKKKNMILKTIIDKIVIVNGNIEIQLKNF

SEQ ID NO: 8549 - protein, 453 aa, Unknown
  Description of Unknown: Integrase B8550 sequence
  PTHR30461:SF3,SM00857,G3DSA:1.10.10.2600,IPR036162,PF13408, PS51737,IPR025827,G3DSA:3.40.50.1390,IPR006119,IPR038109, PF07508,IPR011109,SSF53041,PTHR30461, Coil,PS51736,cd00338,PF00239
MECVAYMRVSTERQAEEGNGLESQKRDILDYCSKSELIVTDWYVDDGYTGANMNRPELQRLVTDCKHKRISCVVAFKLDRLSRNMIDGLYMIEKIFQPNGVQFKCVHDSVSYDSPMEQAYTQMMAVFAQLDKNTMMLRMRGGMLERVKQGYWPGGGNTPYCYSYSKDQGILIPIPERAEQARKGLELYIKGYSDIKICKICGYKGEKVVRQILTSPVNIGMIPYKGKIYQGLHEPIFDKELFELAQQLRKSRSLNKASCITEPNLLTGLCYCGVCGCAMRYQKWTHGKHKIYCMSRNKSMSYLPNHNPDCNNSLEWADDIEEQVEREMLKISLDLSSYKPKEKETKLDIMQSQLDKEQTKLKRLYGLYADGNDTVLSMIKELEGNISAIKENIAEEQKNFSARQKNAIVYDEIKKLADVWGNIDKKQKNMILKTIIDKIIIVNGNIEIQLKSF

SEQ ID NO: 8550 - protein, 453 aa, Unknown
  Description of Unknown: Integrase B8551 sequence
  PTHR30461:SF3,SM00857,G3DSA:1.10.10.2600,IPR036162,PF13408, IPR025827,G3DSA:3.40.50.1390,IPR006119,IPR038109,SSF53041, PTHR30461,Coil,PS51736,cd00338,PF00239
MECVAYMRVSTEKQAEEGNGLESQKRDIENYCRRNELIVTDWYIDDGYTGANMNRPELQRLISDCGKKKVKCVVAFKLDRISRSMIDGLYMIERIFQPNNVIFKCVHDSVSYNSPMEQAYTQMMAVFAQLDKNTMMLRMRGGMLERVKQGYWMGGGNLPYCYSYSKEQGILIPIPERAEQARKALELFISGYSDVKIKEICGFKGERIVYNVLTSVINIGMIPYKGEVYQGKHEPIFDKDKFNLGLELRKSRRSAKACCKTEPNLLTGLCYCGVCGCAMRYQKWTNGKHKIYCMSRNKSMSYLPNYNANCNNSIEWADYIEKQVEEEILKISLDLSSYKPKEKETKLEIMQSQLEKEQTKLKRLYGLYADGNDTVLSMIKELEAQIKEMKANIAAESKNTANMQKTEFVYENIKKLADVWDNIDKKQKNMILKSIIKKIVIVNGNIEIQLKNF

SEQ ID NO: 8551 - protein, 453 aa, Unknown
  Description of Unknown: Integrase B8552 sequence
  PTHR30461:SF3,cd00338,SM00857,G3DSA:1.10.10.2600,IPR036162, PF13408,IPR025827,G3DSA:3.40.50.1390,IPR006119,IPR038109, SSF53041,PTHR30461,PS51736,Coil, PF00239
MECVAYMRVSTEKQAEEGNGLESQKRDILDYCSKNELIVTDWYVDDGYTGTNMNRPELQRLVADCKHKRISCVVAFKLDRLSRNMIDGLYMIEKIFQPNGVQFKCVHDSVSYDSPMEQAYTQMMAVFAQLDKNTMMLRMRGGMLERVKQGYWMGGGNLPYCYSYDKDSGILIPIAERKEQANKALELYISGYSDAMICEICGYKGERVVNRILTSTVNIGMIPYKGKIYQGLHEPIFDKERFELARQLRKSRSLNKASCITEPNLLTGLCYCGVCGCAMRYQKWTHGKHKIYCMSRNKAMSYLPNHKPDCNNSLEWADDIEEQVEKEMLKISLDLSSYKPKEKETKLDIMQSQLDKEQAKLKRLYGLYADGNDTVLSMIKELEANISAIKENIAEERKNFSARQKNTIVYDEIKKLADVWDSIDKKQKNMILKTIIDKIIIVNGNIEIQLKNF

SEQ ID NO: 8552 - protein, 453 aa, Unknown
  Description of Unknown: Integrase B8553 sequence
  SM00857,G3DSA:1.10.10.2600,IPR036162,PF13408,IPR025827, G3DSA:3.40.50.1390,PS51737,IPR006119,IPR038109,SSF53041, IPR011109,PF00239,PTHR30461,PS51736,Coil, cd00338
MKRKIRCAIYDRVSHELQVEKGLSLDTQKEMLTSYAKEQGYEIVDYYQDEGISARKTMKNRKELLRLLEDVKADKIDIILVTKLDRWFRSVKDYHNTQAILDAHHCAWKTILEDYDTTTSDGQLKINIMLAVAQNEADRTSERIKVVFSHKIRNKEHLNGPVPWGYMVDEKKHLVKDPEIAPIVEDMFNHYFTTFSKRETIMYIRSKYPGKTPEGNSLAKIFSNATYAGIRFGIENYCDAYLTWEQHKKIVESTTAKVYPATHPQQTYIFSGMLRCPHCGKMLSGYVRKAKKAGRTYEYPAYRCNKRYNKHSAPVKTEKIVEQYVLEFFEEELNRSIYDLELKEGLSKGEKTANVSVLQDELNRINIMFEKGRISLDYYDKRYEEIETQIKEATVSHSKELRARKEIRDGLDGNWKELYLQLDASHKRAFWKNIIKEILIDPETHELNGIIFF

SEQ ID NO: 8553 - protein, 453 aa, Unknown
  Description of Unknown: Integrase B8554 sequence
  PTHR30461:SF3,SM00857,G3DSA:1.10.10.2600,IPR036162,PF13408, IPR025827,G3DSA:3.40.50.1390,IPR006119,IPR038109,SSF53041, PTHR30461,Coil,PS51736,cd00338,PF00239
MKCVAYMRVSTEKQAEEGNGLESQKRDIENYCRKNELIIADWYVDEGYTGSNMNRPELQRLITDCSRKKVNCVVAFKLDRISRSMVDGIYIIEKVFQSNNVAFKCVHDSISYDSPMEQAYTQMMAVFAQLDKNTMMLRMRGGMLERIKQGYWWGGGNTPYCYRYDKEQGILIPIQERAEQARKALELFISGYSDEKIKEICGFKSELVTRKVLTGVVNIGMIPYKGNIYQGKHKPIFDKDRFELAQELRKSRCSAKISCFTEPNLLTGLCYCGVCGCKMRYQKWSNGNHKIYCCSRNKGLKYLPNYNPNCNNSLEWADDIEKQVTDEILKISLNLSSYKPKAKETKLEIMQSQLEREQTKLKRLYSLYADGNDTVLEMIKDLESQISKTKEDISVESKNAINTQKKEFTYQNIKKLADVWDNIDKKQKNFILKTIIDKVIIVNGNVEIQLKNF

SEQ ID NO: 8554 - protein, 453 aa, Unknown
  Description of Unknown: Integrase B8555 sequence
  PTHR30461:SF3,IPR036162,PS51737,IPR011109,PTHR30461, PS00397,PF00239,G3DSA:1.10.10.2600,IPR006119,SSF53041, SM00857,IPR025827,IPR038109,PS51736, cd03768,IPR006118,PF13408,G3DSA:3.40.50.1390,PF07508,Coil
MIKGACYVRVSTDNQLENYSIEEQTDRLKAYCKAKDIQIVKIYTDGGYSGGNVNRPALQQMLQDIGKGLIDSVIVYKLDRLSRSQKDTLMLIEDCFLAKNVDFVSVNENFDTSTPFGRAMIGILSVFAQLEKDQITERFTMGRIGRAKNGYFHGGGNAPTGYDYIDGELIINDYEALQVKDLYNRFLKGYSIHNCWQYMQQKYGGWSSEVLVRNVLRNELYIGKVKFKGVAYQGNHQPIISEDLFRQVQDLFNSSKRSSNTFKRSPFKASTLLSSIVYCGKCGARFHGEHGNYSCYSRTKGDKKYIVDPNCKNKKWKIEELDRLVLDYITRLDFSKLHNSHPVPVPSTDYSFRLAEIDKQIGKLIDLYQVSGIPLETIQEKMDALNKEKEALLIISKPKNVPVTTLAEMITARDTLMSLSDSGSLDEKRACLTMIIDRIIIDDDNVNIKLKQL

SEQ ID NO: 8555 - protein, 453 aa, Unknown
  Description of Unknown: Integrase B8556 sequence
  PTHR30461:SF3,SM00857,G3DSA:1.10.10.2600,IPR036162,PF13408, IPR025827,G3DSA:3.40.50.1390,IPR006119,IPR038109,SSF53041, PTHR30461,Coil,PS51736,cd00338,PF00239
MECVAYMRVSTEKQAVEGNGLDSQKRDIENYCRKNELVITDWYIDDGYTGTNMDRPELQRLVNDCSRKRLSCVVAFKLDRLSRNMIDGIYLIEKVFQKYNVVFKCVHDSVNYDSPMEQAYTQMMAVFAQLDKNTMMLRMRGGMLERIKQGYWMGGGNLPYCYSYSKEQGILIPIPERAEQARKGLELFISGYSDAKIKEICGFKSELVTRSILTGVVNIGMIPYKGKIYQGKHEPVFDKDRFNLGLELRKSRCSAKTYCITEPNLLTGLCYCGICGCKMRYQKWGSEKHKIYCCSRNKSLSYLPNYNASCNNSLEWADEIEKQVEEEILKISLDLSSYKPKEKATKLEIMQSQLEKEQIKLKRLYNLYADGNDTVLEMIKELEAQIKEMKLNITAESKNAINTQKKEFVYENIKKLADIWDKVDKKQKNLILKTIIDKIVIVNGNIEIQLKNF

SEQ ID NO: 8556 - protein, 453 aa, Unknown
  Description of Unknown: Integrase B8557 sequence
  PTHR30461:SF3,SM00857,G3DSA:1.10.10.2600,IPR036162,PF13408, IPR025827,G3DSA:3.40.50.1390,IPR006119,IPR038109,SSF53041, PTHR30461,Coil,PS51736,cd00338, PF00239
MECVAYMRVSTEKQAVEGNGLDSQKRDIENYCRKNELVITDWYIDDGYTGTNMDRPELQRLVNDCSRKRLSCVVAFKLDRLSRNMIDGIYLIEKVFQKYNVVFKCVHDSVNYDSPMEQAYTQMMAVFAQLDKNTMMLRMRGGMLERIKQGYWMGGGNLPYCYSYSKEQGILIPIPERAEQARKGLELFISGYSDAKIKEICGFKSELVTRSILTGVVNIGMIPYKGKIYQGKHEPVFDKDRFNLGLELRKSRCSAKTYCITEPNLLTGLCYCGICGCKMRYQKWGSEKHKIYCCSRNKSLSYLPNYNASCNNSLEWADEIEKQVEEEILKISLDLSSYKPKEKATKLEIMQSQLEKEQIKLKRLYNLYADGNDTVLEMIKELEAQIKEMKLNIAAESKNAINTQKKEFVYENIKKLADIWDKVDKKQKNLILKTIIDKIVIVNGNIEIQLKNF

SEQ ID NO: 8557 - protein, 453 aa, Unknown
  Description of Unknown: Integrase B8558 sequence
  cd00338,SM00857,G3DSA:1.10.10.2600,IPR036162,PF13408, IPR025827,G3DSA:3.40.50.1390,PS51737,IPR006119,IPR038109, SSF53041,IPR011109,PTHR30461,PS51736,Coil, PF00239
MECVAYMRVSTEKQAEEGNGLDSQKRDIQNYCRKNKLIITDWYIDDGYTGSNMDRPELQRLINDCSKKRVKCVVAFKLDRLSRSMIDGIYMIERIFQPNNIEFYCVHDSVSYDSPMEQAYTQMMAVFSQLDKNTMLLRMRGGMLERVKKGYWMGGGNTPYCYEYDKEQGILVPIPEKAEQARQALELFIDGYSDRSISDMLHFSSDIVVSRILTSPVNIGMIPYKGKMYQGRHQPVFQRDRFELAQEVRKSRRKNRTYRKKEPNLLTGLCYCGVCGCKMRYQKWGCEKQKIHCCSRDKYLQYLPNYSTNCDNMAIWADEIEKQVEEEIIKISLNLSEYKPKQKESKIEIMQKNLNREKTKLKRLYNLYAEGNDTVLEMIKEVEKTIGESKKRIEEEYKNIGNTNKKEYVYENIKSLADVWNTISKTGKNSILKSIVEKIVIVNGDVEIVLKNF

SEQ ID NO: 8558 - protein, 453 aa, Unknown
  Description of Unknown: Integrase B8559 sequence
  PTHR30461:SF3,SM00857,G3DSA:1.10.10.2600,IPR036162,PF13408, IPR025827,G3DSA:3.40.50.1390,IPR006119,IPR038109,SSF53041, PTHR30461,Coil,PS51736,cd00338,PF00239
MECVAYMRVSTEKQAVEGNGLDSQKRDIENYCRKNELVITDWYIDDGYTGTNMDRPELQRLVNDCSRKRVSCVVAFKLDRLSRNMIDGIYLIEKVFQKYNVVFKCVHDSVSYNSPMEQAYTQMMAVFAQLDKNTMMLRMRGGMLERIKQGYWMGGGNLPYCYSYSKEQGILIPIPERAEQARRGLELFISGYSDAKIKEICGFKSELVTRSILTGVVNIGMIPYKGKIYQGKHEPIFDKDRFNLGLELRKSRCSAKTYCITEPNLLTGLCYCGICGCKMRYQKWGSEKHKIYCCSRNKSLSYLPNYNASCNNSLEWADEIEKQVEEEILKISLDLSSYKPKEKATKLEIMQSQLEKEQIKLKRLYNLYADGNDTVLEMIKELEAQIKEMKANIAVESKNAINTQKKEFVYENIKKLADIWDKVDKKQKNLILKTIIDKIVIVNGNIEIQLKNF

SEQ ID NO: 8559 - protein, 453 aa, Unknown
  Description of Unknown: Integrase B8560 sequence
  PTHR30461:SF3,SM00857,G3DSA:1.10.10.2600,IPR036162,PF13408, IPR025827,G3DSA:3.40.50.1390,IPR006119,IPR038109,SSF53041, PTHR30461,Coil,PS51736,cd00338, PF00239
MECVAYMRVSTEKQAVEGNGLDSQKRDIENYCRKNELVITDWYVDDGYTGTNMDRPELQRLVNDCSRKRISCVVAFKLDRLSRNMIDGIYLIEKVFQKYGVMFKCVHDSVNYDSPMEQAYTQMMAVFAQLDKNTMMLRMRGGMLERVKQGYWFGGGNLPYCYSYSKDQGILIPIQEHAEQARKGLELFISGYSDAKIKEICGFRSELVTRSILTSVVNIGMIPYKGKIYQGKHEAVFDKDRFELGLELRKSRCLAKTYCITEPNLLTGLCYCGVCGCKMRYQKWGSKKHKIYCCSRNKSLSYLPNYNASCNNSLEWADEIEKQVEEEILKISLDLSSYKPKEKATKLEIMQSQLEKEQIKLKRLYNLYADGNDTVLEMIKELESQIKEMKSNIAAESKNAINTQKKEFVYENIKKLADIWDKVDKKQKNMILKTIIDRIIIVNGNIEIQLKNF

SEQ ID NO: 8560 - protein, 453 aa, Unknown
  Description of Unknown: Integrase B8561 sequence
  PTHR30461:SF3,SM00857,G3DSA:1.10.10.2600,IPR036162,PF13408, IPR025827,G3DSA:3.40.50.1390,IPR006119,IPR038109,SSF53041, PTHR30461,Coil,PS51736,cd00338,PF00239
MECVAYMRVSTEKQAVEGNGLDSQKRDIENYCRKNELVITDWYVDDGYTGTNMDRPELQRLVNDCSRKRVSYVVAFKLDRLSRNMIDGIYLIEKVFQKYNVVFKCVHDSVNYDSPMEQAYTQMMAVFAQLDKNTMMLRMRGGMLERVKQGYWFGGGNLPYCYSYSKDQGILIPIPEHAEQARKGLELFISGYSDAKIKEICGFRSELVTRSILTSVVNIGMIPYKGKIYQGKHEAVFDKDRFELGLELRKSRCSAKTYCITEPNLLTGLCYCGICGCKMRYQKWGSKKHKIYCCSRNKSLSYLPNYNASCNNSLEWADEIEKQVEEEILKISLDLSSYKPKEKATKLEIMQSQLEKEQIKLKRLYNLYADGNDTVLEMIKDLESQIKEMKSNIAAESKNAINTQKKEFVYENIKKLADIWDKVDKKQKNMILKTIIDRIVIVNGNIEIQLKNF

SEQ ID NO: 8561 - protein, 453 aa, Unknown
  Description of Unknown: Integrase B8562 sequence
  SM00857,IPR006118,G3DSA:1.10.10.2600,IPR036162, PS51737,G3DSA:3.40.50.1390,Coil,IPR006119, IPR038109,SSF53041,IPR011109,PTHR30461, PS00397,PS51736,cd00338,PF00239
MECVAYIRVSTERQVEEGYGLESQKRDIEEYCKKNEMLITDWYIDAGLSGMDMTKRVELQRLISDISKINDIVVYKLDRLARDSVDALYMIEKLFTPKGVRVNSVHDFARYETPQDKFQTHIMAAVAEYDRNTMLLRMRGGMLERVKNGYWMGGGNTPYCYRYDKNLGYLVPIPERAEQANRAMDLFIGGMSDVKIKRLLGYKSEFVVRNILTGVVNIGYIPYKGGTYKGLHEPIFEHDKFYLAQELRKSRRKQHVYSFTEPHLLTGLCYCKTCGCKMRYQKITGMGIHKIYCCSHDKYLDYLPNYNADCDNPGAWASDIEKAFEHEILDISINLSQYKPKAKETKLQILTNQLEKQKAKLKRLYTLYAEGNDMVLDMIKTLETEIRETTEKISTERNNGQHEQKKEFVYENIKKLADIWDGISKSQKNSILKTIIDKVIVGKDDIEIQLKNF

SEQ ID NO: 8562 - protein, 453 aa, Unknown
  Description of Unknown: Integrase B8563 sequence
  PTHR30461:SF3,cd00338,SM00857,G3DSA:1.10.10.2600,IPR036162, PF13408,IPR025827,G3DSA:3.40.50.1390,IPR006119,IPR038109, SSF53041,PTHR30461,PS51736,Coil,PF00239
MECVAYMRVSTEKQAVEGNGLDSQKRDIENYCRKNELVITDWYIDDGYTGANMDRPGLQRLVNDCSRKRVSCVVAFKLDRLSRNMIDGIYLIEKVFQKCNVVFKCVHDSVNYDSPMEQAYTQMMAVFAQLDKNTMMLRMRGGMLERIKQGYWMGGGNLPYCYSYSKEQGILMPIPERAEQARKALELFISGYSDVKIKEICGFKSELVTRNILTGIVNIGMIPYKGKIYQGKHEPIFDKGRFNLAQELRKTRAKSRATCQTEPNLLTGLCYCGVCGCAMRYQKWTNGEHKIYCMSRNKSMSYLPNYNANCNNSLEWADDIEKQVEKEILKISLNLSSYKPKEKATKLEIMQSQLDKEQTKLKRLYNLYADGNDTVLEMIKESESLVKTMKANVLSESKSTANTQKKEFVYENIKKLADVWNNIDKKKKNMILKTIIDKIVIVNGNIEIQLKNF

SEQ ID NO: 8563 - protein, 453 aa, Unknown
  Description of Unknown: Integrase B8564 sequence
  PTHR30461:SF3,IPR036162,PS51737,IPR011109,PTHR30461, PS00397,PF00239,G3DSA:1.10.10.2600,IPR006119,SSF53041, cd00338,SM00857,IPR025827,IPR038109, PS51736,IPR006118,PF13408,G3DSA:3.40.50.1390,Coil
MTDIGSGSSDIYLDLYLHDGATERTVMRIALYARVSTEEQAIHGLSIEAQSEALEEWAKQEHANVVGTYIDAGISARKPASKRPSMQRLLADIERGKIDMVVFTKLDRWFRNIAEYYKVQEILERHGVNWRTIHEDYDTSTASGRFKVNIMLAVAQDEADRTSERIKAVFDSKRKRGEVVSGSVPPGIKICNKKFIVDEDKAPIMRDVFNFFIANHSVYATQRYAANTHGFLRDTSTLKRLLANPLYRGRVVDEATFDLAKELLSVRSQRNSGSPRGRIYLFKGMLHCDVCGGMMSGIVCKDFYYYRCNKHTFTGNCPNSKYIRESHVEQWLLERVVSECDAYNSRITQERTERPRIDDAGIRRKMSKLKDLYLSDLIDRDEYERDYTELRQTLEKVQEAEPPARPIDVEYVRSAVAMYDDLERPEKKEFWMRIVKEIIAYPDGTFSFVLRNI

SEQ ID NO: 8564 - protein, 453 aa, Unknown
  Description of Unknown: Integrase B8565 sequence
  PTHR30461:SF3,SM00857,IPR006118,G3DSA:1.10.10.2600,IPR036162, PF13408,IPR025827,G3DSA:3.40.50.1390,Coil,IPR006119, IPR038109,SSF53041,PTHR30461,PS00397,PS51736, cd00338,PF00239
MECVAYIRVSTEKQAEEGYGIDSQKRDIIAYCRKNELIITDWYIDDGYTGANMDRPELNRLINDCSKKRVHFIVAFKLDRLSRSMVDGIYIIERIFQPNGIVFKCVHDSINYDSPMEQAYTQMMAVFAQLDKNTMLLRMRGGMIERVKKGYWMGGGNTPYCYNYDKESGILVPIPDRKRKANIAMDLFIEGHSDIYIKDTLGFSSELVVRSILTGVVNIGMIPYKGVIYQGLHEPIFEKDKFEEAQELRKLRRNHKQSCQADANILTGLCVCGICGCKMRYQKWTHGKHKIYCCSRNKHLSYLPNYNHSCNNSIEWADEIEEQVESKILKISLSLSEYKPKSKESKLEIMQLQLEREKTKLKRLYVLYSEGNDTVLEMIKSSENVVSETERKIEDEKRSIQESPKKETVFNNIKMLADVWPHINKQKKNNILKNIIEKVVIVNGDIEIQLKTF

SEQ ID NO: 8565 - protein, 453 aa, Unknown
  Description of Unknown: Integrase B8566 sequence
  PTHR30461:SF3,SM00857,G3DSA:1.10.10.2600,IPR036162,PF13408, IPR025827,G3DSA:3.40.50.1390,IPR006119,IPR038109,SSF53041, PTHR30461,Coil,PS51736,cd00338,PF00239
MECVAYMRVSTEKQAVEGNGLDSQKRDIENYCRKNELVITDWYIDDGYTGTNMDRPELQRLVNDCSRKRISCVVAFKLDRLSRNMIDGIYLIEKVFQKYNVMFKCVHDSVNYDSPMEQAYTQMMAVFAQLDKNTMMLRMRGGMLERVKQGYWFGGGNLPYCYSYSKEQGILIPIPEHAEQARKGLELFISGYSDAKIKEICGFRSELVTRSILTSVVNIGMIPYKGKTYQGKHEAIFDKDRFELGLELRKSRCSAKTYCITEPNLLTGLCYCGICGCKMRYQKWGSKKHKIYCCSRNKSLSYLPNYNESCNNSLEWADEIEKQVEEEILKISLDLSSYKPKEKATKLEIMQSQLDKEQAKLKRLYNLYADGNDTVLEMIKELESQIKEMKSSIAAESKNAINTQKKEFVYENIKKLADIWNNIDKKQKNMILKTIIDKIVIVNGNIEIQLKNF

SEQ ID NO: 8566 - protein, 453 aa, Unknown
  Description of Unknown: Integrase B8567 sequence
  PTHR30461:SF3,SM00857,G3DSA:1.10.10.2600,IPR036162,PF13408, PS51737,G3DSA:3.40.50.1390,IPR025827,IPR006119,IPR038109, SSF53041,IPR011109,PTHR30461,Coil, PS51736,cd00338,PF00239
MECVAYMRVSTEKQAEEGNGLDSQKRDIELFCRKNELVVADWYVDDGYTGANMDRPELQRLINDCIKKRVKCVVAFKLDRLSRSMIDGLYIIERVFQPNQVLFKCVHDSVSYDSPMEQAYTQMMAVFAQLDKNTMMLRMRGGMLERIKQGYWIGGANTPYCYNYSKEKGILIPIPERKEQANRALDMFIGGYSDLYIKESLGFHSEVLVRNVLTGVVNIGMIPYKGNVYQGLHEPIFDKERFELAQEIRKSRRKNKTACHTDANLLTGLCYCGVCGCKMRYQKWTHGKHKIYCCSRDKAMKYLPNFNPNCNNSLEWAADIEKQVESEILKISLNLSECKPIEKQSKLEIMQSQFEKEQVKLKRLYVLYSDGNDTVLEMIKNTEKSISEMKVKITEEEKNERNSQKKEVVYENIKKLADVWAHIDKKEKNNILKSIISRIVIVNGDVEIQLKNF

SEQ ID NO: 8567 - protein, 453 aa, Unknown
  Description of Unknown: Integrase B8568 sequence
  PTHR30461:SF3,IPR036162,PS51737,IPR011109,PTHR30461, PS00397,PF00239,G3DSA:1.10.10.2600,IPR006119,SSF53041, cd00338,SM00857,IPR025827,IPR038109,PS51736, IPR006118,PF13408,G3DSA:3.40.50.1390,Coil
MECVAYIRVSTERQVEEGYGLESQKRDIEEYCKKNEMLITDWYIDAGLSGMDMSKRVELQRLISDISKINNIVVYKLDRLARDSVDALYMIEKLFTPKGVRVNSVHDFARYETPQDKFQTHIMAAVAEYDRNTMLLRMRGGMLERVKNGYWMGGGNTPYCYRYDKNLGYLVPIPERAEQANRAMDLFIDGMSDVKIQRLLGYKSEFVVRSIMTGIVNIGYIPYKGGVYKGLHEPIFDREKFYLAQELRKSRRKQHIYCYTEPHLLTGLCYCRECGCKMRYQKITGMGIHKIYCCSHNSYLDYLPNHNPDCNNPGAWASDVEKAFEQEILEISINLSKYKPKAKETKLQILTNQLEKQKAKLKRLYTLYAEGNDMVLDMIKTLETEIRETTEKISAERKNGQHEQKKEFVYENIKKLADIWDGISKSQKNSILKTIIDKVIVGKDDIEIQLKNF

SEQ ID NO: 8568 - protein, 453 aa, Unknown
  Description of Unknown: Integrase B8569 sequence
  PTHR30461:SF3,cd00338,SM00857,G3DSA:1.10.10.2600,IPR036162, PF13408,IPR025827,G3DSA:3.40.50.1390,IPR006119,IPR038109, SSF53041,PTHR30461,PS51736,Coil,PF00239
MECVAYMRVSTEKQAVEGNGLDSQKRDIENYCRKNELVITDWYIDDGYTGTNMDRPELQRLVNDCSRKRVSCVVAFKLDRLSRNMIDGIYLIEKVFQKYNVVFKCVHDSVNYDSPMEQAYTQMMAVFAQLDKNTMMLRMRGGMLERIKQGYWMGGGNLPYCYSYSKEQGILIPIPERAEQARKGLELFISGYSDAKIKEICGFKSELVTRSILTGVVNIGMIPYKGKIYQGKHEPVFDKDRFNLGLELRKSRCSAKTYCITEPNLLTGLCYCGICGCKMRYQKWGSEKHKIYCCSRNKSLSYLPNYNASCNNSLEWADEIEKQVEEEILKISLDLSSYKPKEKATKLEIMQSQLEKEQIKLKRLYNLYADGNDTVLEMIKELEAQIKEMKLNITAESKNAINTQKKEFVYENIKKLADIWDKVDKKQKNLILKTIIDKIVIVNGNIEIQLKNF

SEQ ID NO: 8569 - protein, 453 aa, Unknown
  Description of Unknown: Integrase B8570 sequence
  SM00857,IPR006118,G3DSA:1.10.10.2600,IPR036162, PS51737,G3DSA:3.40.50.1390,Coil,IPR006119, IPR038109,IPR011109,SSF53041,PTHR30461, PS00397,PS51736,cd00338,PF00239
MECVAYIRVSTERQVEEGYGLESQKRDIEEYCKKNEMLITDWYIDAGLSGMDMTKRVELQRLISDISKINDIVVYKLDRLARDSVDALYMIEKLFTPKGVRVNSVHDFARYETPQDKFQTHIMAAVAEYDRNTMLLRMRGGMLERVKNGYWMGGGNTPYCYRYDKNLGYLVPIPERAEQANRAMDLFIDGMSDVKIQRLLGYKSEFVVRNILTGVVNIGYIPYKGGTYKGLHEPIYEHDKFYLAQELRKSRRKQHVYSFTEPHLLTGLCYCKTCGCKMRYQKITGMGIHKIYCCSHDKYLDYLPNYNVDCDNPGAWASDIEKAFEHEILDISINLSQYKPKAKETKLQILTNQLEKQKSKLKRLYTLYAEGNDMVLDMIKTLETEIRETTEKISTERNNGQHEQKKEFVYENIKKLADIWDGISKSQKNSILKTIIDKVIVGKDDIEIQLKNF

SEQ ID NO: 8570 - protein, 453 aa, Unknown
  Description of Unknown: Integrase B8571 sequence
  PTHR30461:SF3,SM00857,G3DSA:1.10.10.2600,IPR036162,PF13408, IPR025827,PS51737,G3DSA:3.40.50.1390,IPR006119,IPR038109, IPR011109,SSF53041,PTHR30461,Coil,PS51736, cd00338,PF00239
MECVAYMRVSTEKQAEEGNGLDSQKRDIELFCRKNELVVSDWYVDDGYTGANMDRPELQRLINDCIKKRVKCVVAFKLDRLSRSMIDGLYIIERVFQPNQVLFKCVHDSVSYDSPMEQAYTQMMAVFAQLDKNTMMLRMRGGMLERIKQGYWIGGANTPYCYNYSKEKGILIPIPERKEQANRALDMFIGGYSDLYIKESLGFHSEVLVRNVLTGVVNIGMIPYKGNVYQGLHEPIFDKERFELAQEIRKSRRKNKTACHTDANLLTGLCYCGVCGCKMRYQKWTHGKHKIYCCSRDKAMKYLPNFNPNCNNSLEWAADIEKQVESEILKISLNLSECKPIEKQSKLEIMQSQFEKEQVKLKRLYVLYSDGNDTVLEMIKNTEKSISEMKVKITEEEKNERNSQKKEVVYENIKKLADVWAHIDKKEKNNILKSIISRIVIVNGDVEIQLKNF

SEQ ID NO: 8571 - protein, 453 aa, Unknown
  Description of Unknown: Integrase B8572 sequence
  SM00857,IPR006118,G3DSA:1.10.10.2600,IPR036162,PF13408, IPR025827,G3DSA:3.40.50.1390,PS51737,IPR006119,IPR038109, SSF53041,IPR011109,PF00239,PTHR30461,PS00397, PS51736,Coil,cd00338
MKCVAYIRVSTEKQAEEGNGLDSQIRDIKNHCRKNGMIIDDWYVDDGYTGSNMDRPELQRLVNDCTRKRVECVVAFKLDRLSRSMIDGLYLIERVFQPNNVRFECVHDSVSYDSPMEQAYTQMMAVFAQLDKNTMMLRMRGGMLERVKQGYWMGGGNLPYCYSYDKNSGILVPIPEKADKAQKALDLFLDGYSDVKIKNMLGFKSEPVVKSILTSVVNIGKIPYKGNIYQGRHTPIFDQEKFELAQEMRKTRSKSKICCQTEPNLLTGLCYCGVCGCKMRYQKWTHGKHKIYCCSRSKDLSYIPNYDENCDNSIEWSDEIEEQVEKEIIRISLDLSSYKPKEKETKLDIMRFQLKKDKKRLKRLYALYADGNDTVIEMIKNLESQIEKTKKNISDEEKNNANSQKKEFVYENIKKIADVWKYTDKKHKNMILKTIIDKIVIVNGNIEIQLKKF

SEQ ID NO: 8572 - protein, 453 aa, Unknown
  Description of Unknown: Integrase B8573 sequence
  SM00857,G3DSA:1.10.10.2600,IPR036162,PF13408,IPR025827, PS51737,G3DSA:3.40.50.1390,IPR006119,IPR038109,IPR011109, SSF53041,PTHR30461,Coil,PS51736,cd00338, PF00239
MECVAYMRVSTEKQAEEGNGLDSQKRDIELFCRKNELVVSDWYVDDGYTGANMDRPELQRLINDCIKKRVKCVVAFKLDRLSRSMIDGLYIIERVFQPNQVLFKCVHDSVSYDSPMEQAYTQMMAVFAQLDKNTMMLRMRGGMLERIKQGYWIGGANTPYCYNYSKEKGILIPIPERKEQANRALDMFIGGYSDLYIKESLGFHSEVLVRNVLTGVVNIGMIPYKGNVYQGLHEPIFDKERFELAQEIRKSRRKNKTACHTDANLLTGLCYCGVCGCKMRYQKWTHGKHKIYCCSRDKAMKYLPNFNPDCNNSLEWAADIEKQVESEILKISLNLSECKPIEKQSKLEIMQSQFEKEQVKLKRLYVLYSDGNDTVLEMIKNTEKIISEMKVKITEEEKNERNSQKKEVVYENIKKLADVWAHIDKKEKNNILKSIISRIVIVNGDVEIQLKNF

SEQ ID NO: 8573 - protein, 453 aa, Unknown
  Description of Unknown: Integrase B8574 sequence
  PTHR30461:SF3,cd00338,SM00857,G3DSA:1.10.10.2600,IPR036162, PF13408,PS51737,G3DSA:3.40.50.1390,IPR025827,IPR006119, IPR038109,SSF53041,IPR011109,PTHR30461,PS51736, Coil,PF00239
MECVAYMRVSTEKQAEEGNGLDSQRRDIENYCRKNELVITDWYIDDGYTGANMDRPELQRLVSDCDRKRVGYVVAFKLDRISRSMVDGIYLIERVFLKNNVEFKCVHDSICYDNPMEQAYTQMMAVFAQLDKNTMLLRMRGGMLERVKQGYWMGGGNLPYCYTYSKDTGTLIPIPERKEQANKAMDLFLQGYSDVKIRDMLGFKSEFVVKQVLTSPVNIGMIPYKGNIYQGLHEPIFNKEVFEKAQQFRAIRKNKRASCHNIQTNLLTGLCYCGICGCAMRYQKWTHGKHKIYCCSRNKDLHYLPNHNPNCNNTLEWASDIEKAVEDEILLISANISEYKPRMKESKLEILQGQLEKEQTKRKRLYNLYAEGNDDVISMIKEIEKVIEDIRKQIREESAIETNKTRQNVFKNIKNLADIWEDIDKKQKNMLLKSIIEKIVISNGNIEIKLKDF

SEQ ID NO: 8574 - protein, 453 aa, Unknown
  Description of Unknown: Integrase B8575 sequence
  cd00338,SM00857,IPR006118,G3DSA:1.10.10.2600,IPR036162, PF13408,IPR025827,G3DSA:3.40.50.1390,PS51737,IPR006119, IPR038109,SSF53041,IPR011109,PTHR30461,PS00397, PS51736,Coil,PF00239
MKCVAYIRVSTEKQAEEGNGLDSQIRDIKNHCRKNGMIIDDWYVDDGYTGSNMDRPELQRLVNDCTRKRVECVVAFKLDRLSRSMIDGLYLIERVFQPNNVRFECVHDSVSYDSPMEQAYTQMMAVFAQLDKNTMMLRMRGGMLERVKQGYWMGGGNLPYCYSYDKNSGILVPIPEKADKAQKALDLFLDGYSDVKIKNMLGFKSEPVVKSILTSVVNIGKIPYKGNIYQGRHTPIFDQEKFELAQEMRKTRSKSKICCQTEPNLLTGLCYCGVCGCKMRYQKWTHGKHKIYCCSRSKDLSYIPNYDENCDNSIEWSDEIEEQVEKEIIRISLDLSSYKPKEKETKLDIMRFQLKKDKKRLKRLYALYADGNDTVIEMIKDLESQIEKTKKNISDEEKNNANSQKKEFVYENIKKIADVWKYTDKKHKNMILKTIIDKIVIVNGNIEIQLKKF

SEQ ID NO: 8575 - protein, 453 aa, Unknown
  Description of Unknown: Integrase B8576 sequence
  PTHR30461:SF3,IPR036162,PS51737,IPR011109,PTHR30461, PS00397,PF00239,G3DSA:1.10.10.2600,IPR006119,SSF53041, SM00857,IPR025827,IPR038109,PS51736,cd03768, IPR006118,PF13408,G3DSA:3.40.50.1390,PF07508,Coil
MIKGACYVRVSTDNQLENYSIEEQTDRLKAYCKAKDIQIVKIYTDGGYSGGNVNRPALQQMLQDIGKGLIDSVIVYKLDRLSRSQKDTLMLIEDCFLAKNVDFVSVNENFDTSTPFGRAMIGILSVFAQLEKDQITERFTMGRIGRAKNGYFHGGGNAPTGYDYIDGELVINDYEAIQVKELYNRFLKGYSIHNCWQYMQQKYGGWSSEVLVRNVLRNELYIGKVKFKGVAYQGNHQPIISEDLFRQVQDLFNSSKRSSNTFKRSPFKASTLLSSIVYCGKCGARFHGEHGNYSCYSRTKGDKKYIVDPNCKNKKWKIEELDRLVLDYITRLDFSKLHNSHPVPVPSTDYSFRLTEIDKQIGKLIDLYQVSGIPLETIQEKMDALNKEKEALLIISKPKNVPVTTLAEMITARDTLMSLSDSGSLDEKRACLTMIIDRIIIDDDNVNIKLKQL

SEQ ID NO: 8576 - protein, 453 aa, Unknown
  Description of Unknown: Integrase B8577 sequence
  SM00857,G3DSA:1.10.10.2600,IPR036162,PF13408,PS51737, IPR025827,G3DSA:3.40.50.1390,IPR006119,IPR038109,IPR011109, SSF53041,PTHR30461,Coil,PS51736,cd00338, PF00239
MECVAYMRVSTEKQAEEGNGLDSQKRDIELFCRKNELVVSNWYVDDGYTGANMDRPELQRLINDCIKKRVKCVVAFKLDRLSRSMIDGLYIIERVFQPNQVLFKCVHDSVSYDSPMEQAYTQMMAVFAQLDKNTMMLRMRGGMLERIKQGYWIGGANTPYCYNYSKEKGILIPIPERKEQANRALDMFISGYSDLYIKESLGFHSEVLVRNVLTGVVNIGMIPYKGNVYQGLHEPIFDKERFELAQEIRKSRRKNKTACHTDANLLTGLCYCGVCGCKMRYQKWTHGKHKIYCCSRDKAMKYLPNFNPDCNNSLEWASDIEKQVESEILKISLNLSECKPIEKQSKLEIMQSQFEKEQVKLKRLYVLYSDGNDTVLEMIKNTEKSISEMKVKITEEEKNGRNSQKKEVVYENIKKLADVWAHIDKKEKNNILKSIISRIVIVNGDVEIQLKNF

SEQ ID NO: 8577 - protein, 453 aa, Unknown
  Description of Unknown: Integrase B8578 sequence
  PTHR30461:SF3,cd00338,SM00857,G3DSA:1.10.10.2600,IPR036162, PF13408,IPR025827,G3DSA:3.40.50.1390,PS51737,IPR006119, IPR038109,PF07508,SSF53041,IPR011109,PTHR30461, PS51736,Coil,PF00239
MQKVTRAVFYIRVSHKEQVLHGLSLSAQKKHLQDYAKAHNLKVVNTYVDEGVSGRKPIRLRPALQEMLADAQENQFDLILFIKIDRYFRSVAEYHECQKILDKHKVKWNAINEDYDITTASGRAFVNMKLTVAEMEADQTGERIRDVNDYKVKQGQMITGAYPFGFKIEKRDGRSYLIHDPDTEHIVIDMIEHYLTYNSLRGVTLYINKKYNLNLLQDSVKRLLKNPYLCGQYRDNPNFCEPYISKETFDKMQEIRKKNIKVQRNHNTFLFSSLIRCDNCNALLSGFANRFNSNRVYNYYRCRNRFNQKTCNCPNVSERKLEKYLLENISTEFQNYFKKIELEEMKNNQKNTKTEMAKIRAEMDRLNFMFQKNRITSAVYNAEYEELESRLSDLHTVKTSKKRDLEPIKELLESDFVSVYSTLSQQNKQAFWRGIIKEIRQLGEPDHYAIIFL

SEQ ID NO: 8578 - protein, 453 aa, Unknown
  Description of Unknown: Integrase B8579 sequence
  PTHR30461:SF3,SM00857,IPR006118,G3DSA:1.10.10.2600,IPR036162, PS51737,G3DSA:3.40.50.1390,Coil,IPR006119,IPR038109, SSF53041,IPR011109,PTHR30461,PS00397,PS51736, cd00338,PF00239
MECVAYIRVSTERQVEEGYGLESQKRDIEDYCKKNEMLITDWYIDAGLSGMDMSKRVELQRLISDISKINDIVVYKLDRLARDSVDALYMIEKLFTPKGVRVNSVHDFARYETPQDKFQTHIMAAVAEYDRNTMLLRMRGGMLERVKNGYWMGGGNTPYCYRYDKNLGYLVPIPERAEQANRAMDLFIDGMSDLKIQRLLGYKSEFVVRNILTGVVNIGYIPYKGGTYKGLHEPIFESDKFYLAQELRKSRRKQHTYSLTEPHLLTGLCYCRTCGCKMRYQKITGMGIHKIYCCSHSKYLDYLPNYNTDCDNPGAWASDIEKAFEHEILDISINLSQYKPKAKETKLQILTKQLEKQKAKLKRLYTLYAEGNDMVLDMIKTSEAEIKETTEKISDERKNGQHEQKKEFVYENIKKLADIWDGISKSQKNSILKTIIDKVIVAKDDIEIQLKNF

SEQ ID NO: 8579 - protein, 453 aa, Unknown
  Description of Unknown: Integrase B8580 sequence
  PTHR30461:SF3,SM00857,G3DSA:1.10.10.2600,IPR036162,PF13408, IPR025827,G3DSA:3.40.50.1390,IPR006119,IPR038109,SSF53041, PTHR30461,Coil,PS51736,cd00338,PF00239
MECVAYMRVSTEKQAEEGNGLESQKRDILDYCSKNELIVTDWYVDDGYTGTNMNRPELQRLVADCKHKRISCVVAFKLDRLSRNMIDGLYMIEKIFQPNGVQFKCVHDSVSYDSPMEQAYTQMMAVFAQLDKNTMMLRMRGGMLERVKQGYWMGGGNLPYCYSYDKDSGILIPIAERKEQANKALELYISGYSDAMICEICGYKGERVVNRILTSTVNIGMIPYKGKIYQGLHEPIFDKERFELAQQLRKSRSLNKASCITEPNLLTGLCYCGVCGCAMRYQKWTHGKHKIYCMSRNKAMSYLPNHKPDCNNSLEWADDIEEQVEKEMLKISLDLSSYKPKEKETKLDIMQSQLDKEQAKLKRLYGLYADGNDTVLSMIKELEANISAIKENIAEERKNFSARQKNTIVYDEIKKLADVWDSIDKKQKNMILKTIIDKIIIVNGNIEIQLKNF

SEQ ID NO: 8580 - protein, 453 aa, Unknown
  Description of Unknown: Integrase B8581 sequence
  SM00857,G3DSA:1.10.10.2600,IPR036162,PF13408, IPR025827,G3DSA:3.40.50.1390,PS51737,IPR006119, IPR038109,SSF53041,IPR011109,PF00239, PTHR30461,PS51736,Coil,cd00338
MKRKIRCAIYDRVSHELQVEKGLSLDTQKEMLTSYAKEQGYEIVDYYQDEGISARKTMKNRKELLRLLEDVKADKIDIILVTKLDRWFRSVKDYHNTQAILDAHHCAWKTILEDYDTTTSDGQLKINIMLAVAQNEADRTSERIKVVFSHKIRNKEHLNGPVPWGYMVDEKKHLVKDPEIAPIVEDMFNHYFTTFSKRETIMYIRSKYPGKTPEGNSLAKIFSNATYAGIRFGIENYCDAYLTWEQHKKIVESTTAKVYPATHPQQTYIFSGMLRCPHCGKMLSGYVRKAKKAGRTYEYPAYRCNKRYNKHSAPVKTEKIVEQYVLEFFEEELNRSIYDLELKEGLSKSEKTANVSVLQDELNRINIMFEKGRISLDYYDKRYEEIETQIKEATVSHSKELRARKEIRDGLDGNWKELYLQLDASHKRAFWKNIIKEILIDPETHELNGIIFF

SEQ ID NO: 8581 - protein, 453 aa, Unknown
  Description of Unknown: Integrase B8582 sequence
  PTHR30461:SF3,G3DSA:1.10.10.2600,IPR036162,PF13408,IPR025827, G3DSA:3.40.50.1390,PS51737,IPR006119,IPR038109,PF07508, IPR011109,SSF53041,PTHR30461,Coil,cd00338, PF00239
MVYQLDRFARNRYDSAIYKSKLKKNGVRVLSARENITDDASGILVEGVLESMAEYFSAELSQKIHRGMEINAQKCLSNGSNPGLGFKVDKDRHFYVDEEEAEIVREIFERYASGETKAEIVKDLKRRKIKTSLGNDFTYNSLSRMLSNKRYIGVYMYKGQETPGGMPRILDDDIFYKVQDILDKNKKASARTHGEGEYLLTTKLFCGHCKNMMVGYGGTSKTGKRYHYYICKEARKKRCDKTIVGKKKIEDRVIAECLKLLTDDNIKFIAQKVAEECNKSPDNLTVKQLKKAIREADTAIENLWRGIEQGQSVPMLTERLNKRQAEKDALEEQLAIEENKRICLSEAQILAFLNFVCEMPLDDVNKRRAIINILVHSVYLYDDHFTLIINASKKPMSVDNIPLEEIEEAFNSDKTCTEQCSTMTSPAPPNKNRNFDTKRILIAVHFLSLKNGL

SEQ ID NO: 8582 - protein, 453 aa, Unknown
  Description of Unknown: Integrase B8583 sequence
  PTHR30461:SF3,SM00857,G3DSA:1.10.10.2600,IPR036162,PF13408, IPR025827,G3DSA:3.40.50.1390,IPR006119,IPR038109,SSF53041, PTHR30461,Coil,PS51736,cd00338,PF00239
MECVAYMRVSTEKQAVEGNGLDSQKRDIENYCRKNELVITDWYIDDGYTGTNMDRPELQRLVNDCSRKRVSCVVAFKLDRLSRNMIDGIYLIEKVFQKYNVVFKCVHDSVNYDSPMEQAYTQMMAVFAQLDKNTMMLRMRGGMLERIKQGYWMGGGNLPYCYSYSKEQGILIPIPERAEQARKGLELFISGYSDAKIKEICGFKSELVTRSILTGVVNIGMIPYKGKIYQGKHEPIFDKDRFNLGLELRKSRCSAKTYCITEPNLLTGLCYCGICGCKMRYQKWGSEKHKIYCCSRNKSLSYLPNYNASCNNSLEWADEIEKQVEEEILKISLDLSSYKPKEKATKLEIMQSQLDKEQTKLKRLYNLYADGNDTVLEMIKELEAQIKEMKANIAVESKNAINTQKKEFVYENIKKLADIWDKVDKKQKNLILKTIIDKIVIVNGIIEIQLKNF

SEQ ID NO: 8583 - protein, 453 aa, Unknown
  Description of Unknown: Integrase B8584 sequence
  PTHR30461:SF3,SM00857,IPR006118,G3DSA:1.10.10.2600,IPR036162, PS51737,G3DSA:3.40.50.1390,Coil,IPR006119,IPR038109, SSF53041,IPR011109,PTHR30461,PS00397, PS51736,cd00338,PF00239
MECVAYIRVSTERQVEEGYGLESQKRDIEEYCKKNEMLITDWYIDAGLSGMDMSKRVELQRLISDISKINNIVVYKLDRLARDSVDALYMIEKLFTPKGVRVNSVHDFARYETPQDKFQTHIMAAVAEYDRNTMLLRMRGGMLERVKNGYWMGGGNTPYCYRYDKNLGYLVPIPERAEQANRAMDLFIDGMSDVKIQRLLGYKSEFVVRNILTGVVNIGYIPYKGGTYKGLHEPIYEHDKFYLAQELRKSRRKQHVYSFTEPHLLTGLCYCKTCGCKMRYQKITGMGIHKIYCCSHDKYLDYLPNYNTDCDNPGAWASDIEIAFEHEILGISINLSQYKPKAKETKLQILTNQLEKQKSKLKRLYTLYAEGNDMVLDMIKTLETEIRETTEKISAERKNGQHEQKKEFVYENIKKLADIWDGISKSQKNSILKTIIDKVIVGKDDIEIQLKNF

SEQ ID NO: 8584 - protein, 453 aa, Unknown
  Description of Unknown: Integrase B8585 sequence
  SM00857,IPR006118,G3DSA:1.10.10.2600,IPR036162,PS51737, G3DSA:3.40.50.1390,Coil,IPR006119,IPR038109,SSF53041, IPR011109,PTHR30461,PS00397,PS51736,cd00338, PF00239
MECVAYIRVSTERQVEEGYGLESQKRDIEEYCKKNEMLITDWYIDAGLSGMDMSKRVELQRLISDVSKINNIVVYKLDRLARDSVDALYMIEKLFTPKGVRVNSVHDFARYETPQDKFQTHIMAAVAEYDRNTMLLRMRGGMLERVKNGYWMGGGNTPYCYRYDKNLGYLVPIPERAEQANRAMDLFIDGMSDVKIQRLLGYKSEFVVRNILTGVVNIGYIPYKGGTYKGLHESIFEHDKFYLAQELRKSRRKQHIYSFTEPHLLTGLCYCKTCGCKMRYQKITGMGVHKIYCCSHDKYLDYLPNYNADCDNPGAWASDIEKAFEHEILDISINLSQYKPKAKETKLQILTNQLEKQKSKLKRLYTLYAEGNDMVLDMIKTLETEIRETTEKISTERNNGQHEQKKEFVYENIKKLADIWDGISKSQKNSILKTIIDKVIVGKDDIEIQLKNF

SEQ ID NO: 8585 - protein, 453 aa, Unknown
  Description of Unknown: Integrase B8586 sequence
  PTHR30461:SF3,SM00857,IPR006118,G3DSA:1.10.10.2600,IPR036162, PS51737,PS00397,G3DSA:3.40.50.1390,IPR006119,IPR038109, IPR011109,SSF53041,PTHR30461,Coil,PS51736, cd00338,PF00239
MECVAYIRVSTERQVEEGYGLESQKRDIEEYCKKNEMLITDWYIDAGLSGMDMTKRVELQRLISDISKINDIVVYKLDRLARDSVDALYMIEKLFTPKGIRVNSVHDFARYETPQDKFQTHIMAAVAEYDRNTMLLRMRGGMLERVKNGYWMGGGNTPYCYRYDKNLGYLVPIPERAEQANRAMDLFIDGMSDVKIQRLLGYKSEFVVRNILTGVVNIGYIPYKGGTYKGLHEPIFEHDKFYLAQELRKSRRKQHVYSFTEPHLLTGLCYCKTCGCKMRYQKITGMGIHKIYCCSHDKYLDYLPNYNTDCDNPGAWASDIEIAFEHEILDISINLSQYKPKAKETKLQILTNQLEKQKSKLKRLYTLYAEGNDMVLNMIKSLETEIRETTEKISTERKNGQHEQKKEFVYENIKKLADIWDGISKSQKNSILKTIIDKVIVGKDDIEIQLKNF

SEQ ID NO: 8586 - protein, 453 aa, Unknown
  Description of Unknown: Integrase B8587 sequence
  PTHR30461:SF3,SM00857,G3DSA:1.10.10.2600,IPR036162,PF13408, IPR025827,PS51737,G3DSA:3.40.50.1390,IPR006119,IPR038109, IPR011109,SSF53041,PTHR30461,Coil,PS51736, cd00338,PF00239
MECVAYMRVSTEKQAEEGNGLDSQKRDIELFCRKNELVVSDWYVDDGYTGANMDRPELQRLINDCIKKRVKCVVAFKLDRLSRSMIDGLYIIERVFQPNQVLFKCVHDSVSYDSPMEQAYTQMMAVFAQLDKNTMMLRMRGGMLERIKQGYWIGGANTPYCYNYSKEKGILIPIPERKEQANRALDMFIGGYSDLYIKESLGFHSEVLVRNVLTGVVNIGMIPYKGNVYQGLHEPIFDKERFELAQEIRKSRRKNKTACHTDANLLTGLCYCGVCGCKMRYQKWTHGKHKIYCCSRDKAMKYLPNFNPNCNNSLEWAADIEKQVESEILKISLNLSECKPIEKQSKLEIMQSQFEKEHVKLKRLYVLYSDGNDTVLEMIKNTEKSISEMKVKITEEEKNERNSQKKEVVYENIKKLADVWAHIDKKEKNNILKSIISRIVIVNGDVEIQLKNF

SEQ ID NO: 8587 - protein, 453 aa, Unknown
  Description of Unknown: Integrase B8588 sequence
  SM00857,G3DSA:1.10.10.2600,IPR036162,PF13408,IPR025827, PS51737,G3DSA:3.40.50.1390,IPR006119,IPR038109,IPR011109, SSF53041,PTHR30461,Coil,PS51736,cd00338, PF00239
MECVAYMRVSTEKQAEEGNGLDSQKRDIELFCRKNELVVSDWYVDDGYTGANMDRPELQRLINDCIKKRVKCVVAFKLDRLSRSMIDGLYIIERVFQPNQVLFKCVHDSVSYDSPMEQAYTQMMAVFAQLDKNTMMLRMRGGMLERIKQGYWIGGANTPYCYNYSKEKGILIPIPERKEQANRALDMFIGGYSDLYIKESLGFHSEVLVRNVLTGVVNIGMIPYKGNVYQGLHEPIFDKERFELAQEIRKSRRKNKTACHTDANLLTGLCYCGVCGCKMRYQKWTHGKHKIYCCSRDKAMKYLPNFNPDCNNSLEWAADIEKQVESEILKISLNLSECKPIEKQSKLEIMQSQFEKEQVKLKRLYVLYSDGNDTVLEMIKTTEKIISEMKVKITEEEKNERNSQKKEAVYENIKKLADVWAHIDKKEKNNILKSIISRIVIVNGDVEIQLKNF

SEQ ID NO: 8588 - protein, 453 aa, Unknown
  Description of Unknown: Integrase B8589 sequence
  PTHR30461:SF3,SM00857,G3DSA:1.10.10.2600,IPR036162,PF13408, IPR025827,G3DSA:3.40.50.1390,IPR006119,IPR038109,SSF53041, PTHR30461,Coil,PS51736,cd00338,PF00239
MKCVAYMRVSTEKQAEEGNGLESQKRDIENYCRKNELIIADWYVDEGYTGSNMNRPELQRLITDCSRKKVNCVVAFKLDRISRSMVDGIYIIEKVFQSNNVAFKCVHDSISYDSPMEQAYTQMMAVFAQLDKNTMMLRMRGGMLERIKQGYWWGGGNTPYCYRYDKEQGILIPIPERAEQARKALELFISGYSDAKIKEICGFKSELVTRKVLTGVVNIGMIPYKGNIYQGKHKPIFDKDRFELAQELRKSRCSAKISCFTEPNLLTGLCYCGVCGCKMRYQKWSNGNHKIYCCSRNKGLKYLPNYNPNCNNSLEWADDIEKQVTDEILKISLNLSSYKPKAKETKLEIMQSQLEREQTKLKRLYSLYADGNDTVLEMIKDLESQISKTKEDISVESKNAINTQKKEFTYQNIKKLADVWDNIDKKQKNFILKTIIDKVIIVNGNVEIQLKNF

SEQ ID NO: 8589 - protein, 453 aa, Unknown
  Description of Unknown: Integrase B8590 sequence
  SM00857,G3DSA:1.10.10.2600,IPR036162,PF13408, IPR025827,G3DSA:3.40.50.1390,PS51737,IPR006119, IPR038109,IPR011109,SSF53041,PTHR30461, PS51736,cd00338,PF00239
MECVAYMRVSTEKQAEEGNGLDSQKRDIELFCRKNELVVSDWYVDDGYTGANMDRPELQRLINDCIKKRVKCVVAFKLDRLSRSMIDGLYIIERVFQPNQVLFKCVHDSVSYDSPMEQAYTQMMAVFAQLDKNTMMLRMRGGMLERIKQGYWIGGANTPYCYNYSKEKGILIPIPERKEQANRALDMFIGGYSDLYIKESLGFHSEVLVRNVLTGVVNIGMIPYKGNVYQGLHEPIFDKERFELAQEIRKSRRKNKTACHTDANLLTGLCYCGVCGCKMRYQKWTHGKHKIYCCSRDKAMKYLPNFNPDCNNSLEWAADIEKQVESEILKISLNLSECKPIEKQSKLEIMQSQFEKEQVKLKRLYVLYSDGNDTVLEMIKNTEKIIFEMKVKITEEEKNERNSQKKEVVYESIKKLADVWAHIDKKEKNNILKSIISRIVIVNGDVEIQLKNF

SEQ ID NO: 8590 - protein, 453 aa, Unknown
  Description of Unknown: Integrase B8591 sequence
  PTHR30461:SF3,SM00857,G3DSA:1.10.10.2600,IPR036162,PF13408, IPR025827,G3DSA:3.40.50.1390,IPR006119,IPR038109,SSF53041, PTHR30461,Coil,PS51736,cd00338,PF00239
MECVAYMRVSTEKQAEEGNGLESQKRDILDYCSKNELIVTDWYVDDGYTGANMDRPELQRLVADCKHKRLSCVVAFKLDRLSRNMIDGLYMIEKIFQPNGVQFKCVHDSVSYDSPMEQAYTQMMAVFAQLDKNTMMLRMRGGMLERVKQGYWPGGGNTPYCYSYSKDQGILIPIPERAEQARKGLELFISGYSDARIKEICGFKLESVVRKVLTSEVNIGMIPYKGKIYQGLHEPIFDKELFELAQQLRKSRSLNKASCITEPNLLTGLCYCGVCGCAMRYQKWTHGKHKIYCMSRNKAMSYLPNHNPDCNNSLEWADDIEEQVEKEMLKISLDLSSYKPKEKETKLDIMQSQLDKEQAKLKRLYGLYADGNDTVLSMIKELEANISAIKENILEERKNFSVKQKNTIVYDEIKKLADVWGNIDKKQKNMILKTIIDKVIIVNGNIEIQLKNF

SEQ ID NO: 8591 - protein, 453 aa, Unknown
  Description of Unknown: Integrase B8592 sequence
  PTHR30461:SF3,SM00857,G3DSA:1.10.10.2600,IPR036162,PF13408, IPR025827,G3DSA:3.40.50.1390,PS51737,IPR006119,IPR038109, IPR011109,SSF53041,PF00239,PTHR30461, PS51736,Coil,cd00338
MECVAYMRVSTEKQAEEGNGLDSQKRDIELFCRKNELVVSDWYVDDGYTGANMDRPELQRLINDCIKKRVKCVVAFKLDRLSRSMIDGLYIIERVFQPNQVLFKCVHDSVSYDSPMEQAYTQMMAVFAQLDKNTMMLRMRGGMLERIKQGYWIGGANTPYCYNYSKEKGILIPIPERKEQANRALDMFIGGYSDLYIKESLGFHSEVLVRNVLTGVVNIGMIPYKGNVYQGLHEPIFDKERFELAQEIRKSRRKNKTACHTDANLLTGLCYCGVCGCKMRYQKWTHGKHKIYCCSRDKAMKYLPNFNPNCNNSLEWAADIEKQVESEILKISLNLSECKPIEKQSKLEIMQSQFEKEQVKLKRLYVLYSDGNDTVLEMIKNTEKSISDMKEKITEEEKNERNSQKKEVVYENIKKLADVWAHIDKKEKNNILKSIISRIVIVNGDVEIQLKNF

SEQ ID NO: 8592 - protein, 453 aa, Unknown
  Description of Unknown: Integrase B8593 sequence
  PTHR30461:SF3,SM00857,G3DSA:1.10.10.2600,IPR036162,PF13408, IPR025827,G3DSA:3.40.50.1390,PS51737,IPR006119,IPR038109, SSF53041,IPR011109,PTHR30461,Coil,PS51736, cd00338,PF00239
MECVAYMRVSTEKQAEEGNGLDSQKRDIELFCRKNELVVSEWYVDDGYTGANMDRPELQRLINDCIKKRVKCVVAFKLDRLSRSMIDGLYIIERVFQPNQVLFKCVHDSVSYDSPMEQAYTQMMAVFAQLDKNTMMLRMRGGMLERIKQGYWIGGANTPYCYNYSKEKGILVPIPERKEQANRALDMFIGGYSDLYIKESLGFHSEVLVRNVLTGVVNIGMIPYKGNVYQGLHEPIFDKERFELAQEIRKSRRKNKTACHTDANLLTGLCYCGVCGCKMRYQKWTHGKHKIYCCSRDKAMKYLPNFNPNCNNSLEWAADIEKQVESEILKISLNLSECKPIEKQSKLEIMHSQFEKEQVKLKRLYVLYSDGNDTVLEMIKNTEKSISEMKVKITEEEKNERNSQKKEVVYENIKKLADVWAHIDKKEKNNILKSIISRIVIVNGDVEIQLKNF

SEQ ID NO: 8593 - protein, 453 aa, Unknown
  Description of Unknown: Integrase B8594 sequence
  SM00857,IPR006118,G3DSA:1.10.10.2600,IPR036162,PS51737, G3DSA:3.40.50.1390,Coil,IPR006119,IPR038109,IPR011109, SSF53041,PTHR30461,PS00397,PS51736,cd00338, PF00239
MECVAYIRVSTERQVEEGYGLESQKRDIEEYCKKNEMLITDWYIDAGLSGMDMSKRVELQRLISDISKINDIVVYKLDRLARDSVDALYMIEKLFTPKGVRVNSVHDFARYETPQDKFQTHIMAAVAEYDRNTMLLRMRGGMLERVKNGYWMGGGNTPYCYRYDKNLGYLVPIPERAEQANRAMDLFIDGMSDVKVQRLLGFKSEQVVRSILTGVVNIGYIPYKGGIYKGLHEPIFDSEKFYLAQELRKSRRKQHIYSYTEPNLLTGMCYCRECGCKMRYQKITGMGIHKIYCCSHDKYLDYLPNYNADCDNPGAWASDVEKAFEQEILEISINLSKYKPKAKETKLQILTNQLEKQKAKLKRLYILYAEGNDMVLDMIKTLETEIRETTEKISAERKNGQHEQKKEFVYENIKKLADIWDGISKSQKNSILKTIIDKVIVGKDDIEIQLKNF

SEQ ID NO: 8594 - protein, 453 aa, Unknown
  Description of Unknown: Integrase B8595 sequence
  SM00857,G3DSA:1.10.10.2600,IPR036162,PF13408,IPR025827, PS51737,G3DSA:3.40.50.1390,IPR006119,IPR038109,IPR011109, SSF53041,PTHR30461,Coil,PS51736,cd00338, PF00239
MECVAYMRVSTEKQAEEGNGLDSQKRDIENYCRKNKLIITDWYIDDGYTGSNMDRPELQRLINDCSKKRVKCVVAFKLDRLSRSMIDGIYMIERIFQPNNIEFYCVHDSVSYDSPMEQAYTQMMAVFSQLDKNTMLLRMRGGMLERVKKGYWMGGGNTPYCYEYDKEQGILVPIPEKAEQARQALELFIDGYSDRSISDMLHFSSDIVVSRILTSPVNIGMIPYKGEMYQGRHQPVFQRDRFELAQEVRKSRRKNRTYRKTEPNLLTGLCYCGVCGCKMRYQKWGCEKQKIHCCSRDKYLQYLPNYSANCDNMAIWADEIEKQVEEEIIKISLNLSEYKPKQKESKIEIMQKNLNREKTKLKRLYNLYAEGNDTVLEMIKEIEKTIGESKKRIEEEYKNIGNTNKKEYVYENIKSLADVWNTISKTGKNSILKSIVEKIVIVNGDVEIVLKNF

SEQ ID NO: 8595 - protein, 453 aa, Unknown
  Description of Unknown: Integrase B8596 sequence
  PTHR30461:SF3,SM00857,G3DSA:1.10.10.2600,IPR036162,PF13408, IPR025827,PS51737,G3DSA:3.40.50.1390,IPR006119,IPR038109, SSF53041,IPR011109,PTHR30461,Coil,PS51736, cd00338,PF00239
MEMIKVGLYDRVSHDEQALYGDSLRTQIEALRKYAKEKNYIIVDEYIDDGYTATQLNRPGLQRLLQDIQDGKIDMILFTKIDRWSRGVRNYYKLQDILDEHNVDWKTIWEEYDTTTAAGRLQINIMLAIAENESNVTSDRIKVVFKNKLERGEVISGSVPLGYRIKDKHLEVVEELRPLVRDIFNNYERLMSLSKLVDYYKDKHQGLTYWRLKRMLENYLYIGMHVSDYGIYRDFCTKIIEPEQFERVQRLLAMNAKHYKKAKSKNEYIFKGVLRCADCGRKLGGNAGRKTYKYPSQMKNTYRCNWHYRDKTCPNNYNITEKMIERRLLEQIKPELEKYLLTIDIKTKEYKSTASIDIGKINKKLEKLRDLYMDDLIDKDHYKTEYERLTKLLQEKEKVEKPRIIDEKSIQQFLSMDIELIYKDLTKAERRRLWLSIIDHVVVNRETFEITFL

SEQ ID NO: 8596 - protein, 453 aa, Unknown
  Description of Unknown: Integrase B8597 sequence
  SM00857,IPR006118,G3DSA:1.10.10.2600,IPR036162,PS51737, G3DSA:3.40.50.1390,Coil,IPR006119,IPR038109,IPR011109, SSF53041,PTHR30461,PS00397,PS51736,cd00338, PF00239
MECVAYIRVSTERQVEEGYGLESQKRDIEEYCKKNEMLITDWYIDAGLSGMDMTKRVELQRLISDISKINDIVVYKLDRLARDSVDALYMIEKLFTPKGIRVNSVHDFARYETPQDKFQTHIMAAVAEYDRNTMLLRMRGGMLERVKNGYWMGGGNTPYCYRYDKNLGYLVPIPERAEQANRAMDLFIEGMSDVKIQRLLGYKSEFVVRNILTGVVNIGYIPYKGGTYKGLHESIFERDKFYLAQELRKSRRKQHIYSFTEPHLLTGLCYCKTCGCKMRYQKITGMGIHKIYCCSHDKYLDYLPNYNADCDNPGAWASDIEKAFEHEILDISINLSQYKPKAKETKLQILTNQLEKQKSKLKRLYTLYAEGNDMVLDMIKTLETEIRETTEKISAERKNGQHEQKKEFVYENIKKLADIWDGISKSQKNSILKTIIDKVIVGKDDIEIQLKNF

SEQ ID NO: 8597 - protein, 453 aa, Unknown
  Description of Unknown: Integrase B8598 sequence
  SM00857,IPR006118,G3DSA:1.10.10.2600,IPR036162,PS51737, G3DSA:3.40.50.1390,Coil,IPR006119,IPR038109,SSF53041, IPR011109,PTHR30461,PS00397,PS51736,cd00338, PF00239
MECVAYIRVSTERQVEEGYGLESQKRDIEEYCKKNEMLITDWYIDAGLSGMDMSKRVELQRLISDISKINNIVVYKLDRLARDSVDALYMIEKLFTPKGVRVNSVHDFARYETPQDKFQTHIMAAVAEYDRNTMLLRMRGGMLERVKNGYWMGGGNTPYCYRYDKNLGYLVPIPERAEQANRAMDLFIDGMSDVKIQRLLGYKSEFVVRNILTGVVNIGYIPYKGGTYKGLHESIFEHDKFYLAQELRKSRRKQHIYSFTEPHLLTGLCYCKTCGCKMRYQKITGMGIHKIYCCSHDKYLDYLPNYNADCDNPGAWASDIEKAFEHEILDISIKLSQYKPKAKETKLQILTNQLEKQKSKLKRLYTLYAEGNDMVLDMIKTLETEIRETTEKISAERKNGQHEQKKEFVYENIKKLADIWDGISKSQKNSILKTIIDKVIVGKDDIEIQLKNF

SEQ ID NO: 8598 - protein, 453 aa, Unknown
  Description of Unknown: Integrase B8599 sequence
  SM00857,G3DSA:1.10.10.2600,IPR036162,PF13408,IPR025827, PS51737,G3DSA:3.40.50.1390,IPR006119,IPR038109,IPR011109, SSF53041,PTHR30461,Coil,PS51736,cd00338, PF00239
MECVAYMRVSTEKQAEEGNGLDSQKRDIELFCRKNELVVSDWYVDDGYTGANMDRPELQRLINDCIKKRVKCVVAFKLDRLSRSMIDGLYIIERVFQPNQVLFKCVHDSVSYDSPMEQAYTQMMAVFAQLDKNTMMLRMRGGMLERIKQGYWIGGANTPYCYNYSKEKGILIPIPERKEQANRALDMFIGGYSDLYIKELLGFHSEVLVRNVLTGVVNIGMIPYKGNVYQGLHEPIFDKERFELAQEIRKSRRKNKTACHTDANLLTGLCYCGVCGCKMRYQKWTHGKHKIYCCSRDKAMKYLPNFNPDCNNSLEWAADIEKQVESEILKISLNLSECKPIEKQSKLEIMQSQFEKEQVKLKRLYVLYSDGNDTVLEMIKNTEKSISEMKVKITEEEKNERNSQKKEVVYENIKKLADVWAHIDKKEKNNILKSIISRIVIVNGDVEIQLKNF

SEQ ID NO: 8599 - protein, 453 aa, Unknown
  Description of Unknown: Integrase B8600 sequence
  SM00857,IPR006118,G3DSA:1.10.10.2600,IPR036162,PS51737, G3DSA:3.40.50.1390,Coil,IPR006119,IPR038109,SSF53041, IPR011109,PTHR30461,PS00397,PS51736,cd00338, PF00239
MECVAYIRVSTERQVEEGYGLESQKRDIEEYCKKNEMLITDWYIDAGLSGMDMAKRVELQRLISDISKINNIVVYKLDRLARDSVDALYMIEKLFTPKGVRVNSVHDFARYETPQDKFQTHIMAAVAEYDRNTMLLRMRGGMLERVKNGYWMGGGNTPYCYRYDKNLGYLVPIPERAEQANRAMDLFIDGMSDVKVQRLLGFKSEQVVRSILTGVVNIGYIPYKGGIYKGLHEPIFDSEKFYLAQELRKSRHKRHIYSYTEPNLLTGMCYCRECGCKMRYQKITGMGIHKIYCCSHDKYLDYLPNYNADCDNPGAWASDVEKAFEQEILEISINLSKYKPKAKETKLQILTNQLEKQKAKLKRLYILYAEGNDMVLDMIKTLETEIRETTEKISAERKNGQHEQKKEFVYENIKKLADIWDGISKSQKNSILKTIIDKVIVGKDDIEIQLKNF

SEQ ID NO: 8600 - protein, 453 aa, Unknown
  Description of Unknown: Integrase B8601 sequence
  cd00338,SM00857,IPR006118,G3DSA:1.10.10.2600,IPR036162, PF13408,IPR025827,G3DSA:3.40.50.1390,IPR006119,IPR038109, SSF53041,PTHR30461,PS00397,PS51736,Coil, PF00239
MECVAYLRVSTEKQAEEGHGLESQKRDIENYCRKNELIIVDWYVDDGYTGSNMDRPEFQRLISDCYSKRVKCVVAYKLDRISRTMLDSIYVIERIFQPNNVRLECVHDAVNYNDPMQQAYTQMMAVFAQLDKNTMMLRMRGGILERVKKGYWPGGGIKPYCYRYDKEIGILIPIPERAERARQALDLFIQGYSDEKIMRMLGFRTEGVVRNILTGVVNIGKIKYKGNVYQGRHEPIFDVEKFNLGLEIRKTRSKARAYCRTEPNLLTGLCYCGVCGCKMRYQKWGSDRRKMYCCSRNRYLDYLPNYNHDCDNSVEWADKIEEQVESEILKISLNLSSYKPKEKATKLEIMQSQLDKNKTKLKRLYELYADGNDMVLDMISNLEREIEASKERIKEESKNVQKENKKEYVYENIKNLADVWDTIDKTKKNTILKSIISKVVVVNGNVDIQLKSF

SEQ ID NO: 8601 - protein, 453 aa, Unknown
  Description of Unknown: Integrase B8602 sequence
  PTHR30461:SF3,IPR036162,PS51737,IPR011109,PTHR30461, PS00397,PF00239,G3DSA:1.10.10.2600,IPR006119,SSF53041, cd00338,SM00857,IPR025827,IPR038109,PS51736, IPR006118,PF13408,G3DSA:3.40.50.1390,Coil
MECVAYLRVSTEKQAEEGHGLDSQKRDIENYCRKNDLIVSEWYVDDGYTGANMDRPALQRLILACSKKRVKCVVAFKLDRLSRSMVDGLYLIERVFIPNGVDFRCVHDSVNYGTPMEQAYTQIMAAFAQLDKNTMMLRMRGGMLERVKRGYWYGGGNLPYCYAYDREKGILVPIPEKARRANMALELYIDGWSDNRISSELGFRSEQVVRSIITGVVNIGLIKYKGNIYQGRHEPVFDRDRFYLAQNLRKNRKKARSYIQPDVNVLTGLCYCGECGCKMRYQKWTKSQTRMIWCCSHDKALNYLPNFNPDCKNKAQRADEIERQVEEQMIRISLDLSTYTPKEKESRLDILISQLEKEKKKLRRLYDLYAEGNDMVLDMIRNEEEEVQRMEDNVRECEKSQNPTRETIAYKNVKRLADVWDQIDKPEKNKILKSIIDKVVIVNGDVEIQLQRF

SEQ ID NO: 8602 - protein, 453 aa, Unknown
  Description of Unknown: Integrase B8603 sequence
  SM00857,IPR006118,G3DSA:1.10.10.2600,IPR036162,PF13408, IPR025827,G3DSA:3.40.50.1390,PS51737,IPR006119,IPR038109, SSF53041,IPR011109,PF00239,PTHR30461,PS00397, PS51736,Coil,cd00338
MKCVAYIRVSTEKQAEEGNGLDSQIRDIKNHCRKNGMIIEDWYVDDGYTGSNMDRPELQRLVNDCTRKRVKCVVSFKLDRLSRSMIDGLYLIERVFQPNNVRFECVHDSVSYDSPMEQAYTQMMAVFAQLDKNTMMLRMRGGMLERVKQGYWMGGGNLPYCYSYDKNSGILVPIPEKADKAQKALDLFLDGYSDVKIKNMLGFKSEPVVKSILTSVVNIGKIPYKGNIYQGRHTPIFDQEKFELAQEMRKTRSKSKICCQTEPNLLTGLCYCGVCGCKMRYQKWTHGKHKIYCCSRSKDLSYIPNYDENCDNSIEWSDEIEEQVEKEIIRISLDLSSYKPKEKETKLDIMRFQLKKDKKRLKRLYALYADGNDTVIEMIKDLESQIEKTKKNISDEEKNNANSQKKEFVYENIKKIADVWKYTDKKHKNMILKTIIDKIVIVNGNIEIQLKKF

SEQ ID NO: 8603 - protein, 453 aa, Unknown
  Description of Unknown: Integrase B8604 sequence
  PTHR30461:SF3,cd00338,SM00857,G3DSA:1.10.10.2600,IPR036162, PF13408,PS51737,IPR025827,G3DSA:3.40.50.1390,IPR006119, IPR038109,PF07508,IPR011109,SSF53041,PTHR30461, PS51736,Coil,PF00239
MECVAYMRVSTEKQVEEGNGLESQKRDILDYCSKNELIVTDWYVDDGYTGANMNRPELQRLISDCGKKKVKCVVAFKLDRISRSMIDGLYMIERIFQPNNVIFKCVHDSVSYNSPMEQAYTQMMAVFAQLDKNTMMLRMRGGMLERVKQGYWPGGGNTPYCYSYSKDQGILIPIPERAEQARKGLELYIKGYSDIKICKICGYKGEKVVRQILTSPVNIGMIPYKGKIYQGLHEPIFDKELFELAQQLRKSRSLNKASCITEPNLLTGLCYCGVCGCAMRYQKWTHGKHKIYCMSRNKSMSYLPNHNPDCNNSLEWADDIEEQVEREMLKISLDLSSYKPKEKETKLDIMQSQLDKEQTKLKRLYGLYADGNDAVLSMIKELEGNISAIKENIAEERKNFSARQKNAIVYDEIKKLADVWDSIDKKQKNLILKTIIDKIVIVNGNIEIQLKNF

SEQ ID NO: 8604 - protein, 453 aa, Unknown
  Description of Unknown: Integrase B8605 sequence
  SM00857,IPR006118,G3DSA:1.10.10.2600,IPR036162,PS51737, G3DSA:3.40.50.1390,Coil,IPR006119,IPR038109,SSF53041, IPR011109,PTHR30461,PS00397,PS51736,cd00338, PF00239
MECVAYIRVSTERQVEEGYGLESQKRDIEEYCKKNEMLITDWYIDAGLSGMDMSKRVELQRLISDISKINNIVVYKLDRLARDSVDALYMIEKLFTPKGVRVNSVHDFARYETPQDKFQTHIMAAVAEYDRNTMLLRMRGGMLERVKNGYWMGGGNTPYCYRYDKNLGYLVPISERAEQANRAMDLFIEGMSDLKIQRLLGYKSEFVVRNILTGVVNIGYIPYKGGTYKGLHESIFERDKFYLAQELRKSRRKQRAYSLTEPHLLTGLCYCKTCGCKMRYQKITGIGIHKIYCCSHDKYLNYLPNYNADCDNPGAWASDIEKAFEHEILDISINLSQYKPKAKETKLQILTNQLEKQKAKLKRLYTLYAEGNDMVLDMIKTLETEIRETTEKISAERKNGQHEQKKEFVYENIKKLADIWDGISKSQKNSILKTIIDKVIVGKDDIEIQLKNF

SEQ ID NO: 8605 - protein, 453 aa, Unknown
  Description of Unknown: Integrase B8606 sequence
  PTHR30461:SF3,IPR036162,PS51737,IPR011109,PTHR30461, PS00397,PF00239,G3DSA:1.10.10.2600,IPR006119,SSF53041, cd00338,SM00857,IPR025827,IPR038109,PS51736, IPR006118,PF13408,G3DSA:3.40.50.1390,Coil
MECVAYIRVSTERQVEEGYGLESQKRDIEEYCKKNEMLITDWYIDAGLSGMDMSKRVELQRLISDISKISNIVVYKLDRLARDSVDALYMIEKLFTPKGVRVNSVHDFARYETPQDKFQTHIMAAVAEYDRNTMLLRMRGGMLERVKNGYWMGGGNTPYCYRYDKNLGYLVPIPERAEQANRAMDLFIDGMSDVKIQRLLGYKSEFVVRSIMTGIVNIGYIPYKGGVYKGLHEPIFDREKFYLAQELRKSRRKQHTYCYTEPHLLTGLCYCRECGCKMRYQKITGMGIHKIYCCSHNSYLDYLPNHNPDCNNPGAWANDIEKAFEHEILDISINLSQYKPKAKETKLQILTKQLEKQKAKLKRLYTLYAEGNDMVLDMIKTLETEIRETTEKLSAERKNGQHEQKKEFVYENIKKLADIWDGISKSQKNSILKTIIDKVIVGKDDIEIQLKNF

SEQ ID NO: 8606 - protein, 453 aa, Unknown
  Description of Unknown: Integrase B8607 sequence
  PTHR30461:SF3,cd00338,SM00857,G3DSA:1.10.10.2600,IPR036162, PF13408,IPR025827,PS51737,G3DSA:3.40.50.1390,IPR006119, IPR038109,SSF53041,IPR011109,PTHR30461,PS51736, Coil,PF00239
MECVAYMRVSTEKQAEEGNGLDSQRRDIENYCRKNELVITDWYIDDGYTGANMDRPELQRLVSDCERKRVSYVVAFKLDRISRSMVDGIYLIERVFLKNNVEFKCVHDSISYDNPMEQAYTQMMAVFAQLDKNTMLLRMRGGMLERVKQGYWMGGGNLPYCYTYSKDTGTLIPIPERKERANKAMDLFLQGYSDVKIRDMLGFKSEFVVKQVLTSPVNIGMIPYKGNIYQGLHEPIFNKEVFEKAQQFRAIRKNKRASCHNIQTNLLTGLCYCGICGCAMRYQKWTHGKHKIYCCSRNKDLHYLPNHNPNCNNTLEWASDIEKAVEDEILLISANISDYKPRVKESKLEILQGQLEKEQTKRKRLYNLYAEGNDDVISMIKEIEKVIEDIRKQIREESAIETNKTRQNVFKNIKNLADIWEDIDKKQKNMLLKSIIEKIVISNGNIEIKLKDF

SEQ ID NO: 8607 - protein, 453 aa, Unknown
  Description of Unknown: Integrase B8608 sequence
  PTHR30461:SF3,IPR036162,PS51737,IPR011109,PTHR30461, PS00397,PF00239,G3DSA:1.10.10.2600,IPR006119,SSF53041, SM00857,IPR025827,IPR038109,PS51736,cd03768, IPR006118,PF13408,G3DSA:3.40.50.1390,PF07508,Coil
MIKGACYVRVSTDNQLENYSIEEQTDRLKAYCKAKDIQIVKIYTDGGYSGGNINRPALQQMLQDIGKGLIDSVIVYKLDRLSRSQKDTLMLIEDCFLAKNVDFVSVNENFDTSTPFGRAMIGILSVFAQLEKDQITERFTMGRIGRAKNGYFHGGGNTPTGYDYIDGELIINDYEALQVKDLYNRFLKGYSIHNCWQYMHQKYGGWSNEVSVRNVLKNELYIGKVKFKGVAYQGNHQPIISEEIFRQVQDLFNSSRRTSDTFKRSPFKANTLLSSLVYCGKCGARFHGEHGNYSCYSRTKGDKKYIVDPNCKNKKWKIEELDKLVLDYITRLDFSKLQNSHPTPVPVTDYSLRLTEIDKQIEKLIDLYQVSGIPLESIQKKMDALTKEKEALLNVSKPKNVPVTTLAEMITARDTLMSLSDSGSLDEKRACLTMIIDRIIIDDDNVNIKLKQL

SEQ ID NO: 8608 - protein, 453 aa, Unknown
  Description of Unknown: Integrase B8609 sequence
  SM00857,IPR006118,G3DSA:1.10.10.2600,IPR036162,PF13408, IPR025827,G3DSA:3.40.50.1390,Coil,PS51737,IPR006119, IPR038109,SSF53041,IPR011109,PTHR30461,PS00397, PS51736,cd00338,PF00239
MECVAYIRVSTEKQVEEGYGLESQQRDIKEYCQKNNMIISHWYIDAGLTGMEMSKRVALQELISDLKKIDKVVIYKLDRLARDSVDALNMIEKIFVPRNVEVLSVHDFAKYKTPQDKFQTQIMAAVAEYDRNTMLLRMRGGMLERIKEGYWPGGGNTPYCYSYSKETGTLVPIPERKKQANEAIDLFLQGYSDNKIRDMLGFKSEMVVRSLLISPVNIGYILYKGKIYKGKHEPIFEIDKFNLAQEVRKNRRKKKTTCINKEPNLLTGLCYCGVCGCSMRYQKWTHGKHKIYCCSRDKSMSYLPNYDANCDNTLEWAVDIEKQVEEEIIKISLNLSSEKPVAKQSKIEILQSQIKKEENRRKRFFNLYADGNDDVLLSIKEINNTIKSLKEQLETERSNTNLNRKKSVTYKNIKKIADVWDSIDKKDKNIILKSIIDKIVIVNGDIEIQLKNF

SEQ ID NO: 8609 - protein, 453 aa, Unknown
  Description of Unknown: Integrase B8610 sequence
  PTHR30461:SF3,SM00857,G3DSA:1.10.10.2600,IPR036162,PF13408, IPR025827,G3DSA:3.40.50.1390,PS51737,IPR006119,IPR038109, IPR011109,SSF53041,PTHR30461,Coil,PS51736, cd00338,PF00239
MECVAYMRVSTEKQAEEGNGLDSQKRDIELFCRKNELVVADWYVDDGYTGANMDRPELQRLINDCIKKRVKCVVAFKLDRLSRSMIDGLYIIERVFQPNHVLFKCVHDSVSYDSPMEQAYTQMMAVFAQLDKNTMMLRMRGGMLERIKQGYWIGGANTPYCYNYSKEKGILIPIPERKEQANRALDMFIGGYSDLYIKESLGFHSEVLVRNVLTGVVNIGMIPYKGNVYQGLHEPIFDKERFELAQEIRKSRRKNKTACHTDANLLTGLCYCGVCGCKMRYQKWTHGKHKIYCCSRDKAMKYLPNFNPNCNNSLEWAADIEKQVESEILKISLNLSECKPIEKQSKLEIMQSQFEKEQVKLKRLYVLYSDGNDTVLEMIKNTEKSISEMKVKITEEEKNERNSQKKEVVYENIKKLADVWAHIDKKEKNNILKSIISRIVIVNGDVEIQLKNF

SEQ ID NO: 8610 - protein, 453 aa, Unknown
  Description of Unknown: Integrase B8611 sequence
  PTHR30461:SF3,SM00857,G3DSA:1.10.10.2600,IPR036162,PF13408, IPR025827,G3DSA:3.40.50.1390,IPR006119,IPR038109,SSF53041, PTHR30461,Coil,PS51736,cd00338,PF00239
MECVAYMRVSTEKQAVEGNGLDSQKRDIENYCRKNELVITDWYIDDGYTGANMDRPGLQRLVNDCSRKRVSCVVAFKLDRLSRNMIDGIYLIEKVFQKCNVVFKCVHDSVNYDSPMEQAYTQMMAVFAQLDKNTMMLRMRGGMLERIKQGYWMGGGNLPYCYSYSKEQGILMPIPERAEQARKALELFISGYSDVKIKEICGFKSELVTRNILTGIVNIGMIPYKGKIYQGKHEPIFDKGRFNLAQELRKTRAKSRATCQTEPNLLTGLCYCGVCGCAMRYQKWTNGEHKIYCMSRNKSMSYLPNYNANCNNSLEWADDIEKQAEKEILKISLNLSSYKPKEKATKLEIMQSQLDKEQTKLKRLYNLYADGNDTVLEMIKESESLVKTMKANVLSESKSTANTQKKEFVYENIKKLADVWNNIDKKKKNMILKTIIDKIVIVNGNIEIQLKNF

SEQ ID NO: 8611 - protein, 453 aa, Unknown
  Description of Unknown: Integrase B8612 sequence
  PTHR30461:SF3,SM00857,G3DSA:1.10.10.2600,IPR036162,PF13408, IPR025827,G3DSA:3.40.50.1390,PS51737,IPR006119,IPR038109, IPR011109,SSF53041,PTHR30461,Coil, PS51736,cd00338,PF00239
MECVAYMRVSTEKQAEEGNGLDSQKRDIELFCRKNELVVADWYVDDGYTGANMDRPELQRLINDCIKKRVKCVVAFKLDRLSRSMIDGLYIIERVFQPNHVLFKCVHDSVSYDSPMEQAYTQMMAVFAQLDKNTMMLRMRGGMLERIKQGYWIGGANTPYCYNYSKEKGILIPIPERKEQANRALDMFIGGYSDLYIKESLGFHSEVLVRNVLTGVVNIGMIPYKGNVYQGLHEPIFDKERFELAQEIRKSRRKNKTACHTDANLLTGLCYCGVCGCKMRYQKWTHGKHKIYCCSRDKAMKYLPNFNPDCNNSLEWAADIEKQVESEILKISLNLSECKPIEKQSKLEIMQSQFEKEQVKLKRLYVLYSDGNDTVLEMIKNTEKSISEMKVKITEEEKNERNSQKKEVVYENIKKLADVWAHIDKKEKNNILKSIISRIVIVNGDVEIQLKNF

SEQ ID NO: 8612 - protein, 453 aa, Unknown
  Description of Unknown: Integrase B8613 sequence
  PTHR30461:SF3,SM00857,G3DSA:1.10.10.2600,IPR036162,PF13408, IPR025827,G3DSA:3.40.50.1390,IPR006119,IPR038109,SSF53041, PTHR30461,Coil,PS51736,cd00338,PF00239
MECVAYMRVSTEKQAVEGNGLDSQKRDIENYCRKNELVITDWYIDDGYTGTNMDRPELQRLVNDCSRKRVSCVVAFKLDRLSRNMIDGIYLIEKVFQKYNVMFKCVHDSVNYDSPMEQAYTQMMAVFAQLDKNTMMLRMRGGMLERVKQGYWFGGGNLPYCYSYSKEQGILIPIPEHAEQARKGLELFISGYSDVKIKEICGFRSELVTRSILTSVVNIGMIPYKGKIYQGKHEAVFDKDRFELGLELRKSRCSAKTYCITEPNLLTGLCYCGICGCKMRYQKWGSKKHKIYCCSRNKSLSYLPNYNASCNNSLEWADEIEKQVEEEILKISLDLSSYKPKEKATKLEIMQSQLEKEQIKLKRLYNLYADGNDTVLEMIKELESQIKEMKSNIAAESKSAINTQKKEFVYENIKKLADIWDKVDKKQKNMILKTIIDRIVIVNGNIEIQLKNF

SEQ ID NO: 8613 - protein, 453 aa, Unknown
  Description of Unknown: Integrase B8614 sequence
  PTHR30461:SF3,SM00857,G3DSA:1.10.10.2600,IPR036162,PF13408, IPR025827,G3DSA:3.40.50.1390,IPR006119,IPR038109,SSF53041, PTHR30461,Coil,PS51736,cd00338, PF00239
MECVAYMRVSTEKQAVEGNGLDSQKRDIENYCRKNELVITDWYIDDGYTGANMDRPGLQRLVNDCSRKRVSCVVAFKLDRLSRNMIDGIYLIEKVFQKCNVVFKCVHDSVNYDSPMEQAYTQMMAVFAQLDKNTMMLRMRGGMLERIKQGYWMGGGNLPYCYSYSKEQGILIPIPERAEQARKALELFISGYSDVKIKEICGFKSELVTRNILTGIVNIGMIPYKGKIYQGRHEPIFDKGRFNLAQELRKTRAKSRTTCQTEPNLLTGLCYCGVCGCAMRYQKWTNGEHKIYCMSRNKSMSYLPNYNANCDNSLEWADDIEKQVEKEILKISLNLSSYKPKEKATKLEIMQSQLDKEQTKLKRLYSLYADGNDTVLEMIKESESTVKTMKANVLSESKNAADTQKKEFVYENIKKLADVWNNIDKKKKNMILKTIIDKIVIVNGNIEIQLKNF

SEQ ID NO: 8614 - protein, 453 aa, Unknown
  Description of Unknown: Integrase B8615 sequence
  SM00857,G3DSA:1.10.10.2600,IPR036162,PF13408,IPR025827, G3DSA:3.40.50.1390,PS51737,IPR006119,IPR038109,SSF53041, IPR011109,PTHR30461,Coil,PS51736,cd00338, PF00239
MECVAYMRVSTEKQAEEGNGLDSQKRDIQNYCRKNKLIITDWYIDDGYTGSNMDRPELQRLINDCSKKRVKCVVAFKLDRLSRSMIDGIYMIERIFQPNNIEFYCVHDSVSYDSPMEQAYTQMMAVFSQLDKNTMLLRMRGGMLERVKKGYWMGGGNTPYCYEYDKEQGILVPIPEKAEQARQALELFIDGYSDRSISDMLHFSSDIVVSRILTSPVNIGMIPYKGKMYQGRHQPVFQRDRFELAQEVRKSRRKNRTYRKTEPNLLTGLCYCGVCGCKMRYQKWGCEKQKIHCCSRDKYLQYLPNYSANCDNMAIWADEIEKQVEEEIIKISLNLSEYKPKQKESKIEIMQKNLNREKSKLKRLYNLYAEGNDTVLEMVKELEKTIGESKKRIEEEYKNIGNTNKKEYVYENIKSLADVWNTISKTGKNSILKSIVEKIVIVNGDVEIVLKNF

SEQ ID NO: 8615 - protein, 453 aa, Unknown
  Description of Unknown: Integrase B8616 sequence
  SM00857,G3DSA:1.10.10.2600,IPR036162,PF13408,IPR025827, G3DSA:3.40.50.1390,IPR006119,IPR038109,SSF53041,PF00239, PTHR30461,PS51736,Coil,cd00338
MKRKIRCAIYDRVSHELQVEKGLSLDTQKEMLTSYAKEQGYEIVDYYQDEGISARKTMKNRKELLRLLEDVKADKIDIILVTKLDRWFRSVKDYHNTQAILDAHHCAWKTILEDYDTTTSDGQLKINIMLAVAQNEADRTSERIKVVFSHKIRNKEHLNGPVPWGYMVDEKKHLVKDPEIAPIVEDMFNHYFTTFSKRETIMYIRSKYPGKTPEGNSLAKIFSNATYAGIRFGIEDYCDAYLTWGQHKKIVESTTAKVYPATHPQQTYIFSGMLRCPHCGKMLSGYVRKAKKAGRTYEYPAYRCNKRYNKHSAPVKTEKIVEQYVLEFFEEELNRSIYDLELKEGLSKGEKTANVSVLQDELNRINIMFEKGRISLDYYDKRYEEIETQIKEATVSHSKELRARKEIRDGLDGNWKELYLQLDASHKRAFWKNIIKEILIDPETHELNGIIFF

SEQ ID NO: 8616 - protein, 453 aa, Unknown
  Description of Unknown: Integrase B8617 sequence
  PTHR30461:SF3,SM00857,G3DSA:1.10.10.2600,IPR036162, PF13408,IPR025827,G3DSA:3.40.50.1390,IPR006119, IPR038109,SSF53041,PTHR30461,Coil, PS51736,cd00338,PF00239
MECVAYMRVSTEKQAVEGNGLDSQKRDIENYCRKNELVITDWYIDDGYTGTNMDRPELQRLVNDCSRKRVSCVVAFKLDRLSRNMIDGIYLIEKVFQKYNVVFKCVHDSVNYDSPMEQAYTQMMAVFAQLDKNTMMLRMRGGMLERIKQGYWMGGGNLPYCYSYSKEQGILIPIPERAEQARRGLELFISGYSDAKIKEICGFKSELVTRSILTGVVNIGMIPYKGKIYQGKHEPIFDKDRFNLGLELRKSRCSAKTYCITEPNLLTGLCYCGICGCKMRYQKWGSEKHKIYCCSRNKSLSYLPNYNASCNNSLEWADEIEKQVEEEILKISLDLSSYKPKEKATKLEIMQSQLEKEQIKLKRLYNLYADGNDTVLEMIKELEAQIKEMKANIAVESKNAINTQKKEFVYENIKKLADIWDKVDKKQKNLILKTIIDKIVIVNGNIEIQLKNF

SEQ ID NO: 8617 - protein, 453 aa, Unknown
  Description of Unknown: Integrase B8618 sequence
  PTHR30461:SF3,SM00857,G3DSA:1.10.10.2600,IPR036162,PF13408, IPR025827,G3DSA:3.40.50.1390,IPR006119,IPR038109,SSF53041, PTHR30461,Coil,PS51736,cd00338,PF00239
MECVAYMRVSTEKQAVEGNGLDSQKRDIENYCRKNELVITDWYIDDGYTGANMDRPGLQRLVNDCSRKRVSCVVAFKLDRLSRNMIDGIYLIEKVFQKCNVVFKCVHDSVNYDSPMEQAYTQMMAVFAQLDKNTMMLRMRGGMLERIKQGYWMGGGNLPYCYSYSKEQGILIPIPERAEQARKALELFISGYSDVKIKEICGFKSELVTRNILTGIVNIGMIPYKGKIYQGKHEPIFGKGRFNLAQELRKTRAKSRATCQTEPNLLTGLCYCGVCGCAMRYQKWTNGEHKIYCMSRNKSMSYLPNYNANCNNSLEWADDIEKQVEKEVLKISLNLSSYKPKEKATKLEIMQSQLDKEQTKLKRLYNLYADGNDTVLEMIKESESLVKTMKANVLSESKSTANTQKKEFVYENIKKLADVWNNIDKKKKNMILKTIIDKIVIVNGNIEIQLKNF

SEQ ID NO: 8618 - protein, 453 aa, Unknown
  Description of Unknown: Integrase B8619 sequence
  PTHR30461:SF3,cd00338,SM00857,G3DSA:1.10.10.2600,IPR036162, PF13408,PS51737,G3DSA:3.40.50.1390,IPR025827,IPR006119, IPR038109,IPR011109,SSF53041,PTHR30461, PS51736,Coil,PF00239
MECVAYMRVSTEKQAEEGNGLDSQRRDIENYCRKNELVITDWYIDDGYTGANMDRPELQRLVSDCDRKRVGYVVAFKLDRISRSMVDGIYLIERVFLKNNVEFKCVHDSISYDNPMEQAYTQMMAVFAQLDKNTMLLRMRGGMLERVKKGYWMGGGNTPYCYNYSKETGTLIPIPERKEQANRAMDLFLQGYSDVKIKDMLGFKSEFVTKQVLTSPVNIGMIPYKGKLYQGLHEPIFDKETFEKAQQFRRTRSKKRVNCNNLQTNLLTGLCYCGVCGCAMRYQKWTHGKHKILCCSRDSSLTYLPNHNPNCNNTLEWASDIENAVEKEILQISANISEYKPRQKESKLEILQSQLEKEQSKRKRLYGLYAEGNDDVIGMIKEIEQTIEELKQDIVKESAIETDNVRKKVFENIKNLADIWADIDKKQKNTLLKSIIEKIIVSNGNIEIRLKDF

SEQ ID NO: 8619 - protein, 453 aa, Unknown
  Description of Unknown: Integrase B8620 sequence
  PTHR30461:SF3,SM00857,G3DSA:1.10.10.2600,IPR036162,PF13408, IPR025827,G3DSA:3.40.50.1390,IPR006119,IPR038109,SSF53041, PTHR30461,Coil,PS51736,cd00338,PF00239
MECVAYMRVSTEKQAVEGNGLDSQKRDIENYCRKNELVITDWYVDDGYTGTNMDRPELQRLVNDCSRKRISCVVAFKLDRLSRNMIDGIYLIEKVFQKYDVVFKCVHDSVNYDSPMEQAYTQMMAVFAQLDKNTMMLRMRGGMLERVKQGYWFGGGNLPYCYSYSKDQGILIPIPEHAQQARKGLELFISGYSDAKIKEICGFRSELVTRSILTSVVNIGMIPYKGKIYQGKHEAVFDKDRFELGLELRKTRCSAKTYCITEPNLLTGLCYCGICGCKMRYQKWGSKKHKIYCCSRNKSLSYLPNYNASCNNSLEWADEIEKQVEEEILKISLDLSSYKPKEKATKLEIMQSQLEKEQIKLKRLYNLYADGNDTVLEMIKELESQIKEMKSNIAAESKNAINTQKKEFVYENIKKLADIWDKVDKKQKNMILKTIIDRIVIVNGNIEIQLKNF

SEQ ID NO: 8620 - protein, 453 aa, Unknown
  Description of Unknown: Integrase B8621 sequence
  PTHR30461:SF3,SM00857,G3DSA:1.10.10.2600,IPR036162,PF13408, PS51737,G3DSA:3.40.50.1390,IPR025827,IPR006119,IPR038109, SSF53041,IPR011109,PF00239,PTHR30461, PS51736,Coil,cd00338
MECVAYMRVSTEKQAEEGNGLDSQRRDIENYCRKNELIITDWYIDDGYTGANMDRPELQRLVSDCDRKRVGYVVAFKLDRISRSMVDGIYLIERVFLKNNVEFKCVHDSISYDNPMEQAYTQMMAVFAQLDKNTMLLRMRGGMLERVKKGYWMGGGNTPYCYNYSKETGTLIPIPERKEQANRAMDLFLQGYSDVKIKDMLGFKSEFVTKQVLTSPVNIGMIPYKGKLYQGLHEPIFDKETFEKAQQFRRTRSKKRVNCNNLQTNLLTGLCYCGVCGCAMRYQKWTHGKHKILCCSRDSSLTYLPNHNPNCNNTLEWASDIENAVEKEILQISANISEYKPRQKESKLEILQSQLEKEQSKRKRLYGLYAEGNDDVIGMIKEIEQTIEELKQDIVKESAIETDNVRKKVFENIKNLADIWADIDKKQKNMLLKSIIEKIVISNGNIEIRLKDF

SEQ ID NO: 8621 - protein, 453 aa, Unknown
  Description of Unknown: Integrase B8622 sequence
  PTHR30461:SF3,cd00338,SM00857,G3DSA:1.10.10.2600,IPR036162, PF13408,PS51737,IPR025827,G3DSA:3.40.50.1390,IPR006119, IPR038109,PF07508,IPR011109,SSF53041,PTHR30461, PS51736,Coil,PF00239
MTAVIYARYSTDSQREESIEGQIRECTAYAEKNGFTVVKHYIDRAISAKTDNRPQFQQMIKDSERGIFDVIIVWKLDRFARNRYDSARYKTQLKRNGVKLVSATEVISAGPEGIILESVLEGYAEYYSADLSEKVVRGMTENALKGIYNGGTIPFGYMIDETRHYQPDPLLAPYVEQTFQKYADGATMTDLRDWLKAHNIKNSMGGEMSYNTIQRMLSNRRYIGELRLRDVVQPNAIPALVSEDLFNKVQEKLAKNKKAPARHKAEESYLLTTKLYCGKCGALMFGESGVSHTGKMYTYYKCAAAKKKKTCDKKAVRKQWLEDLVVNETMKLVEDDASMNAIIAKVMELQNQESTDLPIYEKQLKETEVGITNMLNAIQMGILTSSTKERLEALEEQRKELQARIAEERLAKPKMKEEFVRFWLLRFRKLDMTQPEQPQARQSVALFLVLVLR

SEQ ID NO: 8622 - protein, 453 aa, Unknown
  Description of Unknown: Integrase B8623 sequence
  PTHR30461:SF3,SM00857,G3DSA:1.10.10.2600,IPR036162,PF13408, IPR025827,G3DSA:3.40.50.1390,IPR006119,IPR038109,SSF53041, PTHR30461,Coil,PS51736,cd00338,PF00239
MECVAYMRVSTERQAEEGNGLESQKRDILDYCSKNELIVTDWYVDDGYTGANMNRPELQRLVADCKHKRIYCVVAFKLDRLSRNMIDGLYMIEKIFQPNGVQFKCVHDSVNYDSPMEQAYTQMMAVFAQLDKNTMMLRMRGGMLERVKQGYWMGGGNLPYCYSYDKDSGILIPIAERKEQANKALELYISGYSDAMICEICGYKGERVVNRILTSTVNIGMIPYKGKIYQGLHEPIFNKEQFELAQQLRKSRSCNKASCITEPNLLTGLCYCGVCGCAMRYQKWTHGKHKIYCMSRNKAMSYLPNHKPDCNNSLEWADDIEEQVEKEMLKISLDLSSYKPKEKETKLDIMQSQLDKEQAKLKRLYGLYADGNDTVLSMIKELEANISAIKENIAEERKNFSARQKNTIVYDEIKKLADVWDSIDKKQKNMILKTIIDKIIIVNGNIEIQLKNF

SEQ ID NO: 8623 - protein, 453 aa, Unknown
  Description of Unknown: Integrase B8624 sequence
  PTHR30461:SF3,SM00857,G3DSA:1.10.10.2600,IPR036162,PF13408, IPR025827,G3DSA:3.40.50.1390,IPR006119,IPR038109,SSF53041, PTHR30461,Coil,PS51736,cd00338, PF00239
MECVAYMRVSTEKQAVEGNGLDSQKRDIENYCRKNELVITDWYIDDGYTGANMDRPGLQRLVNDCSRKRVSCVVAFKLDRLSRNMIDGIYLIEKVFQKCNVTFKCVHDSVNYDSPMEQAYTQMMAVFAQLDKNTMMLRMRGGMLERIKQGYWMGGGNLPYCYSYSKEQGILIPIPERAEQARKALELFISGYSDVKIKEICGFKSELVTRNILTGIVNIGMIPYKGKIYQGRHEPIFDKGRFNLAQELRKTRAKSRVTCQTEPNLLTGLCYCGVCGCAMRYQKWTNGEHKIYCMSRNKSMSYLPNYNANCNNSLEWADDIEKQVEKEILKISLNLSSYKPKEKATKLEIMQSQLDKEQTKLKRLYNLYADGNDTVLEMIKESESLIKTMKANVLSESKSTANTQKKEFVYENIKKLADVWDNIDKKKKNMILKTIIDKIVIVNGNIEIQLKNF

SEQ ID NO: 8624 - protein, 453 aa, Unknown
  Description of Unknown: Integrase B8625 sequence
  SM00857,G3DSA:1.10.10.2600,IPR036162,PF13408,IPR025827, G3DSA:3.40.50.1390,PS51737,IPR006119,IPR038109,SSF53041, IPR011109,PF00239,PTHR30461,PS51736,Coil, cd00338
MKRKIRCAIYDRVSHELQVEKGLSLDTQKEMLTSYAKEQGYEIVDYYQDEGISARKTMKNRKELLRLLEDVKADKIDIILVTKLDRWFRSVKDYHNTQAILDAHHCAWKTILEDYDTTTSDGQLKINIMLAVAQNEADRTSERIKVVFSHKIRNKEHLNGPVPWGYMVDEKKHLVKDPEIAPIVEDMFNHYFTTFSKRETIMYIRSKYPGKTPEGNSLAKIFSNATYAGIRFGIENYCDAYLTWEQHKKIVESTTAKFYPATHPQQTYIFSGMLRCPHCGKMLSGYVRKAKKAGRTYEYPAYRCNKRYNKHSAPVKTEKIVEQYVLEFFEEELNRSIYDLELKEGLSKGEKTANVSVLQDELNRINIMFEKGRISLDYYDKRYEEIETQIKEATVSHSKELRARKEIRDGLDGNWKELYLQLDASHKRAFWKNIIKEILIDPETHELNGIIFF

SEQ ID NO: 8625 - protein, 453 aa, Unknown
  Description of Unknown: Integrase B8626 sequence
  SM00857,IPR006118,G3DSA:1.10.10.2600,IPR036162,PS51737, G3DSA:3.40.50.1390,Coil,IPR006119,IPR038109,SSF53041, IPR011109,PTHR30461,PS00397,PS51736,cd00338, PF00239
MECVAYIRVSTERQVEEGYGLESQKRDIEEYCKKNEMLITDWYIDAGLSGMDMSKRVELQRLISDISKINNIVVYKLDRLARDSVDALYMIEKLFTPKGVRVNSVHDFARYETPQDKFQTHIMAAVAEYDRNTMLLRMRGGMLERVKNGYWMGGGNTPYCYRYDKNLGYLVPIPERAEQANRAMDLFIDGMSDVKIQRLLGYKSEFVVRNILTGVVNIGYIPYKGGTYKGLHESIFEHDKFYLAQELRKSRRKQHIYSFTEPHLLTGLCYCKTCGCKMRYQKITGMGIHKIYCCSHDKYLDYLPNYNADCDNPGAWASDIEKAFEHEILDISINLSQYKPKAKETKLQILTNQLEKQKSKLKRLYTLYAEGNDMVLDMIKTLETEIRETTEKISTERKNGQHEQKKEFVYENIKKLADIWDGISKSQKNSILKTIIDKVIVGKDDIEIQLKNF

SEQ ID NO: 8626 - protein, 453 aa, Unknown
  Description of Unknown: Integrase B8627 sequence
  PTHR30461:SF3,SM00857,G3DSA:1.10.10.2600,IPR036162,PF13408, IPR025827,G3DSA:3.40.50.1390,PS51737,IPR006119,IPR038109, SSF53041,IPR011109,PTHR30461,Coil,PS51736, cd00338,PF00239
MECVAYMRVSTEKQAEEGNGLDSQKRDIELFCRKNELVVSDWYVDDGYTGANMDRPELQRLINDCIKKRVKCVVAFKLDRLSRSMIDGLYIIERVFQPNQVLFKCVHDSVSYDSPMEQAYTQMMAVFAQLDKNTMMLRMRGGMLERIKQGYWIGGANTPYCYNYSKEKGILVPIPERKEQANRALDMFIGGYSDLYIKESLGFHSEVLVRNVLTGVVNIGMIPYKGNVYQGLHEPIFDKERFELAQEIRKSRRKNKTACHTDANLLTGLCYCGVCGCKMRYQKWTHGKHKIYCCSRDKAMKYLPNFNPNCNNSLEWAADIEKQVESEILKISLNLSECKPIEKQSKLEIMHSQFEKEQVKLKRLYVLYSDGNDTVLEMIKNTEKSISEMKVKITEEEKNERNSQKKEVVYENIKKLADVWAHIDKKEKNNILKSIISRIVIVNGDVEIQLKNF

SEQ ID NO: 8627 - protein, 453 aa, Unknown
  Description of Unknown: Integrase B8628 sequence
  PTHR30461:SF3,SM00857,G3DSA:1.10.10.2600,IPR036162,PF13408, IPR025827,G3DSA:3.40.50.1390,IPR006119,IPR038109,SSF53041, PTHR30461,Coil,PS51736,cd00338,PF00239
MECVAYMRVSTEKQAVEGNGLDSQKRDIENYCRKNELVITDWYIDDGYTGTNMDRPELQRLVNDCSRKRVSCVVAFKLDRLSRNMIDGIYLIEKVFQKYNVVFKCVHDSVNYDSPMEQAYTQMMAVFAQLDKNTMLLRMRGGMLERIKQGYWMGGGNLPYCYSYSKEQGILIPIPERAEQARKGLELFISGYSDAKIKEICGFKSELVTRSILTGVVNIGMIPYKGKIYQGKHEPIFDKDRFNLGLELRKSRCSAKTYCITEPNLLTGLCYCGICGCKMRYQKWGSEKHKIYCCSRNKSLSYLPNYNASCNNSLEWADEIEKQVEEEILKISLDLSSYKPKEKATKLEIMQSQLDKEQTKLKRLYNLYADGNDTVLEMIKELEAQIKEMKANIAVESKNAINTQKKEFVYENIKKLADIWDKVDKKQKNLILKTIIDKIVIVNGNIEIQLKNF

SEQ ID NO: 8628 - protein, 453 aa, Unknown
  Description of Unknown: Integrase B8629 sequence
  SM00857,IPR006118,G3DSA:1.10.10.2600,IPR036162, PS51737,G3DSA:3.40.50.1390,IPR006119,IPR038109, PF07508,IPR011109,SSF53041,PF00239, PTHR30461,PS00397,PS51736,Coil,cd00338
MKNAIIYVRVSTEEQAKNDLKSSLEMQKSKCLDYCKQNNLNPVKIIQDIQSGGNDKRKGFLELQKELETGIYDIVVVYEISRISRVASTGLEFADMLSRLSVQFASIMQPQANKFILGILFSIAEEERTQGSQRTKSNKLERAKKGFYQGKAPYGYKNIPNSLEIVEEEAKIVRELFEEYLNSFSFSKLSRDYNISISTVKNILTNRAYTGWFKYGDKKRDNLFQEYKKSKDVQYYKGNYPHIIDEVIFYKVQEAISKKIKINAAFPVILFSGLVECSCGSKMYQEKKTKMIKGVKNISYYYKCNSCNKSFNANKEKIIIEAIKSYEVESGEVEKVDNSKIINKLKKELEQLPIKKQRLMELYTNGLISMEAIKEKCNNFDIEKEKIENQLKIYTQESKEISVQEILDTKAKLIYILENYDLDDVQSVRKILRMLIKKIKINDIKKFDFLIEL

SEQ ID NO: 8629 - protein, 453 aa, Unknown
  Description of Unknown: Integrase B8630 sequence
  PTHR30461:SF3,cd00338,SM00857,G3DSA:1.10.10.2600,IPR036162, PF13408,IPR025827,G3DSA:3.40.50.1390,IPR006119,IPR038109, SSF53041,PTHR30461,PS51736,Coil,PF00239
MECVAYMRVSTEKQAVEGNGLDSQKRDIENYCRKNELVITDWYIDDGYTGTNMDRPELQRLVNDCSRKRVSCVVAFKLDRLSRNMIDGIYLIEKVFQKYNVVFKCVHDSVNYDSPMEQAYTQMMAVFAQLDKNTMMLRMRGGMLERIKQGYWMGGGNLPYCYSYSKEQGILIPIPERAEQARKGLELFISGYSDAKIKEICGFKSELVTRSILTGVVNIGMIPYKGKIYQGKHEPIFDKDRFNLGLELRKSRCSAKTYCITEPNLLTGLCYCGICGCKMRYQKWGSEKHKIYCCSRNKSLSYLPNYNASCNNSLEWADEIEKQVEEEILKISLDLSSYKPKEKATKLEIMQSQLEKEQIKLKRLYNLYADGNDTVLEMIKELEAQIKEMKLNIAAESKNAINMQKKEFVYENIKKLADIWDKVDKKQKNLILKTIIDKIVIVNGNIEIQLKNF

SEQ ID NO: 8630 - protein, 453 aa, Unknown
  Description of Unknown: Integrase B8631 sequence
  PTHR30461:SF3,SM00857,G3DSA:1.10.10.2600,IPR036162,PF13408, IPR025827,G3DSA:3.40.50.1390,IPR006119,IPR038109,SSF53041, PTHR30461,Coil,PS51736,cd00338, PF00239
MECVAYMRVSTEKQAVEGNGLDSQKRDIENYCRKNELVITDWYIDDGYTGTNMDRPELQRLVNDCSRKRISCVIAFKLDRLSRNMIDGIYLIEKVFQKYDVVFKCVHDSVNYDSPMEQAYTQMMAVFAQLDKNTMMLRMRGGMLERVKQGYWFGGGNLPYCYSYSKDQGILIPIPEHAEQARKGLELFISGYSDAKIKEICGFRSELVTRSILTSVVNIGMIPYKGKTYQGKHEAVFNKDRFELGLELRKTRCSAKTYCITEPNLLTGLCYCGICGCKMRYQKWGSKKHKIYCCSRNKSLSYLPNYNASCNNSLEWADEIEKQVEEEILKISLDLSSYKPKEKATKLEIMQSQLEKEQIKLKRLYNLYADGNDTVLEMIKELESQIKEMKSSIAAESKNAINTQKKEFVYENIKKLADIWDKVDKKQKNMILKTIIDRIVIVNGNIEIQLKNF

SEQ ID NO: 8631 - protein, 453 aa, Unknown
  Description of Unknown: Integrase B8632 sequence
  PTHR30461:SF3,cd00338,SM00857,G3DSA:1.10.10.2600,IPR036162, PF13408,IPR025827,G3DSA:3.40.50.1390,IPR006119,IPR038109, SSF53041,PTHR30461,PS51736,Coil,PF00239
MKCVAYMRVSTEKQAEEGNGLESQKRDIENYCKKNELIIADWYVDEGYTGSNMNRPELQRLITDCSRKKVNCVVAFKLDRISRSMVDGIYIIEKVFQSNNVAFKCVHDSISYDSPMEQAYTQMMAVFAQLDKNTMMLRMRGGMLERIKQGYWWGGGNTPYCYRYDKEQGILIPIQERAEQARKALELFISGYSDAKIKEICGFKSELVTRKVLTGVVNIGMIPYKGNIYQGKHKPIFDKDRFELAQELRKSRCSAKISCFTEPNLLTGLCYCGVCGCKMRYQKWSNGNHKIYCCSRNKGLKYLPNYNPNCNNSLEWADDIEKQVTDEILKISLNLSSYKPKAKETKLEIMQSQLEREQTKLKRLYSLYADGNDTVLEMIKDLESQISKTKEDISVESKNAINTQKKEFTYQNIKKLADVWDNIDKKQKNFILKTIIDKVIIVNGNVEIQLKNF

SEQ ID NO: 8632 - protein, 453 aa, Unknown
  Description of Unknown: Integrase B8633 sequence
  PTHR30461:SF3,SM00857,G3DSA:1.10.10.2600,IPR036162,PF13408, IPR025827,G3DSA:3.40.50.1390,PS51737,IPR006119,IPR038109, IPR011109,SSF53041,PTHR30461,Coil, PS51736,cd00338,PF00239
MECVAYMRVSTEKQAEEGNGLDSQKRDIELFCRKNELVVSDWYVDDGYTGANMDRPELQRLINDCIKKRVKCVVAFKLDRISRSMIDGLYIIERVFQPNQVLFKCVHDSVSYDSPMEQAYTQMMAVFAQLDKNTMMLRMRGGMLERIKQGYWIGGANTPYCYNYSKEKGILIPIPERKEQANRALDMFIGGYSDLYIKESLGFHSEVLVRNVLTGVVNIGMIPYKGNVYQGLHEPIFDKERFELAQEIRKSRRKNKTACHTDANLLTGLCYCGVCGCKMRYQKWTHGKHKIYCCSRDKAMKYLPNFNPDCNNSLEWAADIEKQVESEILKISLNLSECKPIEKQSKLEIMQSQFEKEQVKLKRLYVLYSDGNDTVLEMIKSTEKSISEMKVKITEEEKNERNSQKKEVVYENIKKLADVWAHIDKKEKNNILKSIISRIVIVNGDVEIQLKNF

SEQ ID NO: 8633 - protein, 453 aa, Unknown
  Description of Unknown: Integrase B8634 sequence
  PTHR30461:SF3,IPR036162,PS51737,IPR011109,PTHR30461, PS00397,PF00239,G3DSA:1.10.10.2600,IPR006119,SSF53041, cd00338,SM00857,IPR025827,IPR038109,PS51736, IPR006118,PF13408,G3DSA:3.40.50.1390,Coil
MECVAYLRVSTEKQAEEGHGLDSQKRDIEDYCRKNDLIVSEWYVDDGYTGANMDRPALQRLILACSKKRVKCVVAFKLDRLSRSMVDGLYLIERVFIPNGVDFRCVHDSVKYETPMEQAYTQIMAAFAQLDKNTMMLRMRGGMLERVKRGYWYGGGNLPYCYDYDRGKGILIPIPEKARRANMALDLYIDGWSDNRISNELGFRSEQVVRSIITGVVNIGLIKYKGNIYQGRHEPVFDRDRFYLAQNLRKNRKKARSYIHPDVNILTGLCYCGECGCKMRYQKWTKSQTRMIWCCSHDKALNYLPNFNQNCKNKAQRADEIERQVEEQMIRISLDLSTYMPKEKESRLDILISQLEKEKKKLRRLYDLYAEGNDMVLDLIRNEEEEVQRMEDHVRECEQSQNPTRETIAYKNVKRLADVWDQIDKPEKNKILKSIIDKVVIVNGDVEIQLQRF

SEQ ID NO: 8634 - protein, 453 aa, Unknown
  Description of Unknown: Integrase B8635 sequence
  SM00857,IPR006118,G3DSA:1.10.10.2600,IPR036162,PS51737, G3DSA:3.40.50.1390,IPR006119,IPR038109,PF07508,IPR011109, SSF53041,PF00239,PTHR30461,PS00397,PS51736, Coil,cd00338
MKNAIIYVRVSTEEQAKNDLKSSLEMQKSKCLDYCKQNNLNPVKIIQDIQSGGNDKRKGFLELQKELETGIYDIVVVYEISRISRVASTGLEFADMLSRLSVQFASIMQPQANKFILGILFSIAEEERTQGSQRTKSNKLERAKKGFYQGKAPYGYKNIPNSLGIVEEEAKIVRELFEEYLNSFSFSKLSRDYNISISTVKNILTNRAYTGWFKYGEKKRDNLFQEYKKSKDVQYYKGNYPHIIDEAIFYKVQEAISKKIKINAAFPVILFSGLVECSCGSKMYQEKKTKMIKGVKNISYYYKCNSCNKSFNANKEKIIIEAIKSYEVESGEVEKVDNSKIINKLKKELEQLPIKKQRLMELYTNGLISMEAIKEKCNNFDHEKEKIEIQLKKYTQESKEISTQEILDTKAKLIYILENYDLDDVQSIRKILRMLIKRIKINDIKKFDFLIEL

SEQ ID NO: 8635 - protein, 453 aa, Unknown
  Description of Unknown: Integrase B8636 sequence
  PTHR30461:SF3,SM00857,G3DSA:1.10.10.2600,IPR036162,PF13408, PS51737,IPR025827,G3DSA:3.40.50.1390,PS51736,IPR006119, IPR038109,PF07508,IPR011109,SSF53041,PTHR30461, mobidb-lite,cd00338,PF00239
MRKITKLETKNIELPKLKRVAAYARVSVERGRTLHSYSAQVSYYNELIQKNPEWEFAGVYSDLGISGTGIEKRNDFKRLLQDCEEGKIDIILTKSISRFARNTVDLLNVVRHLKELGIEVRFEKEGISSLTGDGELMLSILASFAQEEVISTSNNIKWAIKKKFESGKPQCRYKIYGYRWDGDNLVIEPEEAKIVKLIFQMYLNKVSAERMEIELKEMGVIATNGGYFNIGTIRDMLLNITYTGNLLLQKSYTPNPLVRRKVKNNGELPKYYVENNHEAIIPMEMFIQVQEERKRRKAEGQRANFGKNITCFSCRVKCPICGKNYMRNSRSKNSDGIKAHIWACGTRLTGGSKACPGKTINEIALKRVSAKVLGLDEFDSNAFDEQIKKVIVIGDDLLEFHFNDGKIISEKWEYNARKEYWTEEKRRERGEKLKKSWRMKNDKKSNNDTSITK

SEQ ID NO: 8636 - protein, 453 aa, Unknown
  Description of Unknown: Integrase B8637 sequence
  PTHR30461:SF3,SM00857,G3DSA:1.10.10.2600,IPR036162,PF13408, IPR025827,G3DSA:3.40.50.1390,IPR006119,IPR038109,SSF53041, PTHR30461,Coil,PS51736,cd00338,PF00239
MECVAYMRVSTEKQAEEGNGLESQKRDILDYCSKNELIVTDWYVDDGYTGANMNRPELQRLVADCKHKRISCVVAFKLDRLSRNMIDGLYMIEKIFQPNGVQFKCVHDSVSYDSPMEQAYTQMMAVFAQLDKNTMMLRMRGGMLERVKQGYWMGGGNLPYCYSYDKDSGILIPIPERKVQANKALELYIKGYSDLKICKICGYKGEKVVRQILTTPVNIGMIPYKGKIYQGLHEPIFDKERFELAQQLRKSRSLNKASCITEPNLLTGLCYCGVCGCAMRYQKWTHGKHKIYCMSRNKAMSYLPNHNPDCNNSLEWADDIEEQVEKEMLKISLDLSSYKPKEKETKLDIMQSQLDKEQAKLKRLYGLYADGNDTVLSMIKELEANISAIKENISEERKNFSVKQKNTIVYDEIKKLADVWDSIDKKQKNMILKTIIDKVIIVNGNIEIQLKNF

SEQ ID NO: 8637 - protein, 453 aa, Unknown
  Description of Unknown: Integrase B8638 sequence
  PTHR30461:SF3,SM00857,G3DSA:1.10.10.2600,IPR036162,PF13408, IPR025827,G3DSA:3.40.50.1390,PS51737,IPR006119,IPR038109, SSF53041,IPR011109,PTHR30461,Coil, PS51736,cd00338,PF00239
MECVAYMRVSTEKQAEEGNGLESQKRDILDYCSKNELIVTDWYVDDGYTGANMNRPELQRLVADCKHKRVSCVVTFKLDRLSRNMIDGLYMIEKIFQPNGVQFKCVHDSVSYDSPMEQAYTQMMAVFAQLDKNTMMLRMRGGMLERVKQGYWPGGGNLPYCYSYNKEQGILIPIPERAEQANKALELYIRGYSDVKICKICGYKGEKVVRQILTTPVNVGMIPYKGKIYQGLHEPIFNKEQFELAQQLRKSRSCNKASCITEPNLLTGLCYCGVCGCAMRYQKWTHEKHKIYCMSRNKAMSYLPNHNPDCNNSLEWADDIEEQVEKEMLKISLDLSSYKPKEKETKLDIMQSQLDKEQAKLKRLYGLYADGNDTVLSMIKELEANISAIKENISEERKNFSVKQKNTIVYDEIKKLADVWDSIDKKQKNMILKTIIDKVIIVNGNIEIQLKNF

SEQ ID NO: 8638 - protein, 453 aa, Unknown
  Description of Unknown: Integrase B8639 sequence
  PTHR30461:SF3,cd00338,SM00857,G3DSA:1.10.10.2600,IPR036162, PF13408,PS51737,G3DSA:3.40.50.1390,IPR025827,IPR006119, IPR038109,IPR011109,SSF53041,PTHR30461,PS51736, Coil,PF00239
MMGKIIRCAIYDRVSTDIQVQQGLSLDTQKELLTEYAKSHGYEIVDYYIDEGLTARKKLQNRKDFMRLLDDIKANKIDIVLVTKLDRWFRNVKDYHNTQAILEEHNCNWKTILEDYDTSTADGQLKINIMLAVAQNESDRTSERIKVVFEHKKRNQEHLNGPIPFGYKNVDKHLAKDEATKSITDDIFRYYFTCYSKRATIFYSLEKYGDRSPSKYQVDRMLTSEVYAGMRYGRPGYCEPYITPEQHEKILRICQSKTYPGTKVPYLFSQLVKCPHCGATMTGYTKRHTCKDGSRTEHKRYRCEKKLTKHTGPCISESVVEEYMLAHVYPELQHCIYEVKSLQQKAAKKKDSTYRIKAELDRLNILFQKGRITMEYYDEQYEKLEKTLEKERQDSKIITVESYRPIETKLNGNWRDVYERLDYSHKKTFWKSIIEEIYIDKDTHKICGFKFLL

SEQ ID NO: 8639 - protein, 453 aa, Unknown
  Description of Unknown: Integrase B8640 sequence
  PTHR30461:SF3,SM00857,G3DSA:1.10.10.2600,IPR036162,PF13408, IPR025827,G3DSA:3.40.50.1390,IPR006119,IPR038109,SSF53041, PTHR30461,Coil,PS51736,cd00338,PF00239
MECVAYMRVSTEKQAVEGNGLDSQKRDIENYCRKNELVITDWYIDDGYTGTNMDRPELQRLVNDCSRKRVNCVVAFKLDRLSRNMIDGIYLIEKVFQKYNVVFKCVHDSVNYDSPMEQAYTQMMAVFAQLDKNTMLLRMRGGMLERVKQGYWMGGGNLPYCYSYSKEQGILIPIPERAEQARKALELFISGYSDVKIKEICGFKSELVTRSILTGVVNIGMIPYKGNIYQGRHEPIFDKDRFEFGLELRKSRCSAKTYCITEPNLLTGLCYCGICGCKMRYQKWGSKKHKIYCCSRNKSLSYLPNYNANCNNSLEWADEIEKQVEEEILKISLDLSSYKPKEKATKLEIMQSQLEKEQIKLKRLYNLYADGNDTVLKMIKELESQIKEMKSSITAESKNAINAQRKEFVYENIKKLADIWDKVDKKQKNLILKTIIDKIVIVNGNIEIQLKNF

SEQ ID NO: 8640 - protein, 453 aa, Unknown
  Description of Unknown: Integrase B8641 sequence
  PTHR30461:SF3,SM00857,G3DSA:1.10.10.2600,IPR036162,PF13408, IPR025827,G3DSA:3.40.50.1390,IPR006119,IPR038109,SSF53041, PTHR30461,Coil,PS51736,cd00338, PF00239
MECVAYMRVSTEKQAVEGNGLDSQKRDIENYCRKNELVITDWYIDDGYTGTNMDRPELQRLVNDCSRKRVSCVVAFKLDRLSRNMIDGIYLIEKVFQKYNVVFKCVHDSVNYDSPMEQAYTQMMAVFAQLDKNTMMLRMRGGMLERIKQGYWMGGGNLPYCYSYSKEQGILIPIPERAEQARKGLELFISGYSDAKIKEICGFKSELVTRSILTGVVNIGMIPYKGKIYQGKHEPIFDKDRFNLGLELRKSRCSAKTYCITEPNLLTGLCYCGICGCKMRYQKWGSEKHKIYCCSRNKSLSYLPNYNASCNNSLEWADEIEKQVEEEILKISLDLSSYKPKEKATKLEIMQSQLEKEQIKLKRLYNLYADGNDTVLEMIKELETQIKEMKANIAVESKNAINTQKKEFVYENIKKLADIWDKVDKKQKNMILKTIIDKIVIVNGNIEIQLKNF

SEQ ID NO: 8641 - protein, 453 aa, Unknown
  Description of Unknown: Integrase B8642 sequence
  PTHR30461:SF3,SM00857,G3DSA:1.10.10.2600,IPR036162,PF13408, IPR025827,G3DSA:3.40.50.1390,IPR006119,IPR038109,SSF53041, PTHR30461,Coil,PS51736,cd00338,PF00239
MECVAYMRVSTEKQAEEGNGLESQKRDILDYCSKNELIVTDWYVDDGYTGTNMNRPELQRLVADCKHKRISCVVAFKLDRLSRNMIDGLYMIEKIFQPNGVQFKCVHDSVSYDSPMEQAYTQMMAVFAQLDKNTMMLRMRGGMLERVKQGYWMGGGNLPYCYSYDKDSGILIPIAERKEQANKALELYISGYSDAMICEICGYKGERVVNRILTSTVNIGMIPYKGKIYQGLHEPIFDKERFELAQQLRKSRSLNKASCITEPNLLTGLCYCGVCGCAMRYQKWTHGKHKIYCMSRNKAMSYLPNHKPDCNNSLEWADDIEEQVEKEMLKISLDLSSYKPKEKETKLDIMQSQLDKEQVKLKRLYGLYADGNDTVLSMIKELEANISAIKENIAEERKNFSARQKNTIVYDEIKKLADVWDSIDKKQKNMILKTIIDKIIIVNGNIEIQLKNF

SEQ ID NO: 8642 - protein, 453 aa, Unknown
  Description of Unknown: Integrase B8643 sequence
  PTHR30461:SF3,cd00338,SM00857,G3DSA:1.10.10.2600,IPR036162, PF13408,IPR025827,G3DSA:3.40.50.1390,IPR006119,IPR038109, SSF53041,PTHR30461,PS51736,Coil, PF00239
MECVAYMRVSTEKQAVEGNGLDSQKRDIENYCRKNELVITDWYIDDGYTGTNMDRPELQRLVNDCSRKRVSCVVAFKLDRLSRNMIDGIYLIEKVFQKYNVVFKCVHDSVNYDSPMEQAYTQMMAVFAQLDKNTMMLRMRGGMLERIKQGYWMGGGNLPYCYSYSKEQGILIPIPERAEQARKGLELFISGYSDAKIKGICGFKSELVTRSILTGVVNIGMIPYKGKIYQGKHEPVFDKDRFNLGLELRKSRCSAKTYCITEPNLLTGLCYCGICGCKMRYQKWGSEKHKIYCCSRNKSLSYLPNYNASCNNSLEWADEIEKQVEEEILKISLDLSSYKPKEKATKLEIMQSQLEKEQIKLKRLYNLYADGNDTVLEMIKELEAQIKEMKLNITAESKNAINTQKKEFVYENIKKLADIWDKVDKKQKNLILKTIIDKIVIVNGNIEIQLKNF

SEQ ID NO: 8643 - protein, 453 aa, Unknown
  Description of Unknown: Integrase B8644 sequence
  PTHR30461:SF3,IPR036162,PS51737,IPR011109,PTHR30461, PS00397,PF00239,G3DSA:1.10.10.2600,IPR006119,SSF53041, cd00338,SM00857,IPR025827,IPR038109,PS51736, IPR006118,PF13408,G3DSA:3.40.50.1390,Coil
MECVAYLRVSTEKQAEEGHGLDSQKRDVECYCRKNDLIVSEWYVDDGYTGANMDRPALQRLIFACSKRRVKCVVAFKLDRLSRSMVDGLYLIERVFIPNGVDFRCVHDSVNYGTPMEQAYTQIMAAFAQLDKNTMMLRMRGGMLERVKRGYWYGGGNLPYCYDYDRKKGILVPIPEKARRANMALDLYIDGWSDNRICNELGFRSEQVVRSVITGVVNIGLIKYKGNIYQGRHEPVFDRDRFYLAQNLRKNRKKARSYVQPDVNILTGLCYCGECGCKMRYQKWTKSQTRMIWCCSHDKALNYLPNFNPDCKNKAQRADEIERQVEEQMIRISLDLSNYMPKEKESRLDILISQLEKEKKKLRRLYDLYAEGNDMVLDMIRNEEEEVQRMEDNVRECEQSQNPTRETIAYKNVKRLADVWDQIDKPEKNKILKSIIDKVVIVNGDVEIQLQRF

SEQ ID NO: 8644 - protein, 453 aa, Unknown
  Description of Unknown: Integrase B8645 sequence
  PTHR30461:SF3,SM00857,G3DSA:1.10.10.2600,IPR036162,PF13408, IPR025827,G3DSA:3.40.50.1390,IPR006119,IPR038109,SSF53041, PTHR30461,Coil,PS51736,cd00338,PF00239
MECVAYMRVSTEKQAEEGNGLESQKRDILDYCSKNELIVTDWYVDDGYTGTNMNRPELQRLVADCKHKRISCVVAFKLDRLSRNMIDGLYMIEKIFQPNGVQFKCVHDSVSYDSPMEQAYTQMMAVFAQLDKNTMMLRMRGGMLERVKQGYWMGGGNLPYCYSYDKDSGILIPIAERKEQANKALELYISGYSDAMICEICGYKGERVVNRILTSTVNIGMIPYKGKIYQGLHEPIFDKERFELAQQLRKSRSLNKASCITEPNLLTGLCYCGVCGCAMRYQKWTHGKHKIYCMSRNKAMSYLPNHNPDCNNSLEWADDIEEQVEKEMLKISLDLSSYKPKEKETKLDIMQSQLDKEQAKLKRLYGLYADGNDTVLSMIKELEANISAIKENISEERKNFSVKQKNTIVYDEIKKLADVWDSIDKKQKNMILKTIIDKVIIVNGNIEIQLKNF

SEQ ID NO: 8645 - protein, 453 aa, Unknown
  Description of Unknown: Integrase B8646 sequence
  SM00857,G3DSA:1.10.10.2600,IPR036162,PF13408, IPR025827,PS51737,G3DSA:3.40.50.1390,IPR006119, IPR038109,IPR011109,SSF53041,PTHR30461, Coil,PS51736,cd00338,PF00239
MECVAYMRVSTEKQAEEGNGLDSQKRDIQNYCRKNKLIIADWYIDDGYTGSNMDRPELQRLINDCSKKRVKCVVAFKLDRLSRSMIDGIYMIERIFQPNNIEFYCVHDSVSYDSPMEQAYTQMMAVFSQLDKNTMLLRMRGGMLERVKKGYWMGGGNTPYCYEYDKEQGILVPIPEKAEQARQALELFIDGYSDRSISDMLHFSSDIVVSRILTSPVNIGMIPYKGKMYQGRHQPVFQRDRFELAQEVRKSRRKNRTYRKTEPNLLTGLCYCGVCGCKMRYQKWGCEKQKIHCCSRDKYLQYLPNYSANCDNMAIWADEIEKQVEEEIIKISLNLSEYKPKQKESKIEIMQKNLNRERTKLKRLYNLYAEGNDTVLEMIKEIEKTIGESKKRIEEEYKNIGNTNKKEYVYENIKSLADVWNTISKTGKNSILKSIVEKIVIVNGDVEIVLKNF

SEQ ID NO: 8646 - protein, 453 aa, Unknown
  Description of Unknown: Integrase B8647 sequence
  PTHR30461:SF3,SM00857,G3DSA:1.10.10.2600,IPR036162,PF13408, IPR025827,G3DSA:3.40.50.1390,IPR006119,IPR038109,SSF53041, PTHR30461,Coil,PS51736,cd00338,PF00239
MECVAYMRVSTEKQAVEGNGLDSQKRDIENYCRKNELVITDWYIDDGYTGANMDRPGLQRLVNDCSRKRVSCVVAFKLDRLSRNMIDGIYLIEKVFQKCNVTFKCVHDSVNYDSPMEQAYTQMMAVFAQLDKNTMMLRMRGGMLERIKQGYWMGGGNLPYCYSYSKEQGILIPIPERAEQARKALELFISGYSDVKIKEICGFKSELVTRNILTGIVNIGMIPYKGKIYQGRHEPIFDKGRFNLAQELRKTRAKSRTTCQTEPNLLTGLCYCGVCGCAMRYQKWTNGEHKIYCMSRNKSMSYLPNYNANCNNSLEWADDIEKQVEKEILKISLNLSSYKPKEKATKLEIMQSQLDKEQTKLKRLYNLYADGNDTVLEMIKESESAVKTMKTNVLSESKSTANTQKKEFVYENIKKLADVWDNIDKKKKNMILKTIIDKIVIVNGNIEIQLKNF

SEQ ID NO: 8647 - protein, 453 aa, Unknown
  Description of Unknown: Integrase B8648 sequence
  PTHR30461:SF3,SM00857,G3DSA:1.10.10.2600,IPR036162,PF13408, IPR025827,G3DSA:3.40.50.1390,IPR006119,IPR038109,SSF53041, PTHR30461,Coil,PS51736,cd00338, PF00239
MECVAYMRVSTEKQAVEGNGLDSQKRDIENYCRKNELVITDWYVDDGYTGTNMDRPELQRLVNDCSRKRISCVVAFKLDRLSRNMIDGIYLIEKVFQKYDVVFKCVHDSVNYDSPMEQAYTQMMAVFAQLDKNTMMLRMRGGMLERVKQGYWFGGGNLPYCYSYSKDQGILIPIPEHAEQARKGLELFISGYSDAKIKEICGFRSELVTRSILTSVVNIGMIPYKGKIYQGKHEAVFDKDRFELGLELRKTRCSAKTYCITEPNLLTGLCYCGICGCKMRYQKWGSKKHKIYCCSRNKSLSYLPNYNASCNNSLEWADDIEKQVEEEILKISLDLSSYKPKEKATKLEIMQSQLEKEQIKLKRLYNLYADGNDTVLEMIKELESQIKEMKSNIAAESKNAINTQKKEFVYENIKKLADIWDKVDKKQKNMILKTIIDRIVIVNGNIEIQLKNF

SEQ ID NO: 8648 - protein, 453 aa, Unknown
  Description of Unknown: Integrase B8649 sequence
  PTHR30461:SF3,SM00857,G3DSA:1.10.10.2600,IPR036162,PF13408, IPR025827,G3DSA:3.40.50.1390,IPR006119,IPR038109,SSF53041, PTHR30461,Coil,PS51736,cd00338,PF00239
MECVAYMRVSTEKQAIEGNGLDSQKRDIENYCRKNELVITDWYIDDGYTGANMDRPGLQRLVNDCSRKRVSCVVAFKLDRLSRNMIDGIYLIEKVFQKCNVTFKCVHDSVNYDSPMEQAYTQMMAVFAQLDKNTMMLRMRGGMLERIKQGYWMGGGNLPYCYSYSKEQGILIPIPERVEQARKALELFISGYSDVKIKEICGFKSELVTRNILTGIVNIGMIPYKGKIYQGKHEPIFDKGRFNLAQELRKTRAKSRTTCQTEPNLLTGLCYCGVCGCAMRYQKWTNGEHKIYCMSRNKSMSYLPNYNANCDNSLEWADDIEKQVEKEILKISLNLSSYKPKEKATKLEIMQSQLDKEQTKLKRLYNLYADGNDTVLEMIKESETLIKTMKANVLSESKNAADTQKKEFVYENIKKLADVWDNIDKKKKNMILKTIIDKIVIVNGNIEIQLKNF

SEQ ID NO: 8649 - protein, 453 aa, Unknown
  Description of Unknown: Integrase B8650 sequence
  PTHR30461:SF3,SM00857,G3DSA:1.10.10.2600,IPR036162,PF13408, IPR025827,G3DSA:3.40.50.1390,IPR006119,IPR038109,SSF53041, PTHR30461,Coil,PS51736,cd00338, PF00239
MECVAYMRVSTEKQAVEGNGLDSQKRDIENYCRKNELVITDWYIDDGYTGTNMDRPELQRLVNDCSRKRVSCVVAFKLDRLSRNMIDGIYLIEKVFQKYNVVFKCVHDSVNYDSPMEQAYTQMMAVFAQLDKNTMMLRMRGGMLERIKQGYWMGGGNLPYCYSYSKEQGILIPIPERAEQARRGLELFISGYSDAKIKEICGFKSELVTRSILTGVVNIGMIPYKGKIYQGKHEPIFDKDRFNLGLELRKSRCSAKTYCITEPNLLTGLCYCGICGCKMRYQKWGSEKHKIYCCSRNKSLSYLPNYNASCNNSLEWADEIEKQVEEEILKISLDLSSYKPKEKATKLEIMQSQLEKEQIKLKRLYNLYADGNDTVLEMIKELESQIKEMKSNIAAESKNTINTQKKEFVYENIKKLADIWDKVDKKQKNLILKTIIDKIVIVNGNIEIQLKNF

SEQ ID NO: 8650 - protein, 453 aa, Unknown
  Description of Unknown: Integrase B8651 sequence
  PTHR30461:SF3,cd00338,SM00857,G3DSA:1.10.10.2600,IPR036162, PF13408,IPR025827,G3DSA:3.40.50.1390,IPR006119,IPR038109, SSF53041,PTHR30461,PS51736,Coil,PF00239
MECVAYMRVSTEKQAVEGNGLDSQKRDIENYCRKNELVITDWYVDDGYTGTNMDRPELQRLVNDCGRKRIGCVVAFKLDRLSRNMIDGIYLIEKVFQKCGVVFKCVHDSVSYDSPMEQAYTQMMAVFAQLDKNTMMLRMRGGMLERIKQGYWMGGGNLPYCYSYSKEQGILIPIPERAEQARKGLELFISGYSDAKIKEICGFKSELVTRSILTGIVNIGMIPYKGKIYQGKHEPIFDKDRFNLGLELRKSRCSAKTYCITEPNLLTGLCYCGICGCKMRYQKWGSEKHKIYCCSRNKSLSYLPNYNASCNNSLEWADEIEKQVEEEILKISLDLSSYKPKEKTTKLEIMQSQLEKEQIKLKRLYNLYADGNDTVLEMIKELEAQIKEMKANIAAESKNAINTQKKEFVYENIKKLADIWDNIDKKQKNMILKTIIDKIVIVNGNIEIQLKNF

SEQ ID NO: 8651 - protein, 453 aa, Unknown
  Description of Unknown: Integrase B8652 sequence
  PTHR30461:SF3,IPR036162,PS51737,IPR011109,PTHR30461, PS00397,PF00239,G3DSA:1.10.10.2600,IPR006119,SSF53041, cd00338,SM00857,IPR025827,IPR038109, PS51736,IPR006118,PF13408,G3DSA:3.40.50.1390,Coil
MECVAYLRVSTEKQAEEGHGLDSQKRDIENYCRKNDLIVSEWYVDDGYTGANMDRPALQRLILACSKKRVKCVVAFKLDRLSRSMVDGLYLIERVFIPNGVDFRCVHDSVNYGTPMEQAYTQIMAAFAQLDKNTMMLRMRGGMLERVKRGYWYGGGNLPYCYAYDREKGILVPIPEKARRANMALELYIDGWSDNRISSELGFRSEQVVRSIITGVVNIGLIKYKGNIYQGRHEPVFDRDRFYLAQNLRKNRKKARSYIQPDVNVLTGLCYCGECGCKMRYQKWTKSQTRMIWCCSHDKALNYLPNFNPDCKNKAQRADEIERQVEEQMIRISLDLSNYMPKEKESRLDILISQLEKEKKKLRRLYDLYAEGNDMVLDMIRNEEEEVQRMEDNVRECEQSQNPTRETIAYKNVKRLADVWDQIDKPEKNKILKSIIDKVVIVNGDVEIQLQRF

SEQ ID NO: 8652 - protein, 453 aa, Unknown
  Description of Unknown: Integrase B8653 sequence
  PTHR30461:SF3,cd00338,SM00857,G3DSA:1.10.10.2600,IPR036162, PF13408,IPR025827,G3DSA:3.40.50.1390,IPR006119,IPR038109, SSF53041,PTHR30461,PS51736,Coil,PF00239
MECVAYMRVSTERQAEEGNGLESQKRDILDYCSKSELIVTDWYVDDGYTGANMNRPELQRLVTDCKHKRISCVVAFKLDRLSRNMIDGLYMIEKIFQPNGVQFKCVHDSVSYDSPMEQAYTQMMAVFAQLDKNTMMLRMRGGMLERIKQGYWMGGGNLPYCYSYDKDSGILIPIAERKEQANKALELYISGYSDAMICEICGYKGERVVNRILTSTVNIGMIPYKGKIYQGLHEPIFDKERFELAQQLRKSRSLNKASCITEPNLLTGLCYCGVCGCAMRYQKWTHGKHKIYCMSRNKAMSYLPNHNPDCNNSLEWADDIEEQVEREMLKISLDLSSYKPKEKETKLDIMQSQLDKEQTKLKRLYGLYADGNDTVLSMIKELEGNISAIKENIAEERKNFSIKQKNTIIYDEIKKLADVWGNIDKKQKNMILKTIIDKIVIVNGNIEIQLKNF

SEQ ID NO: 8653 - protein, 453 aa, Unknown
  Description of Unknown: Integrase B8654 sequence
  SM00857,IPR006118,G3DSA:1.10.10.2600,IPR036162, PF13408,IPR025827,G3DSA:3.40.50.1390,IPR006119, IPR038109,SSF53041,PF00239,PTHR30461, PS00397,PS51736,Coil,cd00338
MECVAYLRVSTEKQAEEGHGLESQKRDIENYCRKNELIIVDWYVDDGYTGSNMDRPEFQRLISDCYAKRVKCVVAYKLDRISRTMLDSIYVIERIFQPNNVRLECVHDAVNYNDPMQQAYTQMMAVFAQLDKNTMMLRMRGGILERVKKGYWPGGGIKPYCYRYDKEFGILIPIPERAERARQALDLFIQGYSDEKIMRMLGFRTEGVVRNILTGVVNIGKIKYKGNVYQGRHEPIFDVEKFNLGLEIRKTRSKARAYCRTEPNLLTGLCYCGVCGCKMRYQKWGSDRRKMYCCSRNRYLDYLPNYNHDCDNSVEWADKIEEQVESEILKISLNLSSYKPKEKATKFEIMQSQLDKSKTKLRRLYELYADGNDMVLDMISNLENEIEISKERIKEESKNIQKENKKEYVYENIKNLADVWDTIDKTKKNTILKSIISKVVVVNGNVDIQLKSF

SEQ ID NO: 8654 - protein, 453 aa, Unknown
  Description of Unknown: Integrase B8655 sequence
  PTHR30461:SF3,SM00857,G3DSA:1.10.10.2600,IPR036162,PF13408, IPR025827,G3DSA:3.40.50.1390,IPR006119,IPR038109,SSF53041, PTHR30461,Coil,PS51736,cd00338,PF00239
MECVAYMRVSTEKQAVEGNGLDSQKRDIENYCRKNELVITDWYIDDGYTGTNMDRPELQRLVNDCSRKRVRCVVAFKLDRLSRNMIDGIYLIEKVFQKYNVVFKCVHDSVNYDSPMEQAYTQMMAVFAQLDKNTMLLRMRGGMLERIKQGYWMGGGNLPYCYSYSKEQGILIPIPERAEQARKGLELFISGYSDAKIKEICGFKSELVTRSILTGVVNIGMIPYKGKIYQGKHEPVFDKDRFNLGLELRKSRCSAKTYCITEPNLLTGLCYCGICGCKMRYQKWGSEKHKIYCCSRNKSLSYLPNYNASCNNSLEWADEIEKQVEEEILKISLDLSSYKPKEKATKLEIMQSQLEKEQIKLKRLYNLYADGNDTVLEMIKELEAQIKEMKLNIAAESKNAINTQKKEFVYENIKKLADIWDKVDKKQKNLILKTIIDKIVIVNGNIEIQLKNF

SEQ ID NO: 8655 - protein, 453 aa, Unknown
  Description of Unknown: Integrase B8656 sequence
  PTHR30461:SF3,SM00857,G3DSA:1.10.10.2600,IPR036162,PF13408, IPR025827,G3DSA:3.40.50.1390,IPR006119,IPR038109,SSF53041, PTHR30461,Coil,PS51736,cd00338, PF00239
MECVAYMRVSTEKQAVEGNGLDSQKRDIENYCRKNELVITDWYIDDGYTGTNMDRPELQRLVNDCSRKRVSCVVAFKLDRLSRNMIDGIYLIEKVFQKYNVVFKCVHDSVNYDSPMEQAYTQMMAVFAQLDKNTMMLRMRGGMLERIKQGYWMGGGNLPYCYSYSKEQGILIPIPERAEQARKGLELFISGYSDAKIKEICGFKSELVTRSILTGVVNIGMIPYKGKIYQGKHKPIFDKDRFNLGLELRKSRCSAKTYCITEPNLLTGLCYCGICGCKMRYQKWGSEKHKIYCCSRNKSLSYLPNYNASCNNSLEWADEIEKQVEEEILKISLDLSSYKPKEKATKLEIMQSQLEKEQIKLKRLYNLYADGNDTVLEMIKELEAQIKEMKLNIAAESKNAINTQKKEFVYENIKKLADIWDKVDKKQKNLILKTIIDKIVIVNGNIEIQLKNF

SEQ ID NO: 8656 - protein, 453 aa, Unknown
  Description of Unknown: Integrase B8657 sequence
  PTHR30461:SF3,SM00857,G3DSA:1.10.10.2600,IPR036162,PF13408, IPR025827,G3DSA:3.40.50.1390,PS51737,IPR006119,IPR038109, IPR011109,SSF53041,PTHR30461,Coil,PS51736, cd00338,PF00239
MECVAYMRVSTEKQVEEGNGLESQKRDILDYCSKNELIVTDWYVDDGYTGANMNRPELQRLVADCKHKRVSCVVAFKLDRLSRNMIDGLYMIEKIFQPNGVQFKCVHDSVSYDSPMEQAYTQMMAVFAQLDKNTMMLRMRGGMLERVKQGYWPGGGNTPYCYSYNKDQGILIPIPERAEQARKGLELFISGYSDVRIKEICGFKLESVVRKVLTSEVNIGMIPYKGKIYQGLHEPIFNKEQFELAQQLRKSRSCNKASCITEPNLLTGLCYCGVCGCAMRYQKWTHEKHKIYCMSRNKAMSYLPNHNPDCNNSLEWADDIEEQVEKEMLKISLDLSSYKPKEKETKLDIMQSQLDKEQAKLKRLYGLYADGNDTVLSMIKDLEANISAIKENILEERKNFSVKQKNTIVYDEIKKLADVWGNIDKKQKNMILKTIIDKVIIVNGNIEIQLKNF

SEQ ID NO: 8657 - protein, 453 aa, Unknown
  Description of Unknown: Integrase B8658 sequence
  PTHR30461:SF3,SM00857,G3DSA:1.10.10.2600,IPR036162,PF13408, IPR025827,G3DSA:3.40.50.1390,IPR006119,IPR038109,SSF53041, PTHR30461,Coil,PS51736,cd00338,PF00239
MECVAYMRVSTEKQAVEGNGLDSQKRDIENYCRKNELVITDWYIDDGYTGTNMDRPELQRLVNDCSRKRVRCVVAFKLDRLSRNMIDGIYLIEKVFQKYNVAFKCVHDSVNYDSPMEQAYTQMMAVFAQLDKNTMLLRMRGGMLERIKQGYWMGGGNLPYCYSYSKEQGILIPIPERAEQARKGLELFISGYSDAKIKEICGFKSELVTRSILTGVVNIGMIPYKGKIYQGKHEPIFDKDRFNLGLELRKSRCSAKTYCITEPNLLTGLCYCGICGCKMRYQKWGSEKHKIYCCSRNKSLSYLPNYNASCNNSLEWADEIEKQVEEEILKISLDLSSYKPKEKATKLEIMQSQLEKEQIKLKRLYNLYADGNDTVLEMIKELEAQIKEMKLNIAAESKNAINTQKKEFVYENIKKLADIWDKVDKKQKNLILKTIIDKIVIVNGNIEIQLKNF

SEQ ID NO: 8658 - protein, 453 aa, Unknown
  Description of Unknown: Integrase B8659 sequence
  PTHR30461:SF3,IPR036162,PS51737,IPR011109,PTHR30461, PS00397,PF00239,G3DSA:1.10.10.2600,IPR006119,SSF53041, SM00857,IPR025827,IPR038109,PS51736, cd03768,IPR006118,PF13408,G3DSA:3.40.50.1390,PF07508,Coil
MIKGACYVRVSTDNQLENYSIEEQTDRLKAYCKAKDIQIVKIYTDGGYSGGNINRPALQQMLQDIGKGLIDSVIVYKLDRLSRSQKDTLMLIEDCFLAKNVDFVSVNENFDTSTPFGRAMIGILSVFAQLEKDQITERFTMGRIGRAKNGYFHGGGNAPTGYDYIDGELIINDYEALQVKDLYNRFLKGYSIHNCWQYMHQKYGGWSNEVSVRNVLKNELYIGKVKFKGVAYQGNHQPIISEEIFRQVQDLFNSSRRTSDTFKRSPFKANTLLSSLVYCGKCGARFHGEHGNYSCYSRTKGDKKYIVDPNCKNKKWKIEELNKLVLDYITRLDFSKLQNSHPAPVPVTDYSLRLTEIDKQIEKLIDLYQVSGIPLESIQKKMDALTKEKEALLNVSKPKNVPITTLAEMITARDTLMSLSDTGSLDEKRACLTMIIDRIIIDDDNVNIKLKHL

SEQ ID NO: 8659 - protein, 453 aa, Unknown
  Description of Unknown: Integrase B8660 sequence
  PTHR30461:SF3,SM00857,G3DSA:1.10.10.2600,IPR036162,PF13408, IPR025827,G3DSA:3.40.50.1390,IPR006119,IPR038109,SSF53041, PTHR30461,Coil,PS51736,cd00338,PF00239
MECVAYMRVSTEKQAVEGNGLDSQKRDIENYCRKNELVITDWYIDDGYTGTNMDRPELQRLVNDCSRKRVSCVVAFKLDRLSRNMIDGIYLIEKVFQKYNVVFKCVHDSVNYDSPMEQAYTQMMAVFAQLDKNTMMLRMRGGMLERIKQGYWMGGGNLPYCYSYSKEQGILIPIPERAEQARKGLELFISGYSDAKIKEICGFKSELVTRSILTGVVNIGMIPYKGKIYQGKHEPIFDKDRFNLGLELRKSRCSAKTYCITEPNLLTGLCYCGICGCKMRYQKWGSEKHKIYCCSRNKSLSYLPNYNASCNNSLEWADEIEKQVEEEILKISLDLSSYKPKEKATKLEIMQSQLEKEQIKLKRLYNLYADGNDTVLEMIKELEAQIKEMKLNIAAESKNAINTQKREFVYENIKKLADIWDKVDKKQKNLILKTIIDKIVIVNGNIEIQLKNF

SEQ ID NO: 8660 - protein, 453 aa, Unknown
  Description of Unknown: Integrase B8661 sequence
  PTHR30461:SF3,cd00338,SM00857,G3DSA:1.10.10.2600,IPR036162, PF13408,IPR025827,G3DSA:3.40.50.1390,IPR006119,IPR038109, SSF53041,PTHR30461,PS51736,Coil, PF00239
MECVAYMRVSTEKQAEEGNGLDSQRRDIENYCRKNELVITDWYIDDGYTGANMDRPELQRLVSDCDRKRVGYVVAFKLDRISRSMVDGIYLIERVFLKNNVEFKCVHDSISYDNPMEQAYTQMMAVFAQLDKNTMLLRMRGGMLERVKQGYWMGGGNLPYCYTYSKDTGTLIPIPERKEQANKAMDLFLQGYSDVKIRDMLGFKSEFIVKQILTSHVNIGMIPYKGNIYQGLHEPIFNKEVFEKAQQFRAIRKNKRASCHNIQTNLLTGLCYCGICGCAMRYQKWTHGKHKIYCCSRNKDLHYLPNHNPNCNNTLEWASDIEKAVEDEILLISANISDYKPRVKESKLEILQGQLEKEQTKRKRLYNLYAEGNDDVISMIKEIEKAIEDIRKQIKEESAIETNKTRQNVFKNIKNLADIWEDIDKKQKNTLLKSIIEKIVISNGNIEIKLKDF

SEQ ID NO: 8661 - protein, 453 aa, Unknown
  Description of Unknown: Integrase B8662 sequence
  PTHR30461:SF3,IPR036162,PS51737,IPR011109,PTHR30461, PS00397,PF00239,G3DSA:1.10.10.2600,IPR006119,SSF53041, cd00338,SM00857,IPR025827,IPR038109,PS51736, IPR006118,PF13408,G3DSA:3.40.50.1390,Coil
MKECVAYIRVSTEKQAEEGHGLDSQRRDIENYCRKNGLLISDWYEDDGYTGSNMNRPALQSLVTDCTKKRVKCVVAFKLDRLSRSMVDGIYLIERVFQPNDVEFLCVHDSVSYDSPMEQAYTQMMAVFAQLDKNTMMLRMRGGMLERVKKGYWKGGGNPPYCYEYDKEKGILIPIPERAEQANKALDLFIDGYSDERIMRTLGYRSEFIVRSILTGVVNVGMIPYKGNVYQGLHEPIFDKKKFEFAQKLRESRRKSKMYLKSEPKLLTGLCYCGICGCKMRYQKWTNGNCKIYCYSRNHGMEYLPNYNKNCNNTVEWAENIEKQVESEILKISVNLSEHKPKAKKNKLEIMGNQADKEKKKLKRLYGLYADGNDMVIEMIKDLEGNISALEEQIKEERKRSSDNQKSFVYENIKNLADIWEKIDKTRKNKILKSIIEKIVIVNGNVEIQLKNF

SEQ ID NO: 8662 - protein, 453 aa, Unknown
  Description of Unknown: Integrase B8663 sequence
  PTHR30461:SF3,SM00857,G3DSA:1.10.10.2600,IPR036162,PF13408, IPR025827,G3DSA:3.40.50.1390,PS51737,IPR006119,IPR038109, SSF53041,IPR011109,PTHR30461,Coil,PS51736, cd00338,PF00239
MECVAYMRVSTEKQAEEGNGLDSQKRDIEIFCRKNELVVSDWYVDDGYTGANMDRPELQRLINDCIKKRVKCVVAFKLDRLSRSMIDGLYIIERVFQPNQVLFKCVHDSVSYDSPMEQAYTQMMAVFAQLDKNTMMLRMRGGMLERIKQGYWIGGANTPYCYNYSKEKGILIPIPERKEQANRALDMFIGGYSDLYIKESLGFHSEVLVRNVLTGVVNIGMIPYKGNVYQGLHEPIFDKERFELAQEIRKSRRKNKTACHTDANLLTGLCYCGVCGCKMRYQKWTHGKHKIYCCSRDKAMKYLPNFNPNCNNSLEWAADIEKQVESEILKISLNLSECKPIEKQSKLEIMQSQFEKEQVKLKRLYVLYSDGNDTVLEMIKNTEKSISEMKVKITEEEKNERNSQKKEVVYENIKKLADVWAHIDKKEKNNILKSIISRIVIVNGDVEIQLKNF

SEQ ID NO: 8663 - protein, 453 aa, Unknown
  Description of Unknown: Integrase B8664 sequence
  SM00857,IPR006118,G3DSA:1.10.10.2600,IPR036162,PS51737, G3DSA:3.40.50.1390,Coil,IPR006119,IPR038109,SSF53041, IPR011109,PTHR30461,PS00397,PS51736,cd00338, PF00239
MECVAYIRVSTERQVEEGYGLESQKRDIEEYCKKNEMLITDWYIDAGLSGMDMTKRVELQRLISDISKINDIVVYKLDRLARDSVDALYMIEKLFTPKGVRVNSVHDFARYETPQDKFQTHIMAAVAEYDRNTMLLRMRGGMLERVKNGYWMGGGNTPYCYRYDKNLGYLVPIPERAEQANRAMDLFIGGMSDVKIQRLLGYKSEFVVRNILTGVVNIGYIPYKGGTYKGLHEPIFERDKFYLAQELRKSRRKQHVYSFTEPHLLTGLCYCKTCGCKMRYQKITGMGIHKIYCCSHDKYLDYLPNYNTDCDNPGAWASDIEIAFEHEILGISINLSQYKPKAKETKLQILTNQLEKQKSKLKRLYTLYAEGNDMVLDMIKTLETEIRETTEKISTERKNGQHEQKKEFVYENIKKLADIWDGISKSQKNSILKTIIDKVIVGKDDIEIQLKNF

SEQ ID NO: 8664 - protein, 453 aa, Unknown
  Description of Unknown: Integrase B8665 sequence
  PTHR30461:SF3,SM00857,G3DSA:1.10.10.2600,IPR036162,PF13408, IPR025827,G3DSA:3.40.50.1390,IPR006119,IPR038109,SSF53041, PTHR30461,Coil,PS51736,cd00338,PF00239
MECVAYMRVSTEKQAEEGNGLESQKRDILDYCSKNELIVTDWYVDDGYTGANMNRPELQRLVADCKHKRLSCVVAFKLDRLSRNMIDGLYMIEKIFQPNGVQFKCVHDSVSYDSPMEQAYTQMMAVFAQLDKNTMMLRMRGGMLERIKQGYWPGGGNTPYCYSYSKDQGILIPIPERAEQARKGLELFISGYSDARIKEICGFKLESVVRKVLTSEVNIGMIPYKGKIYQGLHEPIFDKELFELAQQLRKSRSLNKASCITEPNLLTGLCYCGVCGCAMRYQKWTHGKHKIYCMSRNKAMSYLPNHNPDCNNSLEWADDIEEQVEKEMLKISLDLSLYKPKEKETKLNIMQSQLDKEQAKLKRLYGLYADGNDTVLSMIKELEANISAIKENILEEQKNFSVKQKNTIVYDEIKKLADVWDSIDKKQKNMILKTIIDKIIIVNGNIEIQLKNF

SEQ ID NO: 8665 - protein, 453 aa, Unknown
  Description of Unknown: Integrase B8666 sequence
  PTHR30461:SF3,IPR036162,PS51737,IPR011109,PTHR30461, PS00397,PF00239,G3DSA:1.10.10.2600,IPR006119,SSF53041, SM00857,IPR025827,IPR038109,PS51736, cd03768,IPR006118,PF13408,G3DSA:3.40.50.1390,PF07508,Coil
MIKGACYVRVSTDNQLENYSIEEQTDRLKAYCKAKDIQIVKIYTDGGYSGGNVNRPALQQMLQDIDKGLIDSVIVYKLDRLSRSQKDTLMLIEDCFLAKNVDFVSVNENFDTSTPFGRAMIGILSVFAQLEKDQITERFTMGRIGRAKNGYFHGGGNAPTGYDYIDGELIINDYEAIQVKDLYNRFLKGYSIHNCWQYMQQKYGGWSSEVLVRNVLKNELYIGKVKFKGVAYQGNHQPIISEETFRQVQDLFNSSRRASDTFKRSPFKASTLLSSLVYCGKCGARFHGEHGNYSCYSRTKGDKKYIVDPNCKNKKWKIEELDRLVLDYIMRLDFSKLKSGHPVPVPVTDYSIRLNEIDKQIGKLIDLYQVSGIPIETIQEKMDALNKEKEALLNISKPKNVPVTTLAEMITARDTLMSLSDTGSLDEKRACLTMIVDRIIIDDDNVNIKLKQL

SEQ ID NO: 8666 - protein, 453 aa, Unknown
  Description of Unknown: Integrase B8667 sequence
  SM00857,IPR006118,G3DSA:1.10.10.2600,IPR036162,PS51737, G3DSA:3.40.50.1390,Coil,IPR006119,IPR038109,IPR011109, SSF53041,PTHR30461,PS00397,PS51736,cd00338, PF00239
MECVAYIRVSTERQVEEGYGLESQKRDIEYYCKKNEMLITDWYIDAGLSGMDMSKRVELQRLISDISKINNIVVYKLDRLARDSVDALYMIEKLFTPKGVRVNSVHDFARYETPQDKFQTHIMAAVAEYDRNTMLLRMRGGMLERVKNGYWMGGGNTPYCYRYDKNLGYLVPIPERAEQANRAMDLFIGGMSDVKIQRLLGYKSEFVVRNILTGVVNIGYIPYKGGTYKGLHEPIFEHDKFYLAQELRKSRRKQHVYSFTEPHLLTGLCYCKTCGCKMRYQKITGMGIHKIYCCSHDKYLDYLPNYNTDCDNPGAWASDIEIAFEHEILGISINLSQYKPKAKETKLQILTNQLEKQKAKLKRLYTLYAEGNDMVLDMIKTLETEIRETTEKISTERKDGQHEQKKEFVYENIKKLADIWDGISKSQKNSILKTIIDKVIVGKDDIEIQLKNF

SEQ ID NO: 8667 - protein, 453 aa, Unknown
  Description of Unknown: Integrase B8668 sequence
  PTHR30461:SF3,SM00857,G3DSA:1.10.10.2600,IPR036162,PF13408, IPR025827,G3DSA:3.40.50.1390,IPR006119,IPR038109,SSF53041, PTHR30461,Coil,PS51736,cd00338,PF00239
MKCVAYMRVSTEKQAEEGNGLESQKRDIENYCRKNELIIADWYVDEGYTGSNMNRPELQRLITDCSRKKVNCVVAFKLDRISRSMVDGIYIIEKVFQSNNVAFKCVHDSISYDSPMEQAYTQMMAVFAQLDKNTMMLRMRGGMLERIKQGYWWGGGNTPYCYRYDKEQGILIPIQERAEQARKALELFISGYSDAKIKEICGFKSELVTRKVLTGVVNIGMIPYKGNIYQGKHKPIFDKDRFELAQELRKSRCSAKTSCFTEPNLLTGLCYCGVCGCKMRYQKWSNGNHKIYCCSRNKGLKYLPNYNPNCNNSLEWADDIEKQVTDEILKISLNLSSYKPKAKETKLEIMQSQLEREQTKLKRLYSLYADGNDTVLEMIKDLESQISKTKEDISVESKNAINTQKKEFTYQNIKKLADVWDNIDKKQKNFILKTIIDKVIIVNGNVEIQLKNF

SEQ ID NO: 8668 - protein, 453 aa, Unknown
  Description of Unknown: Integrase B8669 sequence
  PTHR30461:SF3,SM00857,G3DSA:1.10.10.2600,IPR036162,PF13408, IPR025827,G3DSA:3.40.50.1390,IPR006119,IPR038109,SSF53041, PTHR30461,Coil,PS51736,cd00338, PF00239
MECVAYMRVSTEKQAVEGNGLDSQKRDIENYCRKNELVITDWYIDDGYTGTNMDRPELQRLVNDCSRKRVSCVVAFKLDRLSRNMIDGIYLIEKVFQKYNVVFKCVHDSVSYNSPMEQAYTQMMAVFAQLDKNTMMLRMRGGMLERIKQGYWMGGGNLPYCYSYSKEQGILIPIPERAEQARKGLELFISGYSDAKIKEICGFKSELVTRSILTGVVNIGMIPYKGKIYQGKHEPIFDKDRFNLGLELRKSRCSAKTYCITEPNLLTGLCYCGICGCKMRYQKWGSEKHKIYCCSRNKSLSYLPNYNASCNNSLEWADEIEKQVEEEILKISLDLSSYKPKEKATKLEIMQSQLEKEQIKLKRLYNLYADGNDTVLEMIKELEAQIKEMKLNIAAESKNAINTQKKEFVYENIKKLADIWDKVDKKQKNLILKTIIDKIVIVNGNIEIQLKNF

SEQ ID NO: 8669 - protein, 453 aa, Unknown
  Description of Unknown: Integrase B8670 sequence
  PTHR30461:SF3,IPR036162,PS51737,IPR011109,PTHR30461, PS00397,PF00239,G3DSA:1.10.10.2600,IPR006119,SSF53041, cd00338,SM00857,IPR025827,IPR038109,PS51736, IPR006118,PF13408,G3DSA:3.40.50.1390,Coil
MECVAYIRVSTERQVEEGYGLESQKRDIEEYCKKNEMLITDWYIDAGLSGMDMSKRVELQRLISDISKINDIVVYKLDRLARDSVDALYMIEKLFTPKGVRVNSVHDFARYETPQDKFQTHIMAAVAEYDRNTMLLRMRGGMLERVKNGYWMGGGNTPYCYRYDKNLGYLVPIPERAEQANRAMDLFIDGMSDVKIQRLLGYKSEFVVRSIMTGIVNIGYIPYKGGVYKGLHEPIFDREKFYLAQELRKSRRKQHIYCYTEPHLLTGLCYCRECGCKMRYQKITGMGIHKIYCCSHNSYLDYLPNHNPDCNNPGAWASDVEKAFEQEILEISINLSKYKPKAKETKLQILTNQLEKQKAKLKRLYTLYAEGNDMVLDMIKTLETEIRETTEKISAERKNGQHEQKKEFVYENIKKLADIWDGISKSQKNSILKTIIDKVIVGKDDIEIQLKNF

SEQ ID NO: 8670 - protein, 453 aa, Unknown
  Description of Unknown: Integrase B8671 sequence
  PTHR30461:SF3,SM00857,IPR006118,G3DSA:1.10.10.2600,IPR036162, PF13408,IPR025827,G3DSA:3.40.50.1390,Coil,IPR006119, IPR038109,SSF53041,PTHR30461,PS00397,PS51736, cd00338,PF00239
MECVAYIRVSTEKQAEEGYGIDSQKRDIIAYCRKNELIITDWYIDDGYTGANMDRPELNRLINDCSKKRVHFIVAFKLDRLSRSMVDGIYIIERIFQPNGIVFKCVHDSISYDSPMEQAYTQMMAVFAQLDKNTMLLRMRGGMIERVKKGYWMGGGNTPYCYNYDKESGILVPIPDRKRKANIAMDLFIEGHSDIYIKDTLGFSSELVVRSILTGVVNIGMIPYKGVIYQGLHEPIFEKDKFEEAQELRKLRRNHKQSCQADANILTGLCVCGICGCKMRYQKWTHGKHKIYCCSRNKHLSYLPNYNHSCNNSIEWADEIEEQVESKILKISLSLSEYKPKSKESKLEIMQLQLEREKTKLKRLYVLYSEGNDTVLEMIKSSENVVSETERKIEDEKRSIQESPKKETVFNNIKMLADVWPHINKQKKNNILKNIIEKVVIVNGDIEIQLKTF

SEQ ID NO: 8671 - protein, 453 aa, Unknown
  Description of Unknown: Integrase B8672 sequence
  PTHR30461:SF3,IPR036162,PS51737,IPR011109,PTHR30461, PS00397,PF00239,G3DSA:1.10.10.2600,IPR006119,SSF53041, SM00857,IPR025827,IPR038109,PS51736,cd03768, IPR006118,PF13408,G3DSA:3.40.50.1390,PF07508,Coil
MIKGACYVRVSTDNQLENYSIEEQTDRLKAYCKAKDIQIVKIYTDGGYSGGNVNRPALQQMLQDIGKGLIDSVIVYKLDRLSRSQKDTLMLIEDCFLAKNVDFVSVNENFDTSTPFGRAMIGILSVFAQLEKDQITERFTMGRIGRAKNGYFHGGGNAPTGYDYIDGELIINDYEALQVKDLYNRFLKGYSIHNCWQYMQQKYGGWSSEVLVRNVLRNELYIGKVKFKGVAYQGNHQPIISEDLFRQVQDLFNSSKRSSNTFKRSPFKASTLLSSIVYCGKCGARFHGEHGNYSCYSRTKGDKKYIVDPNCKNKKWKIEELDRLVLDYITRLDFSKLHNSHPVPVPSTDYSFRLTEIDKQIGKLIDLYQVSGIPLETIQEKMDALNKEKEALLIISKPKNVPVTTLAEMITARDTLMSLSDSGSLDEKRACLTMIIDRIIIDDDNVNIKLKQL

SEQ ID NO: 8672 - protein, 453 aa, Unknown
  Description of Unknown: Integrase B8673 sequence
  PTHR30461:SF3,SM00857,G3DSA:1.10.10.2600,IPR036162,PF13408, IPR025827,G3DSA:3.40.50.1390,PS51737,IPR006119,IPR038109, IPR011109,SSF53041,PTHR30461,Coil,PS51736, cd00338,PF00239
MECVAYMRVSTEKQAEEGNGLESQKRDILDYCSKNELIVTDWYVDDGYTGANMNRPELQRLVADCKHKRVSCVVAFKLDRLSRNMIDGLYMIEKIFQPNGVQFKCVHDSVSYDSPMEQAYTQMMAVFAQLDKNTMMLRMRGGMLERVKQGYWSGGGNLPYCYSYNKDQGILIPIPERAEQANKALELYIRGYSDVKICKICGYKGEKVVRQILTTPVNVGMIPYKGKIYQGLHEPIFNKEQFELAQQLRKSRSCNKASCITEPNLLTGLCYCGVCGCAMRYQKWTHGKHKIYCMSRNKAMSYLPNHNPDCNNSLEWADDIEEQVEKEMLKISLDLSSYKPKEKETKLDIMQSQLDKEQAKLKRLYGLYADGNDTVLSMIKELEANISAIKENISEERKNFSVKQKNTIVYDEIKKLADVWDSIDKKQKNMILKTIIDKVIIVNGNIEIQLKNF

SEQ ID NO: 8673 - protein, 453 aa, Unknown
  Description of Unknown: Integrase B8674 sequence
  PTHR30461:SF3,SM00857,G3DSA:1.10.10.2600,IPR036162,PF13408, IPR025827,G3DSA:3.40.50.1390,IPR006119,IPR038109,SSF53041, PTHR30461,Coil,PS51736,cd00338,PF00239
MECVAYMRVSTEKQVEEGNGLESQKRDILDYCSKNKLIVTDWYVDDGYTGANMNRPELQRLVTDCKHKRISCVVAFKLDRLSRNMIDGLYMIEKIFQPNGVQFKCVHDSVSYDSPMEQAYTQMMAVFAQLDKNTMMLRMRGGMLERVKQGYWMGGGNLPYCYSYDKDSGILIPIAERKEQANKALELYISGYSDAMICEICGYKGERVVNRILTSTVNIGMIPYKGKIYQGLHEPIFDKERFELAQQLRKSRSLNKASCITEPNLLTGLCYCGVCGCAMRYQKWTHGKHKIYCMSRNKAMSYLPNHNPDCNNSLEWADDIEEQVEREMLKISLDLSSYKPKEKETKLDIMQSQLDKEQTKLKRLYGLYADGNDTVLSMIKELEGNISAIKENIAEERKNFSIKQKNTIIYDEIKKLADVWGNIDKKQKNMILKTIIDKIIIVNGNIEIQLKSF

SEQ ID NO: 8674 - protein, 453 aa, Unknown
  Description of Unknown: Integrase B8675 sequence
  SM00857,IPR006118,G3DSA:1.10.10.2600,IPR036162, PS51737,G3DSA:3.40.50.1390,Coil,IPR006119, IPR038109,SSF53041,IPR011109,PTHR30461, PS00397,PS51736,cd00338,PF00239
MECVAYIRVSTERQVEEGYGLESQKRDIEEYCKKNEMLITDWYIDAGLSGMDMTKRVELQRLISDISKINDIVVYKLDRLARDSVDALYMIEKLFTPKGVRVNSVHDFARYETPQDKFQTHIMAAVAEYDRNTMLLRMRGGMLERVKNGYWMGGGNTPYCYRYDKNLGYLVPIPERAEQANRAMDLFIGGMSDVKIQRLLGYKSEFVVRNILTGVVNIGYIPYKGGTYKGLHEPIFEHDKFYLAQELRKSRRKQHVYSFTEPHLLTGLCYCKTCGCKMRYQKITGMGIHKIYCCSHDKYLDYLPNYNTDCDNPGAWASDIEIAFEHEILGISINLSQYKPKAKETKLQILTNQLEKQKSKLKRLYTLYAEGNDMVLDMIKTLETEIRETTEKISAERKNGQQEQKKEFVYENIKKLADIWDGISKSQKNSILKTIIDKVIVGKDDIEIQLKNF

SEQ ID NO: 8675 - protein, 453 aa, Unknown
  Description of Unknown: Integrase B8676 sequence
  SM00857,IPR006118,IPR036162,PF13408,IPR025827, G3DSA:3.40.50.1390,PS51737,PS00397,IPR006119,SSF53041, IPR011109,PTHR30461,Coil,PS51736,cd00338, PF00239
MEEQKRLDKEGQKRAAIYVRVSTAEQKEHGLSVDNQLDALKNYCQERGFSIAGIYNDAGISARKKYKSRPALLQLLEDCQKHKIDIILFTKLDRWFRSVADYYAVQQVLDGAKVPWRAIWEDYETETSAGVFKVNIMLSVAQAESDRTSERIKAVLEYKREHGHIIAGRMPLGYIRTSSSTIDYDPATKDAMQAFFDTYLNTYSPVAAMDAARKLGLRMSRKTAHFILDKEPYYGTYYGVDVPAYITPEQHKIIQNARVHYARTTKDNRVYIFTGLIFCASCGARMGSKLSKHIRANGETIERGYYQCRTKTRRKDICEKPAFVMEHKLEDYLIEHMSELITDYEASIAQSQEKAKDAEKEISRIKGKLQRLKDVYLDGDMSRAEYVDKTSQLKANMAELESQRVPLSPIKQLPDDWVEMYRQLSKDGKRDFWHRTIRRIEIDGKKVSKVFFI

SEQ ID NO: 8676 - protein, 453 aa, Unknown
  Description of Unknown: Integrase B8677 sequence
  SM00857,G3DSA:1.10.10.2600,IPR036162,PF13408,IPR025827, G3DSA:3.40.50.1390,IPR006119,IPR038109,SSF53041,PF00239, PTHR30461,PS51736,Coil,cd00338
MKRKIRCAIYDRVSHELQVEKGLSLDTQKEMLTSYAKEQGYEIVDYYQDEGISARKTMKNRKELLRLLEDVKADKIDIILVTKLDRWFRSVKDYHNTQAILDAHHCAWKTILEDYDTTTSDGQLKINIMLAVAQNEADRTSERIKVVFSHKIRNKEHLNGPVPWGYAVDEKKHLVKDLEIAPIVEDMFNHYFTTFSKRETIMYIRSKYPGKTPEGNSLAKIFSNPTYAGVRFGIENYCDAYLTLEQHRKIVESTTAKVYPATHPQQTYIFSGMLRCPHCGKMLSGYVRSNKKGGRCYKYPAYRCHKRYNNHRAPVKTEKVVEQYVLNFFEEELNRSIYDLELKEGAGEKEKTVNVSVLQDELNRINIMFEKGRISLDYYDKRYEEIEMQIKEATVSHSKELRARKGLRDGLDGNWKELYLQLDASHKRAFWKNIIKEILIDPETHELNGIIFF

SEQ ID NO: 8677 - protein, 453 aa, Unknown
  Description of Unknown: Integrase B8678 sequence
  PTHR30461:SF3,SM00857,G3DSA:1.10.10.2600,IPR036162, PF13408,IPR025827,G3DSA:3.40.50.1390,IPR006119, IPR038109,SSF53041,PTHR30461,Coil, PS51736,cd00338,PF00239
MECVAYMRVSTEKQAVEGNGLDSQKRDIENYCRKNELIISDWYIDDGYTGTNMDRPELQRLVNDCSRKRVSCVVAFKLDRLSRNMIDGIYLIEKVFQKYNVMFKCVHDSVSYNSPMEQAYTQMMAVFAQLDKNTMMLRMRGGMLERVKQGYWFGGGNLPYCYSYSKDQGILIPIPERAEQARKALELFISGYSDAKIKEICGFKSEIVTRSILTSVVNVGMIPYKGKVYRGRHEAVFDKDRFELALELRRSRRSAKVSCITEPNLLTGLCYCGVCGCKMRYQKWGSEKHKIYCCSRDKKLSYLPNYNANCDNSLEWADEIEKQIEEEILKISLDLSSYKPKEKATKLEIMQSQLEKEQIKLKRLYNLYADGNDTVLEMIKELESQIKEMKSNIAAESKSAINTQKKEFVYENIKKLADIWDKVDKKQKNMILKTIIDKIVIVNGNIEIQLKNF

SEQ ID NO: 8678 - protein, 453 aa, Unknown
  Description of Unknown: Integrase B8679 sequence
  SM00857,G3DSA:1.10.10.2600,IPR036162,PF13408,IPR025827, PS51737,G3DSA:3.40.50.1390,IPR006119,IPR038109,IPR011109, SSF53041,PTHR30461,Coil,PS51736,cd00338, PF00239
MECVAYMRVSTEKQAEEGNGLDSQKRDIENYCRKNKLIITDWYIDDGYTGSNMDRPELQRLINDCSKKRVKCVVAFKLDRLSRSMIDGIYMIERIFQPNNIEFYCVHDSVSYDSPMEQAYTQMMAVFSQLDKNTMLLRMRGGMLERVKKGYWMGGGNMPYCYEYDKEQGILVPIPEKAERARQALELFIDGYSDRSISDMLHFSSDIVVSRILTSPVNIGMIPYKGKMYQGRHQPVFQRDRFELAQEVRKSRRKNRTYRKTEPNLLTGLCYCGVCGCKMRYQKWGCEKQKIHCCSRDKYLQYLPNYSANCDNMAIWADEIEKQVEEEIIKISLNLSEYKPKQKESKIEIMQKNLNREKIKLKRLYNLYAEGNDTVLEMIKEVEKTIGESKKRIEEEYKNIGNTNKKEYVYENIKSLADVWNTISKTGKNSILKSIVEKIVIVNGDVEIVLKNF

SEQ ID NO: 8679 - protein, 453 aa, Unknown
  Description of Unknown: Integrase B8680 sequence
  PTHR30461:SF3,SM00857,G3DSA:1.10.10.2600,IPR036162,PF13408, IPR025827,G3DSA:3.40.50.1390,PS51737,cd03770,IPR006119, PF07508,IPR038109,IPR011109,SSF53041,PTHR30461, Coil,PF00239
MTDKITALYCRLSQDDMLQGESNSITNQKAILKKYAEDSGFSNLVYYVDDGVSGTTFERDGFKAMMADVEAGKVGTVITKDLSRLGRDYLKTGEYIEIIFPDYDVRYIAINDNVDTLKSENELMAFKNIFNDWYARDTSKKIRAVSKAKGQSGKPLSLPIYGYKASEEDKHKWIIDDEPAAVVRKIYKLCISGYGPTQIARKLTEEGIPNPTAYAISQGRNPANKNSRLDRWCTETVIDILEHPEYIGHTVNFRTRRKSYKNKRKIENPKEDWLIFENTHEPIVTQQEFDLVQEMRKNKRRNQKQETVNPFSGICFCADCGKKLYLCRSRSLSEDQEHLKCSTHSADKDRCSAHYIRTVVLKELVLNALNKLLDNVKDNEAEFVQTAMDNSASKHSSDVFKAKKALNQAEKRIAELDRLFARLYEDNISGKISNERFAVLSAGYEDEQKKLKA

SEQ ID NO: 8680 - protein, 453 aa, Unknown
  Description of Unknown: Integrase B8681 sequence
  SM00857,IPR006118,G3DSA:1.10.10.2600,IPR036162,PS51737, G3DSA:3.40.50.1390,Coil,IPR006119,IPR038109,SSF53041, IPR011109,PTHR30461,PS00397,PS51736,cd00338, PF00239
MECVAYIRVSTERQVEEGYGLESQKRDIEEYCKKNEMLITDWYIDAGLSGMDMSKRVELQRLISDISKINNIVVYKLDRLARDSVDALYMIEKLFTPKGVRVNSVHDFARYETPQDKFQTHIMAAVAEYDRNTMLLRMRGGMLERVKNGYWMGGGNTPYCYRYDKNLGYLVPIPERAEQANRAMDLFIDGMSDVKIQRLLGYKSEFVVRNILTGVVNIGYIPYKGGTYKGLHESIFEHDKFYLAQELRKSRRKQHIYSFTEPHLLTGLCYCKTCGCKMRYQKITGMGIHKIYCCSHDKYLDYLPNYNADCDNPGAWASDIEKAFEHEILDISIKLSQYKPKAKETKLQILTNQLEKQKSKLKRLYTLYAEGNDMVLDMIKTLETEIRETTEKISAERKNGQHEQKKEFVYENIKKLADIWDGISKSQKNSILKTGIDKVIVGKDDIEIQLKNF

SEQ ID NO: 8681 - protein, 453 aa, Unknown
  Description of Unknown: Integrase B8682 sequence
  PTHR30461:SF3,SM00857,G3DSA:1.10.10.2600,IPR036162,PF13408, IPR025827,G3DSA:3.40.50.1390,IPR006119,IPR038109,SSF53041, PTHR30461,Coil,PS51736,cd00338,PF00239
MECVAYMRVSTEKQAEEGNGLESQKRDILDYCTKNELIVTDWYVDDGYTGANMNRPELQRLVADCKHKRISCVVAFKLDRLSRNMIDGLYMIEKIFQPNGVQFKCAHDSVSYDSPMEQAYTQMMAVFAQLDKNTMMLRMRGGMLERVKQGYWMGGGNLPYCYSYDKDSGILIPIAERKEQANKALELYISGYSDAMICEICGYKGERVVNRILTSPVNVGMIPYKGKIYQGLHEPIFDKERFELAQQLRKSRSLNKASCITEPNLLTGLCYCGVCGCAMRYQKWTHGKHKIYCMSRNKAMSYLPNHNPDCNNSLEWADDIEEQVEKEMLKISLDLSSYKPKEKETKLDIMQSQLDKEQAKLKRLYGLYADGNDTVLSMIKELEANISAIKENISEERKNFSVKQKNTIVYDEIKKLADVWDSIDKKQKNMILKTIIDKIIIVNGNVEIQLKNF

SEQ ID NO: 8682 - protein, 453 aa, Unknown
  Description of Unknown: Integrase B8683 sequence
  PTHR30461:SF3,cd00338,SM00857,G3DSA:1.10.10.2600,IPR036162, PF13408,IPR025827,G3DSA:3.40.50.1390,IPR006119,IPR038109, SSF53041,PTHR30461,PS51736,Coil, PF00239
MECVAYMRVSTEKQAVEGNGLDSQKRDIENYCRKNELVITDWYIDDGYTGTNMDRPELQRLVNDCSRKRVRCVVAFKLDRLSRNMIDGIYLIEKVFQKYNVAFKCVHDSVNYDSPMEQAYTQMMAVFAQLDKNTMLLRMRGGMLERIKQGYWMGGGNLPYCYSYSKEQGILIPIPERAEQARKGLELFISGYSDAKIKEICGFKSELVTRSILTGVVNIGMIPYKGKIYQGKHEPVFDKDRFNLGLELRKSRCSAKTYCITEPNLLTGLCYCGICGCKMRYQKWGSEKHKIYCCSRNKSLSYLPNYNASCNNSLEWADEIEKQVEEEILKISLDLSSYKPKEKATKLEIMQSQLEKEQIKLKRLYNLYADGNDTVLEMIKELEAQIKEMKANIAAESKNAINTQKKEFVYENIKKLADIWDKVDKKQKNLILKTIIDKIVIVNGNIEIQLKNF

SEQ ID NO: 8683 - protein, 453 aa, Unknown
  Description of Unknown: Integrase B8684 sequence
  PTHR30461:SF3,SM00857,G3DSA:1.10.10.2600,IPR036162,PF13408, PS51737,G3DSA:3.40.50.1390,IPR025827,IPR006119,IPR038109, PF07508,IPR011109,SSF53041,PTHR30461,Coil, PS51736,cd00338,PF00239
MECVVYMRVSTEKQVEEGNGLESQKRDILDYCSKNELIVTDWYVDDGYTGANMNRPELQRLVADCKHKRISCVVAFKLDRLSRNMIDGLYMIEKIFQPNDVQFKCVHDSVSYDSPMEQAYTQMMAVFAQLDKNTMMLRMRGGMLERVKQGYWPGGGNTPYCYSYSKDQGILIPIPERAEQARKGLELYIKGYSDIKICKICGYKGEKVVRQILTSPVNIGMIPYKGKIYQGLHEPIFDKELFELAQQLRKSRSLNKASCITEPNLLTGLCYCGVCGCAMRYQKWTHGKHKIYCMSRNKAMSYLPNHNPDCSNSLEWADDIEEQVEREILKISLDLSSYKPKEKETKLDIMQSQLDKEQTKLKRLYGLYADGNDTVLSMIKELEGNISAIKDNIAGERKNFSAKQKNAIVYDEIKKLADVWDSIDKKQKNMILKTIIDKIIIVNGNIEIQLKSF

SEQ ID NO: 8684 - protein, 453 aa, Unknown
  Description of Unknown: Integrase B8685 sequence
  PTHR30461:SF3,SM00857,G3DSA:1.10.10.2600,IPR036162,PF13408, IPR025827,G3DSA:3.40.50.1390,IPR006119,IPR038109,SSF53041, PTHR30461,Coil,PS51736,cd00338,PF00239
MECVAYMRVSTEKQAVEGNGLDSQKRDIENYCRKNELVITDWYIDDGYTGANMDRPGLQRLVNDCSRKRVSCVVAFKLDRLSRNMIDGIYLIEKVFQKCNVTFKCVHDSVNYDSPMEQAYTQMMAVFAQLDKNTMMLRMRGGMLERIKQGYWMGGGNLPYCYSYSKEQGILIPIPERAEQARKALELFISGYSDVKIKEICGFKSELVTRNILTGIVNIGMIPYKGKIYQGRHEPIFDKGRFNLAQELRKTRAKSRVTCQTEPNLLTGLCYCGVCGCAMRYQKWTNGKHKIYCMSRNKSMSYLPNYNANCDNSLEWADDIEKQVEEEILKISLNLSSYKPKEKATKLEIMQSQLDKEQTKLKRLYNLYADGNDTVLEMIKESESLIKTMKANVLSESKNAADTQKKEFVYENIKKLADVWDNIDKKKKNMILKTIIDKIVIVNGNIEIQLKNF

SEQ ID NO: 8685 - protein, 453 aa, Unknown
  Description of Unknown: Integrase B8686 sequence
  PTHR30461:SF3,SM00857,G3DSA:1.10.10.2600,IPR036162,PF13408, IPR025827,G3DSA:3.40.50.1390,IPR006119,IPR038109,SSF53041, PTHR30461,Coil,PS51736,cd00338, PF00239
MECVAYMRVSTEKQAVEGNGLDSQKRDIENYCRKNELVITDWYIDDGYTGTNMDRPELQRLVNDCSRKRVSCVVAFKLDRLSRNMIDGIYLIEKVFQKYNVVFKCVHDSVNYDSPMEQAYTQMMAVFAQLDKNTMMLRMRGGMLERIKQGYWMGGGNLPYCYSYSKEQGILIPIPERAEQARKGLELFISGYSDAKIKEICGFKSELVTRSILTGVVNIGMIPYKGKIYQGKHEPVFDKDRFNLGLELRKSRCSAKTYCITEPNLLTGLCYCGICGCKMRYQKWGSEKHKIYCCSRNKSLSYLPNYNASCNNSLEWADEIEKQVEEEILKISLDLSSYKPKEKATKLEIMQSQLEKEQIKLKRLYNLYADGNDTVLEMIKELEAQIKEMKLNIAAESKNAINTQKKEFVYENIKKLADIWDKVDKKQKNLILKTIIDKIVIVNGNIEIQLKNF

SEQ ID NO: 8686 - protein, 453 aa, Unknown
  Description of Unknown: Integrase B8687 sequence
  PTHR30461:SF3,SM00857,G3DSA:1.10.10.2600,IPR036162,PF13408, IPR025827,G3DSA:3.40.50.1390,PS51737,IPR006119,IPR038109, SSF53041,IPR011109,PF00239,PTHR30461,PS51736, Coil,cd00338
MECVAYMRVSTEKQAEEGNGLDSQKRDIELFCRKNELVVSDWYVDDGYTGANMDRPELQRLINDCIKKRVKCVVAFKLDRLSRSMIDGLYIIERVFQPNQVLFKCVHDSVSYDSPMEQAYTQMMAVFAQLDKNTMMLRMRGGMLERIKQGYWIGGANTPYCYNYSKEKGILIPIPERKEQANRAIDMFIGGYSDLYIKESLGFHSEVLVRNVLTGVVNIGMIPYKGNVYQGLHEPIFDKERFELAQEIRKSRRKNKTACHTDANLLTGLCYCGVCGCKMRYQKWTHGKHKIYCCSRDKAMKYLPNFNPNCNNSLEWAADIEKQVESEILKISLNLSECKPIEKQSKLEIMQSQFEKEQVKLKRLYVLYSDGNDTVLEMIKNTEKSISDMKEKITEEEKNERNSQKEEVVYENIKKLADVWAHIDKKEKNNILKSIISRIVIVNGDVEIQLKNF

SEQ ID NO: 8687 - protein, 453 aa, Unknown
  Description of Unknown: Integrase B8688 sequence
  PTHR30461:SF3,SM00857,G3DSA:1.10.10.2600,IPR036162,PF13408, IPR025827,G3DSA:3.40.50.1390,IPR006119,IPR038109,SSF53041, PF00239,PTHR30461,PS51736,Coil,cd00338
MECVAYMRVSTEKQAEEGNGLDSQRRDIENYCRKNELVITDWYIDDGYTGANMDRPELQRLVSDCERKRVGYVVAFKLDRISRSMVDGIYLIERVFLKNNVEFKCVHDSISYDNPMEQAYTQMMAVFAQLDKNTMLLRMRGGMLERVKQGYWMGGGNLPYCYTYSKDTGTLIPIPERKEQANKAMDLFLQGYSDVKIRDMLGFKSEFVVKQVLTSPVNIGMIPYKGNIYQGLHEPIFNKEVFEKAKQFRAIRKSKRASCHNIQTNLLTGLCYCGICGCAMRYQKWTHGKHKIYCCSRNKDLHYLPNHNPNCNNTLEWASDIEKAVEDEILLISANISEYKPRVKESKLEILQGQLEKEQTKRKRLYNLYAEGNDDVISMIKEIEKVIEDIRKQIKEESAIETNKTRQNVFKNIKNLADIWEDIDKKQKNMLLKSIIEKIVISNGNIEIKLKDF

SEQ ID NO: 8688 - protein, 453 aa, Unknown
  Description of Unknown: Integrase B8689 sequence
  PTHR30461:SF3,SM00857,G3DSA:1.10.10.2600,IPR036162,PF13408, IPR025827,G3DSA:3.40.50.1390,PS51737,IPR006119,IPR038109, SSF53041,IPR011109,PTHR30461,Coil, PS51736,cd00338,PF00239
MECVAYMRVSTEKQAEEGNGLDSQKRDIELFCRKNELVVADWYVDDGYTGANMDRPELQRLINDCIKKRVKCVVAFKLDRLSRSMIDGLYIIERVFQPNQVLFKCVHDSVSYDSPMEQAYTQMMAVFAQLDKNTMMLRMRGGMLERIKQGYWIGGANTPYCYNYSKEKGILIPIPERKEQANRALDMFIGGYSDLYIKESLGFHSEVLVRNVLTGVVNIGMIPYKGNVYQGLHEPIFDKERFELAQEIRKSRRKNKTACHTDANLLTGLCYCGVCGCKMRYQKWTHGKHKIYCCSRDKAMKYLPNFNPNCNNSLEWAADIEKQVESEILKISLNLSECKPIEKQSKLEIMQSQFEKEHVKLKRLYVLYSDGNDTVLEMIKNTEKSISEMKVKITEEEKNERNSQKKEVVYENIKKLADVWAHIDKKEKNNILKSIISRIVIVNGDVEIQLKNF

SEQ ID NO: 8689 - protein, 452 aa, Unknown
  Description of Unknown: Integrase B8690 sequence
  SM00857,G3DSA:1.10.10.2600,IPR036162,PS51737,G3DSA:3.40.50.1390, IPR006119,IPR038109,PF07508,IPR011109,SSF53041, PTHR30461,Coil,PS51736,cd00338,PF00239
MKKRAVIYIRESTKFQDPESQKRECINYCKKNKLDIVKIYQDIASGANNNRKDFLQLLQDMEEDFFDVVVLWELSRSTRDFLMYKTTLMRMKELGKELYSLQEGTLTEDDLDKEFSTDIVALVNSHERKRVGRRVKIRREFATREGKWMGGKLPLGYKCVDGKIEIDPDTAPLVKEIFRLFLSGEKRTDIAKKFGFQDPKKINRLLVNPIYTGKLKLNETEMINDKRVYHGKYELIQGKHEAIIDDDTFKLSLILSKEKRREKYKNGDYLLKNVYCYDGDKMYPSTSKNRNKKPYYAAKFSGKVIGVKYLEETVINTLINEVDKLEILNTVESNVELEERKELYEKEIKKLKLQEERIFKKYIEGKLEEETFDKYDSDVKLKIKSFKSKIAEVEKLQLNKLKYEDNKKILREYIEKLSKTQEREELKQLLDIIIAEVRLINDFRVMVITNIF

SEQ ID NO: 8690 - protein, 452 aa, Unknown
  Description of Unknown: Integrase B8691 sequence
  PTHR30461:SF3,IPR036162,PS51737,IPR011109,PTHR30461, PS00397,PF00239,G3DSA:1.10.10.2600,IPR006119,SSF53041, SM00857,IPR025827,IPR038109,PS51736, cd03768,IPR006118,PF13408,G3DSA:3.40.50.1390,PF07508,Coil
MKAAIYIRVSTQEQIENYSIQAQTEKLTALCRSKDWDVYDIFIDGGYSGSNMNRPALNEMLSKLHEIDAVVVYRLDRLSRSQRDTITLIEEYFLKNNVEFVSLSETLDTSSPFGRAMIGILSVFAQLERETIRDRMVMGKIKRIEAGLPLTTAKGRTFGYDVIDTKLYINEEEAKQLRLIYDIFEEEQSITFLQKRLKKLGFKVRTYNRYNNWLTNDLYCGYVSYKDKVHVKGIHEPIISEEQFYRVQEIFSRMGKNPNMNKESASLLNNLVVCSKCGLGFVHRRKDTVSRGKKYHYRYYSCKTYKHTHELEKCGNKIWRADKLEELIIDRVNNYSFASRNIDKEDELDSLNEKLKIEHTKKKRLFDLYISGSYEVSELDAMMSDIDAQINYYEAQIEANEELKKNKKIQENLADLATVDFNSLEFREKQLYLKSLINKIYIDDEQVTIEWL

SEQ ID NO: 8691 - protein, 452 aa, Unknown
  Description of Unknown: Integrase B8692 sequence
  PTHR30461:SF3,IPR036162,PS51737,IPR011109,PTHR30461, PS00397,PF00239,G3DSA:1.10.10.2600,IPR006119,SSF53041, cd00338,SM00857,IPR025827,IPR038109,PS51736, IPR006118,PF13408,G3DSA:3.40.50.1390,Coil
MPKRTRIEDTGIQRAALYIRVSTEEQAMHGLSLTAQRETLLKYAEENGLRIVGTYADEGITARKKYKNRLEFMRMLRDVQSDKIDLILFIKLDRWFRNIADYYEVQKILDDHKVRWIATEEDYDTTTANGRLHLNIKLSIAQDESDRTSERIKFVFDSKVKRGEVISGKIPLGFRVEDKHLCIDQETAGIVVDIFNKYVAIRSLGALRKYIMDTYGMVYCYSGLRALLQNTRYIGLAHDMDDFCPPLIDRDVFGLVQSIIKERAQRNATKRTDWVYLFTGLVRCAECGNRLSAHTVAGKYIYYRCTRYEKLHLCTHKKRTSELVLEDWLLHNLVSQFAQYNLELEARTAQQVQKVDESKVRRKMDKLKDLYLNDLIDRDAYEKDYTTLRDELRAATAAREKLPEPVNLKEITDALSAYSELSKEHKKEFWARIIGRIVVTNEDDFFVYPISP

SEQ ID NO: 8692 - protein, 452 aa, Unknown
  Description of Unknown: Integrase B8693 sequence
  PTHR30461:SF3,SM00857,G3DSA:1.10.10.2600,IPR036162,PF13408, PS51737,G3DSA:3.40.50.1390,IPR025827,IPR006119,IPR038109, SSF53041,IPR011109,PF00239,PTHR30461,PS51736, Coil,cd00338
MKAKRIAGYVRVSHDEQKKYGYSVQAQIDRIIRYAEENKCQLVEIYVDEGFTATKMKRPDLLRMLNDLDKFDVLVFTRLDRFSRNVLQANKMVEIMEEYNVAIKSIEEEDIDTTTADGKFNFNLRVSLAQREAEKTSERIKSIFEFKIKQGQPVSGNQPYGYKIVTKDNKKTIVKDPELIPIVNDIFEYFAKHHTIRGTMTYINGKYDISKNYNCIYRMLTSTEYYGLYEGNPNYYPPYITKEEFEKNVQRRKANVKGRKGTNVYLFTSLMKCPFCGFKMVGKFTKRKNKNGTIREYWGYICSNNQRNKACASGKVINENVILDFLLKNVEKLAQKHIAEVMEVKPADKTDLPQNRINEILEEIDNLNYMFQKKRIDIKKYDKEYEALEKELANLQKETPKETDITILEEFLKSDWKDVYNSLDKENQRALWRNLIKEIKFNKDFKIDVDFL

SEQ ID NO: 8693 - protein, 452 aa, Unknown
  Description of Unknown: Integrase B8694 sequence
  SM00857,IPR006118,G3DSA:1.10.10.2600,IPR036162,PF13408, PS51737,IPR025827,G3DSA:3.40.50.1390,IPR006119,IPR038109, IPR011109,SSF53041,PF00239,PTHR30461,PS00397, PS51736,Coil,cd00338
MKIPEEKMRAALYIRVSTEEQARHGLSLGDQRAALESYAKSHNMTVVGVYEDAGISARKPYKKRPALLRLLDDVEAKKIDIILFIKLDRWFRNVGNYYAVQEILERNKVVWQATNEDYETQTAAGRLKVNIMLSVAQDEADRTSERIKFVFDGKRARGEALTGDKPFGYIIEGKKYIKDPQTETAVNELFAKYAACGSISQTQDLIAEKYGIFLSYQAISKIIRSTAYYGKYFRADGMCPPYITKERYDKNQTLRKTIVRKCQQNRIYLFTGLMICGDCGGHISGRINQDQKNVSYNCQNHYCRRRPCGNAKSISEKKIEAFLMNSVENKLKSYKSNLMGMEESEEKENYQALIASKKARLSRLKDLYLNELISLEEFKKDHAEICAAIAAMEEKQNAKKTPKLDKVEKILSGDWRNIYAELSREEKREFWRVIVKEIRWFPDRHLEFDINT

SEQ ID NO: 8694 - protein, 452 aa, Unknown
  Description of Unknown: Integrase B8695 sequence
  SM00857,G3DSA:1.10.10.2600,IPR036162,PS51737,G3DSA:3.40.50.1390, IPR006119,IPR038109,PF07508,IPR011109,SSF53041, PF00239,PTHR30461,PS51736,Coil,cd00338
MKKRAVIYIRESTKFQDPESQKRECINYCKKNKLDIVKIYQDIASGANNNRKDFLQLLQDMEEDFFDVVVLWELSRSTRDFLMYKTTLMRMKELGKELYSLQEGTLTEDDLDKEFSTDIVALVNSHERKRVGRRVKIRREFATREGKWMGGKLPLGYKCVDGKIEIDPDTAPLVKEIFRLFLSGEKRTDIAKKFGFQDPKKINRLLINPIYTGKLKLNETEMINDKRVYHGKYELIQGKHEAIIDDDTFKLSLILSKEKRREKYKNGDYLLKNVYCYDGDKMYPSTSKNRNKKPYYAAKFSGKVIGVKYLEETVINTLINEVDKLEILNTVESSVELEERKELYEKEIKKLKLQEERIFKKYIEGKLEEETFDKYDSDVKLKIKSFKSKIAEVEKLQLNKLKYEDNKKILREYIEKLSKTQEREELKQLLDIIIAEVRLINDFRVMVITNIF

SEQ ID NO: 8695 - protein, 452 aa, Unknown
  Description of Unknown: Integrase B8696 sequence
  PTHR30461:SF3,IPR036162,PS51737,IPR011109,PTHR30461, PS00397,PF00239,G3DSA:1.10.10.2600,IPR006119,SSF53041, SM00857,IPR025827,IPR038109,PS51736, cd03768,IPR006118,PF13408,G3DSA:3.40.50.1390,PF07508,Coil
MERCVIYARVSTHEQAENDSLKHQIERCRAYATARGYEIVSTLSDVESGSNNEREQYLILKDMIKESVFDVLVVWEFSRISRNAKEFITITEELQNQDIGLVCIQQNIDTSTITGKAVAHLIAVISELEKDTIRMRVKDRMIQLIKSGRYVSHQPFGYKYNNKLLELVEEEALIIKDIFSRFLKGESRFIIAKHYNVDFIKIDRWLRSPLYIGKLAYKGTGKNKLKDEYILYDGLHTPIIDEDTFYNVQAILNKNKRHRINNNPNYIFSGILYCECGDKMYGTKQRTTTYYICTKKRIESKKSCNSKTIKSEEIEKVVKEELRARLKNKDIAYQKNDKESEMKIKSNEKQIKEMENRINKAKDLYYANLLTLDDYSKDISKFNQIIEQLKKDTSILEKKINKQYDSRKIKEIVMSKIDSIESDKIKFKKICNVAIDKIVIDKEGKIQVYFNF

SEQ ID NO: 8696 - protein, 452 aa, Unknown
  Description of Unknown: Integrase B8697 sequence
  PTHR30461:SF3,IPR036162,PS51737,IPR011109,PTHR30461, PS00397,PF00239,G3DSA:1.10.10.2600,IPR006119,SSF53041, cd00338,SM00857,IPR025827,IPR038109,PS51736, IPR006118,PF13408,G3DSA:3.40.50.1390,PF07508,Coil
MLRVALYIRVSTEEQALNGDSIRTQIEALEQYSKENDFNIVGKYIDEGCSATNLKRPNLQRLLRDVEKDKVDLVLMTKIDRLSRGVKNYYKIMETLEKHKCDWKTILENYDSSTAAGRLHINIMLSVAENEAAQTSERIKFVFQDKLRRKEVISGTIPIGYKIENKHLVIDKEKIYIVKAIFDEYEKSGSVRTLIETINNLHGELYSYNKIKNILRNELYIGIYNKRGFYVEDYCEPIISKKQFKQIQRILEKNKKTTPNKNIHYHIFSGLLKCKECGYTLKGNSSNVGEKLYLSYRCSTFYLNKNCVHNVTHNEKHIENYLLTNLKPQLHKHMVKLEAQNEKIRRNKKSNKKDEKKKIMKKLDKIKDLYLEDLIDKETYRKDYEKLQSQLDNITEEQESQIIDTSHIKKFLDIDINEMYSDLSRVERRRFWLSIIDYIEIDNNKNITINFI

SEQ ID NO: 8697 - protein, 451 aa, Unknown
  Description of Unknown: Integrase B8698 sequence
  PTHR30461:SF3,SM00857,G3DSA:1.10.10.2600,IPR036162,PF13408, IPR025827,G3DSA:3.40.50.1390,PS51737,IPR006119,IPR038109, PF07508,SSF53041,IPR011109,PF00239,PTHR30461, PS51736,Coil,cd00338
MKKLNVGYMRVSTEAQTEKYGLDVQEDKIKELAKKRGVKIARWYVDGGYSGSNIQRPNIQKLLEDAEAGEIQAVYIYKLDRMSRDVVDTLTLVSKLLPKYNVEVVSATEDLRNETPMDRVMLGVNAVMGQYEREVIYMRTRAGMVERVKRGLWMGGGTIPYGYRYDRNDGILHIIPEEAEKVKAIFQMFRDGYSCDRIQKILGMHSEKLVSNIIRRIAYVGKIQYKGKTYQGLHEPIIDEKLFYEVQEEIKKRSTNAYVSNKYMLTGLCYCGKCGTKMRMQKWGKYTKIVCYSQYKGKEHISKTGNPCKNKKVRADVVEKEVEDCFKRFIVNVEEKENESESTRKMIEKEISLSEAKLKRLYTLYASGNSGTDTLLDVIQAEEKTLKNLREELKAEDIREKAGRGEKIEKIKEMSNVWDTLTDSEKNKVLKECVEKVVITGDDIDIHFSIY

SEQ ID NO: 8698 - protein, 451 aa, Unknown
  Description of Unknown: Integrase B8699 sequence
  SM00857,G3DSA:1.10.10.2600,IPR036162,PF13408,PS51737, G3DSA:3.40.50.1390,IPR025827,IPR006119,IPR038109,PF07508, SSF53041,IPR011109,PF00239,PTHR30461,PS51736, Coil,cd00338
MKKLNVGYMRVSTEAQTEKYGLDVQEDKIKELAKKRGVKIARWYVDGGYSGSNIQRPNIQKLLEDAEAGEIQAVYIYKLDRMSRDVVDTLTLVSKLLPKYNVEVVSATEDLRNETPMDRVMLGVNAVMGQYEREVIYMRTRAGMVERVKRGLWMGGGTIPYGYRYDRNDGILHIIPEEAEKVKAIFQMFRDGYSCDRIQKILGMHSEKLVSNIIRRIAYVGKIQYKGRVYQGLHEPIIDEKLFYEVQEEIKKRSTNAYVSNKHMLTGLCYCGKCGTKMRMQKWGKYTKIVCYSQYKEKEHISKTGNPCKNKKVRADVVEKEVEDCFKRFIVNVEEKENESESTRKMIEKEISLSEAKLKRLYTLYASGSSGTDTLFDVIHAEEKTLKNLREELKAEDIREKAGRVEKIEKIKEMSNVWDTLTDSEKNKVLKECVEKVVITGDDIDIHFSIY

SEQ ID NO: 8699 - protein, 451 aa, Unknown
  Description of Unknown: Integrase B8700 sequence
  PTHR30461:SF3,cd00338,SM00857,G3DSA:1.10.10.2600,IPR036162, PF13408,IPR025827,G3DSA:3.40.50.1390,PS51737,IPR006119, IPR038109,PF07508,IPR011109,SSF53041,PTHR30461, PS51736,Coil,PF00239
MKKLNVGYMRVSTEAQTEKYGLDVQEDKINELAKKRGVKIARWYVDGGYSGSNIQRPNIQKLLEDAEAGEIQAVYIYKLDRMSRDVVDTLTLVSKLLPKYNVEVVSATEDLRNETPMDRVMLGVNAVMGQYEREVIYMRTRAGMVERVKRGLWMGGGTIPYGYRYDRNDGILHIIPEEAEKVKAIFQMFRDGYSCDRIQKILGMHSEKLVSNIIRRIAYVGKIQYKGKTYQGLHEPIIDEKLFYEVQEEIKKRSTNAYVSNRYMLTGLCYCGKCGTKMRMQKWGKYTKIVCYSQYKEKEHISKKGSPCKNKKVRADVVEKEVEDCFKRFIVNVEEKENESESTRKMIEKEISLSETKLKRLYTLYASGNSGTDTLLDVIQAEEKTLKNLREELKAEDIREKAGRGEKIEKIKEMSNVWDTLTDSEKNKVLKECVEKVVITGDDIDIHFSIY

SEQ ID NO: 8700 - protein, 451 aa, Unknown
  Description of Unknown: Integrase B8701 sequence
  PTHR30461:SF3,SM00857,G3DSA:1.10.10.2600,IPR036162,PF13408, PS51737,G3DSA:3.40.50.1390,IPR025827,IPR006119,IPR038109, PF07508,SSF53041,IPR011109,PF00239,PTHR30461, PS51736,Coil,cd00338
MKKLNVGYMRVSTEAQTEKYGLDVQEDKIKELAKKRGVKIARWYVDGGYSGSNIQRPNIQKLLEDAEAGEIQAVYIYKLDRMSRDVVDTLTLVSKLLPKYNVEVVSATEDLRNETPMDRVMLGVNAVMGQYEREVIYMRTRAGMVERVKRGLWMGGGTIPYGYRYDRNDGILHIIPEEAEKVKAVFQMFRDGYSCDRIQKILGMHSEKLVSNIIRRIAYVGKIQYKGRVYQGLHEPIIDEKLFYEVQEEIKKRSTNAYVSNKYMLTGLCYCGKCGTKMRMQKWGKYTKIVCYSQYKGKEHISKTGNPCKNKKVRADVVEKEVEDCFKRFIVNVEEKENESESTRKMIEKEISLSEAKLKRLYTLYASGNSGTDTLLDVIQAEEKTLKNLREELKAEDIREKAGRGEKIEKIKEMSNVWDTLTDSEKNKVLKECVEKVVITGDDIDIHFSIY

SEQ ID NO: 8701 - protein, 451 aa, Unknown
  Description of Unknown: Integrase B8702 sequence
  PTHR30461:SF3,SM00857,G3DSA:1.10.10.2600,IPR036162,PF13408, PS51737,G3DSA:3.40.50.1390,IPR025827,IPR006119,IPR038109, PF07508,IPR011109,SSF53041,PF00239,PTHR30461, PS51736,Coil,cd00338
MKKLNVGYMRVSTEAQTEKYGLDVQEDKIKELAKKKGVKIARWYVDGGYSGSNIQRPNIQKLLEDAEAGEIQAVYIYKLDRMSRDVVDTLTLVSKLLPKYNVEVVSATEDLRNETPMDRVMLGVNAVMGQYEREVIYMRTRAGMVERVKRGLWMGGGTIPYGYRYDRNDGILHIIPEEAEKVKAVFQMFRDGYSCDRIQKILGMHSEKLVSNIIRRIAYVGKIQYKGRVYQGLHEPIIDEKLFYEVQEEIKKRSTNAYVSNKYMLTGLCYCGKCGTKMRMQKWGKYTKIVCYSQYKGKEHISKTESPCENKKVRADVVEKEVEDCFKRFIVNVEEKENESESTKKMIEREISLSESKLKRLYTLYANGNSGTDTLLDVIQAEEKTLKNLREELKAEDIREKAGRGEKIEKIKEMSNVWDTLTDSEKNKVLKECVEKVVITGDDIDIHFSIY

SEQ ID NO: 8702 - protein, 451 aa, Unknown
  Description of Unknown: Integrase B8703 sequence
  SM00857,G3DSA:1.10.10.2600,IPR036162,PF13408,IPR025827, G3DSA:3.40.50.1390,PS51737,IPR006119,IPR038109,PF07508, SSF53041,IPR011109,PF00239,PTHR30461,PS51736, Coil,cd00338
MKKLNVGYMRVSTEAQTEKYGLDVQEDKIKELAKKRGVKIARWYVDGGYSGSNIQRPNIQKLLEDAEAGEIQAVYIYKLDRMSRDVVDTLTLVSKLLPKYNVEVVSATEDLRNETPMDRVMLGVNAVMGQYEREVIYMRTRAGMVERVKRGLWMGGGTIPYGYRYDRNDGILHIIPEEAEKVKAVFQMFRDGYSCDRIQKILGMHSEKLVSNIIRRITYVGKIQYKGRVYQGLHEPIIDEKLFYEVQEEIKKRSTNAYVSNKHMLTGLCYCGKCGTKMRMQKWGKYTKIVCYSQYKEKEHISKTGNPCKNKKVRADVVEKEVEDCFKRFIVNVEEKENESESTRKMIEKEISLSEAKLKRLYTLYASGSSGTDTLFDVIHAEEKTLKNLQEELKTEDIREKAGRGKKIEKIKEMSNVWDTLTDSEKNKVLKECVEKVVITGDDIDIHFSIY

SEQ ID NO: 8703 - protein, 451 aa, Unknown
  Description of Unknown: Integrase B8704 sequence
  SM00857,G3DSA:1.10.10.2600,IPR036162,PF13408,PS51737, IPR025827,G3DSA:3.40.50.1390,IPR006119,IPR038109,PF07508, IPR011109,SSF53041,PF00239,PTHR30461,PS51736, Coil,cd00338
MKKLNVGYMRVSTEAQTEKYGLDVQEDKIKELAKKKGVKIARWYVDGGYSGSNIQRPNIQKLLEDAEAGEIQAVYIYKLDRMSRDVVDTLTLVSKLLPKYNVEVVSATEDLRNETPMDRVMLGVNAVMGQYEREVIYMRTRAGMVERVKRGLWMGGGTIPYGYRYDRNDGILHIIPEEAEKVKAIFQMFRDGYSCDRIQKILGMHTEKLVSNIIRRITYVGKIQYKGRVYQGLHEPIIDEKLFYEVQEEIKKRSTNAYVSNKHMLTGLCYCGKCGTKMRMQKWGKYTKIVCYSQYKEKEHISKTGNPCKNKKVRADVVEKEVEDCFKRFIVNVEEKENESESTRKMIEKEISLSEAKLKRLYTLYASGSSGTDTLFDVIQTEEKKLKNLQEELKAEDIREKAGRGEKIEKIKEMSNVWDTLTDSEKNKVLKECVEKVVITGDDIDIHFSIY

SEQ ID NO: 8704 - protein, 451 aa, Unknown
  Description of Unknown: Integrase B8705 sequence
  cd00338,SM00857,G3DSA:1.10.10.2600,IPR036162,PF13408, PS51737,G3DSA:3.40.50.1390,IPR025827,IPR006119,IPR038109, PF07508,SSF53041,IPR011109,PTHR30461,PS51736, Coil,PF00239
MKKLNVGYMRVSTEAQTEKYGLDVQEDKIKELAKKRGVKIARWYVDGGYSGSNIQRPNIQKLLEDAEAGEIQAVYIYKLDRMSRDVVDTLTLVSKLLPKYNVEVVSATEDLRNETPMDRVMLGVNAVMGQYEREVIYMRTRAGMVERVKRGLWMGGGTIPYGYRYDRNDGILHIIPEEAEKVKAIFQMFRDGYSCDRIQKILGMHSEKLVSNIIRRITYVGKIQYKGRVYQGLHEPIIDEKLFCEVQEEIKKRSTNAYVSNKHMLTGLCYCGKCGTKMRMQKWGKYTKIVCYSQYKEKEHISKTGNPCKNKKVRADVVEKEVEDCFKQFIVNVEEKENESESTRKMIEKEISLSESKLKRLYTLYANGNSGTDTLFGVIQAEEKTLKNLQEELKAEDIREKAGRGEKIEKIKEMSNVWDTLTDSEKNKVLKECVEKVVITGDDIDIHFSIY

SEQ ID NO: 8705 - protein, 451 aa, Unknown
  Description of Unknown: Integrase B8706 sequence
  SM00857,G3DSA:1.10.10.2600,IPR036162,PF13408,PS51737, G3DSA:3.40.50.1390,IPR025827,IPR006119,IPR038109,PF07508, SSF53041,IPR011109,PF00239,PTHR30461,PS51736, Coil,cd00338
MKKLNVGYMRVSTEAQTEKYGLDVQEDKIKELAKKRGVKIARWYVDGGYSGSNIQRPNIQKLLEDAEAGEIQAVYIYKLDRMSRDVVDTLTLVSKLLPKYNVEVVSATEDLRNETPMDRVMLGVNAVMGQYEREVIYMRTRAGMVERVKRGLWMGGGTIPYGYRYDRNDGILHIIPEEAEKVKAIFQMFRDGYSCDRIQKILGMHSEKLVSNIIRRITYVGKIQYKGRVYQGLHEPIIDEKLFCEVQEEIKKRSTNAYVSNKHMLTGLCYCGKCGTKMRMQKWGKYTKIVCYSQYKEKEHISKTGNPCKNKKVRADVVEKEVEDCFKRFIVNVEEKENESESTRKMIEKEISLSEAKLKRLYTLYASGSSGTDTLLDVIQAEEKTLKNLREELKAEDIREKAGRGEKIEKIKEMSNVWDTLTDSEKNKVLKECVEKVVITGDDIDIHFSIY

SEQ ID NO: 8706 - protein, 451 aa, Unknown
  Description of Unknown: Integrase B8707 sequence
  PTHR30461:SF3,SM00857,G3DSA:1.10.10.2600,IPR036162,PF13408, PS51737,G3DSA:3.40.50.1390,IPR025827,IPR006119,IPR038109, PF07508,IPR011109,SSF53041,PTHR30461,Coil, PS51736,cd00338,PF00239
MKKLNVGYMRVSTEAQTEKYGLDVQEDKINELAKKRGVKIARWYVDGGYSGSNIQRPNIQKLLEDAEAGEIQAVYIYKLDRMSRDVVDTLTLVSKLLPKYNVEVVSATEDLRNETPMDRVMLGVNAVMGQYEREVIYMRTRAGMVERIKRGLWMGGGTIPYGYRYDRNDGILHIIPEEAEKVKAIFQMFRDGYSCDRIQKILGMHSEKLVSNIIRRIAYVGKIQYKGKTYQGLHEPIIDEKLFYEVQEEIKKRSTNAYVSNKYMLTGLCYCGKCGTKMRMQKWGKYTKIVCYSQYKGKEHISKTGNPCKNKKVRADVVEKEVEDCFKRFIVNVEEKENESENTRKMIEKEISLSEAKLKRLYTLYASGNSGTDTLLDVIQAEEKTLKNLREELKAEDIREKGGRGEKIEKIKEMSNVWDTLTDSEKNKVLKECVEKVVITGDDIDIHFSIY

SEQ ID NO: 8707 - protein, 451 aa, Unknown
  Description of Unknown: Integrase B8708 sequence
  PTHR30461:SF3,SM00857,G3DSA:1.10.10.2600,IPR036162,PF13408, IPR025827,G3DSA:3.40.50.1390,PS51737,IPR006119,IPR038109, PF07508,IPR011109,SSF53041,PF00239,PTHR30461, PS51736,Coil,cd00338
MKKLNVGYMRVSTEAQTEKYGLDVQEDKIKELAKKRGVKIARWYVDGGYSGSNIQRPNIQKLLEDAEAGEIQAVYIYKLDRMSRDVVDTLTLVSKLLPKYNVEVVSATEDLRNETPMDRVMLGVNAVMGQYEREVIYMRTRAGMVERVKRGLWMGGGTIPYGYRYDRNDGILHTIPEEAEKVKAIFQMFRDGYSCDRIQKILGMHSEKLVSNIIRRIAYVGKIQYKGRVYQGLHEPIIDEKLFYEVQEEIKKRSTNAYVSNKHMLTGLCYCGKCGTKMRMQKWGKYTKIVCYSQYKEKEHISKTGNPCKNKKVRADVVEKEVEDCFKRFIVNVEEKENESESTRKMIEKEISLSEAKLKRLYTLYASGNSGTDTLFGVIQEEEKTLKNLQEELKAEDIREKAGRGEKIEKIKEMSNVWDTLTDSEKNKVLKECVEKVVITGDDIDIHFSIY

SEQ ID NO: 8708 - protein, 451 aa, Unknown
  Description of Unknown: Integrase B8709 sequence
  PTHR30461:SF3,cd00338,SM00857,G3DSA:1.10.10.2600,IPR036162, PF13408,PS51737,G3DSA:3.40.50.1390,IPR025827,IPR006119, IPR038109,PF07508,IPR011109,SSF53041,PTHR30461, PS51736,Coil,PF00239
MKKLNVGYMRVSTEAQTEKYGLDVQEDKINELAKKRGVKIARWYVDGGYSGSNIQRPNIQKLLEDAEAGEIQAVYIYKLDRMSRDVVDTLTLVSKLLPKYNVEVVSATEDLRNETPMDRVMLGVNAVMGQYEREVIYMRTRAGMVERVKRGLWMGGGTIPYGYRYDRNDGILHIIPEEAEKVKAIFQMFQDGYSCDRIQKILGMHSEKLVSNIIRRITYVGKIQYKGRVYQGLHEPIIDEKLFYEVQEEIKKRSTNAYVSNKHMLTGLCYCGKCGTKMRMQKWGKYTKIVCYSQYKEKEHISKTGNPCKNKKVRADVVEKEVEDCFKRFIVNVEEKENESESTRKMIEKEISLSEAKLKRLYTLYASGNSGTDTLVDVIQAEEKTLKNLQEELKAEDIREKAGRGEKIEKIKEMSNVWDTLTDSEKNKVLKECVEKVVITGDDIDIHFSIY

SEQ ID NO: 8709 - protein, 451 aa, Unknown
  Description of Unknown: Integrase B8710 sequence
  SM00857,G3DSA:1.10.10.2600,IPR036162,PF13408,IPR025827, G3DSA:3.40.50.1390,PS51737,IPR006119,IPR038109,PF07508, SSF53041,IPR011109,PF00239,PTHR30461,PS51736, Coil,cd00338
MKKLNVGYMRVSTEAQTEKYGLDVQEDKIKELAKKRGVKIARWYVDGGYSGSNIQRPNIQKLLEDAEAGEIQAVYIYKLDRMSRDVVDTLTLVSKLLPKYNVEVVSATEDLRNETPMDRVMLGVNAVMGQYEREVIYMRTRAGMVERVKRGLWMGGGTIPYGYRYDRNDGILHIIPEEAEKVKAIFQMFRDGYSCDRIQRILGMHSEKLVSNIIRRIAYVGKIQYKGRVYQGLHEPIIDEKLFYEVQEEIKKRSTNAYVSNKHMLTGLCYCGKCGTKMRMQKWGKYTKIVCYSQYKEKEHISKTGNPCKNKKVRADVVEKEVEDCFKRFIVNVEEKENESESTRKMIEKEISLSEAKLKRLYTLYASDNSGTDTLFDVIQAEEKTLKNLQEELKAEDIREKAGRGKKIEKIKEMSNVWDTLTDSEKNKVLKECVEKVVITGDDIDIHFSIY

SEQ ID NO: 8710 - protein, 451 aa, Unknown
  Description of Unknown: Integrase B8711 sequence
  SM00857,IPR006118,G3DSA:1.10.10.2600,IPR036162,PF13408, IPR025827,G3DSA:3.40.50.1390,PS51737,PS00397,IPR006119, IPR038109,IPR011109,SSF53041,PTHR30461,Coil, PS51736,cd00338,PF00239
MKCVAYIRVSTDKQVEEGFGLDSQKRDIEDYCRKHEMVISEWYIDAGLSGMEMTKRVELQRLISDLNDIDKILVYKLDRLARDSVDSLFMIEKIFTPKNVEVVSIHDFAKYQTPQDKFQTHIMAAVAEYDRNTMLLRMRGGMLERVKNGYWIGGGNPPYCYNYDRNKGILVPIEERAEKMRTALEMYISGSSECKISKAIGVAEPTIHKNLTSYVNIGMIPYKGKIYQGRHEPIFDKERWKIGKDIRSARAAGSKSVYPPNLLTGLCVCGICGCKMRYQKHYKHGKVICCCSRDKWLYYLPNFDKNCTNRYANPADKIESAVEKEILKISMDISLYKPVKPKSKVEVISNQVEKESNKLKRLYELYAEGNDTVIDMIKKQETRVYEMKKTLTEEEKKEANKPDKSFVYDNIKKIADVWDNIDKTQKNKILRIIIDKVVIVNDDVKIFLRDF

SEQ ID NO: 8711 - protein, 451 aa, Unknown
  Description of Unknown: Integrase B8712 sequence
  PTHR30461:SF3,SM00857,G3DSA:1.10.10.2600,IPR036162,PF13408, IPR025827,G3DSA:3.40.50.1390,PS51737,IPR006119,IPR038109, PF07508,IPR011109,SSF53041,PF00239,PTHR30461, PS51736,Coil,cd00338
MKKLNVGYMRVSTEAQTEKYGLDVQEDKINELAKKRGVKIARWYVDGGYSGSNIQRPNIQKLLEDAEAGEIQAVYIYKLDRMSRDVVDTLTLVSKLLPKYNVEVVSATEDLRNETPMDRVMLGVNAVMGQYEREVIYMRTRAGMVERVKRGLWMGGGTIPYGYRYDRNDGILHIIPEEAEKVKAIFQMFRDGYSCDRIQKILGMHSEKLVSNIIRRIAYVGKIQYKGKTYQGLHEPIIDEKLFYEVQEEIKKRSTNAYVSNRYMLTGLCYCGKCGTKMRMQKWGKYTKIVCYSQYKEKEHISKTGNPCKNKKVRADVVEKEVEDCFKRFIVNVEEKENESESTRKMIEKEISLSEAKLKRLYTLYASGSSGTDTLLDVIQAEEKTLKNLREELKAEDIREKAGRGEKIEKIKEMSNVWDTLTDSEKNKVLKECVEKVVITGDDIDIHFSIY

SEQ ID NO: 8712 - protein, 451 aa, Unknown
  Description of Unknown: Integrase B8713 sequence
  SM00857,G3DSA:1.10.10.2600,IPR036162,PF13408,IPR025827, G3DSA:3.40.50.1390,PS51737,IPR006119,IPR038109,PF07508, SSF53041,IPR011109,PF00239,PTHR30461,PS51736, Coil,cd00338
MKKLNVGYMRVSTEAQAEKYGLDVQEDKIKELAKKRGVKIARWYVDGGYSGSNIQRPNIQKLLEDAEAGEIQAVYIYKLDRMSRDVVDTLTLVSKLLPKYNVEVVSATEDLRNETPMDRVMLGVNAVMGQYEREVIYMRTRAGMVERVKRGLWMGGGTIPYGYRYDRNDGILHIIPEEAEKVKAIFQMFRDGYSCDRIQKILGMHSEKLVSNIIRRIAYVGKIQYKGKTYQGLHEPIIDEKLFYEVQEEIKKRSTNAYVSNKHMLTGLCYCGKCGTKMRMQKWGKYTKIVCYSQYKEKEHISKTGNPCKNKKVRADVVEKEVEDCFKRFIVNVEEKENESESTRKMIEKEISLSEAKLKRLYTLYASGSSGTDTLFDVIQTEEKKLKNLQEELKAEDIREKAGRGEKIEKIKEMSNVWDTLTDSEKNKVLKECVEKVVITEDDIDIHFSIY

SEQ ID NO: 8713 - protein, 451 aa, Unknown
  Description of Unknown: Integrase B8714 sequence
  SM00857,G3DSA:1.10.10.2600,IPR036162,PF13408,PS51737, G3DSA:3.40.50.1390,IPR025827,IPR006119,IPR038109,PF07508, SSF53041,IPR011109,PF00239,PTHR30461,PS51736, Coil,cd00338
MKKLNVGYMRVSTEAQTEKYGLDVQEDKIKELAKKRGVKIARWYVDGGYSGSNIQRPNIQKLLEDAEAGEIQAVYIYKLDRMSRDVVDTLTLVSKLLPKYNVEVVSATEDLRNETPMDRVMLGVNAVMGQYEREVIYMRTRAGMVERVKRGLWMGGGTIPYGYRYDRNDGILHIIPEEAEKVKAVFQMFRDGYSCDRIQKILGMHSEKLVSNIIRRIAYVGKIQYKGKTYQGLHEPIIDEKLFYEVQEEIKKRSTNAYVSNKYMLTGLCYCGKCGTKMRMQKWGKYTKIVCYSQYKGKEHISKTVNPCDNKKVRADVVEKEVEDCFKRFIVNVEEKENESESTRKMIEKEISLSEAKLKRLYTLYASGNSGTDTLLDVIQAEEKTLKNLREELKAEDIREKAGRGEKIEKIKEMSNVWDTLTDSEKNKVLKECVEKVVITGDDIDIHFSIY

SEQ ID NO: 8714 - protein, 451 aa, Unknown
  Description of Unknown: Integrase B8715 sequence
  PTHR30461:SF3,SM00857,G3DSA:1.10.10.2600,IPR036162,PF13408, PS51737,G3DSA:3.40.50.1390,IPR025827,IPR006119,IPR038109, PF07508,SSF53041,IPR011109,PF00239,PTHR30461, PS51736,Coil,cd00338
MKKLNVGYMRVSTEAQTEKYGLDVQEDKIKELAKKRGVKIARWYVDGGYSGSNIQRPNIQKLLEDAEAGEIQAVYIYKLDRMSRDVVDTLTLVSKLLPKYNVEVVSATEDLRNETPMDRVMLGVNAVMGQYEREVIYMRTRAGMVERVKRGLWMGGGTIPYGYRYDRNDGILHIIPEEAEKVKAIFQMFRDGYSCDRIQKILGMHSEKLVSNIIRRIAYVGKIQYKGKTYQGLHEPIIDEKLFYEVQEEIKKRSTNAYVSNKYMLTGLCYCGKCGTKMRMQKWGKYTKIVCYSQYKEKEHISKTGNPCKNKKVRADVVEKEVEDCFKRFIVNVEEKENESESTRKMIEKEISLSETKLKRLYTLYASGSSGTDTLFGVIQEEEKTLKNLQEELKAEDIREKAGRGEKIEKIKEMSNVWDTLTDSEKNKVLKECVEKVVITGDDIDIHFSIY

SEQ ID NO: 8715 - protein, 451 aa, Unknown
  Description of Unknown: Integrase B8716 sequence
  PTHR30461:SF3,SM00857,G3DSA:1.10.10.2600,IPR036162,PF13408, PS51737,G3DSA:3.40.50.1390,IPR025827,IPR006119,IPR038109, PF07508,SSF53041,IPR011109,PF00239,PTHR30461, PS51736,Coil,cd00338
MKKLNVGYMRVSTEAQTEKYGLDVQEDKIKELAKKRGVKIARWYVDGGYSGSNIQRPNIQKLLEDAEAGEIQAVYIYKLDRMSRDVVDTLTLVSKLLPKYNVEVVSATEDLRNETPMDRVMLGVNAVMGQYEREVIYMRTRAGMVERVKRGLWMGGGAIPYGYRYDRNDGILHIIPEEAEKVKAIFQMFRDGYSCDRIQKILGMHSEKLVSNIIRRIAYVGKIQYKGKTYQGLHEPIIDEKLFYEVQEEIKKRSTNAYVSNKYMLTGLCYCGKCGTKMRMQKWGKYTKIVCYSQYKGKEHISKTGNPCKNKKVRADVVEKEVEDCFKRFIVNVEEKENESESTRKMIEKEISLSEAKLKRLYTLYASGNSGTDTLLDVIQAEEKTLKNLREELKAEDIREKGGRGEKIEKIKEMSNVWDTLTDSEKNKVLKECVEKVVITGDDIDIHFSIY

SEQ ID NO: 8716 - protein, 451 aa, Unknown
  Description of Unknown: Integrase B8717 sequence
  PTHR30461:SF3,IPR036162,PS51737,IPR011109,PTHR30461, PS00397,PF00239,G3DSA:1.10.10.2600,IPR006119,SSF53041, cd00338,SM00857,IPR025827,IPR038109,PS51736, IPR006118,PF13408,G3DSA:3.40.50.1390,Coil
MKCVAYIRVSTEKQAEEGYGLDSQKRDILDYCKRNNLAVSEWYIDAGLSGMDMTKRVELQRLISDMSKIDIIVVYKLDRLARDSVDALYMIEKIFIPKGIRVESVHDFAKYDTPQEKFQTQIMAAVAEYDRNTMLLRMRGGMLERVKNGLWMGGGNTPYCYHYSKELGILVPIPERAEKANQAMELFLSGYSDEKIQHICGFRTEKIVRNILTSPVNVGFIPYKGKLYRGKHQPIFDMDRYDRAQNVRRSRSKSKSISTEPNLLTGLCYCGVCGCAMRYQKWTNGRHKIYCMSRNKSMSYLPNYNHDCNNALEWATDIENQVEGEILKISLDLSSHKPKAKETRLEIMQSRLDKEQTKLKRLYKLYADGNDTILEMISEMEEKISETKMEIEEESKNQNVSEKKSLAYENIKKLADIWPDIDKKQKNLILKTIIDKIVIVNGNIEIQLKNF

SEQ ID NO: 8717 - protein, 451 aa, Unknown
  Description of Unknown: Integrase B8718 sequence
  SM00857,G3DSA:1.10.10.2600,IPR036162,PF13408,IPR025827, G3DSA:3.40.50.1390,PS51737,IPR006119,IPR038109,PF07508, SSF53041,IPR011109,PF00239,PTHR30461,PS51736, Coil,cd00338
MKKLNVGYMRVSTEAQTEKYGLDVQEDKIKELAKKRGVKIARWYVDGGYSGSNIQRPNIQKLLEDAEAGEIQAVYIYKLDRMSRDVVDTLTLVSKLLPKYNVEVVSATEDLRNETPMDRVMLGVNAVMGQYEREVIYMRTRAGMVERVKRGLWMGGGTIPYGYRYDRNDGILHIIPEEAEKVKAIFQMFRDGYSCDRIQKILGMHSEKLVSNIIRRIAYVGKIQYKGRVYQGLHEPIIDEKLFYEVQEEIKKRSTNAYVSNKHMLTGLCYCGKCGTKMRMQKWGKYTKIVCYSQYKEKEHISKTGNPCKNKKVRADVVEKEVEDCFKRFIVNVEEKENESESTRKMIEKEISLSEAKLKRLYTLYASGSSGTDTLFDVIHAEEKTLKNLREELKAEDIREKAGRVEKIEKIKEMSNVWDTLTDSEKNKVLKECVEKVVIAGDDIDIHFSIY

SEQ ID NO: 8718 - protein, 451 aa, Unknown
  Description of Unknown: Integrase B8719 sequence
  PTHR30461:SF3,SM00857,G3DSA:1.10.10.2600,IPR036162,PF13408, IPR025827,G3DSA:3.40.50.1390,PS51737,IPR006119,IPR038109, PF07508,SSF53041,IPR011109,PF00239,PTHR30461, PS51736,Coil,cd00338
MKKLNVGYMRVSTEAQTEKYGLDVQEDKIKELAKKRGVKIARWYVDGGYSGSNIQRPNIQKLLEDAEAGEIQAVYIYKLDRMSRDVVDTLTLVSKLLPKYNVEVVSATEDLRNETPMDRVMLGVNAVMGQYEREVIYMRTRAGMVERVKRGLWMGGGTIPYGYRYDRNDGILHIIPEEAEKVKAIFQMFRDGYSCDRIQKILGMHSEKLVSNIIRRIAYVGKIQYKGKTYQGLHEPIIDEKLFYEVQEEIKKRSTNAYVSNKYMLTGLCYCGKCGTKMRMQKWGKYTKIVCYSQYKEKEHISKTGNPCKNKKVRADVVEKEVEDCFKRFIVNVEEKENESESTRKMIEKEISLSEAKLKRLYTLYASGNSGTDTLLDVIQTEEKTLKNLQEELKAEDIREKAGRGEKIEKIKEMSNVWDTLTDSEKNKVLKECVEKVVITGDDIDIHFSIY

SEQ ID NO: 8719 - protein, 451 aa, Unknown
  Description of Unknown: Integrase B8720 sequence
  cd00338,SM00857,G3DSA:1.10.10.2600,IPR036162,PF13408, IPR025827,G3DSA:3.40.50.1390,PS51737,IPR006119,IPR038109, PF07508,IPR011109,SSF53041,PTHR30461,PS51736, Coil,PF00239
MKKLNVGYMRVSTEAQAEKYGLDVQEDKIKELAKKRGVKIARWYVDGGYSGSNIQRPNIQKLLEDAEAGEIQAVYIYKLDRMSRDVVDTLTLVSKLLPKYNVEVVSATEDLRNETPMDRVMLGVNAVMGQYEREVIYMRTRAGMVERVKRGLWMGGGTIPYGYRYDRNDGILHIIPEEAEKVKAIFQMFRDGYSCDRIQKILGMHSEKLVSNIIRRIAYVGKIQYKGKTYQGLHEPIIDEKLFYEVQEEIKKRSTNAYVSNKHMLTGLCYCGKCGTKMRMQKWGKYTKIVCYSQYKEKEHISNTGNPCKNKKVRADVVEKEVEDCFKRFIVNVEEKENESESTRKMIEKEISLSEAKLKRLYTLYASGSSGTDTLFGVIQAEEKTLKNLQEELKAEDIREKAGRGEKIEKIKEMSNVWDTLTDSEKNKVLKECVEKVVITGDDIDIHFSIY

SEQ ID NO: 8720 - protein, 451 aa, Unknown
  Description of Unknown: Integrase B8721 sequence
  PTHR30461:SF3,SM00857,G3DSA:1.10.10.2600,IPR036162,PF13408, PS51737,G3DSA:3.40.50.1390,IPR025827,IPR006119,IPR038109, PF07508,SSF53041,IPR011109,PF00239,PTHR30461, PS51736,Coil,cd00338
MKKLNVGYMRVSTEAQTEKYGLDVQEDKIKELAKKRGVKIARWYVDGGYSGSNIQRPNIQKLLEDAEAGEIQAVYIYKLDRMSRDVVDTLTLVSKLLPKYNVEVVSATEDLRNETPMDRVMLGVNAVMGQYEREVIYMRTRAGMVERVKRGLWMGGGTIPYGYRYDRNDGILHIIPEEAEKVKAIFQMFRDGYSCDRIQKILGMHSEKLVSNIIRRIAYVGKIQYKGKTYQGLHEPIIDEKLFYEVQEEIKKRSTNAYVSNKYMLTGLCYCGKCGTKMRMQKWGKYTKIVCYSQYKGKEHISKTGNPCKNKKVRADVVEKEVEDCFKRFIVNVEEKENESESTRKMIEKEISLSEAKLKRLYTLYASGNSGTDTLLDVIQAEEKTLKNLREELKAEDIREKAGRGEKIEKIKEMSNVWDTLTDSEKNKVLKECVEKVVITEDDIDIHFSIY

SEQ ID NO: 8721 - protein, 451 aa, Unknown
  Description of Unknown: Integrase B8722 sequence
  PTHR30461:SF3,SM00857,G3DSA:1.10.10.2600,IPR036162,PF13408, PS51737,G3DSA:3.40.50.1390,IPR025827,IPR006119,IPR038109, PF07508,SSF53041,IPR011109,PF00239,PTHR30461, PS51736,Coil,cd00338
MKKLNVGYMRVSTEAQTEKYGLDVQEDKIKELAKKRGVKIARWYVDGGYSGSNIQRPNIQKLLEDAESGEIQAVYIYKLDRMSRDVVDTLTLVSKLLPKYNVEVVSATEDLRNETPMDRVMLGVNAVMGQYEREVIYMRTRAGMLERVKRGLWMGGGTIPYGYRYDRNDGILHIIPEEAEKVKAIFQMFRDGYSCDRIQKILGMHSEKLVSNIIRRIAYVGKIQYKGRVYQGLHEPIIDEKLFYEVQEEIKKRSTNAYVSNKYMLTGLCYCGKCGTKMRMQKWGKYTKIVCYSQYKGKEHISKTGNPCKNKKVRADVVEKEVEDCFKRFIVNVEEKENESESTRKMIEKEISLSEAKLKRLYTLYASGNSGTDTLLDVIQAEEKTLKNLREELNAEDIREKAGRGEKIEKIKEMSNVWDTLTDSEKNKVLKECVEKVVITGDDIDIHFSIY

SEQ ID NO: 8722 - protein, 451 aa, Unknown
  Description of Unknown: Integrase B8723 sequence
  SM00857,G3DSA:1.10.10.2600,IPR036162,PF13408,PS51737, G3DSA:3.40.50.1390,IPR025827,IPR006119,IPR038109,PF07508, SSF53041,IPR011109,PF00239,PTHR30461,PS51736, Coil,cd00338
MKKLNVGYMRVSTEAQTEKYGLDVQEDKIKELAKKRGVKIARWYVDGGYSGSNIQRPNIQKLLEDAEAGEIQAVYIYKLDRMSRDVVDTLTLVSKLLPKYNVEVVSATEDLRNETPMDRVMLGVNAVMGQYEREVIYMRTRAGMVERVKRGLWMGGGTIPYGYRYDRNDGILHIIPEEAEKVKAIFQMFRDGYSCDRIQKILGMHSEKLVSNIIRRITYVGKIQYKGRVYQGLHEPIIDEKLFYEVQEEIKKRSTNAYLSNKHMLTGLCYCGKCGTKMRMQKWGKYTKIVCYSQYKEKEHISKTGNPCKNKKVRADVVEKEVEDCFKRFIVNVEEKENESESTRKMIEKEISLSEAKLKRLYTLYASGNSGTDTLFDVIQAEEKTLKNLQEELKAEDIREKAGRGEKIEKIKEMSNVWDTLTDSEKNKVLKECVEKVVIAEDDIDIHFSIY

SEQ ID NO: 8723 - protein, 451 aa, Unknown
  Description of Unknown: Integrase B8724 sequence
  SM00857,G3DSA:1.10.10.2600,IPR036162,PF13408,IPR025827, G3DSA:3.40.50.1390,PS51737,IPR006119,IPR038109,PF07508, SSF53041,IPR011109,PF00239,PTHR30461,PS51736, Coil,cd00338
MKKLNVGYMRVSTEAQTEKYGLDVQEDKIKELAKKRGVKIARWYVDGGYSGSNIQRPNIQKLLEDAEAGEIQAVYIYKLDRMSRDVVDTLTLVSKLLPKYNVEVVSATEDLRNETPMDRVMLGVNAVMGQYEREVIYMRTRAGMVERVKRGLWMGGGTIPYGYRYDRNDGILHIIPEEAEKVKAIFQMFRDGYSCDRIQKILGMHSEKLVSNIIRRITYVGKIQYKGRVYQGLHEPIIDEKLFYEVQEEIKKRSTNAYVSNKHMLTGLCYCGKCGTKMRMQKWGKYTKIVCYSQYKEKEHISKTGNPCKNKKVRADVVEKEVEDCFKRFIVNVEEKENESESTRKMIEKEISLSEAKLKRLYTLYASGNSGTDTLFDVIQAEEKTLKNLQEELKAEDIREKAGRGEKIEKIKEMSNVWDTLTDSEKNKVLKECVEKVVITGDDIDIHFSIY

SEQ ID NO: 8724 - protein, 451 aa, Unknown
  Description of Unknown: Integrase B8725 sequence
  PTHR30461:SF3,cd00338,SM00857,G3DSA:1.10.10.2600,IPR036162, PF13408,IPR025827,G3DSA:3.40.50.1390,PS51737,IPR006119, IPR038109,PF07508,SSF53041,IPR011109,PTHR30461, PS51736,Coil,PF00239
MKKLNVGYMRVSTEAQTEKYGLDVQEDKIKELAKKRGVKIARWYVDGGYSGSNIQRPNIQKLLEDAEAGEIQAVYIYKLDRMSRDVVDTLTLVSKLLPKYNVEVVSATEDLRNETPMDRVMLGVNAVMGQYEREVIYMRTRAGMVERVKRGLWMGGGTIPYGYRYDRNDGILHIIPEEAEKVKAIFQMFRDGYSCDRIQKILGMHSEKLVSNIIRRIAYVGKIQYKGKTYQGLHEPIIDEKLFYEVQEEIKKRSTNAYVSNKYMLTGLCYCGKCGTKMRMQKWGKYTKIVCYSQYKGKEHISKTGNPCKNKKVRADVVEKEVEDCFKRFIVNVEEKENESESTRKMIEKEISLSEAKLKRLYTLYARGNSGTDTLLDVIQAEEKTLKNLREELKAEDIREKAGRGEKIEKIKEMSNVWDTLTDSEKNKVLKECVEKVVITGDDIDIHFSIY

SEQ ID NO: 8725 - protein, 451 aa, Unknown
  Description of Unknown: Integrase B8726 sequence
  PTHR30461:SF3,SM00857,G3DSA:1.10.10.2600,IPR036162,PF13408, PS51737,IPR025827,G3DSA:3.40.50.1390,IPR006119,IPR038109, PF07508,SSF53041,IPR011109,PTHR30461,Coil, PS51736,cd00338,PF00239
MKKLNVGYMRVSTEAQTEKYGLDVQEDKIKELAKKRGVKIARWYVDGGYSGSNIQRPNIQKLLEDAEAGEIRAVYIYKLDRMSRDVVDTLTLVSKLLPKYNVEVVSATEDLRNETPMDRVMLGVNAVMGQYEREVIYMRTRAGMVERVKRGLWMGGGTIPYGYRYDRNDGILHIIPEEAEKVKAVFQMFRDGYSCDRIQKILGMHSEKLVSNIIRRIAYVGKIQYKGKTYQGLHEPIIDEKLFYEVQEEIKKRSTNAYVSNKYMLTGLCYCGKCGTKMRMQKWGKYTKIVCYSQYKDKKYIPQGPEPCKNKKVRADIVEKEVEDCFKRFIVNVEEKENESESTRKMIEKEISLSEAKLKRLYTLYANGNSGTDTLLDVIQAEEKTLKNLREELKAEDIREKAGQQEKIEKIKEMSNVWDTLTDSEKNKVLKECVEKVVITGDDIDIHFSIY

SEQ ID NO: 8726 - protein, 451 aa, Unknown
  Description of Unknown: Integrase B8727 sequence
  SM00857,G3DSA:1.10.10.2600,IPR036162,PF13408,IPR025827, G3DSA:3.40.50.1390,PS51737,IPR006119,IPR038109,PF07508, SSF53041,IPR011109,PF00239,PTHR30461,PS51736, Coil,cd00338
MKKLNVGYMRVSTEAQTEKYGLDVQEDKIKELAKKRGVKIARWYVDGGYSGSNIQRPNIQKLLEDAEAGEIQAVYIYKLDRMSRDVVDTLTLVSKLLPKYNVEVVSATEDLRNETPMDRVMLGVNAVMGQYEREVIYMRTRAGMVERVKRGLWMGGGTIPYGYRYDRNDGILHIIPEEAEKVKAVFQMFRDGYSCDRIQKILGMHSEKLVSNIIRRITYVGKIQYKGRVYQGLHEPIIDEKLFYEVQEEIKKRSTNAYVSNKHMLTGLCYCGKCGTKMRMQKWGKYTKIVCYSQYKEKEHISKTGNPCKNKKVRADVVEKEVEDCFKRFIVNVEEKENESESTRKMIEKEISLSEAKLKRLYTLYASGSSGTDTLFDVIQTEEKKLKNLQEELKAEDIREKAGRGEKIEKIKEMSNVWDTLTDSEKNKVLKECVEKVVITGDDIDIHFSIY

SEQ ID NO: 8727 - protein, 451 aa, Unknown
  Description of Unknown: Integrase B8728 sequence
  SM00857,G3DSA:1.10.10.2600,IPR036162,PF13408,PS51737, G3DSA:3.40.50.1390,IPR025827,IPR006119,IPR038109,PF07508, SSF53041,IPR011109,PF00239,PTHR30461,PS51736, Coil,cd00338
MKKLNVGYMRVSTEAQTEKYGLDVQEDKIKELAKKRGVKIARWYVDGGYSGSNIQRPNIQKLLEDAEAGEIQAVYIYKLDRMSRDVVDTLTLVSKLLPKYNVEVVSATEDLRNETPMDRVMLGVNAVMGQYEREVIYMRTRAGMVERVKRGLWMGGGTIPYGYRYDRNDGILHIIPEEAEKVKAIFQMFRDGYSCDRIQKILGMHSEKLVSNIIRRIAYVGKIQYKGKTYQGLHEPIIDEKLFYEVQEEIKKRSTNAYVSNRYMLTGLCYCGKCGTKMRMQKWGKYTKIVCYSQYKGKEHISKTGNPCKNKKVRADVVEKEVEDCFKRFIVNVEEKENESESTRKMIEKEISLSEAKLKRLYTLYARGNSGTDTLFDVIQTEEKTLKNLQEELKAEDIREKAGRGEKIEKIKEMSNVWDTLTDSEKNKVLKECVEKVVITEDDIDIHFSIY

SEQ ID NO: 8728 - protein, 451 aa, Unknown
  Description of Unknown: Integrase B8729 sequence
  cd00338,SM00857,G3DSA:1.10.10.2600,IPR036162,PF13408, IPR025827,G3DSA:3.40.50.1390,PS51737,IPR006119,IPR038109, SSF53041,IPR011109,PTHR30461,PS51736,Coil, PF00239
MKKVLKIGGYVRVSHEEQKKFGYSTKAQIEEIEKWCNENNHNLIDLYIDEGYSASNMKRPNLQRMINDLPKLDAILFTRIDRLSRNVLEANKLLQLLKQNNTDMIAIKEENVDTTTSNGMFLFNLKLSLAQHELDRGSERIKAVFEYKVREGEAVTGSLPFGYKIGEKDGKKVIIKDKETEAIVNDIFDHFSTYRSIRSTCIYINKKYNLTKDYRTYARILKRDLYTGKYKDNYNYAPAYITEKEYLLNQEYIKGNVKVRKNKNVYLFVGMIKCPECKSSFVGKYYDGKKRYYSYVCGKHKSTKLCSFKKGITEEKIEKFLIENVEDLLNKHIASVRTDVEILPKPEKEKLKKQIKDIKTELDNLNYMFRKGRISASDYDIEYDDLEKELKKIEALTTSNKEIKDINKFFVNDWKTIYNNLEKEKKRALWNSVIKNITIDEDLNITLVFRS

SEQ ID NO: 8729 - protein, 451 aa, Unknown
  Description of Unknown: Integrase B8730 sequence
  PTHR30461:SF3,SM00857,G3DSA:1.10.10.2600,IPR036162,PF13408, IPR025827,G3DSA:3.40.50.1390,PS51737,IPR006119,IPR038109, PF07508,SSF53041,IPR011109,PF00239,PTHR30461, PS51736,Coil,cd00338
MKKLNVGYMRVSTEAQTEKYGLDVQEDKIKELAKKRGVKIARWYVDGGYSGSNIQRPNIQKLLEDAEAGEIQAVYIYKLDRMSRDVVDTLTLVSKLLPKYNVEVVSATEDLRNETPMDRVMLGVNAVMGQYEREVIYMRTRAGMVERVKRGLWMGGGTIPYGYRYDRNDGILHIIPEEAEKVKAVFQMFRDGYSCDRIQKILGMHSEKLVSNIIRRITYVGKIQYKGRVYQGLHEPIIDEKLFYEVQEEIKKRSTNAYVSNKHMLTGLCYCGKCGTKMRMQKWGKYTKIVCYSQYKEKEHISKTGNPCKNKKVRADVVEKEVEDCFKRFIVNVEEKENESESTRKMIEKEISLSEAKLKRLYTLYASGNSGTDTLLDVIQAEEKTLKNLREELKAEDIREKAGRGKKIEKIKEMSNVWDTLTDSEKNKVLKECVEKVVITGDDIDIHFSIY

SEQ ID NO: 8730 - protein, 451 aa, Unknown
  Description of Unknown: Integrase B8731 sequence
  PTHR30461:SF3,cd00338,SM00857,G3DSA:1.10.10.2600,IPR036162, PF13408,PS51737,G3DSA:3.40.50.1390,IPR025827,IPR006119, IPR038109,PF07508,IPR011109,SSF53041,PTHR30461, PS51736,Coil,PF00239
MKKLNVGYMRVSTEAQTEKYGLDVQEDKINELAKKRGVKIARWYVDGGYSGSNIQRPNIQKLLEDAEAGEIRAVYIYKLDRMSRDVVDTLTLVSKLLPKYNVEVVSATEDLRNETPMDRVMLGVNAVMGQYEREVIYMRTRAGMVERVKRGLWMGGGTIPYGYRYDRNDGILHIIPEEAEKVKAIFKMFRDGYSCDRIQKILDMHSEQLVSNIIRSITYVGKIQYKGRVYQGLHEPIIDEKLFYEVQEEIKKRSTNAYVSNKHMLTGLCYCGKCGTKMRMQKWGKYTKIVCYSQYKEKEHISKTGNPCKNKKVRADVVEKEVEDCFKRFIVNVEEKENESESTRKMIEKEISLSEAKLKRLYTLYASGNSGTDTLVDVIQAEEKTLKNLQEELKAEDIKEKAGRGEKIEKIKEMSNVWDTLTDSEKNKVLKECVEKVVITEDDIDIHFSIY

SEQ ID NO: 8731 - protein, 451 aa, Unknown
  Description of Unknown: Integrase B8732 sequence
  IPR036162,PS51737,IPR011109,PTHR30461,PS00397, PF00239,G3DSA:1.10.10.2600,IPR006119,SSF53041,cd00338, SM00857,IPR025827,IPR038109,PS51736,IPR006118, PF13408,G3DSA:3.40.50.1390,PF07508,Coil
MKKMDVAYLRVSTETQTEKYGLDMQRQKIIDYCERNGVTIDKWYVDGGYSGSKLDRPDIQKLLDDAENGLIGRVFIYKLDRMSRDVIDTLNLIYRILPKYGVKVISMTEEIRTENPMDKVMLTMNAAMNQYEREVIRMRMSAGMVERVKKGYWMGGGRTPYGYYYDRNDGILHVDQEQAELVRNAYMLYLDGTSCDKISKMLGFKGERIVTQILKRKSNIGYIVYNGKTYKGLHEPIVDEKTFYDVQEMMKKRSTNSHVSNGNLLTGLCYCGVCGARIRYQKWGSYHKLVCYSQDIHSGKDYMKKSDHCNNAKIKADYVEHEVEECFVQFAINIDDSKPESIDRTDIIEKQIKSINSKIKKLYDLYIERQSDNLLDMINSEEEKVRDLELEIIAERNDSNDGLSEEKISQIKHMADIWDVLKIQEKNKILKQCIDKIVIMNGNVEIHFHTI

SEQ ID NO: 8732 - protein, 451 aa, Unknown
  Description of Unknown: Integrase B8733 sequence
  cd00338,SM00857,G3DSA:1.10.10.2600,IPR036162,PF13408, PS51737,G3DSA:3.40.50.1390,IPR025827,IPR006119,IPR038109, PF07508,SSF53041,IPR011109,PTHR30461,PS51736, Coil,PF00239
MKKLNVGYMRVSTEAQTEKYGLDVQEDKIKELAKKRGVKIARWYVDGGYSGSNIQRPNIQKLLEDAEAGEIQAVYIYKLDRMSRDVVDTLTLVSKLLPKYNVEVVSATEDLRNETPMDRVMLGVNAVMGQYEREVIYMRTRAGMVERVKRGLWMGGGTIPYGYRYDRNDGILHIIPEEAEKVKAIFQMFRDGYSCDRIQKIIGMHSEKLVSNIIRRIAYVGKIQYKGKVYQGLHEPIIDEKLFYEVQEEIKKRSTNAYVSNKYMLTGLCYCGKCGTKMRMQKWGKYTKIVCYSQYKGKEHISKTGNPCKNKKVRADVVEKEVEDCFKRFIVNVEEKENESESTRKMIEKEISLSEAKLKRLYTLYARGNSGTDTLLDVIQAEEKTLKNLREELKAEDIREKAGRGEKIEKIKEMSNVWDTLTDSEKNKVLKECVEKVVIAGDDIDIHFSIY

SEQ ID NO: 8733 - protein, 451 aa, Unknown
  Description of Unknown: Integrase B8734 sequence
  PTHR30461:SF3,SM00857,G3DSA:1.10.10.2600,IPR036162,PF13408, PS51737,G3DSA:3.40.50.1390,IPR025827,IPR006119,IPR038109, PF07508,IPR011109,SSF53041,PTHR30461,Coil, PS51736,cd00338,PF00239
MQRVAIYMRVSTDQQAKHGDSLREQQETLDEYIKRNKNLKVVDKYIDGGISGQKLNRDEFQRLLDDVKNDQIDLILFTKLDRWFRNLRHYLNTQEILEKHNVSWNAVSQQYYDTTTAYGRTFIAQVMSFAELEAQMTSERIKSVFSNKIQQGEVVSGKVPLGYKIENKRLVPTSDKDIVIDLFDYYVRVGSLRKTTTYLEEKHGIVRDYQSVRKLLTNEKYIGKLRNNTNYCEPIIDKDIFETVQLRLSQNVKTSGSHDYIFRGLVRCADCDGSMSCSTLKSKYIKKTDGEVSYYIRSCYRCTRRRNNPTRCKNKKTYYERALERYLLDNIQTNIAMHVRTLKKEVTKKDSVKRKKDALFVKIERLKKAYLNEIIELDEYKRDRELLENEIASLKEPKINKNIAPLKKVLSDDFFEKYEKASINQKNELWRSIIESIEVSVDGNITINFLP

SEQ ID NO: 8734 - protein, 451 aa, Unknown
  Description of Unknown: Integrase B8735 sequence
  SM00857,G3DSA:1.10.10.2600,IPR036162,PF13408,IPR025827, G3DSA:3.40.50.1390,PS51737,IPR006119,IPR038109,PF07508, SSF53041,IPR011109,PF00239,PTHR30461,PS51736, Coil,cd00338
MKKLNVGYMRVSTEAQTEKYGLDVQEDKIKELAKKRGVKIARWYVDGGYSGSNIQRPNIQKLLEDAEAGEIQAVYIYKLDRMSRDVVDTLTLVSKLLPKYNVEVVSATEDLRNETPMDRVMLGVNAVMGQYEREVIYMRTRAGMVERVKRGLWMGGGTIPYGYRYDRNDGILHIIPEEAEKVKAVFQMFRDGYSCDRIQKILGMHSEKLVSNIIRRITYVGKIQYKGRVYQGLHEPIIDEKLFYEVQEEIKKRSTNAYISNKHMLTGLCYCGKCGTKMRMQKWGKYTKIVCYSQYKEKEHISKTGNPCKNKKVRADVVEKEVEDCFKRFIVNVEEKENESESTRKMIEKEISLSEAKLKRLYTLYASGNSGTDTLFDVIQAEEKTLKNLQEELKAEDIREKAGRGEKIEKIKEMSNVWDTLTDSEKNKVLKECVEKVVITGDDIDIHFSIY

SEQ ID NO: 8735 - protein, 451 aa, Unknown
  Description of Unknown: Integrase B8736 sequence
  SM00857,G3DSA:1.10.10.2600,IPR036162,PF13408,IPR025827, G3DSA:3.40.50.1390,PS51737,IPR006119,IPR038109,PF07508, IPR011109,SSF53041,PF00239,PTHR30461,PS51736, Coil,cd00338
MKKLNVGYMRVSTEAQTEKYGLDVQEDKIKELAKKRGVKIARWYVDGGYSGSNIQRPNIQKLLEDAEAGEIQAVYIYKLDRMSRDVVDTLTLVSKLLPKYNVEVVSATEDLRNETPMDRVMLGVNAVMGQYEREVIYMRTRAGMVERVKRGLWMGGGTIPYGYRYDRNDGILHIIPEEAEKVKAIFQMFRDGYSCDRIQRILGMHSEKLVSNIIRRIAYVGKIQYKGRVYQGLHEPIIDEKLFYEVQEEIKKRSTNAYVSNKHMLTGLCYCGKCGTKMRMQKWGKYTKIVCYSQYKEKEHISKTGNPCKNKKVRADVVEKEVEDCFRRFIVNVEEKENESESTRKMIEKEISLSEAKLKRLYTLYASGNSGTDTLFDVIQAEEKTLKNLQEELKAEDIREKAGRGEKIEKIKEMSNVWDTLTDSEKNKVLKECVEKVVITGDDIDIHFSIY

SEQ ID NO: 8736 - protein, 451 aa, Unknown
  Description of Unknown: Integrase B8737 sequence
  PTHR30461:SF3,SM00857,G3DSA:1.10.10.2600,IPR036162,PF13408, PS51737,G3DSA:3.40.50.1390,IPR025827,IPR006119,IPR038109, PF07508,SSF53041,IPR011109,PF00239,PTHR30461, PS51736,Coil,cd00338
MKKINVGYMRVSTEAQTEKYGLDVQEDKIKELAKKRGVKIARWYVDGGYSGSNIQRPNIQKLLEDAEAGEIQAVYIYKLDRMSRDVVDTLTLVSKLLPKYNVEVVSATEDLRNETPMDRVMLGVNAVMGQYEREVIYMRTRAGMVERVKRGLWMGGGTIPYGYRYDRNDGILHIIPEEAEKVKAIFQMFRDGYSCDRIQKILGMHSEKLVSNIIRRIAYVGKIQYKGRVYQGLHEPIIDEKLFYEVQEEIKKRSTNAYVSNKYMLTGLCYCGKCGTKMRMQKWGKYTKIVCYSQYKGKEHISKTGNPCKNKKVRADVVEKEVEDCFKRFIVNVEEKENESESTRKMIEKEISLSEAKLKRLYTLYASGNSGTDTLLDVIQAEEKTLKNLREELKAEDIREKAGRGEKIEKIKEMSNVWDTLTDSEKNKVLKECVEKVVITGDDIDIHFSIY

SEQ ID NO: 8737 - protein, 451 aa, Unknown
  Description of Unknown: Integrase B8738 sequence
  PTHR30461:SF3,SM00857,G3DSA:1.10.10.2600,IPR036162,PF13408, PS51737,IPR025827,G3DSA:3.40.50.1390,IPR006119,IPR038109, PF07508,IPR011109,SSF53041,PF00239,PTHR30461, PS51736,Coil,cd00338
MKKLNVGYMRVSTEAQTEKYGLDVQEDKIKELANKRGVKIARWYVDGGYSGSNIQRPNIQKLLEDAEAGEIQAVYIYKLDRMSRDVVDTLTLVSKLLPKYNVEVVSATEDLRNETPMDRVMLGVNAVMGQYEREVIYMRTRAGMVERVKHGLWMGGGTIPYGYRYDRNDGILHIIPEEAEKVKAVFQMFRDGYSCDRIQKILGMHSEKLVSNIIRRIAYVGKIQYKGKTYQGLHEPIIDEKLFYEVQEEIKKRSTNAYVSNKYMLTGLCYCGKCGTKMRMQKWGKYTKIVCYSQYKGKEHISKTGNPCKNKKVRADVVEKEVEDCFKRFIVNVEEKENESESTRKMIEKEISLSEAKLKRLYTLYASGNSGTDTLLDVIQAEEKTLKNLREELKEEDIREKAGRGEKIEKIKEMSNVWDTLTDSEKNKVLKECVEKVVITGDDIDIHFSIY

SEQ ID NO: 8738 - protein, 451 aa, Unknown
  Description of Unknown: Integrase B8739 sequence
  PTHR30461:SF3,cd00338,SM00857,G3DSA:1.10.10.2600,IPR036162, PF13408,PS51737,G3DSA:3.40.50.1390,IPR025827,IPR006119, IPR038109,PF07508,IPR011109,SSF53041,PTHR30461, PS51736,Coil,PF00239
MKKINVGYMRVSTEAQTEKYGLDVQEDKIKELAKKRGVKIARWYVDWGYSGSNIQRPNIQKLLEDAEAGEIQAVYIYKLDRMSRDVVDTLTLVSKLLPKYNVEVVSATEDLRNETPMDRVMLGVNAVMGQYEREVIYMRTRAGMVERVKRGLWVGGGAIPYGYRYDRNDGILHIIPEEAEKVKAIFQMFRDGYSCDRIQKILGMHSEKLVSNIIRRIAYVGKIQYKGKVYQGLHEPIIDEKLFYEVQEEIKKRSTNAYVSNKYMLTGLCYCGKCGTKMRMQKWGKYTKIVCYSQYKGKEHISKTESPCENKKVRADVVEKEVEDCFKRFIVNVEEKENESENTKKMIEREISLSESKLKRLYTLYANGNSGTDTLLDVINVEEKTLKNLREELKAEDIREKAGRGEKIEKIKEMSNVWDTLTDSEKNKVLKECVEKVVITGDDIDIHFSIY

SEQ ID NO: 8739 - protein, 451 aa, Unknown
  Description of Unknown: Integrase B8740 sequence
  SM00857,G3DSA:1.10.10.2600,IPR036162,PF13408,PS51737, G3DSA:3.40.50.1390,IPR025827,IPR006119,IPR038109,PF07508, SSF53041,IPR011109,PF00239,PTHR30461,PS51736, Coil,cd00338
MKKLNVGYMRVSTEAQTEKYGLDVQEDKIKELAKKRGVKIARWYVDGGYSGSNIQRPNIQKLLEDAEAGEIQAVYIYKLDRMSRDVVDTLTLVSKLLPKYNVEVVSATEDLRNETPMDRVMLGVNAVMGQYEREVIYMRTRAGMVERVKRGLWMGGGTIPYGYRYDRNDGILHIIPEEAEKVKAVFQMFRDGYSCDRIQKILGMHSEKLVSNIIRRIAYVGKIQYKGKVYQGLHEPIIDEKLFYEVQEEIKKRSTNAYVSNKYMLTGLCYCGKCGTKMRMQKWGKYTKIVCYSQYKGKEHISKTGNPCKNKKVRADVVEKEVEDCFKRFIVNVEEKENESESTRKMIEKEISLSEAKLKRLYTLYASGNSGTDTLFDVIQAEEKTLKNLQEELKAEDIREKAGRGEKIEKIKEISNVWDTLTDSEKNKVLKECVEKVVITEDDIDIHFSIY

SEQ ID NO: 8740 - protein, 451 aa, Unknown
  Description of Unknown: Integrase B8741 sequence
  PTHR30461:SF3,SM00857,G3DSA:1.10.10.2600,IPR036162,PF13408, IPR025827,G3DSA:3.40.50.1390,PS51737,IPR006119,IPR038109, PF07508,SSF53041,IPR011109,PF00239,PTHR30461, PS51736,Coil,cd00338
MKKLNVGYMRVSTEAQTEKYGLDVQEDKIKELAKKRGVKIARWYVDGGYSGSNIQRPNIQKLLEDAEAGEIQAVYIYKLDRMSRDVVDTLTLVSKLLPKYNVEVVSATEDLRNETPMDRVMLGVNAVMGQYEREVIYMRTRAGMVERVKRGLWMGGGTIPYGYRYDRNDGILHIIPEEAEKVKAIFQMFRDGYSCDRIQRILGMHSEKLVSNIIRRIAYVGKIQYKGKTYQGLHEPIIDEKLFYEVQEEIKKRSTNAYVSNKHMLTGLCYCGKCGTKMRMQKWGKYTKIVCYSQYKEKEHISKTGNPCKNKKVRADVVEKEVEDCFKRFIVNVEEKENESESTRKMIEKEISLSEAKLKRLYTLYASGNSGTDTLVDVIQTEEKTLKNLQEELKAEDIREKAGRGKKIEKIKEMSNVWDTLTDSEKNKVLKECVEKVVITGDDIDIHFSIY

SEQ ID NO: 8741 - protein, 451 aa, Unknown
  Description of Unknown: Integrase B8742 sequence
  PTHR30461:SF3,SM00857,G3DSA:1.10.10.2600,IPR036162,PF13408, PS51737,G3DSA:3.40.50.1390,IPR025827,IPR006119,IPR038109, PF07508,IPR011109,SSF53041,PF00239,PTHR30461, PS51736,Coil,cd00338
MKKLNVGYMRVSTEAQTEKYGLDVQEDKINELAKKRGVKIARWYVDGGYSGSNIQRPNIQKLLEDAEAGEIQAVYIYKLDRMSRDVVDTLTLVSKLLPKYNVEVVSATEDLRNETPMDRVMLGVNAVMGQYEREVIYMRTRAGMVERVKRGLWMGGGTIPYGYRYDRNDGILHIIPEEAEKVKAIFQMFRDGYSCDRIQKILGMHSEKLVSNIIRRITYVGKIQYKGRVYQGLHEPIIDEKLFCEVQEEIKKRSTNAYVSNKHMLTGLCYCGKCGTKMRMQKWGKYTKIVCYSQYKEKEHISKTGNPCKNKKVRADVVEKEVEDCFKQFIVNVEEKENESESTRKMIEKEISLSESKLKRLYTLYANGNSGTDTLFGVIQAEEKTLKNLQEELKAEDIREKAGRGEKIEKIKEMSNVWDTLTDSEKNKVLKECVEKVVITGDDIDIHFSIY

SEQ ID NO: 8742 - protein, 451 aa, Unknown
  Description of Unknown: Integrase B8743 sequence
  PTHR30461:SF3,cd00338,SM00857,G3DSA:1.10.10.2600,IPR036162, PF13408,IPR025827,G3DSA:3.40.50.1390,PS51737,IPR006119, IPR038109,PF07508,IPR011109,SSF53041,PTHR30461, PS51736,Coil,PF00239
MKKLNVGYMRVSTEAQTEKYGLDVQEDKIKELAKKRGVKIARWYVDGGYSGSNIQRPNIQKLLEDAEAGEIQAVYIYKLDRMSRDVVDTLTLVSKLLPKYNVEVVSATEDLRNETPMDRVMLGVNAVMGQYEREVIYMRTRAGMVERVKRGLWMGGGTIPYGYRYDRNDGILHIIPEEAEKVKAIFQMFRDGYSCDRIQKILGMHSEKLVSNIIRRIAYVGKIQYKGRVYQGLHEPIIDEKLFYEVQEEIKKRSTNAYVSNKHMLTGLCYCGKCGTKMRMQKWGKYTKIVCYSQYKEKEHISKTGNPCKNKKVRADVVEKEVEDCFKRFIVNVEEKENESESTRKMIEKEISLSEAKLKRLYTLYASGSSGTDTLFGVIQEEEKTLKNLQEELKAEDIREKAGRGEKIEKIKEMSNVWDTLTDSEKNKVLKECVEKVVITGDDIDIHFSIY

SEQ ID NO: 8743 - protein, 451 aa, Unknown
  Description of Unknown: Integrase B8744 sequence
  PTHR30461:SF3,SM00857,G3DSA:1.10.10.2600,IPR036162,PF13408, PS51737,G3DSA:3.40.50.1390,IPR025827,IPR006119,IPR038109, PF07508,SSF53041,IPR011109,PF00239,PTHR30461, PS51736,Coil,cd00338
MKKLNVGYMRVSTEAQTEKYGLDVQEDKIKELAKKRGVKIARWYVDGGYSGSNIQRPNIQKLLEDAEAGEIQAVYIYKLDRMSRDVVDTLTLVSKLLPKYNVEVVSATEDLRNETPMDRVMLGVNAVMGQYEREVIYMRTRAGMVERVKRGLWMGGGTIPYGYRYDRNDGILHIIPEEAEKVKAIFQMFRDGYSCDRIQRILGMHSEKLVSNIIRRIAYVGKIQYKGRVYQGLHEPIIDEKLFYEVQEEIKKRSTNSYVSNKHMLTGLCYCGKCGTKMRMQKWGKYTKIVCYSQYKEKKHISKTGNPCKNKKVRADVVEKEVEDCFKQFIVNVEEKENESESTRKMIEKEISLSEAKLKRLYTLYASGSSGTDTLFGVIQEEEKTLKNLQEELKAEDIREKAGRGEKIEKIKEMSNVWDTLTDSEKNKVLKECVEKVVITEDDIDIHFSIY

SEQ ID NO: 8744 - protein, 451 aa, Unknown
  Description of Unknown: Integrase B8745 sequence
  SM00857,G3DSA:1.10.10.2600,IPR036162,PF13408,PS51737, G3DSA:3.40.50.1390,IPR025827,IPR006119,IPR038109,PF07508, SSF53041,IPR011109,PF00239,PTHR30461,PS51736, Coil,cd00338
MKKLNVGYMRVSTEAQTEKYGLDVQEDKIKELAKKRGVKIARWYVDGGYSGSNIQRPNIQKLLEDAEAGEIQAVYIYKLDRMSRDVVDTLTLVSKLLPKYNVEVVSATEDLRNETPMDRVMLGVNAVMGQYEREVIYMRTRAGMVERVKRGLWMGGGTIPYGYRYDRNDGILHIIPEEAEKVKAIFQMFRDGYSCDRIQKILGMHSEKLVSNIIRRIAYVGKIQYKGKVYQGLHEPIIDEKLFFEVQEEIKKRSTNAYVSNKYMLTGLCYCGKCGTKMRMQKWGKYTKIVCYSQYKGKEHISKTGNPCKNKKVRADVVEKEVEDCFKRFIVNVEEKENESESTRKMIEKEISLSEAKLKRLYTLYASGNSGTDTLLDVIQAEEKTLKNLREELKAEDIREKAGRGEKIEKIKEMSNVWDTLTDSEKNKVLKECVEKVVITGDDIDIHFSIY

SEQ ID NO: 8745 - protein, 451 aa, Unknown
  Description of Unknown: Integrase B8746 sequence
  PTHR30461:SF3,cd00338,SM00857,G3DSA:1.10.10.2600,IPR036162, PF13408,PS51737,G3DSA:3.40.50.1390,IPR025827,IPR006119, IPR038109,PF07508,SSF53041,IPR011109,PTHR30461, PS51736,Coil,PF00239
MKKLNVGYMRVSTEAQTEKYGLDVQEDKIKELAKKRGVKIARWYVDGGYSGSNIQRPNIQKLLEDAEAGEIQAVYIYKLDRMSRDVVDTLTLVSKLLPKYNVEVVSATEDLRNETPMDRVMLGVNAVMGQYEREVIYMRTRAGMVERVKRGLWMGGGTIPYGYRYDRNDGILHIIPEEAEKVKAIFQMFRDGYSCDRIQKILGMHSEKLVSNIIRRIAYVGKIQYKGRVYQGLHEPIIDEKLFYEVQEEIKKRSTNAYVSNKYMLTGLCYCGKCGTKMRMQKWGKYTKIVCYSQYKGKEHISKTGNPCKNKKVRADVVEKEVEDCFKRFIVNVEEKENESESTRKMIEKEISLSEAKLKRLYTLYASGNSGTDTLVDVIQTEEKTLKNLQEELKAEDIREKAGRGEKIEKIKEMSNVWDTLTDSEKNKVLKECVEKVVITGDDIDIHFSIY

SEQ ID NO: 8746 - protein, 451 aa, Unknown
  Description of Unknown: Integrase B8747 sequence
  PTHR30461:SF3,SM00857,G3DSA:1.10.10.2600,IPR036162,PF13408, PS51737,G3DSA:3.40.50.1390,IPR025827,IPR006119,IPR038109, PF07508,SSF53041,IPR011109,PF00239,PTHR30461, PS51736,Coil,cd00338
MKKLNVGYMRVSTEAQTEKYGLDVQEDKIKELAKKRGVKIARWYVDGGYSGSNIQRPNIQKLLEDAEAGEIQAVYIYKLDRMSRDVVDTLTLVSKLLPKYNVEVVSATEDLRNETPMDRVMLGVNAVMGQYEREVIYMRTRAGMLERVKRGLWMGGGTIPYGYRYDRNDGILHIIPEEAEKVKAIFQMFRDGYSCDRIQKILGMHSEKLVSNIIRRIAYVGKIQYKGKTYQGLHEPIIDEKLFYEVQEEIKKRSTNAYVSNKYMLTGLCYCGKCGTKMRMQKWGKYTKIVCYSQYKGKEHISKTGNPCKNKKVRADVVEKEVEDCFKRFIVNVEEKENESESTRKMIEKEISLSEAKLKRLYTLYASGNSGTDTLLDVIQAEEKTLKNLREELKAEDIREKAGRGEKIEKIKEMSNVWDTLTDSEKNKVLKECVEKVVITGDDIDIHFSIY

SEQ ID NO: 8747 - protein, 451 aa, Unknown
  Description of Unknown: Integrase B8748 sequence
  SM00857,G3DSA:1.10.10.2600,IPR036162,PF13408,IPR025827, G3DSA:3.40.50.1390,PS51737,IPR006119,IPR038109,PF07508, SSF53041,IPR011109,PF00239,PTHR30461,PS51736, Coil,cd00338
MKKLNVGYMRVSTEAQTEKYGLDVQEDKIKELAKKRGVKIARWYVDGGYSGSNIQRPNIQKLLEDAEAGEIQAVYIYKLDRMSRDVVDTLTLVSKLLPKYNVEVVSATEDLRNETPMDRVMLGVNAVMGQYEREVIYMRTRAGMVERVKRGLWMGGGTIPYGYRYDRNDGILHIIPEEAEKVKAVFQMFRDGYSCDRIQKILGMHSEKLVSNIIRRIAYVGKIQYKGKTYQGLHEPIIDEKLFYEVQEEIKKRSTNAYVSNKYMLTGLCYCGKCGIKMRMQKWGKYTKIVCYSQYKGKEHISKTVNPCDNKKVRADVVEKEVEDCFKRFIVNVEEKENESESTRKMIEKEISLSEAKLKRLYTLYASGNSGTDTLLDVIQAEEKTLKNLREELKAEDIREKAGRGEKIEKIKEMSNVWDTLTDSEKNKVLKECVEKVVITGDDIDIHFSIY

SEQ ID NO: 8748 - protein, 451 aa, Unknown
  Description of Unknown: Integrase B8749 sequence
  PTHR30461:SF3,SM00857,G3DSA:1.10.10.2600,IPR036162,PF13408, IPR025827,PS51737,G3DSA:3.40.50.1390,IPR006119,IPR038109, PF07508,IPR011109,SSF53041,PF00239,PTHR30461, PS51736,Coil,cd00338
MKKLNVGYMRVSTEAQTEKYGLDVQEDKINELAKKRGVKIARWYVDGGYSGSNIQRPNIQKLLEDAEAGEIQAVYIYKLDRMSRDVVDTLTLVSKLLPKYNVEVVSATEDLRNETPMDRVMLGVNAVMGQYEREVIYMRTRAGMVERVKRGLWMGGGTIPYGYRYDRNDGILHIIPEEAEKVKVIFQMFRDGYSCDRIQKILGMHSEKLVSNIIRRITYVGKIQYKGRVYQGLHEPIIDEKLFYEVQEEIKKRSTNAYVSNKHMLTGLCYCGKCGTKMRMQKWGKYTKIVCYSQYKEKEHISKTGTPCKNKKVRADVVEKEVEDCFKRFIVNVEEKENESESTRKMIEKEISLSEAKLKRLYTLYASGNSGTDTLIDVIQTEEKTLKNLQEELKAEDIREKAGRGEKIEKIKEMSNVWDTLTDSEKNKVLKECVEKVVITGDDIDIHFSIY

SEQ ID NO: 8749 - protein, 451 aa, Unknown
  Description of Unknown: Integrase B8750 sequence
  PTHR30461:SF3,SM00857,G3DSA:1.10.10.2600,IPR036162,PF13408, IPR025827,G3DSA:3.40.50.1390,PS51737,IPR006119,IPR038109, PF07508,SSF53041,IPR011109,PTHR30461,Coil, PS51736,cd00338,PF00239
MKKLNVGYMRVSTEAQTEKYGLDVQEDKIKELAKKRGVKIARWYVDGGYSGSNIQRPNIQKLLEDAEAGEIQAVYIYKLDRMSRDVVDTLTLVSKLLPKYNVEVVSATEDLRNETPMDRVMLGVNAVMGQYEREVIYMRTRAGMVERVKRGLWLGGGTIPYGYRYDRNDGILHIIPEEAEKVKAIFQMFRDGYSCDRIQKILGMHSEKLVSNIIRRITYVGKIQYKGRVYQGLHEPIIDEKLFYEVQEEIKKRSTNAYVSNKYMLTGLCYCGKCGTKMRMQKWGKYTKIVCYSQYKGKEHISKTGNPCKNKKVWADVVEKEVEDCFKRFIVNVEEKENESESTRKMIEKEISLSEAKLKRLYTLYASGNSGTDTLLDVIQAEEKTLKNLREELKAEDIREKAGRGEKIEKIKEMSNVWDTLTDSEKNKVLKECVEKVVITEDDIDIHFSIY

SEQ ID NO: 8750 - protein, 451 aa, Unknown
  Description of Unknown: Integrase B8751 sequence
  PTHR30461:SF3,SM00857,G3DSA:1.10.10.2600,IPR036162,PF13408, PS51737,G3DSA:3.40.50.1390,IPR025827,IPR006119,IPR038109, PF07508,SSF53041,IPR011109,PF00239,PTHR30461, PS51736,Coil,cd00338
MKKLNVGYMRVSTEAQTEKYGLDVQEDKIKELAKKRGVKIARWYVDGGYSGSNIQRPNIQKLLEDAEAGEIQAVYIYKLDRMSRDVVDTLTLVSKLLPKYNVEVVSATEDLRNETPMDRVMLGVNAVMGQYEREVIYMRTRAGMVERVKRGLWMGGGTIPYGYRYDRNDGILHIIPEEAEKVKAIFQMFRDGYSCDRIQKILGMHSEKLVSNIIRRIAYVGKIQYKGKTYQGLHEPIIDEKLFYEVQEEIKKRSTNAYVSNKYMLTGLCYCGKCGTKMRMQKWGKYTKIVCYSQYKGKEHISKTGNPCKNKKVRADVVEKEVEDCFKRFIVNVEEKENESESTRKMIEKEISLSEAKLKRLYTLYASGNSGTDTLVDVIQAEEKTLKNLQEELKAEDIREKAGRGKKIEKIKEMSNVWDTLTDSEKNKVLKECVEKVVITGDDIDIHFSIY

SEQ ID NO: 8751 - protein, 451 aa, Unknown
  Description of Unknown: Integrase B8752 sequence
  PTHR30461:SF3,cd00338,SM00857,G3DSA:1.10.10.2600,IPR036162, PF13408,IPR025827,G3DSA:3.40.50.1390,PS51737,IPR006119, IPR038109,IPR011109,SSF53041,PTHR30461,PS51736, Coil,PF00239
MKQKARIYARVSRDEQVKYGYSIDAQLTALKEYCNQNKITVSGIYVDEGISAATTKKRKDYLRMMNNLEENDIILFTKLDRFSRNLLDANLAVLELEKKNVSIKAIHEDDIDTSTADGKFIFNLKLSLAEREREKTSERINDVFKYMAKNGQRISSKVPFGYKIENKLYVRDDKKADALLDAYHMVLLYRSVSYSNKLFNEKYPCYKMEYANFLNRLKNPINIGVHKYNDNFCKGVIPKELFDQVQEIINKNNIRSRKTKSIFLFSGLIRCGTCGRRIVGNKKTDHNSRKNPNWKDTTYYLYRCNHAYQNKVCSNRHIISESKIEKYLLENLNTLLSNYVIDIETKQREQKDHTKDIAKIKKQMMKLKDLYLDDLIQKDEYTNSYKELEIKLKEYSNIKQITVPNEIKQILNINIRDYYETLDRKQKQALWQSIIKEIIYNEDKSFVIYFI

SEQ ID NO: 8752 - protein, 451 aa, Unknown
  Description of Unknown: Integrase B8753 sequence
  SM00857,G3DSA:1.10.10.2600,IPR036162,PF13408,IPR025827, G3DSA:3.40.50.1390,PS51737,IPR006119,IPR038109,PF07508, SSF53041,IPR011109,PF00239,PTHR30461,PS51736, Coil,cd00338
MKKLNVGYMRVSTEAQTEKYGLDVQEDKIKELAKKRGVKIARWYVDGGYSGSNIQRPNIQKLLEDAEAGEIQAVYIYKLDRMSRDVVDTLTLVSKLLPKYNVEVVSATEDLRNETPMDRVMLGVNAVMGQYEREVIYMRTRAGMVERVKRGLWMGGGTIPYGYRYDRNDGILHIIPEEAEKVKAIFQMFRDGYSCDRIQRILGMHSEKLVSNIIRRIAYVGKIQYKGRVYQGLHEPIIDEKLFYEVQEEIKKRSTNAYVSNKHMLTGLCYCGKCGTKMRMQKWGKYTKIVCYSQYKEKEHISKTGNPCKNKKVRADVVEKEVEDCFKRFIVNVEEKENESESTRKMIEKEISLSEAKLKRLYTLYASGNSGTDTLFDVIQTEEKTLKNLQEELKAEDIREKAGRGEKIEKIKEMSNVWDTLTDSEKNKVLKECVEKVVITGDDIDIHFSIY

SEQ ID NO: 8753 - protein, 451 aa, Unknown
  Description of Unknown: Integrase B8754 sequence
  SM00857,G3DSA:1.10.10.2600,IPR036162,PF13408,PS51737, G3DSA:3.40.50.1390,IPR025827,IPR006119,IPR038109,PF07508, IPR011109,SSF53041,PF00239,PTHR30461,PS51736, Coil,cd00338
MKKLNVGYMRVSTEAQTEKYGLDVQEDKIKELAKKRGVKIARWYVDGGYSGSNIQRPNIQKLLEDAEAGEIQAVYIYKLDRMSRDVVDTLTLVSKLLPKYNVEVVSATEDLRNETPMDRVMLGVNAVMGQYEREVIYMRTRAGMVERVKRGLWMGGGTIPYGYRYDRNDGILHIIPEEAEKVKAIFQMFRDGYSCDRIQRILGMHSEKLVSNIIRRIAYVGKIQYKGRVYQGLHEPIIDEKLFCEVQEEIKKRSTNAYVSNKYMLTGLCYCGKCGTKMRMQKWGKYTKIVCYSQYKEKEHISKTVNPCDNKKVRADVVEKEVEDCFKRFIVNVEEKENESESTRKMIEKEISLSEAKLKRLYTLYASGNSGTDTLLDVIQAEEKTLKNLREELKAEDIREKAGQQEKIEKIKEMSNVWDTLTDSEKNKVLKECVEKVVITGDDIDIHFNIY

SEQ ID NO: 8754 - protein, 451 aa, Unknown
  Description of Unknown: Integrase B8755 sequence
  PTHR30461:SF3,SM00857,G3DSA:1.10.10.2600,IPR036162,PF13408, IPR025827,G3DSA:3.40.50.1390,PS51737,IPR006119,IPR038109, PF07508,SSF53041,IPR011109,PF00239,PTHR30461, PS51736,Coil,cd00338
MKKINVGYMRVSTEAQTEKYGLDVQEDKIKELAKKRGVKIARWYVDGGYSGSNIQRPNIQKLLEDAEAGEIQAVYIYKLDRMSRDVVDTLTLVSKLLPKYNVEVVSATEDLRNETPMDRVMLGVNAVMGQYEREVIYMRTRAGMVERVKRGLWMGGGTIPYGYRYDRNDGILHIIPEEAEKVKAIFQMFRDGYSCDRIQKILGMHSEKLVSNIIRRIAYVGKIQYKGKTYQGLHEPIIDEKLFYEVQEEIKKRSTNAYVSNKYMLTGLCYCGKCGTKMRMQKWGKYTKIVCYSQYKGKEHISKTGNPCKNKKVRADVVEKEVEDCFKRFIVNVEEKENESESTRKMIEKEISLSEAKLKRLYTLYASGNSGTDTLVDVIQAEEKTLKNLQEELKAEDIREKAGRGKKIEKIKEMSNVWDTLTDSEKNKVLKECVEKVVITGDDIDIHFSIY

SEQ ID NO: 8755 - protein, 451 aa, Unknown
  Description of Unknown: Integrase B8756 sequence
  PTHR30461:SF3,SM00857,G3DSA:1.10.10.2600,IPR036162,PF13408, PS51737,IPR025827,G3DSA:3.40.50.1390,IPR006119,IPR038109, PF07508,SSF53041,IPR011109,PF00239,PTHR30461, PS51736,Coil,cd00338
MKKINVGYMRVSTEAQTEKYGLDVQEDKIKELAKKRGVKIARWYVDGGYSGSNIQRPNIQKLLEDAEAGEIQAVYIYKLDRMSRDVVDTLTLVSKLLPKYNVEVVSATEDLRNETPMDRVMLGVNAVMGQYEREVIYMRTRAGMVERVKRGLWMGGGTIPYGYRYDRNDGILHIIPEEAEKVKAVFQMFRDGYSCDRIQKILGMHSEKLVSNIIRRIAYVGKIQYKGRVYQGLHEPIIDEKLFYEVQEEIKKRSTNAYVSNKYMLTGLCYCGKCGTKMRMQKWGKYTKIVCYSQYKGKEHISKTGNPCKNKKVRADAVEKEVEDCFKRFIVNVEEKENESESTRKMIEKEISLSEAKLKRLYTLYASGNSGTDTLLDVIQAEEKTLKNLREELKAEDIREKAGQQEKIEKIKEMSNVWDTLTDSEKNKVLKECVEKVVITGDDIDIHFSIY

SEQ ID NO: 8756 - protein, 451 aa, Unknown
  Description of Unknown: Integrase B8757 sequence
  PTHR30461:SF3,SM00857,G3DSA:1.10.10.2600,IPR036162,PF13408, PS51737,G3DSA:3.40.50.1390,IPR025827,IPR006119,IPR038109, PF07508,SSF53041,IPR011109,PTHR30461,Coil, PS51736,cd00338,PF00239
MKKLNVGYMRVSTEAQTEKYGLDVQEDKIKELAKKRGVKIARWYVDGGYSGSNIQRPNIQKLLEDAEAGEIQAVYVYKLDRMSRDVVDTLTLVSKLLPKYNVEVVSATEDLRNETPMDRVMLGVNAVMGQYEREVIYMRTRAGMVERVKRGLWMGGGTIPYGYRYDRNDGILHIIPEEAEKVKAVFQMFRDGYSCDRIQKILGMHSEKLVSNIIRRIAYVGKIQYKGRVYQGLHEPIIDEKLFYEVQEEIKKRSTNAYVSNKYMLTGLCYCGKCGTKMRMQKWGKYTKIVCYSQYKGKEHISKTGNPCKNKKVRADVVEKEVEDCFKRFIVNVEEKENESESTRKMIEKEISLSEAKLKRLYTLYASGNSGTDTLLDVIQAEEKTLKNLREELKAEDIREKAGRGEKIEKIKEMSNVWDTLTDSEKNKVLKECVEKVVITGDDIDIHFSIY

SEQ ID NO: 8757 - protein, 450 aa, Unknown
  Description of Unknown: Integrase B8758 sequence
  PTHR30461:SF3,SM00857,G3DSA:1.10.10.2600,IPR036162,PF13408, IPR025827,G3DSA:3.40.50.1390,PS51737,IPR006119,IPR038109, PF07508,IPR011109,SSF53041,PTHR30461,PS51736, cd00338,PF00239
MINCAIYPRKSKAVDNSDSMDVQIDMCRRYLDDKYGSGNYTATVYDGDYGITGHSTKKRKDFQRMMRDVSDRKIQLVVIQRYDRIARNTRDFCNLYHDMEINGCNLVSVSQQIDTTTPYGKNFMYMQASMAELEWALNSERRKDTIRYAASIGKSILPDHSTPFGYHNAVVNGVRRLVKEEQWEDAVVDLFEYYRKYRNYSATARYINQQYGTNFEIQAIKRIIRSPFYYGCYKDNDNFCEPYISKDDWQDLQQKRPVIRTAGNKKTEVLFSGMIRCPECNRLMRSCQKSHRSGNVYRYYHCEYHSARMCAFSRIKSENLIEEMLLNRVDTFLAERETAMSDQKSEKKHSTNNVSKYRAELDRLNTMFLKGRISEEYYDTEYLRLNDLIGQYEASSRSHDSVKHLREVFVSDWKEMYKDLDKLHRKFFWRDVIRQIIVDDNMIVIDVIFL

SEQ ID NO: 8758 - protein, 450 aa, Unknown
  Description of Unknown: Integrase B8759 sequence
  PTHR30461:SF3,SM00857,G3DSA:1.10.10.2600,IPR036162,PF13408, IPR025827,G3DSA:3.40.50.1390,PS51737,IPR006119,IPR038109, IPR011109,SSF53041,PTHR30461,PS51736,cd00338, PF00239
MIRCAIYDRVSTDLQVEKGLSLATQKDDLTQYAKDHGYVIVGYYEDEGITARKKMKNRKDLMRLLGDVKANKVDLILVTKLDRWFRNVKDYHNTQEILDAHHCNWKTIYEDYDSSTADGQLKINIMLAVAQNECDRTSERIKAVFRHKEAQGKVISGRMAPYGYKVVDGYVQKDESVSHIVVSAYERYFKTFSIRDVIRYLNMKYGENAPSDNVIDRLFKNEKYSGSFRGNPNWCEPYLTREQYEQIRTIGTTKQNTGQYEPYIFTSLIKCPICGNNFTGYRKKQNLKNGGQSIYIKYRCGNKFNRHGGASILEKTVENYLIENVLIFLQRDIEKLKSMAASEQESGNNAKVIHDEMGRLNLMYQKGRITDSYYESQYELLEKKLMELSTVCDIENTIEKRQNLVSFFQGDWINLYRSLDAENKKIFWKKYIKDIQVDPETRKLCGFHFY

SEQ ID NO: 8759 - protein, 450 aa, Unknown
  Description of Unknown: Integrase B8760 sequence
  cd00338,SM00857,G3DSA:1.10.10.2600,IPR036162,PF13408, IPR025827,G3DSA:3.40.50.1390,PS51737,IPR006119,IPR038109, PF07508,IPR011109,SSF53041,PTHR30461,PS51736, Coil,PF00239
MINCAIYPRKSKAVDNSDSMDVQIDMCRRYLDDKYGSGNYTATVYDGDYGITGHSTKKRKDFQRMMRDVSDRKIQLVVIQRYDRIARNTRDFCNLYHDMEINGCNLVSVSQQIDTTTPYGKNFMYMQASMAELEWALNSERRKDTIRYAASIGKSILPDHSTPFGYHNSVVNGVRRLVKEEQWEDAVADLFEYYRKYRNYSATARHINQQYGTRFEIQAIKRIIRSPFYYGCYKDNDNFCEPYISKEDWHDLQQKRPVIRTAGNKRTEVLFSGMIRCPECNRLMRSCQKSHRSGNVYRYYHCEYHSTKMCGFAKVKSENLIEEMLLNRVDTFLAEREADMSDQKSEKKHLTNNVSKYLAELDRLNTMFLKGRISEEYYDTEYLRLNDLIWQYEASRQSHDSVKHLQEVFVSDWKEIYKDLDKLHRKFFWRDVIRQIIVDDNMNVIDVIFL

SEQ ID NO: 8760 - protein, 450 aa, Unknown
  Description of Unknown: Integrase B8761 sequence
  PTHR30461:SF3,SM00857,G3DSA:1.10.10.2600,IPR036162,PF13408, IPR025827,G3DSA:3.40.50.1390,PS51737,IPR006119,IPR038109, PF07508,SSF53041,IPR011109,PTHR30461,PS51736, cd00338,PF00239
MINCAIYPRKSKAVDNSDSMDVQIDMCRRYLDDKYGSGNYTATVYDGDYGITGHSTKKRKDFQRMMRDVSDRKIQLVVIQRYDRIARNTRDFCNLYHDMEVNGCNLVSVSQQIDTTTPYGKNFMYMQASMAELEWALNSERRKDTIRYAASIGKSILPDHSTPFGYHNAVVNGVRRLVKEEQWEDAVADLFEYYRKYRNYSATARHINQQYGTRFEIQAIKRIIRSPFYYGCYKDNDNFCEPYISKEDWQDLQQKRPVIRTAGNKKTEVLFSGMIRCPECNRLMRSCQKSHRSGNVYRYYHCEYHSARMCAFARVKSENLIEEMLLNRVDTFLAEREAAMSDQKSEKKHSTNNVSKYRAELDRLNTMFLKGRISEEYYDTEYLRLNDLIGQYEASRQSHDSVKHLREVFVSDWKEMYKDLDKLHRKLFWRDVIRQIIVDDNMNVIDVIFL

SEQ ID NO: 8761 - protein, 450 aa, Unknown
  Description of Unknown: Integrase B8762 sequence
  PTHR30461:SF3,SM00857,G3DSA:1.10.10.2600,IPR036162,PF13408, PS51737,IPR025827,G3DSA:3.40.50.1390,IPR006119,IPR038109, PF07508,IPR011109,SSF53041,PTHR30461,PS51736, cd00338,PF00239
MINCAIYPRKSKAVDNSDSMDVQIDMCRRYLDDKYGSGNYTATVYDGDYGITGHSTKKRKDFQRMMRDVSDRKIQLVVIQRYDRIARNTRDFCNLYHDMEINGCNLVSVSQQIDTTTPYGKNFMYMQASMAELEWALNSERRKDTIRYAASIGKSILPDHSTPFGYHNAVVNGVRRLVKEEQWEDAVSDLFEYYRKYRNYSATARHINQQYGTNFEIQAIKRIIRSPFYYGCYKDNDNFCEPYISKEEWQDLQQKRPVIRTAGNKRTEVLFSGMIRCPECNRLMRSCQKSHRSGNVYRYYHCEYHSARMCGFVKVKSENLIEEMLLNRVDTFLAEREAAMSDQKSEKKHSTNNATKYREELDRLNTMFLKGRISEEYYDTEYLRLNDLIWQYEASRQSHDSVKHLQEVFVSDWKEIYKDLDKLHRKFFWRDVIRQIIVDDNMNVIDVIFL

SEQ ID NO: 8762 - protein, 450 aa, Unknown
  Description of Unknown: Integrase B8763 sequence
  PTHR30461:SF3,SM00857,G3DSA:1.10.10.2600,IPR036162,PF13408, IPR025827,PS51737,G3DSA:3.40.50.1390,IPR006119,IPR038109, PF07508,IPR011109,SSF53041,PTHR30461,PS51736, cd00338,PF00239
MINCAIYPRKSKAVDNSDSMDVQIDMCRRYLDDKYGSGNYTATVYDGDYGITGHSTKKRKDFQRMMRDVSDRKIQLVVIQRYDRIARNTRDFCNLYHDMEINGCNLVSVSQQIDTTTPYGKNFMYMQASMAELEWALNSERRKDTIRYAASIGKSILPDHSTPFGYHNAVVNGVRRLVKEEQWEDAVADLFEYYRKFRNYSATARHINQQYGTKFEIQAIKRIIRSPFYYGSYKDNDNFCEPYISKEDWQDLQQKRPVIRTAGNKRTEVLFSGMIRCPECNRLMRSCQKSHRSGNVYRYYHCEYHSTKMCGFAKVKSENLIEEMLLNRVDTFLAEREAAMSDQKSEKKHSTNNVSKYRAELDRLNTMFLKGRISEEYYDTEYLRLNDLIGQYEASRQSHDSVKHLQEVFVSDWKEMYKDLDKLHQKFFWRDVIRQIIVDDNMNVIDVIFL

SEQ ID NO: 8763 - protein, 450 aa, Unknown
  Description of Unknown: Integrase B8764 sequence
  PTHR30461:SF3,SM00857,G3DSA:1.10.10.2600,IPR036162,PF13408, PS51737,IPR025827,G3DSA:3.40.50.1390,IPR006119,IPR038109, SSF53041,IPR011109,PTHR30461,PS51736,cd00338, PF00239
MINCAIYPRKSKAVDNSDSMDVQIDMCRRYLDNKYGSGNYTATVYDGDYGITGHSTKKRKDFQRMMRDVSNRKIQLVVIQRYDRIARNTRDFCNLYHDMEINGCNLVSVSQQIDTTTPYGKNFMYMQASMAELEWALNSERRKDTIRYAASIGKCILPDHSTPFGYHNAVVNGVRKLVKEEQWEDAVADLFEYYRKYRNYSATARHINQQYGTKFEIQAIKRIIRSSFYYGCYKDNDNFCEPYISKNEWQDLQQKKPVIRTAGNKRTEVLFSGMIRCPECNRLMRSCQKSHRSGNVYRYYHCEYHSTKMCGFAKVKSENLIEEMLLNRVDIFLAEREAAMSDQKSEKKHSTNNVSKYRAELDRLNTMFLKGRISEEYYDTEYLRLNDLIGQYEASRQSHDSVKHLQEVFVSDWKEMYKDLDKLHQKFFWRDVIRQIIVDDNMNVIDVIFL

SEQ ID NO: 8764 - protein, 450 aa, Unknown
  Description of Unknown: Integrase B8765 sequence
  PTHR30461:SF3,SM00857,G3DSA:1.10.10.2600,IPR036162,PF13408, PS51737,G3DSA:3.40.50.1390,IPR025827,IPR006119,IPR038109, SSF53041,IPR011109,PTHR30461,Coil,PS51736, cd00338,PF00239
MINCAIYPRKSKAVDNSDSMDVQIDMCRRYLDDKYGSGNYTAKVYDGDYGITGHSTKKRKDFQRMMRDVSDRKIQLVVIQRYDRIARNTRDFCNLYHDMEINGCNLVSVSQQIDTTTPYGKNFMYMQASMAELEWALNSERRKDTIRYAASIGKSILPDHSTPFGYHNAVVNGVRRLVKEEQWEDAVADLFAYYRKYRNYSATARHINQQYGTRFEIQAIKRIIRSPFYYGCYKDNDNFCEPYISKDDWQDLQQKRPVIRTAGNKRTEVLFSGMIRCPECNRLMRSCQKSHRSGNVYRYYHCEYHSTKMCGFSKVKSENLIEEMLLNRIDTFLAEREAAMSDQKPEKKHSNNNVSKYREELDRLNTMFLKGRISEEYYDTEYLRLNDLIGQYGDSMRSHDSIKHLREVFVSDWKEMYKDLDKLHRKFFWRDVIRQIVVDDNMNVIDVIFL

SEQ ID NO: 8765 - protein, 450 aa, Unknown
  Description of Unknown: Integrase B8766 sequence
  PTHR30461:SF3,SM00857,G3DSA:1.10.10.2600,IPR036162,PF13408, PS51737,G3DSA:3.40.50.1390,IPR025827,IPR006119,IPR038109, PF07508,IPR011109,SSF53041,PTHR30461,PS51736, cd00338,PF00239
MINCAIYPRKSKAVDNSDSMDVQIDMCRRYLDDKYGSGNYTATVYDGDYGITGHSTKKRKDFQRMMRDVSDRKIQLVVIQRYDRIARNTRDFCNLYHDMEINGCNLVSVSQQIDTTTPYGKNFMYMQASMAELEWALNSERRKDTIRYAASIGKSILPDHSTPFGYHNSVVNGVRRLVKEEQWEDAVADLFEYYRKYRNYSATARHINQQYGTRFEIQAIKRIIRSPFYYGCYKDNDNFCEPYISKEDWQDLQQKKPVIRTAGNKRTEVLFSGMIRCPECNRLMRSCQKSHRSGNVYRYYHCEYHSTKMCGFSKVKSENLIEEMLLNRIDTFLAEREAAMSDQKSEKKHSTNNATKYREELDRLNTMFLKGRISEEYYDTEYLRLNDLIGQYEASRRSHDSIEHLREVFVSDWKEMYKDLDKLHRKFFWRDVIRQIIVDDNMNVIDVIFL

SEQ ID NO: 8766 - protein, 450 aa, Unknown
  Description of Unknown: Integrase B8767 sequence
  PTHR30461:SF3,SM00857,G3DSA:1.10.10.2600,IPR036162,PF13408, IPR025827,PS51737,G3DSA:3.40.50.1390,IPR006119,IPR038109, PF07508,SSF53041,IPR011109,PTHR30461,PS51736, cd00338,PF00239
MINCAIYPRKSKAVDNSDSMDVQIDMCRRYLDDKYGSGNYNATVYDGDYGITGHSTKKRKDFQRMMRDVSDRKIQLVVIQRYDRIARNTRDFCNLYHDMEINGCNLVSVSQQIDTTTPYGKNFMYMQASMAELEWALNSERRKDTIRYAASIGKSILPDHSTPFGYHNAVVNGVRRLVKEEQWEDAVADLFEYYRKYRNYSATARHINQQYGTRFEIQAIKRIIRSPFYYGCYKDNDNFCEPYISKEEWQDLQQKRPVIRTAGNKRTEVLFSGMIRCPECNRLMRSCQKSHRSGNVYRYYHCEYHSTKMCGFAKVKSENLIEEMLLNRVDTFLAEREAAMSDQKSEKKHSTNNASKYRAELDRLNTMFLKGRISEEYYDTEYLRLNDLIGQYEASRKSNDSVKHLREVFVSDWKEMYKDLDKLHRKFFWRDVIRQIIVDNNMNVIDVIFL

SEQ ID NO: 8767 - protein, 450 aa, Unknown
  Description of Unknown: Integrase B8768 sequence
  PTHR30461:SF3,IPR036162,PS51737,IPR011109,PTHR30461, PS00397,PF00239,G3DSA:1.10.10.2600,IPR006119,SSF53041, cd00338,SM00857,IPR025827,IPR038109,PS51736, IPR006118,PF13408,G3DSA:3.40.50.1390,Coil
MDIIRAALYIRVSTEEQVREGYSVEAQRDNLKRYAKNKGYSVVGVYADEGITARKKYTNRKEFMRLLDDVEAGKIDVILFIKLDRWFRNVGDYYKIQEILERNNVGWTATTENYDTTTANGRLYVNIRLAVAQDESDRTSERIKFVFEKKVADGEAIWGLAPFGYKVENKKVVIDEDLYPIVVDTFEAFIKLRSVNSVCVYINEKYGTHYSYNIFKRILRDNTAFYYGTYRNNTSYCPPYLSKAQYEIIKEISDSTTTIRSSGKKYDYIFSGMLECGYCGKRLVGGGSTRRDNGKAYYGYRCTGYRGGTCSNKISELKIESLLFAALEDEVKKYKVDYEIKQKKKKPAYINKSSIEKKIARLRNLYLNEVIEIDDYTVEYRKLQDKLKEYEESINKVEDNKDFTALDNLLKSDFKKIYNELSNIDKRTLWHSVIKRIIIKDKQIQEIIFK

SEQ ID NO: 8768 - protein, 450 aa, Unknown
  Description of Unknown: Integrase B8769 sequence
  PTHR30461:SF3,SM00857,G3DSA:1.10.10.2600,IPR036162,PF13408, IPR025827,G3DSA:3.40.50.1390,PS51737,IPR006119,IPR038109, SSF53041,IPR011109,PTHR30461,PS51736,cd00338, PF00239
MIRCAIYDRVSTDLQVEKGLSLATQKDDLTQYAKDHGYVIVGYYEDEGITARKKMKNRRDLMRLLDDVKANKVDLILVTKLDRWFRNVKDYHNTQEILDAHHCNWKTIYEDYDSSTADGQLKINIMLAVAQNECDRTSERIKAVFRHKEAQGKVISGRMAPYGYKVVDGYVQKDESVSHIVVSAYERYFKTFSIRDVIRYLNMKYGENAPSDNVIDRLFKNEKYSGSFRGNPNWCEPYLTREQYEQIHTIGTTKQNTGQYEPYIFTSLIKCPICGNNFTGYRKKQNLKNGGQSIYIKYRCGNKFNRHGGASILEKTVENYLIENVLIFLQRDIEKLKSMAASEQESGNNAKVIHDEMGRLNLMYQKGRITDSYYESQYELLEKKLMELSTVCDIENTIEKRENLVSFFQGDWINLYRSLDAENKKIFWKKYIKDIQVDPETRKLCGFHFY

SEQ ID NO: 8769 - protein, 450 aa, Unknown
  Description of Unknown: Integrase B8770 sequence
  PTHR30461:SF3,SM00857,G3DSA:1.10.10.2600,IPR036162,PF13408, IPR025827,PS51737,G3DSA:3.40.50.1390,IPR006119,IPR038109, PF07508,IPR011109,SSF53041,PTHR30461,PS51736, cd00338,PF00239
MINCAIYPRKSKAVDNSDSMDVQIDMCRRYLDDKYGSGNYTATVYDGDYGITGHSTKKRKDFQRMMRDVSDRKIQLVVIQRYDRIARNTRDFCNLYHDMEINGCNLVSVSQQIDTTTPYGKNFMYMQASMAELEWALNSERRKDTIRYAASIGKSILPDHSTPFGYHNAVVNGVRRLVKEEQWEDAVADLFEYYRKYRNYSATARYINQQYGTNFEIQAIKRIIRSPFYYGCYKDNDNFCEPYISKEEWQDLQQKRPVIRTAGNKRTEVLFSGMIRCPECNRLMRSCQKSHRSGNVYRYYHCEYHSTKMCGFARVKSENLIEEMLLNRVDTFLAEREAAMSDQKSEKKHSTNNVSKYRAELDRLNTMYLKGRISEEYYDTEYLRLNDLIWQYEASRQSHDSVKHLQEVFVSDWKEIYKDLDKLHRKFFWRDVIRQIIVDDNMNVIDVIFL

SEQ ID NO: 8770 - protein, 450 aa, Unknown
  Description of Unknown: Integrase B8771 sequence
  PTHR30461:SF3,SM00857,G3DSA:1.10.10.2600,IPR036162,PF13408, IPR025827,G3DSA:3.40.50.1390,PS51737,IPR006119,IPR038109, PF07508,IPR011109,SSF53041,PTHR30461,PS51736, cd00338,PF00239
MINCAIYPRKSKAVDNSDSMDVQIDMCRRYLDDKYGSGNYTATVYDGDYGITGHSTKKRKDFQRMMRDVSDRKIQLVVIQRYDRIARNTRDFCNLYHDMEINGCNLVSVSQQIDTTTPYGKNFMYMQASMAELEWALNSERRKDTIRYAASIGKSILPDHSTPFGYHNAVVNGVRRLVKEEQWKDAVADLFEYYRKYRNYSATARHINQQYGTRFEIQAIKRIIRSPFYYGCYKDNDNFCEPYISKEDWQDLQQKRPVIRTAGNKRTEVLFSGMIRCPECNRLMRSCQKSHRSGNVYRYYHCEYHSARMCGFVKVKSENLIEEMLLNRVDTFLAEREAAMSDQKSEKKHSTNNASKYRAELDRLNTMFLKGRISEEYYDTEYLRLNDLIGQYEASRQSHDSVKHLQEVFVSDWKEMYKDLDKLHRKFFWRDVIRQIIVDDNMNVIDVIFL

SEQ ID NO: 8771 - protein, 450 aa, Unknown
  Description of Unknown: Integrase B8772 sequence
  PTHR30461:SF3,SM00857,G3DSA:1.10.10.2600,IPR036162,PF13408, IPR025827,G3DSA:3.40.50.1390,PS51737,IPR006119,IPR038109, IPR011109,SSF53041,PTHR30461,PS51736,cd00338, PF00239
MIRCAIYDRVSTDLQVEKGLSLATQKDDLTQYAKDHGYVIVGYYEDEGITARKKMKNRKDLMRLLDDVKANKVDLILVTKLDRWFRNVKDYHNTQEILDAHHCNWKTIYEDYDSSTADGQLKINIMLAVAQNECDRTSERIKAVFRHKEAQGKVISGRMAPYGYKVVDGYVQKDESVSHIVVSAYERYFKTFSIRDVIRYLNMKYGENAPSDNVIDRLFKNEKYSGSFRGNPNWCEPYLTREQYEQIRTIGTTKQNTGQYEPYIFTSLIKCPICGNNFTGYRKKQNLKNGGQSIYIKYRCGNKFNRHGGASILEKTVENYLIENVLIFLQRDIEKLKSMAASEQESGNNAKVIHDEMGRLNLMYQKGRITDSYYESQYELLEKKLMELSTVCDIENTIEKRENLVSFFQGDWINLYRSLDAENKKIFWKKYIKDIQVDPETRKLCGFHFY

SEQ ID NO: 8772 - protein, 450 aa, Unknown
  Description of Unknown: Integrase B8773 sequence
  PTHR30461:SF3,SM00857,G3DSA:1.10.10.2600,IPR036162,PF13408, IPR025827,PS51737,G3DSA:3.40.50.1390,IPR006119,IPR038109, IPR011109,SSF53041,PTHR30461,PS51736,cd00338, PF00239
MIRCAIYDRVSTDLQVEKGLSLATQKDDLTQYAKDHGYVIVGYYEDEGITARKKMKNRKDLMRLLDDVKANKVDLILVTKLDRWFRNVKDYHNTQEILDAHHCNWKTIYEDYDSSTADGQLKINIMLAVAQNECDRTSERIKAVFRHKEAQGKVISGRMAPYGYKVVEGYVQKDESVSHIVVSAYERYFKTFSIRDVIRYLNMKYGENAPSDNVIDRLFKNEKYSGSFRGNPNWCEPYLTREQYEQIRTIGTTKQNTGQYEPYIFTSLIKCPICGNNFTGYRKKQNLKNGGQSIYIKYRCGNKFNRHGGASILEKTVENYLIENVLIFLQRDIEKLKSMAASEQESGNNAKVIHDEMGRLNLMYQKGRITDSYYESQYELLEKKLMELSTVCDIENTIEKRQNLVSFFQGDWINLYRSLDAENKKIFWKKYIKDIQVDPETRKLCGFHFY

SEQ ID NO: 8773 - protein, 450 aa, Unknown
  Description of Unknown: Integrase B8774 sequence
  PTHR30461:SF3,SM00857,G3DSA:1.10.10.2600,IPR036162,PF13408, PS51737,G3DSA:3.40.50.1390,IPR025827,IPR006119,IPR038109, PF07508,IPR011109,SSF53041,PTHR30461,PS51736, cd00338,PF00239
MINCAIYPRKSKAVDNSDSMDVQIDMCRRYLDDKYGSENYTATVYDGDYGITGHSTKKRKDFQRMMRDVSDRKIQLVVIQRYDRIARNTRDFCNLYHDMEVNGCNLVSVSQQIDTTTPYGKNFMYMQASMAELEWALNSERRKDTIRYAASIGKSILPDHSTPFGYHNAVVNGVRRLVKEEQWEDAVADLFEYYRKFRNYSATARHINQQYGTKFEIQAIKRIIRSPFYYGSYKDNDNFCEPYISKEDWQDLQQKRPVIRTAGNKRTEVLFSGMIRCPECNRLMRSCQKSHRSGNVYRYYHCEYHSTKMCGFAKVKSENLIEEMLLNRVDTFLAEREAAMSDQKSEKKHSTNNVSKYRAELDRLNTMFLKGRISEEYYDTEYLRLNDLIGQYEASRQSHDSVKHLQEVFVSDWKEMYKDLDKLHQKFFWRDVIRQIIVDDNMNVIDVIFL

SEQ ID NO: 8774 - protein, 450 aa, Unknown
  Description of Unknown: Integrase B8775 sequence
  PTHR30461:SF3,SM00857,G3DSA:1.10.10.2600,IPR036162,PF13408, IPR025827,G3DSA:3.40.50.1390,PS51737,IPR006119,IPR038109, PF07508,IPR011109,SSF53041,PTHR30461,PS51736, cd00338,PF00239
MINCAIYPRKSKAVDNSDSMDVQIDMCRRYLDDKYGSGNYTATVYDGDYGITGHSTKKRKDFQRMMRDVSDRKIQLVVIQRYDRIARNTRDFCNLYHDMEINGCNLVSVSQQIDTTTPYGKNFMYMQASMAELEWALNSERRKDTIRYAASIGKSILPDHSTPFGYHNAVVNGVRRLVKEEQWEDAVADLFEYYRKYRNYSATARYINQQYGTNFEIQAIKRIIRSHFYYGCYKDNDNFCEPYISKEDWQDLQQKRPVIRTEGNKRTEVLFSGMIRCPECNRLMRSCQKSHRSGNVYRYYHCEYHSTKMCGFAKVKSENLIEEMLLNRVDTFLAEREAAMSDQKSEKKHSTNNVSKYRAELDRLNTMFLKGRISEEYYDTEYLRLNDLIGQYEASRQSHDSVKHLQEVFVSDWKEMYKDLDKLHRKFFWRDVIRQIVVDDNMNVIDVIFL

SEQ ID NO: 8775 - protein, 450 aa, Unknown
  Description of Unknown: Integrase B8776 sequence
  SM00857,G3DSA:1.10.10.2600,IPR036162,PF13408,PS51737, G3DSA:3.40.50.1390,IPR025827,IPR006119,IPR038109,PF07508, IPR011109,SSF53041,PF00239,PTHR30461,PS51736, Coil,cd00338
MINCAIYPRKSKAVDNSDSMDVQIDMCRRYLDDKYGSGNYTATVYDGDYGITGHSTKKRKDFQRMMRDVSDRKIQLVVIQRYDRIARNTRDFCNLYHDMEINGCNLVSVSQQIDTTTPYGKNFMYMQASMAELEWALNSERRKDTIRYAASIGKSILPDHSTPFGYHNAVVNGVRRLVKEEQWEDAVADLFEYYRKYRNYSATARHINQQYGTRFEIQAIKRIIRSPFYYGCYKDNDNFCEPYISKDDWQDLQQKRPVIRTAGNKRTEVLFSGMIRCPECNRLMRSCQKSHRSGNVYRYYHCEYHSARMCSFARVKSENLIEEMLLNRVDTFLAEREAAMSDQKSEKKHLTNNATKYREELDRLNTMFLKGRISEEYYDTEYLRINDLIGQYGDSRRSHDSIKHLRDVFVSDWKEMYKDLDKLHRKFFWRDVIRQIIVDDNMNVIDVIFL

SEQ ID NO: 8776 - protein, 450 aa, Unknown
  Description of Unknown: Integrase B8777 sequence
  PTHR30461:SF3,SM00857,G3DSA:1.10.10.2600,IPR036162,PF13408, IPR025827,G3DSA:3.40.50.1390,PS51737,IPR006119,IPR038109, SSF53041,IPR011109,PTHR30461,PS51736,cd00338, PF00239
MIRCAIYDRVSTDLQVEKGLSLATQKDDLTQYAKDHGYVIVGYYEDEGITARKKMKNRKDLMRLLDDVKANKVDLILVTKLDRWFRNVKDYHNTQEILDAHHCNWKTIYEDYDSSTADGQLKINIMLAVAQNECDRTSERIKAVFRHKESQGKVISGRMAPYGYKVVDGYVQKDESVSHIVVSAYERYFKTFSIRDVIRYLNMKYGENAPSDNVIDRLFKNEKYSGSFRGNPNWCEPYLTREQYEQIRTIGTTKQNTGQYEPYIFTSLIKCPICGNNFTGYRKKQNLKNGGQSIYIKYRCGNKFNRHGGASILEKTVENYLIENVLIFLQLDIQKLKSMAASEQESGNNAKVIHDEMGRLNLMYQKGRITDSYYESQYELLEKKLMELSTVCDIENTIEKRQNLVSFFQGDWINLYRSLDAENKKIFWKKYIKDIQVDPETRKLCGFHFY

SEQ ID NO: 8777 - protein, 450 aa, Unknown
  Description of Unknown: Integrase B8778 sequence
  PTHR30461:SF3,SM00857,G3DSA:1.10.10.2600,IPR036162,PF13408, PS51737,G3DSA:3.40.50.1390,IPR025827,IPR006119,IPR038109, PF07508,IPR011109,SSF53041,PTHR30461,Coil, PS51736,cd00338,PF00239
MINCAIYPRKSKAVDNSDSMDVQIDMCRRYLDDKYGSGNYTATVYDGDYGITGHSTKKRKDFQRMMRDVSDRKIQLVVIQRYDRIARNTRDFCNLYHDMEINGCNLVSVSQQIDTTTPYGKNFMYMQASMAELEWALNSERRKDTIRYAASIGKSILPNHSTPFGYHNAVVNGVRRLVKEEQWEDAVADLFEYYRKYRNYSATARHINQQYGTNFEIQAIKRIIRSPFYYGCYKDNDNFCEPYISKEEWKNLQQKKPVIRTAGNKRTEVLFSGMIRCPECNRLMRSCQKSHRSGNVYRYYHCEYHSTKMCGFSKVKSENLIEEMLLNRIDTFLAEREAAMSDQKPEKKHSNNNVSKYREELDRLNTMFLKGRISEEYYDTEYLRLNDLIGQYEASRRSHDSIEHLQEVFVSDWKEMYKDLDKLHRKFFWRDVIRQIIVDDNMNVIDVIFL

SEQ ID NO: 8778 - protein, 450 aa, Unknown
  Description of Unknown: Integrase B8779 sequence
  PTHR30461:SF3,SM00857,G3DSA:1.10.10.2600,IPR036162,PF13408, IPR025827,PS51737,G3DSA:3.40.50.1390,IPR006119,IPR038109, PF07508,IPR011109,SSF53041,PTHR30461,PS51736, cd00338,PF00239
MINCAIYPRKSKAVDNSDSMDVQIDMCRRYLDDKYGSGNYTATVYDGDYGITGHSTKKRKDFQRMMRDVSDRKIQLVVIQRYDRIARNTRDFCNLYHDMEINGCNLVSVSQQIDTTTPYGKNFMYMQASMAELEWALNSERRKDTIRYAASIGKSILPDHSTPFGYHNAVVNGVRRLVKEEQWKDAVADLFEYYRKYRNYSATARHINQQYGTRFEIQAIKRIIRSPFYYGCYKDNDNFCEPYISKEDWQDLQQKRPVIRTAGNKKTEVLFSGMIRCPECNRLMRSCQKSHRSGNVYRYYHCEYHSARMCAFARVKSENLIEEMLLNRVDTFLAEREAAMSDQKSEKKHSTNNVSKYRAELDRLNTMFLKGRISEEYYDTEYLRLNDLIGQYEASRQSHDSVKHLREVFVSDWKEMYKDLDKLHRKLFWRDVIRQIIVDDNMNVIDVIFL

SEQ ID NO: 8779 - protein, 450 aa, Unknown
  Description of Unknown: Integrase B8780 sequence
  PTHR30461:SF3,SM00857,G3DSA:1.10.10.2600,IPR036162,PF13408, IPR025827,G3DSA:3.40.50.1390,PS51737,IPR006119,IPR038109, IPR011109,SSF53041,PTHR30461,PS51736,cd00338, PF00239
MIRCAIYDRVSTDLQVEKGLSLATQKDDLTQYAKDHGYVIVGYYEDEGITARKKMKNRKDLMRLLDDVKANKVDLILVTKLDRWFRNVKDYHNTQEILDAHHCNWKTIYEDYDSSTADGQLKINIMLAVAQNECDRTSERIKAVFRHKEAQGKVISGRMAPYGYKVVDGYVQKDESVSHIVVSAYERYFKTFSIRDVIRYLNMKYGENAPSDNVIDRLFKNEKYSGSFRGNPNWCEPYLTREQYEQIRTIGTTKQNTGQYEPYIFTSLIKCPICGNNFTGYRKKQNLKNGGQSIYIKYRCGNKFNRHGGASILEKTVENYLIENVLIFLQRDIEKLKSMAASEQESGNNAKVIHDEMGRLNLMYQKGRITDSYYESQYELLEKKLMELSTVCDIENTIEKRENLVSFFQGDWINLYRSLDAENKKIFWKKYIKAIQVDPETRKLCGFHFY

SEQ ID NO: 8780 - protein, 449 aa, Unknown
  Description of Unknown: Integrase B8781 sequence
  PTHR30461:SF3,IPR036162,PS51737,IPR011109,PTHR30461, PS00397,PF00239,G3DSA:1.10.10.2600,IPR006119,SSF53041, cd00338,SM00857,IPR025827,IPR038109,PS51736, IPR006118,PF13408,G3DSA:3.40.50.1390,PF07508
MLKRAALYIRVSTDQQAKHGDSLDAQIATLKDYVSTQDNLTIIDTYIDDGISGQKLYRDEFQRLLEDIKKNRIDIILFTKLDRWFRNLRHYLNIQEILDNSGVTWLAVSQPFFNTDTAYGRSFVNQSMSFAELEAQMASERIKAVFENKIRKGEVVTGSVPFGYKICDKKLIPNENAPIAKDIFKHYSIHNSIRLTVEYLFNEYDITRSSRTIKHMLRNRKYIGEVSGNKNYCPPIVDKETFEKVQNLLDKNISSIAKRTYIFSGLVVCSCCGKKMTGRYRKRKYIKKDGTVMYYTKKVYRCNGNTYKRNKCPNKINIPEEILEEYLLNNIKADAENFEAKQKKIAVSAPEKNNNSKVLKKIERLKKAYLNEVISLDEYKKDRKELEQMIVQVKPKETIVFKSNWFKKNIESTYRDFDEEEKRFVWRSVLKNLIVDPHGKITINFLTKN

SEQ ID NO: 8781 - protein, 449 aa, Unknown
  Description of Unknown: Integrase B8782 sequence
  IPR036162,PS51737,IPR011109,PTHR30461,PS00397, PF00239,G3DSA:1.10.10.2600,IPR006119,SSF53041,cd00338, SM00857,IPR025827,IPR038109,PS51736,IPR006118, PF13408,G3DSA:3.40.50.1390,PF07508,Coil
MSKLQVAYLRVSTETQTEKYGLDMQKQKIMDYCEKHGITIDKWYIDGGYSGSKLDRPEIQELLNHAKSGIIDTVYIYKLDRMSRDVIDTLNLFYKILPGYGVKVISMTEELRTENPMDRMMLTMNAAMNQYEREVIRMRMSAGMLERVKKGYWMGGGRTPWGYYYDRNDGILHINEQQASVVRKVYDLYLNGFSCENISKILGFKGEPIVKGILKRKSNIGLIEYKGKVYKGRHEPIIDEKVFWKVQDEMKKRHTNAYLSSGHLLTGLCHCGYCGARMRYQKWTAKTMKLVCYSHYQSSKAYMRKSDCCKNHPVDAYKIEAEVEECFKNFAININEYTESHQDSTEILVESLKKSDTKVRRLYGLYADNPSENLLDVIKTEEENIKKLKKKLDDAKTEKRCDPTKISEIRHMSDIWDSLTLKEKNKILKQCVEDIVVDKDEITIRFVTL

SEQ ID NO: 8782 - protein, 449 aa, Unknown
  Description of Unknown: Integrase B8783 sequence
  IPR036162,PS51737,IPR011109,PTHR30461,PS00397, PF00239,G3DSA:1.10.10.2600,IPR006119,SSF53041,cd00338, SM00857,IPR025827,IPR038109,PS51736,IPR006118, PF13408,G3DSA:3.40.50.1390,PF07508,Coil
MRKLNVAYLRVSTEAQTEKYGLDVQKQKILDHCEKKGVVIDKWYIDGGYSGSKLDRPKIQELLDDAEKGLIGTVFIYKLDRMSRDVIDTLNLFYKVLPKYGVKVVSMTEDLRTEKPMDRVMLTMNAAMNQYEREVIRMRMSAGMLERVKNGLWMGGGRIPWGYYYDRNDGILHVDEEQAKMVRNAYKLYLEGYSCDKIATMLGFRGERIVTQILKRKSNIGLIEYKGNVYQGNHEPIVDEKLFWDVQDAINKRKSNSHISNNHLLTGLCYCGYCGSKMRYQKWGRSGHRLVCYSHYKSGKPYMRKVDSCISKPERADFLENEIEDAFKKFAIHVDETENECLDQSIILERTIKSEHERLKKMYTLYISCMSDDLLELIKEKEESIKKLQKQLEENEREKGCDVEKIEEIKQMADVWDSLTVKEKNRILKECVEKIIIKGSDIEVSFVTF

SEQ ID NO: 8783 - protein, 449 aa, Unknown
  Description of Unknown: Integrase B8784 sequence
  PTHR30461:SF3,SM00857,IPR036162,PF13408,IPR025827, PS51737,G3DSA:3.40.50.1390,IPR006119,IPR011109,SSF53041, PTHR30461,PS51736,cd00338,PF00239
MGILRVGLYERVSTTEQSLNGYSIETQISNLEEYAKKNKMKIVDHYTDEGISGAKPPLKRPALKRLLEDVKAGKIDMILFTKLDRWFRSVKEYFKVQEILDKYKVQWKAIQEDYDTSTANGQMSITIFLAVAQNERDRTAERIKVVLEHKRKNKEACFGGNAIPLGYMKEPDEDGVMRLVKDPETQQAVQEFWDIMIESNNLNKAIRHMVNVYGINKDWKSWMRMTRSDFYCGIHRGVQDFCEPYVTPEDFLRLHEKRPQKATPTGRTYLLRGLIRCPECGNKLCGDADTRKSKVYKTYRCAYRARGCSNHGSYSELKLEKQLLTRLDEFLRDEIALAEIELSKPKPKPSVDVKALKEKQRRLTVAYMAGNKSDDEYLQEDRELKALIEKAEKTAPPEPRNIEPLKELLNSDFRSLYDSLIEEEKQLFWARLIQEIKLDGKTIKRVIFF

SEQ ID NO: 8784 - protein, 449 aa, Unknown
  Description of Unknown: Integrase B8785 sequence
  PTHR30461:SF3,IPR036162,PS51737,IPR011109, PTHR30461,PS00397,PF00239,G3DSA:1.10.10.2600, IPR006119,SSF53041,cd00338,SM00857,IPR025827,IPR038109 ,PS51736,IPR006118,PF13408,G3DSA:3.40.50.1390,PF07508
MLKRAALYIRVSTDQQAKHGDSLDAQIATLKDYVSTQDNLTIIDTYIDDGISGQKLYRDEFQRLLEDIKKNRIDIILFTKLDRWFRNLRHYLNIQEILDNSGVTWLAVSQPFFNTDTAYGRSFVNQSMSFAELEAQMASERIKAVFENKIRKGEVVTGSVPFGYKICDKKLIPNENAPIAKDIFRHYSIHNSIRLTVEYLFNEYDITRSSRTIKHMLRNRKYIGEVSGNKNYCPPIVDKETFEKVQNLLDKNISSIAKRTYIFSGLVVCSCCGKKMTGRYRKRKYIKKDGTVMYYTKKVYRCNGNTYKRNKCPNKINIPEEILEEYLLNNIKADAENFEAKQKKIAVSAPEKNNNSKILKKIERLKKAYLNEVISLDEYKKDRKELEQMIVQVKPKETIVFKSNWFNKNIESTYRDFDEEEKRFVWRSVLKNLLVDPHGKITINFLTKN

SEQ ID NO: 8785 - protein, 449 aa, Unknown
  Description of Unknown: Integrase B8786 sequence
  IPR036162,PS51737,IPR011109,PTHR30461,PS00397, PF00239,G3DSA:1.10.10.2600,IPR006119,SSF53041,cd00338, SM00857,IPR025827,IPR038109,PS51736,IPR006118, PF13408,G3DSA:3.40.50.1390,PF07508,Coil
MSKLQVAYLRVSTETQTEKYGLDMQKQKIMDYCEKHGITVDKWYIDGGYSGSKLDRPKIQELLDHAKSGIIDTVYIYKLDRMSRDVIDTLTLFYKTLPSYGVKVISMTEELRTENPMDRMMLTMNAAMNQYEREVIRMRMSSGMVERVKNGLWPGGGNIPVGYHYDRNDGILHIDADKAALVRDAFGLYLKGYSCNRIANILGFSCEKAVDNALKRKTYIGLIEYKGNVYKGKHEPIIDEEIFYMAQDMRKKRSTNAHVSNGYLLSGLCYCGICGARMRYHKWDGIKPRIICYSQYSGKSYMIRDKNCINIKAYAEIIEADVEDCFKKFAINVKANTSQKDDPVAKLKVAIRKENEHVKRLYVLYAENPSKNLMDVIKETEKKIEKLNKQLLTENDRKEPDNTQKIQKIKHVSDVWDTLSVKEKNRVLKECIERIVINGNDIEIRFVTF

SEQ ID NO: 8786 - protein, 449 aa, Unknown
  Description of Unknown: Integrase B8787 sequence
  IPR036162,PS51737,IPR011109,PTHR30461,PS00397, PF00239,G3DSA:1.10.10.2600,IPR006119,SSF53041,cd00338, SM00857,IPR025827,IPR038109,PS51736,IPR006118, PF13408,G3DSA:3.40.50.1390,PF07508,Coil
MSKLQVAYLRVSTETQTEKYGLDMQKQKIMDYCEKHGITIDKWYIDGGYSGSKLDRPEIQELLNHAKSGIIDTVYIYKLDRMSRDVIDTLNLFYKILPGYGVKVISMTEELRTENPMDRMMLTMNAAMNQYEREVIRMRMSAGMLERVKKGYWMGGGRTPWGYYYDRNDGILHINEQQASVVRKVYDLYLNGFSCENISKILGFKGEPIVKGILKRKSNIGLIEYKGKVYKGRHEPIIDEKVFWKVQDEMKKRHTNAYLSSGHLLTGLCHCGYCGARMRYQKWTAKTMKLVCYSHYQSSKAYMRKSDCCKNHPVDAYKIEAEVEECFKNFAININEYTESHQDSTEILVESLKKSDTKVRRLYGLYADNPSENLLDVIKAEEENIKKLKKKLDDAKTEKRCDPTKIAEIRHMSDVWDSLTLKEKNKILKQCVEDIVVDKDEITIRFVTL

SEQ ID NO: 8787 - protein, 449 aa, Unknown
  Description of Unknown: Integrase B8788 sequence
  PTHR30461:SF3,IPR036162,PS51737,IPR011109,PTHR30461, PS00397,PF00239,G3DSA:1.10.10.2600,IPR006119,SSF53041, cd00338,SM00857,IPR025827,IPR038109,PS51736, IPR006118,PF13408,G3DSA:3.40.50.1390,PF07508
MLKRAALYIRVSTDQQAKHGDSLDAQIATLKDYVSTQDNLTIIDTYIDDGISGQKLYRDEFQRLLEDIKKNRIDIILFTKLDRWFRNLRHYLNIQEILDNSGVTWLAVSQPFFNTDTAYGRSFVNQSMSFAELEAQMASERIKAVFENKIRKGEVVTGSVPFGYKICDKKLIPNENAPIAKDIFKHYSIHNSIRLTVEYLFNEYDITRSSRTIKHMLRNRKYIGEVSGNKNYCPPIVDKETFEKVQNLLDKNISSIAKRTYIFSGLVVCSCCGKKMTGRYRKRKYIKKDGTVMYYTKKVYRCNGNTYKRNKCPNKINIAEEILEEYLLNNIKADAENFEAKQKKIAVSAPEKNNNSKILKKIERLKKAYLNEVISLDEYKKDRKELEQMMIQVKPKETIVFKSNWFNKNIESTYRDFDEEEKRFVWRSVLKNLIVDPHSKITINFLTKN

SEQ ID NO: 8788 - protein, 449 aa, Unknown
  Description of Unknown: Integrase B8789 sequence
  PTHR30461:SF3,IPR036162,PS51737,IPR011109,PTHR30461, PS00397,PF00239,G3DSA:1.10.10.2600,IPR006119,SSF53041, cd00338,SM00857,IPR025827,IPR038109,PS51736, IPR006118,PF13408,G3DSA:3.40.50.1390,PF07508
MLKRAALYIRVSTDQQAKHGDSLDAQIATLKDYVSTQDNLTIIDTYIDDGISGQKLYRDEFQRLLEDIKKNRIDIILFTKLDRWFRNLRHYLNIQEILDNSGVTWLAVSQPFFNTDTAYGRSFVNQSMSFAELEAQMASERIKAVFENKIRKGEVVTGSVPFGYKICDKKLIPNENAPIAKDIFKHYSIHNSIRLTVEYLFNEYDITRSSRTIKHMLRNRKYIGEVSGNKNYCPPIVDKETFEKVQNLLDKNISSIAKRTYIFSGLVVCSCCGKKMTGRYRKRKYIKKDGTVMYYTKKVYRCNGNTYKRNKCPNKINIAEEILEEYLLNNIKADAENFEAKQKKIAVSAPEKNNNSKILKKIERLKKAYLNEVISLDEYKKDRKELEQMIVQVKPKETIVFKSNWFNKNIESTYHDFDEEEKRFVWRSVLKNLIVDPHGKITINFLTKN

SEQ ID NO: 8789 - protein, 449 aa, Unknown
  Description of Unknown: Integrase B8790 sequence
  PTHR30461:SF3,SM00857,IPR006118,IPR036162,PF13408, PS51737,G3DSA:3.40.50.1390,IPR025827,IPR006119,IPR011109, SSF53041,PF00239,PTHR30461,PS00397,PS51736, Coil,cd00338
MSGDVIRAAGYIRVSTAEQALRGLSLEAQEAEIRRYAAQRNIRLEKIYVDKGITARKQLHRRVAFTQLMHAVDAGELDLIIVMRLDRWFRNVYDYHRMMNEHLIPHGVNWCAVKEEYDTTTTNGRLMINLRLSIAEQECDTDGDRIRDVQQNLIAKGCWPFGGAPLGYRIENKRLVKDPETEPQVSFFFQHMLAHGSLRGALFAMNERFGTGYEYRRAQDLSRKSVYYGTYGENTSFCPAYITFEEHERIRALAEKNVRVWSSPTAWPHLFSGLLICDDCHRRLNAQTIRRPSGIYTTYRCSHSTDNHGCVNNRCISEKVIEAYLLDYLNTHLKDYLVEIEVVQKKAAAQPDNTEKIRAKQERVKTLFINNLIDLAEYKSRMESLEQQIVRPTAPPAPQNTQKLKEILESDVLRLYPELSREEKRSFWRGFIKELHIYRGTIQGPPIFW

SEQ ID NO: 8790 - protein, 449 aa, Unknown
  Description of Unknown: Integrase B8791 sequence
  PTHR30461:SF3,SM00857,IPR036162,PF13408,IPR025827, PS51737,G3DSA:3.40.50.1390,IPR006119,IPR011109,SSF53041, PTHR30461,PS51736,cd00338,PF00239
MGILRVGLYERVSTTEQSLNGYSIETQISNLEEYAKKNKMKIVDHYTDEGISGAKPPLKRPALKRLLEDVKAGKIDMILFTKLDRWFRSVKEYFKVQEILDKYKVQWKAIQEDYDTSTANGQMSITIFLAVAQNERDRTAERIKVVLEHKRKNKEACFGGNAIPLGYMKEPDEDGVMRLVKDPETQQAVQEFWDIMIESNNLNKAIRHMVNVYGINKDWKSWMRMTRSDFYCGIHRGVQDFCEPYVTPEDFLRLHEKRPQKATPTGRTYLLRGLIRCPECGNKLCGDADTRKSKVYKTYRCAYRARGCSNHGSYSELKLEKQLLTRLDEFLRDEIALAEIELSKPKPKPSVDVKALKEKQRRLTVAYMAGNKSDDEYLQEDRELKVLIEKAEKTAPPEPRNIEPLKELLNSDFRSLYEGLIEEEKQLFWARLIQEIKLDGKTIKRVIFF

SEQ ID NO: 8791 - protein, 449 aa, Unknown
  Description of Unknown: Integrase B8792 sequence
  PTHR30461:SF3,cd00338,SM00857,IPR006118, IPR036162,PF13408,IPR025827,G3DSA:3.40.50.1390, PS51737,IPR006119,IPR011109,SSF53041, PTHR30461,PS00397,PS51736,Coil,PF00239
MSAPVVRAAGYIRVSTAEQALRGLSLEAQEAEIRRWAAEHHVRLENIYVDKGITARKQLHRRAAFMQMMQAVDAGQIDLILVMRLDRWFRNVYDYHKMMNEHLIPHGVNWCAVKEDYDTTTTNGRLMINLRLSIAEQECDTDADRIRDVQQNMVAKGRWPFGAAPLGYRIEEKRLVKDPHTQPQVEFFFRHMLANGSLRGALFAMNDRFGTSYEYRRAQDLSRKSVYYGVYGENQSFCPAYITLEEHQRIRSLAEKNVRVWSSPTAWPHLFSGLLICDDCHRRLNAQTIRRPSGVYTTYRCSHSTDNHGCANNRSISEKVIEEYLLNYVREDLAQYIVQMEVSQKKAAALPDNTAKIRAKQERVKTLFINNFIDLEEYKRRIQELEGQIIRRPPSEKTKDVSKLKQLLEDGALKMYPTLTREEKRAFWRGFLKELHIYRGTIQGPPIFL

SEQ ID NO: 8792 - protein, 449 aa, Unknown
  Description of Unknown: Integrase B8793 sequence
  PTHR30461:SF3,cd00338,SM00857,G3DSA:1.10.10.2600,IPR036162, PF13408,IPR025827,G3DSA:3.40.50.1390,IPR006119,IPR038109, SSF53041,PTHR30461,PS51736,Coil,PF00239
MLRGFLYARISVEERNQKKYSIPAQIARMEEHCRVNHIKICDTFIDDGISAATIKKRKELCRMLDSLDDADIVLFTQLDRFSRNVLDANRLLEQFEKHNVSFRAVDEDDIDTSTADGRFIFNLKVNLAERERIKTSERIKAVNEFKRKNKQVTFGVGPTGYEVKDHKWVTNEKATMIYDLFDTYIKTGSRQAAREMLARKYDYDCEPSTVSHFLSQKCYTGEYKGIPDYYPQIITIEMWKEAERLRKEMCVRNRAVGIVYIFRGLLRCKYCGHIMTGAFPLSKPGATRKAVYRCARKANNIGEKIFCTEIHQIREEVVEAYLLENVEKQIKEYMIEIAQEESKKQEKKIDAASIKNKLTKIKDLYLADMIQLSDYEKEYKSLTKQLEEVDKQKTKKAAPDYKPFKAVLSGFLENEYKDFTNEQKRYFWQSLIDYIEVDKQKNMTIYFRR

SEQ ID NO: 8793 - protein, 449 aa, Unknown
  Description of Unknown: Integrase B8794 sequence
  IPR036162,PS51737,IPR011109,PTHR30461, PS00397,PF00239,G3DSA:1.10.10.2600,IPR006119, SSF53041,cd00338,SM00857,IPR025827,IPR038109,PS51736 ,IPR006118,PF13408,G3DSA:3.40.50.1390,PF07508,Coil
MSKLQVAYLRVSTETQTEKYGLDMQKQKIMDYCEKHGITIDKWYIDGGYSGSKLDRPEIQELLNHAKSGIIDTVYIYKLDRMSRDVIDTLNLFYKILPGYGVKVISMTEELRTENPMDRMMLTMNAAMNQYEREVIRMRMSAGMLERVKKGYWMGGGRTPWGYYYDRNDGILHINEQQASVVRKVYDLYLNGFSCENISKILGFKGEPIVKGILKRKSNIGLIEYKGKVYKGRHEPIIDEKVFWKVQDEMKKRHTNAYLSSGHLLTGLCHCGYCGARMRYQKWTAKTMKLVCYSHYQSSKAYMRKSDCCKNRPVDAYKVEAEVEECFKNFAININEYTESHQDSTEILVETLKKSDTKVRRLYGLYADNPSENLLDVIKAEEENIKKLKKKLDDAKTEKRCDPTKIAEIRHMSDVWDSLTLKEKNKILKQCVEDIVVDKDEITIRFVTL

SEQ ID NO: 8794 - protein, 449 aa, Unknown
  Description of Unknown: Integrase B8795 sequence
  IPR036162,PS51737,IPR011109,PTHR30461,PS00397, PF00239,G3DSA:1.10.10.2600,IPR006119,SSF53041,cd00338, SM00857,IPR025827,IPR038109,PS51736,IPR006118, PF13408,G3DSA:3.40.50.1390,PF07508,Coil
MRKLNVAYLRVSTEAQTEKYGLDVQKQKILDHCEKKGVVIDKWYIDGGYSGSKLDRPKIQELLDDAEKGLIGTVFIYKLDRMSRDVIDTLNLFYKVLPKYGVKVVSMTEDLRTEKPMDRVMLTMNAAMNQYEREVIRMRMSAGMLERVKKGLWMGGGRIPWGYYYDRNDGILHVDEEQAKMVRNAYKLYLEGYSCDKIATMLGFRGERIVTQILKRKSNIGLIEYKGNVYQGKHEPIVDEKLFWDVQDAINKRKTNSHISNNHLLTGLCYCGYCGSKMRYQKWGRSGHRLVCYSHYKSGKPYMRKVDSCISKPERADFLENEIEDAFKKFAIHVDETENECLDQSIILERTIKSEHERLKKMYTLYISCMSDDLLELIKEKEESIKKLQKQLEENEREKGCDVEKIEEIKQMADVWDSLTVKEKNRILKECVEKIIIKGSDIEVSFVTF

SEQ ID NO: 8795 - protein, 449 aa, Unknown
  Description of Unknown: Integrase B8796 sequence
  PTHR30461:SF3,cd00338,SM00857,IPR006118,IPR036162, PF13408,IPR025827,G3DSA:3.40.50.1390,PS51737,IPR006119, IPR011109,SSF53041,PTHR30461,PS00397,PS51736, Coil,PF00239
MSAPVVRAAGYIRVSTAEQALRGLSLEAQEAEIRRWAAEHHVRLENIYVDKGITARKQLHRRAAFMQMMQAVDAGQIDLILVMRLDRWFRNVYDYHKMMNEHLIPHGVNWCAVKEDYDTTTTNGRLMINLRLSIAEQECDTDADRIRDVQQNMVAKGRWPFGAAPLGYRIEEKRLVKDPHTQPQVEFFFQHMLANGSLRGALFAMNDRFGTSYEYRRAQDLSRKSVYYGVYGENQSFCPAYITLEEHQRIRSLAEKNVRVWSSPTAWPHLFSGLLICDDCHRRLNAQTIRRPSGVYTTYRCSHSTDNHGCANNRSISEKVIEEYLLNYVREDLAQYIVQMEVSQKKAAALPDNTAKIRAKQERVKTLFINNFIDLEEYKRRIQELEGQIIRRPPSEKTKDVSKLKQLLEDGALKMYPTLTREEKRAFWRGFLKELHIYRGTIQGPPIFL

SEQ ID NO: 8796 - protein, 449 aa, Unknown
  Description of Unknown: Integrase B8797 sequence
  IPR036162,PS51737,IPR011109,PTHR30461,PS00397, PF00239,G3DSA:1.10.10.2600,IPR006119,SSF53041,cd00338, SM00857,IPR025827,IPR038109,PS51736,IPR006118, PF13408,G3DSA:3.40.50.1390,PF07508,Coil
MSKLQVAYLRVSTETQTEKYGLDMQKQKIMDYCEKHGITIDKWYIDGGYSGSKLDRPEIQELLNHAKSGIIDTVYIYKLDRMSRDVIDTLNLFYKILPGYGVKVISMTEELRTENPMDRMMLTMNAAMNQYEREVIRMRMSAGMLERVKKGYWMGGGRTPWGYYYDRNDGILHINEQQASVVRKVYDLYLNGFSCENISKILGFKGEPIVKGILKRKSNIGLIEYKGKVYKGRHEPIIDEKVFWKVQDEMKKRHTNAYLSSGHLLTGLCHCGYCGARMRYQKWTVKTMKLVCYSHYQSSKAYMRKSDCCKNHPVDAYKIEAEVEECFKNFAININEYTESHQDGTEILVESLKKSDTKVRRLYGLYADNPSENLLDVIKTEEENIKKLKKKLDDAKTEKRCDPTKIAEIRHMSDVWESLTLKEKNKILKQCVEDIVVDKDEITIRFVTL

SEQ ID NO: 8797 - protein, 449 aa, Unknown
  Description of Unknown: Integrase B8798 sequence
  IPR036162,PS51737,IPR011109,PTHR30461,PS00397, PF00239,G3DSA:1.10.10.2600,IPR006119,SSF53041,cd00338, SM00857,IPR025827,IPR038109,PS51736,IPR006118, PF13408,G3DSA:3.40.50.1390,PF07508,Coil
MRKLNVAYLRVSTEAQTEKYGLDVQKQKILDHCEKKGVVIDKWYIDGGYSGSKLDRPKIQELLDDAEKGLIGTVFIYKLDRMSRDVIDTLNLFYKVLPKYGVKVVSMTEDLRTEKPMDRVMLTMNAAMNQYEREVIRMRMSAGMLERVKKGLWMGGGRIPWGYYYDRNDGILHVDEEQAKMVRNAYKLYLEGYSCDKIATMLGFRGERIVTQILKRKSNIGLIEYKGNVYQGKHEPIVDEKLFWDVQDAINKRKSNSHISNNHLLTGLCYCGYCGSKMRYQKWGRSGHRLVCYSHYKSGKPYMRKVDSCISKPERADFLENEIEDAFKKFAIHVDETENECLDQSIILERTIKSEHERLKKMYTLYISCMSDDLLELIKEKEESIKKLQKQLEENEREKGCDVEKIEEIKQMADVWDSLTVKEKNQILKECVEKIIIKGSDIEVSFVTF

SEQ ID NO: 8798 - protein, 448 aa, Unknown
  Description of Unknown: Integrase B8799 sequence
  PTHR30461:SF3,IPR036162,PS51737,IPR011109,PTHR30461, PS00397,PF00239,G3DSA:1.10.10.2600,IPR006119,SSF53041, cd00338,SM00857,IPR025827,IPR038109,PS51736, IPR006118,PF13408,G3DSA:3.40.50.1390,Coil
MSITNVAIYVRVSTDRQAKKGDSIDEQLSTCKNYIDSKENMVLAGTYIDDGISGRKIKRGDFEQLLDDVRLGRIDLIIFTKLDRWFRSLRHYLNTQAILEANHCDWLAVDQPYFDTTTPHGRAFVAQSMTFAELEAENDSVRIRDVFDYKYRQGEVLSGKVPLGYSIENKHLVLNQDADKVLHIFQFYAECGSLNQTISHLERDMGIIMSQDNLKKSVLKNKKYIGVFRDNDHYCPALVSADLFERVQELLAINIKVSQKYSYVFSGLLRCAHCGQAFSGAMRKIKKRNGDGYYKYPFYRCHGAYPNKRCVNRKIIFESYIERYLLSNIKDLLQKYIADYEITTAKVVDYDSRRASILKKIDKLKDLYVNDIITMDELKQDKERYIKELESLPRNQSQKDMAPIRELLKMDLNSVYETLDPAERRQLWRSVIKEIQIDDRRNLKVIFL

SEQ ID NO: 8799 - protein, 448 aa, Unknown
  Description of Unknown: Integrase B8800 sequence
  PTHR30461:SF3,IPR036162,PS51737,IPR011109,PTHR30461, PS00397,PF00239,G3DSA:1.10.10.2600,IPR006119,SSF53041, cd00338,SM00857,IPR025827,IPR038109,PS51736, IPR006118,PF13408,G3DSA:3.40.50.1390,Coil
MKQRAALYVRVSTEEQAKHGLSLQEQLNSLKAYAEKNGMDVVGVYSDAGISARKPYTKRPDLLRLLSDCEAHKVDVILFIKLDRWFRNVGNYYAVQDILDRCGVSWQATKEDYETRTASGRLKVNIMLSVAQDEADRTSERIRFITEAKKAKGQSTNAKAPLGIKVVNSHYTIDPETADIARDMFAQYIALQSALGVSKYMRERYGITRTYNNFVRYIKNRLYIGEAYGVENAFPALIDKKDFDLANAILARRSTRNSSENADRVYLFSRLLVCRECGKSMQSETKIKGENGKTYTYIYYRCRTKMIKGTCKHVHRVKEDVLEDYLLREIVHLIEAYRFQVEKRAKKEKAPAVTPESIRRKMQKLKDLYLSDLIEIEDYKKDYAGLKEQLETLEMVQKMAPPPTPISEIKCQLEEYPSMTRAQKKAFWARTVQRIEADDNGAFFVTPV

SEQ ID NO: 8800 - protein, 448 aa, Unknown
  Description of Unknown: Integrase B8801 sequence
  PTHR30461:SF3,IPR036162,PS51737,IPR011109,PTHR30461, PS00397,PF00239,G3DSA:1.10.10.2600,IPR006119,SSF53041, cd00338,SM00857,IPR025827,IPR038109,PS51736, IPR006118,PF13408,G3DSA:3.40.50.1390,Coil
MSITNVAIYVRVSTDRQAKKGDSIDEQLSTCKNYIDSKENMVLAGTYIDDGISGRKIKRGDFEQLLDDVRLGRVNLIIFTKLDRWFRSLRHYLNTQAILEANHCDWLAVDQPYFDTTTPHGRAFVAQSMTFAELEAENDSVRIRDVFDYKYRQGEVLSGKVPLGYSIENKHLVLNQDADKVLHIFQFYAECGSLNQTISHLERDMGIIMSQDNLKKSVLKNKKYIGVFRDNDHYCPALVSADLFERVQELLAINIKVSQKYSYVFSGLLRCAHCGQAFSGAMRKIKKRNGDGYYKYPFYRCHGAYPNKRCVNRKIIFESYIERYLLSNIQDLLQKYIADYEIAAAKVVDYDSRRASILKKIDKLKDLYVNDIITMDELKQDKERYTKELESLPRNQSQKDMAPIRKLLKMDLNSVYETLDPAERRQLWRSVIKEIQIDDRRNLKVIFL

SEQ ID NO: 8801 - protein, 448 aa, Unknown
  Description of Unknown: Integrase B8802 sequence
  IPR036162,PS51737,IPR011109,PTHR30461,PS00397, PF00239,G3DSA:1.10.10.2600,IPR006119,SSF53041,cd00338, SM00857,IPR025827,IPR038109,PS51736,IPR006118, PF13408,G3DSA:3.40.50.1390,PF07508,Coil
MSKLQVAYLRVSTETQTEKYGLDMQKQKIMDYCEKHGITIDKWYIDGGYSGSKLDRPEIQELLKHAKSGIIDTVYIYKLDRMSRDVIDTLTLFYKTLPGYGVKVVSMTEELRTENPMDRMMLTMNAAMNQYEREVIRMRMSSGMVERVKNGFWPGGGNVPVGYYYDRNDGILHIDNKKADMVRDTFRLYLDGYSCIRIADILGFSCERIVVNILKRKTYIGLIEYKGNVYKGKHESIIDEETFYKVQEMHKKRSTNAHVSRRYLLTGLCYCGVCGARMRYHQWNGINPRIVCYSQYGKDYMARDRNCNNLKPHASHIESEVEECFKQFAINVKQKDKQKDDPVNKLKVAIKKEEDGVKRLYLVYAENPTKNLMDVIKETEKKITRLNKKLLEESSRKEMNNSKKIQDIRRVSDVWDTLTTQEKNKILKECIEKVVISGNDLEIRFITF

SEQ ID NO: 8802 - protein, 448 aa, Unknown
  Description of Unknown: Integrase B8803 sequence
  SM00857,IPR006118,G3DSA:1.10.10.2600,IPR036162,PF13408, IPR025827,PS51737,G3DSA:3.40.50.1390,IPR006119,IPR038109, PF07508,IPR011109,SSF53041,PTHR30461,PS00397, PS51736,cd00338,PF00239
MSKLNVAYLRVSTESQTEKYGLDVQRQKILDYCERKGVKIDKWYIDGGYSGSKLDRPEIKELLDHAEKGLIGTVYIYKLDRMSRDVIDTLNLFYKILPKYGVKVVSMTEDLRTDNPMDRVMLTMNAAMNQYEREVIRMRMTAGMIERVKKGFWMGGGLIPWGYYYDRNDGILHVDQKEAEMVRKAFNMYLDGYSCENIAKIVGFKSEKIVRDILKRKSNIGMIEYKGKVYKGKHEPIIDEATFNRVQDLMRKRTTNSHVNHDNLLTGLCYCGVCGARMRYQKWGNYHKIVCYSQYKNKEYMQRSDHCYNLKPFASDIEAEVEDCFKRFLINIDNQDEPPKNHKEEIEESIKKSSAKVKRLYMLYADNPSDNLLEVIKEEEDKICSLKKQLELEIENDRRSDTEKIEKIKRMSDVWDTLTVRDKNRVLKECIERIIITGSDIEIRFITL

SEQ ID NO: 8803 - protein, 448 aa, Unknown
  Description of Unknown: Integrase B8804 sequence
  PTHR30461:SF3,IPR036162,PS51737,IPR011109,PTHR30461, PS00397,PF00239,G3DSA:1.10.10.2600,IPR006119,SSF53041, cd00338,SM00857,IPR025827,IPR038109,PS51736, IPR006118,PF13408,G3DSA:3.40.50.1390,Coil
MRQRAALYIRVSTEEQAKHGLSLQEQLNSLKDYAEKNGMDVVGVYSDAGISARKPYTKRPDLLRLLSDCEAHKVDVILFIKLDRWFRNVGNYYAVQDILDRCGVSWQATKEDYETRTASGRLKVNIMLSVAQDEADRTSERIRFITDAKKAKGQSPNAKAPLGIKVVDSHYVIDPETADIARDMFAQYIALQSALGLSKYMRQRYGITRTYNNYMRYLKNRLYIGEAYGIENALPALISRKDFDLVGDILARRSTRNASAGENHTYLFSGLLLCHECKKTMQAETIVKGQNGKTYTYVYYRCRTKMFKGTCRHVHRVKEDVLEDYLLREIVHLIEAYRFQAEKRAKKEKAPAVTPESIRRKMQKLKDLYLMDMIEIEDYKADYSALKEQLESLEMVQKMSPPPTPISEIECQLAEYPDMSRTQKKAFWVRTVKRIEADDNGAFFVTPV

SEQ ID NO: 8804 - protein, 448 aa, Unknown
  Description of Unknown: Integrase B8805 sequence
  IPR036162,PS51737,IPR011109,PTHR30461,PS00397, PF00239,G3DSA:1.10.10.2600,IPR006119,SSF53041,cd00338, SM00857,IPR025827,IPR038109,PS51736,IPR006118, PF13408,G3DSA:3.40.50.1390,PF07508,Coil
MKKMNVGYLRVSTENQTEKYGLDLQKNKIIERAEKEGDKIDKWYIDGGYSGSTLDRPDIQRLLEDSKNGYIEKVYIYKLDRVSRDTIDTLVILYRTLPEYNVKIVSATEELSLDTPMDKMKIGIDALMGQYEREIISMRTKAGMLERVKSGLWMGGGRVPFGYYYDRNDGILHPKEEEAEKVRTMYRLYNDGYSCQKISEMLGMKGERIVIQILKRKSNIGYIEYKGNIYKGKHEAIIDEETFYKTQKFMEKRANNSYICNKFLLSGLCFCGKCGARMRYKKWANRHVLECYSRDGYKEYMVKNPNCDNKRPDAKDVEKEVSDCFKRFAVNITGRREKQLSKKELIEKEMKSTVDKLKKLYELYATSESETLLEVIGKSEKRVKELRRELDRETRKKSLNTPERIEKIKKISDVWDKLDVKEQNKILKECIDKIVITDGNIDIYFNLL

SEQ ID NO: 8805 - protein, 448 aa, Unknown
  Description of Unknown: Integrase B8806 sequence
  PTHR30461:SF3,cd00338,SM00857,G3DSA:1.10.10.2600,IPR036162, PF13408,IPR025827,G3DSA:3.40.50.1390,IPR006119,IPR038109, SSF53041,PTHR30461,PS51736,Coil,PF00239
MKCVAYMRVSTEKQAEEGNGLESQKRDIENYCRKNELIIADWYVDEGYTGSNMNRPELQRLITDCSRKKVNCVVAFKLDRISRSMVDGIYIIEKVFQSNNVAFKCVHDSISYDSPMEQAYTQMMAVFAQLDKNTMMLRMRGGMQGYWWGGGNTPYCYRYDKEQGILIPIPERAEQARKALELFISGYSDAKIKEICGFKSELVTRKVLTGVVNIGMIPYKGNIYQGKHKPIFDKDRFELAQELRKSRCSAKISCFTEPNLLTGLCYCGVCGCKMRYQKWSNGNHKIYCCSRNKGLKYLPNYNPNCNNSLEWADDIEKQVTDEILKISLNLSSYKPKAKETKLEIMQSQLEREQTKLKRLYSLYADGNDTVLEMIKDLESQISKTKEDISVESKNAINTQKKEFTYQNIKKLADVWDNIDKKQKNFILKTIIDKVIIVNGNVEIQLKNF

SEQ ID NO: 8806 - protein, 448 aa, Unknown
  Description of Unknown: Integrase B8807 sequence
  PTHR30461:SF3,IPR036162,PS51737,IPR011109,PTHR30461, PS00397,PF00239,G3DSA:1.10.10.2600,IPR006119,SSF53041, cd00338,SM00857,IPR025827,IPR038109, PS51736,IPR006118,PF13408,G3DSA:3.40.50.1390,Coil
MSITNVAIYVRVSTDRQAKKGDSIDEQLSTCKNYIDSKENMVLAGTYIDDGISGRKIKRGDFEQLLDDVRLGRIDLIIFTKLDRWFRSLRHYLNTQAILEANHCDWLAVDQPYFDTTTPHGRAFVAQSMTFAELEAENDSVRIRDVFDYKYRQGEVLSGKVPLGYSIENKHLVLNQDADKVLHIFQFYAECGSLNQTISHLERDIGIIMSQDNLKKSVLKNKKYIGVFRDNDHYCPALVSADLFERVQELLAINIKVSQKYSYVFSGLLRCAHCGQAFSGAMRKIKKRNGDGYYKYPFYRCHGAYPNKRCVNRKIIFESYIERYLLSNIKDLLQKYIADYEITTAKVVDYDSRRASILKKIDKLKDLYVNDIITMDELKQDKERYIKELESLPRNQSQKDMAPIRELLKMDLNSVYETLDPAERRQLWRSVIKEIQIDDRRNLKVIFL

SEQ ID NO: 8807 - protein, 448 aa, Unknown
  Description of Unknown: Integrase B8808 sequence
  PTHR30461:SF3,IPR036162,PS51737,IPR011109,PTHR30461, PS00397,PF00239,G3DSA:1.10.10.2600,IPR006119,SSF53041, cd00338,SM00857,IPR025827,IPR038109,PS51736, IPR006118,PF13408,G3DSA:3.40.50.1390,Coil
MSIINVAIYVRVSTDRQAKKGDSIDEQLSTCKNYIASKENMVLAGVYIDDGISGRKIKRGDFEQLLDDVRLGRVDLIIFTKLDRWFRSLRHYLNTQAILEANHCDWLAVDQPYFDTTTPHGRAFVAQSMTFAELEAENDSVRIRDVFDYKYRQGEVLSGKVPLGYSIENKHLVLNQDADKVLHIFQFYAECGSLNQTISHLERDMGIIMSQDNLKKSVLKNKKYIGVFRDNDHYCPALVSADLFERVQELLAINIKVSQKYSYVFSGLLRCAHCGQAFSGAMRKIKKRNGDGYYKYPFYRCHGAYPNKRCVNRKIIFESYIERYLLSNIKDLLQKYIADYEITTAKVVDYDSRRATILKKIDKLKDLYINDIITMDELKRDKERYIKELESLPRNQSQKDMAPIRELLKMDLNSVYETLDPAERRQLWRSVIKEIQIDDRRNLKVIFL

SEQ ID NO: 8808 - protein, 448 aa, Unknown
  Description of Unknown: Integrase B8809 sequence
  SM00857,IPR006118,IPR036162,PF13408,IPR025827, G3DSA:3.40.50.1390,IPR006119,SSF53041,PF00239,PTHR30461, PS00397,PS51736,Coil,cd00338
MTEKEEQKRAAIYVRVSTAEQKEHGLSVDNQLDALKSYCQERGFTVAGIYNDAGISARKKYKSRPALLKLLEDCQKHKIDIILFTKLDRWFRSVADYYAVQQVLDGAKVPWRAIWEDYETETSAGVFKVNIMLSVAQAESDRTSERIKAVLEYKREHGHIIAGRMPLGYIRTSSSTIDYDPATKDAMQAFFGTYLNTYSPAKAIDAAKELGLRITRKNAHDILDKEPYYGTYYGVEVPAYITPEQHKIIENARVHYARTPKYDRVYIFTGLIFCATCGARMGSKLSKHIKASGEMIEKGYYQCRTNTMRKGICEKPAFMMEYKLEEYLIEHMSELIENYTADIAQSQEKAKDVEKEITRIKSKLQRLRDVYLDGDMSRAEYIEKTSQLKADIVELESQKVPLSPIKQFPDDWAEIYRQLSKEGKRDFWHRTIRRIEIDGKKVTKVFFV

SEQ ID NO: 8809 - protein, 448 aa, Unknown
  Description of Unknown: Integrase B8810 sequence
  PTHR30461:SF3,IPR036162,PS51737,IPR011109, PTHR30461,PS00397,PF00239,G3DSA:1.10.10.2600, IPR006119,SSF53041,cd00338,SM00857,IPR025827,IPR038109 ,PS51736,IPR006118,PF13408,G3DSA:3.40.50.1390,Coil
MSITNVAIYVRVSTDRQAKKGDSIDEQLSTCKNYIDSKENMVLAGTYIDDGISGRKIKRGDFEQLLDDVRLGRIDLIIFTKLDRWFRSLRHYLNTQAILEANHCDWLAVDQPYFDTTTPHGRAFVAQSMTFAELEAENDSVRIRDVFDYKYRQGEVLSGKVPLGYSIENKHLVLNQDADKVLHIFQFYAECGSLNQTISHLERDMGIIMSQDNLKKSVLKNKKYIGVFRDNDHYCPALVSADLFERVQELLAINIKVSQKYSYVFSGLLRCAHCGQAFSGAMRKIKKRNGDGYYKYPFYRCHGAYPNKRCVNRKIIFESYIERYLLSNIKDLLQNYIADYEITTAKVVDYDSRRATILKKIDKLKDLYINDIITMDELKRDKERYIKELESLPRNQSQKDMAPIRELLKMDLNSVYETLDPAERRQLWRSVIKEIQIDDRRNLKVIFL

SEQ ID NO: 8810 - protein, 448 aa, Unknown
  Description of Unknown: Integrase B8811 sequence
  PTHR30461:SF3,IPR036162,PS51737,IPR011109,PTHR30461, PS00397,PF00239,G3DSA:1.10.10.2600,IPR006119,SSF53041, cd00338,SM00857,IPR025827,IPR038109,PS51736, IPR006118,PF13408,G3DSA:3.40.50.1390,Coil
MSITNVAIYVRVSTDRQAKKGDSIDEQLSTCKNYIDSKENMVLAGTYIDDGISGRKINRGDFEQLLDDVRLGRIDLIIFTKLDRWFRSLRHYLNTQAILEANHCDWLAVDQPYFDTTTPHGRAFVAQSMTFAELEAENDSVRIRDVFDYKYRQGEVLSGKVPLGYSIENKHLVLNQDADKVLHIFQFYAECGSLNQTISHLERDMGIIMSQDNLKKSVLKNKKYIGVFRDNDHYCPALVSADLFERVQELLAINIKVNQKYSYVFSGLLRCAHCGQAFSGAMRKIKKRNGDGYYKYPFYRCHGAYPNKRCVNRKIVFESYIERYLLSNIKDLLQKYIADYEIATAKVIDYDSRRASILKKIDKLKDLYVNDIITMDELKQDKERYIKELESLPRNQPQKDMAPIRKLLKMDLNSVYETLDPAERRQLWRSVIKEIQIDDRRNLKVIFL

SEQ ID NO: 8811 - protein, 448 aa, Unknown
  Description of Unknown: Integrase B8812 sequence
  PTHR30461:SF3,IPR036162,PS51737,IPR011109,PTHR30461, PS00397,PF00239,G3DSA:1.10.10.2600,IPR006119,SSF53041, cd00338,SM00857,IPR025827,IPR038109,PS51736, IPR006118,PF13408,G3DSA:3.40.50.1390,Coil
MSITNVAIYVRVSTDRQAKKGDSIDEQLSTCKNYIDSKENMVLAGTYIDDGISGRKINRGDFEQLLDDVRLGRIDLIIFTKLDRWFRSLRHYLNTQAVLEANHCDWLAVDQPYFDTTTPHGRAFVAQSMTFAELEAENDSVRIRDVFDYKYRQGEVLSGKVPLGYSIENKHLVLNQDADKVLHIFQFYAECGSLNQTISHLERDMGIIMSQDNLKKSVLKNKKYIGVFRDNDHYCPALVSADLFERVQELLAINIKVSQKYSYVFSGLLRCAHCGQAFSGAMRKIKKRNGDGYYKYPFYRCHGAYPNKRCINRKIVFESYIERYLLSNIKDLLQKYIADYEIATAKVIDYDSRRASILKKINKLKDLYVNDIITMDELKQDKERYIKELESLPRNQPQKDMAPIRKLLKMDLNSVYETLDPAERRQLWRSVIKEIQIDDRRNLKVIFL

SEQ ID NO: 8812 - protein, 448 aa, Unknown
  Description of Unknown: Integrase B8813 sequence
  SM00857,IPR006118,IPR036162,PF13408,PS51737, G3DSA:3.40.50.1390,IPR025827,IPR006119,SSF53041,IPR011109, PF00239,PTHR30461,PS00397,PS51736,Coil, cd00338
MTEKEEQKRAAIYVRVSTAEQKEHGLSVDNQLDALKSYCQERGFTVAGIYNDAGISARKKYKSRPALLKLLEDCQKHKIDIILFTKLDRWFRSVADYYAVQQVLDGAKVPWRAIWEDYETETSAGVFKVNIMLSVAQAESDRTSERIKAVLEYKREHGHIIAGRMPLGYIRTSSSTIDYDPATKDAMQAFFDTYLGTYSPVAAMDAARKLGLRMSRKTAHFILDKEPYYGTYFGVDVPAYITPEQHKIIQNARVHYARTPKDDRVYIFTGLIFCANCGARMGSKLSKHIKASGETIERGYYQCRTKTVRKDICEKPAFMMEHKLEDYLIEHMSELITDYEASIAQSREKAKDAEKEISRIKGKLQRLKDVYLDGDMSRAEYVEKTSQLKADMAEFESQRVPLSPIKQLPDDWEEMYRQLSKGGKRDFWHRTIRRIEIDGKKVTKVFFV

SEQ ID NO: 8813 - protein, 448 aa, Unknown
  Description of Unknown: Integrase B8814 sequence
  PTHR30461:SF3,IPR036162,PS51737,IPR011109,PTHR30461, PS00397,PF00239,G3DSA:1.10.10.2600,IPR006119,SSF53041, SM00857,IPR025827,IPR038109,PS51736,cd03768, IPR006118,PF13408,G3DSA:3.40.50.1390,PF07508,Coil
MRTGLYVRVSTTEQEKHGYSIKVQLEKLRAFASAKDYTVVKEYVDAAQSGAKLERPGLKQLIEDVENNALDCVLVYRLDRLSRSQKDTMYLIEDVFLKNSVAFVSLQESFDTTSSFGRAMIGMLSVFAQLERDNITERLFSGRAHRAKRGFHHGGGIIPFGYRYDVETGELKRFENESNEVKAMFEMIANGKSVSSVAKEFNTYDTTIRRRIANSVYIGKIQFDGETFDGQHEPIISKELFDKANVRMNARASSLPFKRTYLLSGLIYCGKCGERCSAYESRSKHNGKEYRRAYYRCNARTWKYKQKHGRTCEQPHIRVDELEQAVMEQVKRLPLKHKAKKRAFDFKPVENQIATIDKQKERLLDLYLNEHLDNEMFNKKSKELDKSRDKLAKQLERMRMQAADSVESYQWLDGIDWNALDKDTLREVLERIIERIVIRDKDVEIYFK

SEQ ID NO: 8814 - protein, 448 aa, Unknown
  Description of Unknown: Integrase B8815 sequence
  PTHR30461:SF3,IPR036162,PS51737,IPR011109,PTHR30461, PS00397,PF00239,G3DSA:1.10.10.2600,IPR006119,SSF53041, cd00338,SM00857,IPR025827,IPR038109,PS51736, IPR006118,PF13408,G3DSA:3.40.50.1390,Coil
MSITNVAIYVRVSTDRQAKKGDSIDEQLSTCKNYIDSKENMVLAGTYIDDGISGRKIKRGDFEQLLDDVRLGRIDLIIFTKLDRWFRSLRHYLNTQAILEANHCDWLAVDQPYFDTTTPHGRAFVAQSMTFAELEAENDSVRIRDVFDYKYRQGEVLSGKVPLGYSIENKHLVLNQDADKVLHIFQFYAECGSLNQTISHLERDMGIIMSQDNLKKSVLKNKKYIGVFRDNDHYCPALVSADLFERVQELLAINIKVSQKYSYVFSGLLRCAHCGQAFSGAMRKIKKRNGDGYYKYPFYRCHGAYPNKRCVNRKIIFESYIERYLLSNIKDLLQKYIADYEITTAKVVDYDSRRASILKKIDKLKDLYLNDIITMDELKQDKERYIKELESLPRNQSQKDMAPIRELLKMDLNSVYETLDPAERRQLWRSVIKEIQIDDRRNLKVIFL

SEQ ID NO: 8815 - protein, 448 aa, Unknown
  Description of Unknown: Integrase B8816 sequence
  PTHR30461:SF3,cd00338,SM00857,IPR006118,IPR036162, PF13408,IPR025827,G3DSA:3.40.50.1390,PS51737,IPR006119, SSF53041,IPR011109,PTHR30461,PS00397,PS51736, Coil,PF00239
MAEKEGQKRAAIYVRVSTAEQRDHGLSVDSQISALKNYCTQHNFAIAGIYNDAGISARKKYKARPALLQLLEDCQKHKIDIILFTRLDRWFRSVSDYYKVQAVLDETKVPWRTIWEDYETETSSGLLKVNIMLAIAQSESDRTSERIKAVLEYKREHGHIIAGRMPLGYIRTSSSTIDYDPATKDAMQAFFDTYLGTYSPVAAMDAARKLGLRMSRKTAHFILDKEPYYGTYFGVDVPAYITPEQHKIIQNARVHYARTPKDDRVYIFTGLIFCANCGARMGSKLSKHIKASGETIERGYYQCRTKTVRKDICEKPAFMMEHKLEDYLIEHMSELITDYEASVAQSREKAKDAEKEIIRIKGKLQRLKDVYLDGDMSRTEYVERTSQLKADMAELESQRVPLSPIKQLPDDWVEMYRQLSKDGKRDFWHRTIRRIEIDGKKVSKVFFI

SEQ ID NO: 8816 - protein, 448 aa, Unknown
  Description of Unknown: Integrase B8817 sequence
  PTHR30461:SF3,IPR036162,PS51737,IPR011109,PTHR30461, PS00397,PF00239,G3DSA:1.10.10.2600,IPR006119,SSF53041, cd00338,SM00857,IPR025827,IPR038109,PS51736, IPR006118,PF13408,G3DSA:3.40.50.1390,Coil
MSIINVAIYVRVSTDRQAKKGDSIDEQLSTCKNYIASKENMVLAGVYIDDGISGRKIKRGDFEQLLDDVRLGRVDLIIFTKLDRWFRSLRHYLNTQAILEANHCDWLAVDQPYFDTTTPHGRAFVAQSMTFAELEAENDSVRIRDVFDYKYRQGEVLSGKVPLGYSIENKHLVLNQDADKVLHIFQFYAECGSLNQTISHLERDMGIIMSQDNLKKSVLKNKKYIGVFRDNDHYCPALVSADLFERVQELLAINIKVSQKYSYVFSGLLRCAHCGQAFSGAMRKIKKRNGDGYYKYPFYRCHGAYPNKRCVNRKIIFESYIERYLLSNIKDLLQKYIADYEITTAKVVDYDSRRASILKKIDKLKDLYVNDIITMDELKQDKERYIKELESLPRNQSQKDMAPIRELLKMDLNSVYETLDPAERRQLWRSVIKEIQIDDRRNLKVIFL

SEQ ID NO: 8817 - protein, 448 aa, Unknown
  Description of Unknown: Integrase B8818 sequence
  IPR036162,PS51737,IPR011109,PTHR30461,PS00397, PF00239,G3DSA:1.10.10.2600,IPR006119,SSF53041,cd00338, SM00857,IPR025827,IPR038109,PS51736,IPR006118, PF13408,G3DSA:3.40.50.1390,PF07508,Coil
MSKLQVAYLRVSTETQTEKYGLDMQKQKIMDYCEKHGITIDKWYIDGGYSGSKLDRPEIQELLEHAKSGIIDTVYIYKLDRMSRDVIDTLTLFYKTLPGYGVKVVSMTEELRTENPMDRMMLTMNAAMNQYEREVIRMRMSSGMVERVKNGFWPGGGNVPVGYYYDRNDGILHIDNKKADMVRDTFRLYLDGYSCIRIADILGFSCERIVVNILKRKTYIGLIEYKGNVYKGKHESIIDEETFYKVQEMHKKRSTNAHVSRRYLLTGLCYCGVCGARMRYHQWNGINPRIVCYSQYGKDYMARDRNCNNLKPHASHIESEVEECFKQFAINVKQKDKQKDDPVNKLKVAIKKEEDGVKRLYLVYAENPTKNLMDVIKETEKKITRLNKKLLEESSRKEMNNSKKIQEIRRVSDVWDTLTTQEKNKILKECIEKVVISGNDLEIRFITF

SEQ ID NO: 8818 - protein, 448 aa, Unknown
  Description of Unknown: Integrase B8819 sequence
  PTHR30461:SF3,SM00857,G3DSA:1.10.10.2600,IPR036162,PF13408, IPR025827,PS51737,G3DSA:3.40.50.1390,IPR006119,IPR038109, PF07508,IPR011109,SSF53041,PTHR30461,PS51736, cd00338,PF00239
MERIIQKVTPPARKKAPKLKRVAAYARVSSGREAPLHSLSAQISQYSGMIQKTPGWQYAGVYADEALTGTKDSRGEFQRLLADCRAGKIDMIITKSVSRFARNTVTTLRTIRELRLMGVDVFFEEQNIHTMGEDGELLLTLLAAYAEEEARSVSENQKWRIKSNYEQGLPWSITMYGYRQVNGRLEVVPEEAEIIRLAADLYLEGYGRCKLEDAFAAVNIKGRHGANMGGNSIVDLICNEKIVGDMLLQKTFVVDPITKEVRKNNGEKPQYFVEGSHEGILDRETYEKVLAERARRAAAYKPRSGNYERNRFPFSGKIHCGKCGKSFTRKVLNGNTPYEKRGWLCRTFNQKGKAHCDAKQIPEEILKRVSAEAMGLPEFDEAAFAAKVEEIQVPENGVLVFVFYDGHTVTKTWDNPSRRHSWNPENRQRARELALRQAAERRLAKCQQ

SEQ ID NO: 8819 - protein, 448 aa, Unknown
  Description of Unknown: Integrase B8820 sequence
  PTHR30461:SF3,IPR036162,PS51737,IPR011109,PTHR30461, PS00397,PF00239,G3DSA:1.10.10.2600,IPR006119,SSF53041, cd00338,SM00857,IPR025827,IPR038109,PS51736, IPR006118,PF13408,G3DSA:3.40.50.1390,Coil
MSITNVAIYVRVSTDRQAKRGDSIDEQLSTCKNYIDSKENMVLAGTYIDDGISGRKINRGDFEQLLDDVRLGRIDLIIFTKLDRWFRSLRHYLNTQAVLEANHCDWLAVDQPYFDTTTPHGRAFVAQSMTFAELEAENDSVRIRDVFDYKYRQGEVLSGKVPLGYSIENKHLVLNQDADKVLHIFQFYAECGSLNQTISHLERDMGIIMSQDNLKKSVLKNKKYIGVFRDNDHYCPALVSTGLFERVQELLAINIKVSQKYSYVFSGLLRCAHCGQAFSGAMRKIKKRNGDGYYKYPFYRCHGAYPNKRCINRKIVFESYIERYLLSNIKDLLQKYIADYEITTAKVVDYDSRRASILKKIDKLKDLYVNDIITMDELKQDKERYIKELESLPRNQSQKDMAPIRKLLKMDLNSVYETLDPAERRQLWRSVIKEIQIDDRRNLKVIFL

SEQ ID NO: 8820 - protein, 447 aa, Unknown
  Description of Unknown: Integrase B8821 sequence
  PTHR30461:SF3,IPR036162,PS51737,IPR011109,PTHR30461, PS00397,PF00239,G3DSA:1.10.10.2600,IPR006119,SSF53041, cd00338,SM00857,IPR025827,IPR038109,PS51736, IPR006118,PF13408,G3DSA:3.40.50.1390,Coil
MSITNVAIYVRVSTDRQAKKGDSIDEQLSTCKAYIASKENMVLAGTYIDDGISGRKIKRGDFEQLLDDVRLGRVNLIIFTKLDRWFRSLRHYLNTQAVLEANHCDWLAVDQPYFDTTTPHGRAFVAQSMTFAELEAENDSVRIRDVFDYKYRQGEVLAGKAPLGFSIENKHLVPNQDAEKVLHIFQFYAACNSLNQTITHLESDMGIVMTQSNLKTAILKNKKYIGVFRDNDHYCPAIIPLDLFERVQELLAINVKISQKYNYIFSGLLRCAHCGHSFSGATRKIKKKAGGFYKYPLYKCHGAYPSKRCSNRKVIFESCIERYLIANIKPLLQEHIAEYEITSAKVIDYDSRRAALLRKIDKLKDLYVNDIITMDELKRDKEKYIKELENLPRNQEQKDLAPIQKLLKMDLDSIYQTLEPAERRQLWRSVIKEIQIDDHKNLKVIFL

SEQ ID NO: 8821 - protein, 447 aa, Unknown
  Description of Unknown: Integrase B8822 sequence
  SM00857,IPR006118,G3DSA:1.10.10.2600,IPR036162,PF13408, IPR025827,PS51737,PS00397,G3DSA:3.40.50.1390,IPR006119, IPR038109,IPR011109,SSF53041,PTHR30461,Coil, PS51736,cd00338,PF00239
MVKKHVALYVRVSTEEQKNHGLSVDSQIDALEKYCAEHDYAIFHIYNDAGHSAAKRYTTRPALLQLMEDCSHGMFDLILFTRLDRWFRSVPDYYQVQSVLDHNHIAWRAIWEDYETETSEGVFKVNIMLSIAQAEAQRTSEKIRSVLQYKRDSGGYVGQPPMGYIRINKRDLIFDDSIKDAIRELFKVYLTTNSIVKAVQSAHDNGLQISAQQAYRILKKEAYAGLAVGGYKCPAYISWEDHEKILSMMKQHTRKTTPARTYYFSGLLFCENCGYRLAAGASHKRSASGEDYYIKYYRCNGFRTMRSDCPGSYLNEKKLEKYLLDHLNAELDQYNVNLMTHSKDYDPDEIKKQIAALESRMRRIGDRYEDGDISREEYRNKRYEITYRINTLRSLIAKNPTPIHLADDWMAVYQGFDAEHKRQFWRSIIERMDVPVEDSYHVKIHFC

SEQ ID NO: 8822 - protein, 447 aa, Unknown
  Description of Unknown: Integrase B8823 sequence
  PTHR30461:SF3,IPR036162,PS51737,IPR011109,PTHR30461, PS00397,PF00239,G3DSA:1.10.10.2600,IPR006119,SSF53041, cd00338,SM00857,IPR025827,IPR038109,PS51736, IPR006118,PF13408,G3DSA:3.40.50.1390,Coil
MSITNVAIYVRVSTDRQAKKGDSIDEQLSTCKAYIASKENMVLAGTYIDDGISGRKIKRGDFEQLLDDVRLGRVNLIIFTKLDRWFRSLRHYLNTQAVLEANHCDWLAVDQPYFDTTTPHGRAFVAQSMTFAELEAENDSVRIRDVFDYKYRQGEVLAGKAPLGFSIENKHLVPNQDAEKVLHIFQFYAACNSLNQTITHLESNMGIVMTQSNLKTAILKNKKYIGVFRDNDHYCPAIIPLDLFERVQELLAINVKISQKYNYIFSGLLRCAHCGHSFSGATRKIKKKAGGFYKYPLYKCHGAYPSKRCSNRKVIFESCIERYLIANIKPLLQEHIAEYEITSAKVIDYDSRRAALLKKIDKLKDLYVNDIITMDELKRDKEKYIKELENLPRNQEQKDLAPIRKLLKMDLDSIYQTLEPAERRQLWRSVIKEIQIDDHKNLKVIFL

SEQ ID NO: 8823 - protein, 447 aa, Unknown
  Description of Unknown: Integrase B8824 sequence
  PTHR30461:SF3,IPR036162,PS51737,IPR011109,PTHR30461, PS00397,PF00239,G3DSA:1.10.10.2600,IPR006119,SSF53041, cd00338,SM00857,IPR025827,IPR038109,PS51736, IPR006118,PF13408,G3DSA:3.40.50.1390,Coil
MSITNVAIYVRVSTDRQAKKGDSIDEQLSTCKAYIASKENMVLAGTYIDDGISGRKIKRGDFEQLLDDVRLGRVNLIIFTKLDRWFRSLRHYLNTQAVLEANHCDWLAVDQPYFDTTTPHGRAFVAQSMTFAELEAENDSVRIRDVFDYKYRQGEVLAGKAPLGFSIENKHLVPNQDAEKVLHIFQFYAACNSLNQTITHLESDMGIVMTQSNLKTAILKNKKYIGVFRDNDHYCPAIIPLDLFERVQELLAINVKISQKYNYIFSGLLRCAHCGHSFSGATRKIKKKTGGFYKYPLYKCHGAYPSKRCSNRKVVFESCIERYLIANIKPLLQEHIAEYEITSAKVIDYDSRRAALLRKIDKLKDLYVNDIITMDELKRDKEKYIKELENLPRNQEQKDLAPIQKLLKMDLDSIYQTLEPAERRQLWRSVIKEIQIDDHKNLKVIFL

SEQ ID NO: 8824 - protein, 447 aa, Unknown
  Description of Unknown: Integrase B8825 sequence
  SM00857,G3DSA:1.10.10.2600,IPR036162,PF13408,PS51737, IPR025827,G3DSA:3.40.50.1390,mobidb-lite,IPR006119,IPR038109, PF07508,IPR011109,SSF53041,PTHR30461,PS51736, cd00338,PF00239
MREIQLVTPNNRPILVRKRVCAYARVSTAKDAMLHSLSSQVSYYQKYIQAHKDWEFCGVYADEGLTGTKESRAQFQEMLKECRYGNIDIILTKSISRFARNTVDLLNTVRELKSLGIAVYFEEQNINTLSSDGELMLTILASYAQEESLSASENMKWSIRKGFENGELCCFRFMYGYRIERGSVTVCEEEAAIVQEVFDRFAKGESMLAIAKDLNARGISTHSKRQMRWSGKRIGKMLTNEKYAGNALLQKTYINNHLEKKRMVNRGELPKYYAEQTHPAIIDAQTYRLVQERIERNRGRHTVKIGYLKSAFTGKMFCGYCGEPVWRGKNNGRTIWGCRNARGKGVLTCHAASIRNDILEETCCSLFGLSTFDPTFIDQNVREIILYDNRLVFSMTDGREEKISWKNKSRSQSWTPEMKERARQRTMERLQNRRINDADSKGNTSDS

SEQ ID NO: 8825 - protein, 447 aa, Unknown
  Description of Unknown: Integrase B8826 sequence
  SM00857,G3DSA:1.10.10.2600,IPR036162,PF13408,IPR025827, G3DSA:3.40.50.1390,PS51737,IPR006119,IPR038109,PF07508, SSF53041,IPR011109,PTHR30461,Coil,PS51736, cd00338,PF00239
MGKMNVAYMRVSTEAQTEKYGLDVQRDKIQDLADKNNAKIERWYVDGGYSGSNIDRPEMQRLLDDARDGKISSVYVYKLDRMSRDAIDTLTLLYRTLPKYGVKIESVTEELRFETPMDKVMVGVNAIMGQYEREVIYMRTRAGMVERVKKGLWMGGGNQPYGYYYDRNDGILHPKEDEAENVRRMFEMYNSGMSCRSISEILGIKCEKVVRDVLRRKSNIGYIEYNGVLYKGLHEPIVDEDVFWNTQELIERRSNNYYLANKHILSGLCFCGKCGAKMRYKMWGSYFILECYSREGTKKNMVKSSHCDNKRNKASYIEKEVTDCFKKFIINVEPNSDRSENKELVKNEIKKSNEKLKRLYLLYSDSGNDVLFGVIKDEEKRLNSLKVKLEDEIRRENSNKESKIKRIRKMSDIWDELDTQEKNKILKECIEKIIITDDDIEIRFNIE

SEQ ID NO: 8826 - protein, 447 aa, Unknown
  Description of Unknown: Integrase B8827 sequence
  PTHR30461:SF3,IPR036162,PS51737,IPR011109,PTHR30461, PS00397,PF00239,G3DSA:1.10.10.2600,IPR006119,SSF53041, cd00338,SM00857,IPR025827,IPR038109,PS51736, IPR006118,PF13408,G3DSA:3.40.50.1390,Coil
MSITNVAIYVRVSTDRQAKKGDSIDEQLSTCKAYIASKENMVLAGTYIDDGISGRKIKRGDFEQLLDDVRLGRVNLIIFTKLDRWFRSLRHYLNTQAILEANHCDWLAVDQPYFDTTTPHGRAFVAQSMTFAELEAENDSVRIRDVFDYKYRQGEVLAGKAPLGFSIENKHLVPNQDAEKVLHIFQFYAACNSLNQTITHLESDMGIVMTQSNLKTAILKNKKYIGVFRDNDHYCPAIIPLDLFERVQELLAINVKISQKYNYIFSGLLRCAHCGHSFSGATRKIKKKAGGFYKYPLYKCHGAYPSKRCSNRKVIFESCIERYLIANIKPLLQEHIAEYEITSAKVIDYDSRRTALLKKIDKLKDLYINDIITMDELKRDKEKYIKELENLPRNQEQKDLTPIRKLLKMDLDSIYQTLEPAERRQLWRSVIKEIQIDDHKNLKVIFL

SEQ ID NO: 8827 - protein, 447 aa, Unknown
  Description of Unknown: Integrase B8828 sequence
  PTHR30461:SF3,IPR036162,PS51737,IPR011109,PTHR30461, PS00397,PF00239,G3DSA:1.10.10.2600,IPR006119,SSF53041, cd00338,SM00857,IPR025827,IPR038109,PS51736, IPR006118,PF13408,G3DSA:3.40.50.1390,PF07508,Coil
MNRLNVGYLRVSTEAQTEKYGLDLQKQKIIERANKDGTTIDRWYIDGGYSGSKLDRPDIQRLLEDVEFGIVKSVYVYKLDRMSRDTIDALTLLCRTLPKYGVKLISATEELRIDTPSDKFLTSVTAVVGQYERELIYMRTRAGMVERVKKGLWMGGGRIPYGYYYDRNDGILHIDEENAIKVRKAYELYLKGFSCQKISDVLGMSGDTIVHRALTNKVYLGYIFYKDKLYKGLHEPIIDQKTYDDVQRFMKKRSTNSFVGNKYMLSGLCYCGKCGARMRYKKWSQRYIMECYSRDGGKPYMVRDSKCDNRRINVEIIEQEVSDCFRRFIVNAKASERKESKKVATEKEIKKTTYKLKKLYNLYVDSESETLFSIIQQEEKKRKLLEKELEEAIREESSDTNVKIEEIKRISNIWDDLTTKEQNRILKECVEKIVITDGNIDIHFRII

SEQ ID NO: 8828 - protein, 447 aa, Unknown
  Description of Unknown: Integrase B8829 sequence
  PTHR30461:SF3,SM00857,IPR006118,G3DSA:1.10.10.2600,IPR036162, PF13408,IPR025827,G3DSA:3.40.50.1390,PS51737,IPR006119, IPR038109,IPR011109,SSF53041,PTHR30461,PS00397, PS51736,cd00338,PF00239
MSITNVAIYVRVSTDRQAKKGDSIDEQLSTCKNYIASKENMVLAGVYIDDGISGRKIKRGDFEQLLDDVRLGRVDLIIFTKLDRWFRSLRHYLNTQAILEVNHCDWLAVDQPYFDTTTPHGRAFVAQSMTFAELEAENDSVRIRDVFDYKYRQGEVLSGKVPLGYSIENKHLVPNQDADKALRIFQFYAECGSLNQTITHLESDMGIIMSQDNLKKSILKNKKYIGVFRDNDHYCPAIIPADLFDRVQELLAINVKSSQKYSYVFSGLLRCAHCGQAFSGFTQKAKKKAGGFYKYPYYKCHGAYPNKRCINRKMVPESYIEKYLLINVKDLLQEHIAEYEIASAKIVDYDSRRATLLKKIDKLKDLYINDIITMDELKMDKEKYMKELEDLPHNQNQKDLAPIKKLLKMDLDSIYKTLEPAERRQLWRSVIKEIQIDDHKNLKIIFL

SEQ ID NO: 8829 - protein, 447 aa, Unknown
  Description of Unknown: Integrase B8830 sequence
  PTHR30461:SF3,IPR036162,PS51737,IPR011109,PTHR30461, PS00397,PF00239,G3DSA:1.10.10.2600,IPR006119,SSF53041, cd00338,SM00857,IPR025827,IPR038109,PS51736, IPR006118,PF13408,G3DSA:3.40.50.1390,Coil
MSITNVAIYVRVSTDRQAKKGDSIDEQLSTCKAYIASKENMVLAGTYIDDGISGRKIKRGDFEQLLDDVRLGRVNLIIFTKLDRWFRSLRHYLNTQAVLEAKHCDWLAVDQPYFDTTTPHGRAFVAQSMTFAELEAENDSVRIRDVFDYKYRQGEVLSGKAPLGFSVENKHLVPNQDAEKVLHIFQFYAACNSLNQTTAHLESDMGIVMTQSNLKTAILKNKKYIGVFRDNDHYCPAIIPLDLFERVQELLAINVKISQKYNYIFSGLLRCAHCGHSFSGATRKIKKKTGGFYKYPFYKCHGAYPSKRCSNRKVMFESCIERYLIANIKPLLQEHIAEYEITSAKVIDYDSRRTALLKKIDKLKDLYINDIITMDELKRDKEKYIKELENLPRNQEQKDLTPIQKLLKMDLDSIYQTLEPVERRQLWRSVIKEIQIDDHKNLKVIFL

SEQ ID NO: 8830 - protein, 447 aa, Unknown
  Description of Unknown: Integrase B8831 sequence
  PTHR30461:SF3,IPR036162,PS51737,IPR011109,PTHR30461, PS00397,PF00239,G3DSA:1.10.10.2600,IPR006119,SSF53041, cd00338,SM00857,IPR025827,IPR038109,PS51736, IPR006118,PF13408,G3DSA:3.40.50.1390,Coil
MSITNVAIYVRVSTDRQAKKGDSIDEQLSTCKAYIASKENMVLAGTYIDDGISGRKIKRGDFEQLLDDVRLGRVNLIIFTKLDRWFRSLRHYLNTQAVLEANHCDWLAVDQPYFDTTTPHGRAFVAQSMTFAELEAENDSVRIRDVFDYKYRQGEVLAGKAPLGFSIENKHLVPNQDAEKVLHIFQFYATCNSLNQTITHLESDMGIVMTQSNLKTAILKNKKYIGVFRDNDHYCPAIIPLDLFERVQELLAINVKISQKYNYIFSGLLRCAHCGHSFSGATRKIKKKAGGFYKYPLYKCHGAYPSKRCSNRKVIFESCIERYLIANIKPLLQEHIAEYEITSAKVIDYDSRRTALLKKIDKLKDLYINDIITMDELKRDKEKYIKELENLPRNQEQKDLAPIRKLLNMDLDSIYQTLEPAERRQLWRSVIKEIQIDDHKNLKVIFL

SEQ ID NO: 8831 - protein, 447 aa, Unknown
  Description of Unknown: Integrase B8832 sequence
  PTHR30461:SF3,IPR036162,PS51737,IPR011109,PTHR30461, PS00397,PF00239,G3DSA:1.10.10.2600,IPR006119,SSF53041, cd00338,SM00857,IPR025827,IPR038109,PS51736, IPR006118,PF13408,G3DSA:3.40.50.1390,Coil
MSITNVAIYVRVSTDRQAKKGDSIDEQLSTCKNYIASKENMVLAGVYIDDGISGRKIKRGDFEQLLDDVRLGRVDLIIFTKLDRWFRSLRHYLNTQAILEVNHCDWLAVDQPYFDTTTPHGRAFVAQSMTFAELEAENDSVRIRDVFDYKYRQGEVLSGKVPLGYSIENKHLAPNQDAGKVLHIFQFYAECGSLNQTIAHLESDMGIIMSQDNLKKSILKNKKYIGAFRDNDHYCPAIIPVDLFERVQELLAINIKSSQKYSYVFSGLLRCAHCGQAFSGFTQKAKKKAGGFYKYPYYKCHGAYPNKRCINRKMVPESYIEKYLLINVKDLLQEHIAEYEIASAKIVDYDSQRATLLKKIDKLKDLYINDIITMDELKMDKEKYMKELEDLPRNQDQKDLAPIKKLLKMDLDSIYKTLEPEERRQLWRSVIKEIQIDDHKNLKIIFL

SEQ ID NO: 8832 - protein, 447 aa, Unknown
  Description of Unknown: Integrase B8833 sequence
  PTHR30461:SF3,IPR036162,PS51737,IPR011109,PTHR30461, PS00397,PF00239,G3DSA:1.10.10.2600,IPR006119,SSF53041, cd00338,SM00857,IPR025827,IPR038109,PS51736, IPR006118,PF13408,G3DSA:3.40.50.1390,Coil
MSITNVAIYVRVSTDRQAKKGDSIDEQLSTCKNYIASKENMVLAGVYIDDGISGRKIKRGDFEQLLDDVRLGRVDLIIFTKLDRWFRSLRHYLNTQAILEANHCDWLAVDQPYFDTTTPHGRAFVAQSMTFAELEAENDSVRIRDVFDYKYRQGEVLSGKVPLGYSIENKHLVLNQDADKALHIFQFYAECGSLNQTIAHLESDMGIIMSQDNLKKSILKNKKYIGAFRDNDHYCPAIIPVDLFERVQELLAINIKSSQKYSYVFSGLLRCAHCGQAFSGFTQKAKKKAGGFYKYPYYKCHGAYPNKRCINRKMVPESYIEKYLLINVKDLLQEHIAEYEIASAKIVDYDSRRATLLKKIDKLKDLYINDIITMDELKMDKEKYMKELEDLPRNQNQKDLAPIKKLLRMDLASIYKTLEPAERRQLWRSVIKEIQIDDHKNLKIIFL

SEQ ID NO: 8833 - protein, 447 aa, Unknown
  Description of Unknown: Integrase B8834 sequence
  PTHR30461:SF3,IPR036162,PS51737,IPR011109,PTHR30461, PS00397,PF00239,G3DSA:1.10.10.2600,IPR006119,SSF53041, cd00338,SM00857,IPR025827,IPR038109,PS51736, IPR006118,PF13408,G3DSA:3.40.50.1390,Coil
MSITNVAIYVRVSTDRQAKKGDSIDEQLSTCKAYIASKENMVLAGTYIDDGISGRKIKRGDFEQLLDDVRLGRVNLIIFTKLDRWFRSLRHYLNTQAILEANHCDWLAVDQPYFDTTTPHGRAFVAQSMTFAELEAENDSVRIRDVFDYKYRQGEVLAGKAPLGFSIENKHLVPNQDAEKVLHIFQFYAACNSLNQTITHLESDMGIVMTQSNLKTAILKNKKYIGVFRDNDHYCPAIIPLDLFERVQELLAINVKISQKYNYIFSGLLRCAHCGHSFSGATRKIKKKAGGFYKYPFYKCHGAYPSKRCSNRKVMFESCIERYLIANIKPLLQEHIAEYEITSAKVIDYDSRRTALLKKIDKLKDLYINDIITMDELKRDKEKYIKELENLPRNQEQKDLTPIRKLLKMDLDSIYQTLEPAERRQLWRSVIKEIQIDDHKNLKVIFL

SEQ ID NO: 8834 - protein, 447 aa, Unknown
  Description of Unknown: Integrase B8835 sequence
  SM00857,G3DSA:1.10.10.2600,IPR036162,PF13408,PS51737, IPR025827,PS51736,G3DSA:3.40.50.1390,IPR006119,IPR038109, PF07508,IPR011109,SSF53041,PTHR30461,mobidb-lite, cd00338,PF00239
MREIQLVTPNNRPILVRKRVCAYARVSTAKDAMLHSLSSQVSYYQKYIQAHKDWEFCGVYADEGLTGTKESRAQFQEMLKECRYGNIDIILTKSISRFARNTVDLLNTVRELKSLGIAVYFEEQNINTLSSDGELMLTILASYAQEESLSASENMKWSIRKGFEHGELCCFRFMYGYRIERGSVTVCEEEAAIVQEVFDRFAKGESMLAIAKNLNARGISTHSKRQMRWSGKRIGKMLINEKYTGNALLQKTYINNHLEKKRMVNRGELPKYYAEQTHPAIIDAQTYRLVQERIERNRGRHTVKIGYLKSAFTGKMFCGYCGEPVWRGKNNGRTIWGCRNARGKGVLTCHAASIRNDILEETSCSLFGLSTFDPTFIEQNVRKIILYDNRLVFSMADGREEKISWKNKSRSQSWTPEMKEHARQRTMERLQNRRINDADSKGNTSDS

SEQ ID NO: 8835 - protein, 447 aa, Unknown
  Description of Unknown: Integrase B8836 sequence
  PTHR30461:SF3,IPR036162,PS51737,IPR011109,PTHR30461, PS00397,PF00239,G3DSA:1.10.10.2600,IPR006119,SSF53041, cd00338,SM00857,IPR025827,IPR038109,PS51736, IPR006118,PF13408,G3DSA:3.40.50.1390,Coil
MSITNVAIYVRVSTDRQAKKGDSIDEQLSTCKNYIASKENMVLAGVYIDDGISGRKIKRGDFEQLLDDVRLGRVDLIIFTKLDRWFRSLRHYLNTQAILEANHCDWLAVDQPYFDTTTPHGRAFVAQSMTFAELEAENDSVRIRDVFDYKYRQGEVLSGKVPLGYSIENKHLVPNHGADKVLHIFQFYAECGSLNQTIAHLESDIGIIMSQDNLKKSILKNKKYIGVFRDNDHYCPAIIPVDLFERVQELLAINIKSSQKYSYVFSGLLRCAHCGQAFSGFTQKAKKKAGGFYKYPYYKCHGAYPNKRCINRKMVPESYIEKYLLINVKDLLQEHIAEYEIASAKIVDYDSRRATLLKKIDKLKDLYINDIITMDELKMDKEKYMKELEDLPRNQNQKDLAPIKKLLKMDLDSIYKTLEPAERRQLWRSVIKEIQIDDHKNLKIIFL

SEQ ID NO: 8836 - protein, 447 aa, Unknown
  Description of Unknown: Integrase B8837 sequence
  SM00857,G3DSA:1.10.10.2600,IPR036162,PF13408,IPR025827, G3DSA:3.40.50.1390,mobidb-lite,PS51737,IPR006119,IPR038109, PF07508,IPR011109,SSF53041,PTHR30461,PS51736, cd00338,PF00239
MREIQLVTPNNRPILVRKRVCAYARVSTAKDAMLHSLSSQVSYYQKYIQAHKDWEFCGVYADEGLTGTKESRAQFQEMLKECRYGNIDIILTKSISRFARNTVDLLNTVRELKSLGIAVYFEEQNLNTLSSDGELMLTILASYAQEESLSASENMKWSIRKGFEHGELCCFRFMYGYRIERGSVTVCEEEAAIVQEVFDRFAKGESMLAIAKNLNARGISTHSKRQMRWSGKRIGKMLTNEKYTGNALLQKTYINNHLEKKRMVNRGELPKYYAEQTHPAIIDAQTYRLVQERIERNRGRHTVKIGYLKSAFTGKMFCGYCGEPVWRGKNNGRTIWGCRNARGKGVLTCHAASIRNDILEETCCSLFGLSTFDPTFIEQNVRKIILYDNRLVFSMADGREEKISWKNKSRSQSWTPEMKEHARQRTMERLQNRRINDADSKGNTSDS

SEQ ID NO: 8837 - protein, 447 aa, Unknown
  Description of Unknown: Integrase B8838 sequence
  PTHR30461:SF3,IPR036162,PS51737,IPR011109,PTHR30461, PS00397,PF00239,G3DSA:1.10.10.2600,IPR006119,SSF53041, cd00338,SM00857,IPR025827,IPR038109,PS51736, IPR006118,PF13408,G3DSA:3.40.50.1390,Coil
MSITNVAIYVRVSTDRQAKKGDSIDEQLSTCKNYIVSKENMVLAGVYIDDGISGRKIKRGDFEQLLDDVRLGRVDLIIFTKLDRWFRSLRHYLNTQAILEANHCDWLAVDQPYFDTTTPHGRAFVAQSMTFAELEAENDSVRIRDVFDYKYRQGEVLSGKVPLGYSIENKHLVPNHDADKVLHIFQFYAECGSLNQTITHLESDMGIIMSQDNLKKSILKNKKYIGVFRDNDHYCPAIIPADLFDRVQELLAINVKSSQKYSYVFSGLLRCAHCGQAFSGFTQKAKKKAGGFYKYPYYKCHGAYPNKRCINRKMVSESYIEKYLLINVKDLLQEHIAEYEIASAKIVDYDSRRATLLKKIDKLKDLYINDIITMDELKMDKEKYMKELEDLPRNQDQKDLAPIKKLLKMDLDSIYKTLELAERRQLWRSVIKEIQIDDHKNLKIIFL

SEQ ID NO: 8838 - protein, 447 aa, Unknown
  Description of Unknown: Integrase B8839 sequence
  PTHR30461:SF3,IPR036162,PS51737,IPR011109,PTHR30461, PS00397,PF00239,G3DSA:1.10.10.2600,IPR006119,SSF53041, cd00338,SM00857,IPR025827,IPR038109,PS51736, IPR006118,PF13408,G3DSA:3.40.50.1390,Coil
MSITNVAIYVRVSTDRQAKKGDSIDEQLSTCKNYIASKENMVLAGVYIDDGISGRKIKRGDFEQLLDDVRLGRVDLIIFTKLDRWFRSLRHYLNTQAILEANHCDWLAVDQPYFDTTTPHGRAFVAQSMTFAELEAENDSVRIRDVFDYKYRQGEVLSGKVPLGYSIENKHLVLNQDADKALHIFQFYAECGSLNQTIAHLESDMGIIMSQDNLKKSILKNKKYIGAFRDNDHYCPAIIPVDLFERVQELLAINIKSSQKYSYVFSGLLRCAHCGQAFSGFTQKAKKKAGGFYKYPYYKCHGAYPNKRCINRKMVPESYIEKYLLINVKDLLQEHIAEYEIASAKIVDYDSRRATLLKKIDKLKDLYINDIITMDELKMDKEKYMKELEDLPRNQNQKDLAPIKKLLKMDLDSIYKTLEPAERRQLWRSVIKEIQIDDHKNLKIIFL

SEQ ID NO: 8839 - protein, 447 aa, Unknown
  Description of Unknown: Integrase B8840 sequence
  PTHR30461:SF3,IPR036162,PS51737,IPR011109,PTHR30461, PS00397,PF00239,G3DSA:1.10.10.2600,IPR006119,SSF53041, cd00338,SM00857,IPR025827,IPR038109,PS51736, IPR006118,PF13408,G3DSA:3.40.50.1390,Coil
MSITNVAIYVRVSTDRQAKKGDSIDEQLSTCKAYIASKENMVLAGTYIDDGISGRKIKRGDFEQLLDDVRLGRVNLIIFTKLDRWFRSLRHYLNTQAVLEANHCDWLAVDQPYFDTTTPHGRAFVAQSMTFAELEAENDSVRIRDVFDYKYRQGEVLAGKAPLGFSIENKHLVPNQDAEKVLHIFQFYAACNSLNQTITHLESDMGIVMTQSNLKTAILKNKKYIGVFRDNDHYCPAIIPLDLFERVQELLAINVKISQKYNYIFSGLLRCAHCGHSFSGATRKIKKKAGGFYKYPLYKCHGAYPSKRCSNRKVVFESCIERYLIANIKPLLQEHIAEYEITSAKVIDYDSRRAALLRKIDKLKDLYVNDIITMDELKRDKEKYIKELENLPHNQEQKDLAPIQKLLKMDLDSIYQTLEPAERRQLWRSVIKEIQIDDHKNLKVIFL

SEQ ID NO: 8840 - protein, 447 aa, Unknown
  Description of Unknown: Integrase B8841 sequence
  PTHR30461:SF3,IPR036162,PS51737,IPR011109,PTHR30461, PS00397,PF00239,G3DSA:1.10.10.2600,IPR006119,SSF53041, cd00338,SM00857,IPR025827,IPR038109,PS51736, IPR006118,PF13408,G3DSA:3.40.50.1390,PF07508,Coil
MGKMNVGYLRVSTENQTEKYGLDVQRGAIEDYCKKNNITIDKWYVDGGYSGKKMQRPAMLELLSDCEKGIIDTVYTYKLDRMSRDTIDTLNLLYNTLPNYDVKIVSMSEQISTKTPMDKVFVTLNAAMNQYEREIIRTRMTAGLQERVKGGKWRGGGNIPYGYRYDRNDGLLHIYEPEAAVVRKVYDLYIDGNSCLSIPDLIGVKKTERAIILILKNTTYTGVVKYRGVEYPGNHEAIISKEKFDLVQRIMEKRSKKIKPVSNNLLTGLIYCGNCGARMRYQKWGKYYYKLICYSYQGCKKYLIKDPNCDNSGIRADTVESEVEDCFKRFAISSGSDDNDEKSKIETLRESLSSIGKKLKRLYVLYADSDSDALIDTISELESQKKTLESELESEIERSRKKSQNNYTHIAEIWDELSTKDKNSILKMCIDKILIYRDNIEIHFITN

SEQ ID NO: 8841 - protein, 447 aa, Unknown
  Description of Unknown: Integrase B8842 sequence
  PTHR30461:SF3,IPR036162,PS51737,IPR011109,PTHR30461, PS00397,PF00239,G3DSA:1.10.10.2600,IPR006119,SSF53041, cd00338,SM00857,IPR025827,IPR038109,PS51736, IPR006118,PF13408,G3DSA:3.40.50.1390,PF07508,Coil
MNKLNVGYLRVSTEAQTEKYGLDLQKQKIIERANKDGTTIDRWYIDGGYSGSKLDRPDIQRLLEDVEFGIVKSVYVYKLDRMSRDTIDALTLLCRTLPKYGVKLISATEELRIDTPSDKFLTSVTAVVGQYERELIYMRTRAGMVERVKKGLWMGGGRIPYGYYYDRNDGILHVKSGESEKVIEAYELYLKGYSCQRISDLLDFSCDKHVKNILTSKVYLGYIFYKGKYYKGLHEPIVSEKMFNSVHIFMKKRSSNAYIGNKFMLSGLCYCGKCGARMRYKKWGNCHIMECYSRDGGKQRMVRDPNCKNLRMDAKMIEQEVSDCFRRFIVNVKAEEKKENQKSIIEKKIKKSIDKLKKLYALYGEGDSDTLLSVIQEEEKRQKSLKTELEESIREESVDSSVKIENIQRVSTIWDTLTPKEQNKILKECVEKVVITDGDIDIHFNIS

SEQ ID NO: 8842 - protein, 447 aa, Unknown
  Description of Unknown: Integrase B8843 sequence
  PTHR30461:SF3,IPR036162,PS51737,IPR011109,PTHR30461, PS00397,PF00239,G3DSA:1.10.10.2600,IPR006119,SSF53041, cd00338,SM00857,IPR025827,IPR038109,PS51736, IPR006118,PF13408,G3DSA:3.40.50.1390,Coil
MSITNVAIYVRVSTDRQAKKGDSIDEQLSTCKAYIASKENMVLAGTYIDDGISGRKIKRGDFEQLLDDVRLGRVNLIIFTKLDRWFRSLRHYLNTQAVLEANHCDWLAVDQPYFDTTTPHGRAFVAQSMTFAELEAENDSVRIRDVFDYKYRQGEVLAGKAPLGFSIENKHLVPNQDAEKVLHIFQFYAACNSLNQTITHLESDMGIVMTQSNLKTAILKNKKYIGVFRDNDHYCPAIIPLDLFERVQELLAINVKISQKYNYIFSGLLRCAHCGHSFSGATRKIKKKAGGFYKYPLYKCHGAYPSKRCSNRKVIFESCIERYLIANIKPLLQEHIAEYEITSAKVIDYDSRRAALLKKIDKLKDLYVNDIITMDELKRDKEKYIKELENLPRNQEQKDLAPIRKLLKMDLDSIYQTLEPAERRQLWRSVIKEIQIDDHKNLKVIFL

SEQ ID NO: 8843 - protein, 447 aa, Unknown
  Description of Unknown: Integrase B8844 sequence
  PTHR30461:SF3,SM00857,IPR006118,IPR036162,PF13408, PS51737,G3DSA:3.40.50.1390,IPR025827,IPR006119,SSF53041, IPR011109,PF00239,PTHR30461,PS00397,PS51736, Coil,cd00338
MEGKKRAAIYVRVSTAEQRDHGLSVDSQIDALQKYCRENGLEVAGIYNDAGISARKKYKARPALLQLIEDCQNKKVDIILFTKLDRWFRSVADYYEVQSQLDAAKVPWRAIWEDYETETSAGVFKVNIMLSIAQAESDRTSERIRAVNEYRKSQGYIIVGKMPLGYIRTSASTIDFDPKTKDAMQTFFDTYLNTYSPVQAMDAAAEKGLKMSRKTAHFLLDKEPYYGTYYGVSVPGYITPAQHELIQQARQHYPRQPKADRVYIFTGLIFCASCGARMGSKCTCYTSYGKPSEKLYYQCRMRTVRRGECKNAAFIMEHNLESYMIDHLEELIVDYNASVQKLAAKAKSTEGKIEKIKGRLERLKDIYLDGDMSRAEYLEKTKELKAQLAQLAELESLATPALPVSQMPDNWREIYEQLSRQGKRDFWHRVVRRIEIKRHSVDKVYFV

SEQ ID NO: 8844 - protein, 447 aa, Unknown
  Description of Unknown: Integrase B8845 sequence
  PTHR30461:SF3,IPR036162,PS51737,IPR011109,PTHR30461, PS00397,PF00239,G3DSA:1.10.10.2600,IPR006119,SSF53041, cd00338,SM00857,IPR025827,IPR038109,PS51736, IPR006118,PF13408,G3DSA:3.40.50.1390,Coil
MSITNVAIYVRVSTDRQAKKGDSIDEQLSTCKAYIASKENMVLAGTYIDDGISGRKIKRGDFEQLLDDVRLGRVNLIIFTKLDRWFRSLRIQIVSQAVLEANHCDWLAVDQPYFDTTTPHGRAFVAQSMTFAELEAENDSVRIRDVFDYKYRQGEVLAGKAPLGFSIENKHLVPNQDAEKVLHIFQFYAACNSLNQTITHLESDMGIVMTQSNLKTAILKNKKYIGVFRDNDHYCPAIIPLDLFERVQELLAINVKISQKYNYIFSGLLRCAHCGHSFSGATRKIKKKAGGFYKYPLYKCHGAYPSKRCSNRKVIFESCIERYLIANIKPLLQEHIAEYEITSAKVIDYDSRRTALLKKIDKLKDLYINDIITMDELKRDKEKYIKELENLPRNQEQKDLTPIRKLLKMDLDSIYQTLEPAERRQLWRSVIKEIQIDDHKNLKVIFL

SEQ ID NO: 8845 - protein, 447 aa, Unknown
  Description of Unknown: Integrase B8846 sequence
  PTHR30461:SF3,IPR036162,PS51737,IPR011109,PTHR30461, PS00397,PF00239,G3DSA:1.10.10.2600,IPR006119,SSF53041, cd00338,SM00857,IPR025827,IPR038109,PS51736, IPR006118,PF13408,G3DSA:3.40.50.1390,PF07508,Coil
MNKLNVGYLRVSTEAQTEKYGLDLQKQKIIERANKDGATIDRWYIDGGYSGSKLDRPDIQRLLEDVEFGIVKSVYVYKLDRMSRDTIDALTLLCRTLPKYGVKLISATEELRIDTPSDKFLTSVTAVVGQYERELIYMRTRAGMVERVKKGLWMGGGRIPYGYYYDRNDGILHVKSGESEKVIEAYELYLKGYSCQRISDLLDFSCDKHVKNILTSKVYLGYIFYKGKYYKGLHEPIVSEKMFNSVHIFMKKRSSNAYIGNKFMLSGLCYCGKCGARMRYKKWGNCHIMECYSRDGGKQRMVRDPNCKNLRMDAKMIEQEVSDCFRRFIVNVKAEEKKENQKSIIEKKIKKSIDKLKKLYALYGEGDSDTLLSVIQEEEKRQKSLKTELEESIREESVDSSVKIENIQRVSTIWDTLTPKEQNKILKECVEKVVITDGDIDIHFNIS

SEQ ID NO: 8846 - protein, 447 aa, Unknown
  Description of Unknown: Integrase B8847 sequence
  PTHR30461:SF3,IPR036162,PS51737,IPR011109,PTHR30461, PS00397,PF00239,G3DSA:1.10.10.2600,IPR006119,SSF53041, cd00338,SM00857,IPR025827,IPR038109,PS51736, IPR006118,PF13408,G3DSA:3.40.50.1390,Coil
MSITNVAIYVRVSTDRQAKKGDSIDEQLSTCKNYIASKENMVLAGVYIDDGISGRKIKRGDFEQLLDDVRLGRVDLIIFTKLDRWFRSLRHYLNTQAILEANHCDWLAVDQPYFDTTTPHGRAFVAQSMTFAELEAENDSVRIRDVFDYKYRQGEVLSGKVPLGYSIENKHLVPNHDVDKVLHIFQFYAECGSLNQTIAHLESDMGIIMSQDNLKKSILKNKKYIGAFRDNDHYCPAIIPVDLFERVQELLAINIKSSQKYSYVFSGLLRCAHCGQAFSGFTQKAKKKAGGFYKYPYYKCHGAYPNKRCINRKMVPESYIEKYLLINVKDLLQEHIAEYEIASAKIVDYDSRRATLLKKIDKLKDLYINDIITMDELKMDKEKYMKELEDLPRNQDQKDLAPIKKLLKMDLDSIYKTLEPAERRQLWRSVIKEIQIDDHKNLKIIFL

SEQ ID NO: 8847 - protein, 447 aa, Unknown
  Description of Unknown: Integrase B8848 sequence
  PTHR30461:SF3,IPR036162,PS51737,IPR011109,PTHR30461, PS00397,PF00239,G3DSA:1.10.10.2600,IPR006119,SSF53041, cd00338,SM00857,IPR025827,IPR038109,PS51736, IPR006118,PF13408,G3DSA:3.40.50.1390,Coil
MSITNVAIYVRVSTDRQAKKGDSIDEQLSTCKAYIASKENMVLAGTYIDDGISGRKIKRGDFEQLLDDVRLGRVNLIIFTKLDRWFRSLRHYLNTQAVLEANHCDWLAVDQPYFDTTTPHGRAFVAQSMTFAELEAENDSVRIRDVFDYKYRQGEVLSGRAPLGFSVENKHLVPNQDAEKVLHIFQFYATCNSLNQTIAHLESDMGIVMTQSNLKTAILKNKKYIGVFRDNDHYCPAIIPLDLFERVQELLSINVKISQKYNYIFSGLLRCTHCGHSFSGATRKIKKKTGGFYKYPFYKCHGAYPSKRCSNRKVMFESCIERYLIANIKPLLQEHIAEYEITSAKVIDYDSRRTALLKKIDKLKDLYINDIITMDELKRDKEKYIKELENLPRNQEQKDLTPIRKLLKMDLDSIYQTLEPAERRQLWRSVIKEIQIDDHKNLKVIFL

SEQ ID NO: 8848 - protein, 447 aa, Unknown
  Description of Unknown: Integrase B8849 sequence
  PTHR30461:SF3,IPR036162,PS51737,IPR011109,PTHR30461, PS00397,PF00239,G3DSA:1.10.10.2600,IPR006119,SSF53041, cd00338,SM00857,IPR025827,IPR038109,PS51736, IPR006118,PF13408,G3DSA:3.40.50.1390,Coil
MSITNVAIYVRVSTDRQAKKGDSIDEQLSTCKAYIASKENMVLAGTYIDDGISGRKIKRGDFEQLLDDVRLGRVNLIIFTKLDRWFRSLRHYLNTQAILEANHCDWLAVDQPYFDTTTPHGRAFVAQSMTFAELEAENDSVRIRDVFDYKYRQGEVLAGKAPLGFSVENKHLVPNQDAEKVLHIFQFYAACNSLNQTITHLESDMGIVMTQSNLKTAILKNKKYIGVFRDNDHYCPAIIPLDLFERVQELLAINVKISQKYNYIFSGLLRCTHCGHSFSGATRKIKKKAGGFYKYPLYKCHGAYPSKRCSNRKVIFESCIERYLIANIKPLLQEHIAEYEITSAKVIDYDSRRAALLRKIDKLKDLYINDIITMDELKRDKEKYIKELENLPRNQEQKDLAPIRKLLKMDLESIYQTLEPAERRQLWRSVIKEIQIDDHKNLKVIFL

SEQ ID NO: 8849 - protein, 447 aa, Unknown
  Description of Unknown: Integrase B8850 sequence
  PTHR30461:SF3,IPR036162,PS51737,IPR011109,PTHR30461, PS00397,PF00239,G3DSA:1.10.10.2600,IPR006119,SSF53041, cd00338,SM00857,IPR025827,IPR038109,PS51736, IPR006118,PF13408,G3DSA:3.40.50.1390,Coil
MSITNVAIYVRVSTDRQAKKGDSIDEQLSTCKAYIASKENMVLAGTYIDDGISGRKIKRGDFEQLLDDVRLGRVNLIIFTKLDRWFRSLRHYLNTQAILEANHCDWLAVDQPYFDTTTPHGRAFVAQSMTFAELEAENDSVRIRDVFDYKYRQGEVLAGKAPLGFSVEKKHLVPNQDAEKVLHIFQFYAACNSLNQTITHLESDMGIVMTQSNLKTAILKNKKYIGVFRDNDHYCPAIIPLDLFERVQELLAINVKISQKYNYIFSGLLRCAHCGHSFSGATRKIKKKAGGFYKYPLYKCHGAYPSKRCSNRKVIFESCIERYLIANIKPLLQEHIAEYEITSAKVIDYDSRRAALLRKIDKLKDLYVNDIITMDELKRDKEKYIKELENLPRNQEQKDLAPIRKLLKMDLDSIYQTLEPAERRQLWRSVIKEIQIDDHKNLKVIFL

SEQ ID NO: 8850 - protein, 447 aa, Unknown
  Description of Unknown: Integrase B8851 sequence
  PTHR30461:SF3,IPR036162,PS51737,IPR011109,PTHR30461, PS00397,PF00239,G3DSA:1.10.10.2600,IPR006119,SSF53041, cd00338,SM00857,IPR025827,IPR038109,PS51736, IPR006118,PF13408,G3DSA:3.40.50.1390,Coil
MSITNVAIYVRVSTDRQAKKGDSIDEQLSTCKAYIASKENMVLAGTYIDDGISGRKIKRGDFEQLLDDVRLGRVNLIIFTKLDRWFRSLRHYLNTQAVLEANHCDWLAVDQPYFDTTTPHGRAFVAQSMTFAELEAENDSVRIRDVFDYKYRQGEVLAGKAPLGFSIENKHLVPNQDAEKVLHIFQFYAACNSLNQTITHLESDMGIVMTQSNLKTAILKNKKYIGVFRDNDHYCPAIIPLDLFERVQELLAINVKISQKYNYIFSGLLRCAHCGHSFSGATRKIKKKAGGFYKYPLYKCHGAYPSKRCSNRKVIFESCIERYLIANIKPLLQEHIAEYEITSAKVIDYDSRRTALLKKIDKLKDLYINDIITMDELKRDKEKYIKELENLPRNQEQKDLTPIRKLLKMDLDSIYQTLEPAERRQLWRSVIKEIQIDDHKNLKVIFL

SEQ ID NO: 8851 - protein, 447 aa, Unknown
  Description of Unknown: Integrase B8852 sequence
  PTHR30461:SF3,IPR036162,PS51737,IPR011109,PTHR30461, PS00397,PF00239,G3DSA:1.10.10.2600,IPR006119,SSF53041, cd00338,SM00857,IPR025827,IPR038109,PS51736, IPR006118,PF13408,G3DSA:3.40.50.1390,Coil
MSITNVAIYVRVSTDRQAKKGDSIDEQLSTCKNYIDSKENMVLAGTYIDDGISGRKIKRGDFEQLLDDVRLGRVNLIIFTKLDRWFRSLRHYLNTQAVLEANHCDWLAVDQPYFDTTTPHGRAFVAQSMTFAELEAENDSVRIRDVFDYKYRQGEVLAGKAPLGFSIENKHLVPNQDAEKVLHIFQFYAACNSLNQTITHLESDMGIVMTQSNLKTAILKNKKYIGVFRDNDHYCPAIIPLDLFERVQELLAINVKISQKYNYIFSGLLRCAHCGHSFSGATRKIKKKAGGFYKYPLYKCHGAYPSKRCSNRKVIFESCIERYLIANIKPLLQEHIAEYEITSAKVIDYDSRRAALLKKIDKLKDLYINDIITMDELKRDKEKYIKELENIPRNQEQKDLAPIRKLLKMDLDSIYQTLEPAERRQLWRSVIKEIQIDDHKNLKVIFL

SEQ ID NO: 8852 - protein, 447 aa, Unknown
  Description of Unknown: Integrase B8853 sequence
  PTHR30461:SF3,IPR036162,PS51737,IPR011109,PTHR30461, PS00397,PF00239,G3DSA:1.10.10.2600,IPR006119,SSF53041, cd00338,SM00857,IPR025827,IPR038109,PS51736, IPR006118,PF13408,G3DSA:3.40.50.1390,PF07508,Coil
MGKMNVGYLRVSTENQTEKYGLDVQRGAIEDYCKKNNITIDKWYVDGGYSGKKMQRPAMLELLSDCEKGIIDTVYTYKLDRMSRDTIDTLNLLYNTLPNYDVKIVSMSEQISTKTPMDKVFVTLNAAMNQYEREIIRTRMTAGLQERVKGGKWRGGGNIPYGYRYDRNDGLLHIYEPEAAVVRKVYDLYIDGNSCLSIPDLIGVKKTERAIILILKNTTYTGVVKYRGVEYPGNHEAIISKEKFDLVQRIMEKRSKKIKPVSNNLLTGLIYCGNCGARMRYQKWGKYYYKLICYSYQGCKKYLIKDPNCDNSGIRADTVESEVEDCFKRFAISSGSDDNDEKSKIETIRESLSSIGKKLKRLYVLYADSDSDALIETISELESQKKTLESELESEIERSRKKSQNNYTHIAEIWDELSTKDKNSILKMCIDKILIYRDNIEIHFITN

SEQ ID NO: 8853 - protein, 447 aa, Unknown
  Description of Unknown: Integrase B8854 sequence
  PTHR30461:SF3,IPR036162,PS51737,IPR011109,PTHR30461, PS00397,PF00239,G3DSA:1.10.10.2600,IPR006119,SSF53041, cd00338,SM00857,IPR025827,IPR038109,PS51736, IPR006118,PF13408,G3DSA:3.40.50.1390,Coil
MCQKIVVTLPNNLRIRVALYIRVSTEEQAKHGLSLADQREALIAYAAAHGMEVVGIYEDAGISARKPYKKRPALMRLLDDCRAGKIDTILFVKLDRWFRNVAGYYAVQEVLDKNHVAWQAIREDYETRTASGRLKVNIMLSVAQDEADRTSERIKAINEGKRAKGQPTNGRTPIGIKTENRAYVIDEETADIARDMFLAFIRLQSVLALRRYMAETWGVRRSYNKYKQALSNHLYIGEAFGIENALPPLIDRKTFDLAGELLQRRSQRNAGTDDRVYLFSGLLRCRECGRTMQSETVKKVYTYYRCRTHMLDPADCPHALRIREDVLEEYLLKEITGIAERYYSKAKGAQKKTAKTAEQIRRKMQKLKELYLSDLIELDDYRRDYTELKQQLSQAEPQEEKAFDIGTLRRGLEAYPGLDRQGKKEFWTRTIKRLEADNNGAFFVTPV

SEQ ID NO: 8854 - protein, 447 aa, Unknown
  Description of Unknown: Integrase B8855 sequence
  PTHR30461:SF3,IPR036162,PS51737,IPR011109,PTHR30461, PS00397,PF00239,G3DSA:1.10.10.2600,IPR006119,SSF53041, cd00338,SM00857,IPR025827,IPR038109,PS51736, IPR006118,PF13408,G3DSA:3.40.50.1390,Coil
MSITNVAIYVRVSTDRQAKKGDSIDEQLSTCKAYIASKENMVLAGTYIDDGISGRKIKRGDFEQLLDDVRLGRVNLIIFTKLDRWFRSLRHYLNTQAVLEANHCDWLAVDQPYFDTTTPHGRAFVAQSMTFAELEAENDSVRIRDVFDYKYRQGEVLAGKAPLGFSIENKHLVPNQDAEKVLHIFQFYAACNSLNQTITHLESDMGIVMTQSNLKTAILKNKKYIGVFRDNDHYCPAIIPLDLFERVQELLAINVKISQKYNYIFSGLLRCAHCGHSFSGATRKIKKKAGGFYKYPLYKCHGAYPSKRCSNRKVIFESCIERYLIANIKPLLQEHIAEYEITSAKVIDYDSRRAALLRKIDKLKDLYVNDIITMDELKRDKEKYIKELENLPRNQEQKDLAPIRKLLKMDLESIYQTLEPAERRQLWRSVIKEIQIDDHKNLKVIFL

SEQ ID NO: 8855 - protein, 447 aa, Unknown
  Description of Unknown: Integrase B8856 sequence
  PTHR30461:SF3,IPR036162,PS51737,IPR011109,PTHR30461, PS00397,PF00239,G3DSA:1.10.10.2600,IPR006119,SSF53041, cd00338,SM00857,IPR025827,IPR038109,PS51736, IPR006118,PF13408,G3DSA:3.40.50.1390,Coil
MSITNVAIYVRVSTDRQAKKGDSIDEQLSTCKAYIASKENMVLAGTYIDDGISGRKIKRGDFEQLLDDVRLGRVNLIIFTKLDRWFRSLRHYLNTQAILEANHCDWLAVDQPYFDTTTPHGRAFVAQSMTFAELEAENDSVRIRDVFDYKYRQGEVLAGKAPLGFSIENKHLVPNQDAEKVLHIFQFYAACNSLNQTITHLESDMGIVMTQSNLKTAILKNKKYIGVFRDNDHYCPAIIPLDLFERVQELLAINVKISQKYNYIFSGLLRCAHCGHSFSGATRKIKKKAGGFYKYPLYKCHGAYPSKRCSNRKVIFESCIERYLIANIKPLLQEHIAEYEITSAKVIDYDSRRTALLKKIDKLKDLYINDIITMDELKRDKEKYIKELENLPRNQEQKDLAPIRKLLKMDLESIYQTLEPAERRQLWRSVIKEIQIDDHKNLKVIFL

SEQ ID NO: 8856 - protein, 447 aa, Unknown
  Description of Unknown: Integrase B8857 sequence
  PTHR30461:SF3,IPR036162,PS51737,IPR011109,PTHR30461, PS00397,PF00239,G3DSA:1.10.10.2600,IPR006119,SSF53041, cd00338,SM00857,IPR025827,IPR038109,PS51736, IPR006118,PF13408,G3DSA:3.40.50.1390,Coil
MSITNVAIYVRVSTDRQAKKGDSIDEQLSTCKNYIDSKENMVLAGTYIDDGISGRKIKRGDFEQLLDDVRLGRIDLIIFTKLDRWFRSLRHYLNTQAILEVNHCDWLAVDQPYFDTTTPHGRAFVAQSMTFAELEAENDSVRIRDVFDYKYRQGEVLAGKAPLGFSIENKHLVPNQDAEKVLHIFQFYAACNSLNQTITHLESDMGIVMTQSNLKTAILKNKKYIGVFRDNDHYCPAIIPLDLFERVQELLAINVKISQKYNYIFSGLLRCAHCGHSFSGATRKIKKKAGGFYKYPLYKCHGAYPSKRCSNRKVIFESCIERYLIANIKPLLQEHIAEYEITSAKVIDYDSRRAALLKKIDKLKDLYVNDIITMDELKRDKEKYIKELENLPRNQEQKDLAPIRKLLKMDLDSIYQTLEPAERRQLWRSVIKEIQIDDHKNLKVIFL

SEQ ID NO: 8857 - protein, 447 aa, Unknown
  Description of Unknown: Integrase B8858 sequence
  PTHR30461:SF3,IPR036162,PS51737,IPR011109,PTHR30461, PS00397,PF00239,G3DSA:1.10.10.2600,IPR006119,SSF53041, cd00338,SM00857,IPR025827,IPR038109,PS51736, IPR006118,PF13408,G3DSA:3.40.50.1390,Coil
MSITNVAIYVRVSTDRQAKKGDSIDEQLSTCKAYIASKENMVLAGTYIDDGISGRKIKRGDFEQLLDDVRLGRVNLIIFTKLDRWFRSLRHYLNTQAILEANHCDWLAVDQPYFDTTTPHGRAFVAQSMTFAELEAENDSVRIRDVFDYKYRQGEVLAGKAPLGFSIENKHLVPNQDAEKVLHIFQFYAACNSLNQTITHLESDMGIVMTQSNLKTAILKNKKYIGVFRDNDHYCPAIIPLDLFERVQELLAINVKISQKYNYIFSGLLRCAHCGHSFSGATRKIKKKAGGFYKYPLYKCHGAYPSKRCSNRKVIFESCIERYLIANIKPLLQEHIADYEITSAKVIDYDSRRAALLRKIDKLKDLYVNDIITMDELKRDKEKYIKELENLPRNQEQKDLAPIRKLLKMDLDSIYQTLEPAERRQLWRSVIKEIQIDDHKNLKVIFL

SEQ ID NO: 8858 - protein, 447 aa, Unknown
  Description of Unknown: Integrase B8859 sequence
  PTHR30461:SF3,IPR036162,PS51737,IPR011109,PTHR30461, PS00397,PF00239,G3DSA:1.10.10.2600,IPR006119,SSF53041, cd00338,SM00857,IPR025827,IPR038109,PS51736, IPR006118,PF13408,G3DSA:3.40.50.1390,Coil
MSITNVAIYVRVSTDRQAKKGDSIDEQLSTCKNYIVSKENMVLAGVYIDDGISGRKIKRGDFEQLLDDVRLGRVDLIIFTKLDRWFRSLRHYLNTQAILEANHCDWLAVDQPYFDTTTPHGRAFVAQSMTFAELEAENDSVRIRDVFDYKYRQGEVLSGKVPLGYSIDNKHLVLNQDADKALHIFQFYAECGSLNQTILHMERDMGIIMTQDNLKKAILKNKKYTGVFRDNDHYCPAIVPADLFERVQELLAINIKSSQKYSYVFSGLLRCAHCGQAFSGFTQKAKKKAGGFYKYPYYKCHGAYPNKRCINRKMVPESYIEKYLLINVKDLLQEHIAEYEIASAKIVDYDSRRATLLKKIDKLKDLYINDIITMDELKMDKEKYMKELEDLPRNQNQKDLAPIKKLLKMDLDSIYKTLEPAERRQLWRSVIKEIQIDDHKNLKIIFL

SEQ ID NO: 8859 - protein, 447 aa, Unknown
  Description of Unknown: Integrase B8860 sequence
  PTHR30461:SF3,IPR036162,PS51737,IPR011109,PTHR30461, PS00397,PF00239,G3DSA:1.10.10.2600,IPR006119,SSF53041, cd00338,SM00857,IPR025827,IPR038109,PS51736, IPR006118,PF13408,G3DSA:3.40.50.1390,PF07508,Coil
MNKLNVGYLRVSTEAQTEKYGLDLQKQKIIERANKDGTTIDRWYIDGGYSGSKLDRPDIQRLLEDVEFGIVKSVYVYKLDRMSRDTIDALTLLCRTLPKYGVKLISATEELRIDTPSDKFLTSVTAVVGQYERELIYMRTRAGMVERVKKGLWMGGGRIPYGYYYDRNDGILHIDEENAIKVRKAYELYLKGFSCQKISDVLGMSGDTIVRRTLTNKVYLGYIFYKDKLYKGLHEPIIDQKTYDDVQRFMKKRSTNSFVGNKYMLSGLCYCGKCGARMKYKKWAQRYIMECYSRDGGKPYMIRDSKCDNRRMNVEIIEQEVSDCFRRFIVNAKASEKKESRKAVTEKEIKKTTDKLKKLYNLYVDSESETLLSIIQQEEKKRKLLEKELEETIREESSDTNVKIEEIKRISNIWDDLTPKEQNRILKECVEKIVITDDNIDIHFRII

SEQ ID NO: 8860 - protein, 447 aa, Unknown
  Description of Unknown: Integrase B8861 sequence
  PTHR30461:SF3,IPR036162,PS51737,IPR011109,PTHR30461, PS00397,PF00239,G3DSA:1.10.10.2600,IPR006119,SSF53041, cd00338,SM00857,IPR025827,IPR038109,PS51736, IPR006118,PF13408,G3DSA:3.40.50.1390,PF07508,Coil
MNKLNVGYLRVSTEAQTEKYGLDLQKQKIIERANKDGTTIDRWYIDGGYSGSRLDRPDIQRLLEDVEFWIIKSVYVYKLDRMSRDTIDALTLLCRTLPKYGVKLISATEELRIDTPSDKFLTSVTAVVGQYERELIYMRTRAGMVERVKKGLWMGGGRIPYGYYYDRNDGILHVKSGESEKVIEAYELYLKGYSCQRISDLLDFSCDKHVKNILTSKVYLGYIFYKGKYYKGLHEPIVSEKMFNSVHIFMKKRSSNAYIGNKFMLSGLCYCGKCGARMRYKKWGNCHIMECYSRDGGKQRMVRDPNCKNLRMDAKMIEQEVSDCFRRFIVNVKAEEKKENQKSIIEKKIKKSIDKLKKLYALYGEGDSDTLLSVIQEEEKRQKSLKTELEESIREESVDSSVKIENIQRVSTIWDTLTPKEQNKILKECVEKVVITDGDIDIHFNIS

SEQ ID NO: 8861 - protein, 447 aa, Unknown
  Description of Unknown: Integrase B8862 sequence
  PTHR30461:SF3,IPR036162,PS51737,IPR011109,PTHR30461, PS00397,PF00239,G3DSA:1.10.10.2600,IPR006119,SSF53041, cd00338,SM00857,IPR025827,IPR038109,PS51736, IPR006118,PF13408,G3DSA:3.40.50.1390,Coil
MSITNVAIYVRVSTDRQAKKGDSIDEQLSTCKAYIASKENMVLAGTYIDDGISGRKIKRGDFEQLLDDVRLGRVNLIIFTKLDRWFRSLRHYLNTQAVLEANHCDWLAVDQPYFDTTTPHGRAFVAQSMTFAELEAENDSVRIRDVFDYKYRQGEVLSGKAPLGFSVENKHLVPNQDAEKVLHIFQFYAACNSLNQTITHLESDMGIVMTQSNLKTAILKNKKYIGVFRDNDHYCPAIIPLDLFERVQELLAINVKISQKYNYIFSGLLRCAHCGHSFSGATRKIKKKTGGFYKYPFYKCHGAYPSKRCSNRKVMFESCIERYLIANIKPLLQEHIAEYEITSAKVIDYDSRRAALLRKIDKLKDLYVNDIITMDELKRDKEKYIKELENLPHNQEQKDLAPIQKLLKMDLDSIYQTLEPAERRQLWRSVIKEIQIDDHKNLKVIFL

SEQ ID NO: 8862 - protein, 447 aa, Unknown
  Description of Unknown: Integrase B8863 sequence
  PTHR30461:SF3,IPR036162,PS51737,IPR011109,PTHR30461, PS00397,PF00239,G3DSA:1.10.10.2600,IPR006119,SSF53041, cd00338,SM00857,IPR025827,IPR038109,PS51736, IPR006118,PF13408,G3DSA:3.40.50.1390,Coil
MSITNVAIYVRVSTDRQAKKGDSIDEQLSTCKAYIASKENMVLAGTYIDDRISGRKIKRGDFEQLLDDVRLGRVNLIIFTKLDRWFRSLRHYLNTQAVLEANHCDWLAVDQPYFDTTTPHGRAFVAQSMTFAELEAENDSVRIRDVFDYKYRQGEVLAGKAPLGFSVENKHLVPNQDAEKVLHIFQFYAACNSLNQTITHLESDMGIVMTQSNLKTAILKNKKYIGVFRDNDHYCPAIIPLDLFERVQELLAINVKISQKYNYIFSGLLRCAHCGHSFSGATRKIKKKAGGFYKYPLYKCHGAYPSKRCSNRKVIFESCIERYLIANIKPLLQEHIAEYEITSAKVIDYDSRRAALLRKIDKLKDLYINDIITMDELKRDKEKYIKELENLPRNQEQKDLAPIRKLLKMDLESIYQTLEPAERRQLWRSVIKEIQIDDHKNLKVIFL

SEQ ID NO: 8863 - protein, 447 aa, Unknown
  Description of Unknown: Integrase B8864 sequence
  PTHR30461:SF3,IPR036162,PS51737,IPR011109,PTHR30461, PS00397,PF00239,G3DSA:1.10.10.2600,IPR006119,SSF53041, cd00338,SM00857,IPR025827,IPR038109,PS51736, IPR006118,PF13408,G3DSA:3.40.50.1390,Coil
MSITNVAIYVRVSTDRQAKKGDSIDEQLSTCKAYIASKESMVLAGTYIDDGISGRKIKRGDFEQLLDDVRLGRIDLIIFTKLDRWFRSLRHYLNTQAILEANHCDWLAVDQPYFDTTTPHGRAFVAQSMTFAELEAENDSVRIRDVFDYKYRQGEVLSGKAPLGFSVENKHLVPNQDAEKVLHIFQFYAACNSLNQTTAHLESDMGIVMTQSNLKTAILKNKKYIGVFRDNDHYCPAIIPLDLFERVQELLAINVKISQKYNYIFSGLLRCAHCGHSFSGATRKIKKKTGGFYKYPFYKCHGAYPSKRCSNRKVMFESCIERYLIANIKPLLQEHIAEYEITSAKVIDYDSRRTALLKKIDKLKDLYINDIITMDELKRDKEKYIKELENLPRNQEQKDLTPIRKLLKMDLDSIYQTLEPAERRQLWRSVIKEIQIDDHKNLKVIFL

SEQ ID NO: 8864 - protein, 447 aa, Unknown
  Description of Unknown: Integrase B8865 sequence
  PTHR30461:SF3,IPR036162,PS51737,IPR011109,PTHR30461, PS00397,PF00239,G3DSA:1.10.10.2600,IPR006119,SSF53041, cd00338,SM00857,IPR025827,IPR038109,PS51736, IPR006118,PF13408,G3DSA:3.40.50.1390,Coil
MSITNVAIYVRVSTDRQAKKGDSIDEQLSTCKAYIASKENMVLAGTYIDDGISGRKIKRGDFEQLLDDVRLGRVNLIIFTKLDRWFRSLRHYLNTQAILEANHCDWLAVDQPYFDTTTPHGRAFVAQSMTFAELEAENDSVRIRDVFDYKYRQGEVLAGKAPLGFSIENKHLVPNQDAEKVLHIFQFYAACNSLNQTITHLESDMGIVMTQSNLKTAILKNKKYIGVFRDNDHYCPAIIPLDLFERVQELLAINVKISQKYNYIFSGLLRCAHCGHSFSGATRKIKKKAGGFYKYPLYKCHGAYPSKRCSNRKVIFESCIERYLIANIKPLLQEHIAEYEITSAKVIDYDSRRAALLRKIDKLKDLYVNDIITMDELKRDKEKYIKELENLPRNQEQKDLAPIRKLLKMDLESIYQTLEPAERRQLWRSVIKEIQIDDHKNLKVIFL

SEQ ID NO: 8865 - protein, 447 aa, Unknown
  Description of Unknown: Integrase B8866 sequence
  PTHR30461:SF3,IPR036162,PS51737,IPR011109,PTHR30461, PS00397,PF00239,G3DSA:1.10.10.2600,IPR006119,SSF53041, cd00338,SM00857,IPR025827,IPR038109,PS51736, IPR006118,PF13408,G3DSA:3.40.50.1390,Coil
MSITNVAIYVRVSTDRQAKKGDSIDEQLSTCKAYIASKENMVLAGTYIDDGISGRKIKRGDFEQLLDDVRLGRVNLIIFTKLDRWFRSLRHYLNTQAILEANHCDWLAVDQPYFDTTTPHGRAFVAQSMTFAELEAENDSVRIRDVFDYKYRQGEVLAGKAPLGFSVENKHLVPNQDAEKVLHIFQFYAACNSLNQTITHLESDMGIVMTQSNLKTAILKNKKYIGVFRDNDHYCPAIIPLDLFERVQELLAINVKISQKYNYIFSGLLRCAHCGHSFSGATRKIKKKAGGFYKYPLYKCHGAYPSKRCSNRKVIFESCIERYLIANIKPLLQEHIAEYEITSAKVIDYDSRRAALLRKIDKLKDLYVNDIITMDELKRDKEKYIKELENLPRNQEQKDLAPIRKLLKMDLDSIYQTLEPAERRQLWRSVIKEIQIDDYKNLKVIFL

SEQ ID NO: 8866 - protein, 447 aa, Unknown
  Description of Unknown: Integrase B8867 sequence
  PTHR30461:SF3,IPR036162,PS51737,IPR011109,PTHR30461, PS00397,PF00239,G3DSA:1.10.10.2600,IPR006119,SSF53041, cd00338,SM00857,IPR025827,IPR038109,PS51736, IPR006118,PF13408,G3DSA:3.40.50.1390,PF07508,Coil
MNRLNVGYLRVSTEAQTEKYGLDLQKQKIIERANKDGTTIDRWYIDGGYSGSKLDRPDIQRLLEDVEFGIVKSVYVYKLDRMSRDTIDALTLLCRTLPKYGVKLISATEELRIDTPSDKFLTSVTAVVGQYERELIYMRTRAGMVERVKKGLWMGGGRIPYGYYYDRNDGILHIDEENAIKVRKTYELYLKGFSCQKISDVLGMSGDTIVHRALTNKVYLGYIFYKDKLYKGLHEPIIDQKTYDDVQRFMKKRSTNSFVGNKYMLSGLCYCGKCGARMRYKKWSQRYIMECYSRDGGKPYMVRDSKCDNRRINVEIIEQEVSDCFRRFIVNAKASERKESKKVATEKEIKKTTYKLKKLYNLYVDSESETLFSIIQQEEKKRKLLEKELEEAIREESSDTNVKIEEIKRISNIWDDLTTKEQNRILKECVEKIVITDGNIDIHFRII

SEQ ID NO: 8867 - protein, 447 aa, Unknown
  Description of Unknown: Integrase B8868 sequence
  PTHR30461:SF3,IPR036162,PS51737,IPR011109,PTHR30461, PS00397,PF00239,G3DSA:1.10.10.2600,IPR006119,SSF53041, cd00338,SM00857,IPR025827,IPR038109,PS51736, IPR006118,PF13408,G3DSA:3.40.50.1390,Coil
MSITNVAIYVRVSTDRQAKKGDSIDEQLSTCKAYIASKENMVLAGTYIDDGISGRKIKRGDFEQLLDDVRLGRVNLIIFTKLDRWFRSLRHYLNTQAILEANHCDWLAVDQPYFDTTTPHGRAFVAQSMTFAELEAENDSVRIRDVFDYKYRQGEVLAGKAPLGFSIENKHLVPNQDAEKVLHIFQFYAACNSLNQTITHLESDMGIVMTQSNLKTAILKNKKYIGVFRDNDHYCPAIIPLDLFERVQELLAINVKISQKYNYIFSGLLRCAHCGHSFSGATRKIKKKAGGFYKYPLYKCHGAYPSKRCSNRKVIFESCIERYLIANIKPLLQEHIAEYEITSAKVIDYDSRRTALLKKIDKLKDLYINDIITMDELKRDKEKYIKELENLPRNQEQKDLAPIRKLLKMDLDSIYQTLEPAERRQLWRSVIKEIQIDDHKNLKVIFL

SEQ ID NO: 8868 - protein, 447 aa, Unknown
  Description of Unknown: Integrase B8869 sequence
  SM00857,IPR006118,G3DSA:1.10.10.2600,IPR036162,PF13408, PS51737,G3DSA:3.40.50.1390,IPR025827,IPR006119,IPR038109, IPR011109,SSF53041,PTHR30461,PS00397,PS51736, cd00338,PF00239
MAKKHVALYVRVSTEEQKNHGLSVDSQIDALEKYCAEHDYAIFRIYNDAGHSAAKRYTTRPALLQLMEDCSHGMFDLILFTRLDRWFRSVPDYYQVQSVLDHNHIAWRAIWEDYETETSEGVFKVNIMLSIAQAEAQRTSEKIRSVLQYKRDSGGYVGQPPMGYIRVNKRDLIFDDSIKDAIRELFKVYLTTNSIVKAVQSAHDNGLQISAQQAYRILKKEAYAGLAVGGYKCPAYISWEDHEKILSMMKQHTRKTTPARTYYFSGLLFCENCGYRLAAGASHKRSASGEDYYIKYYRCNGFRTMRNDCPGSYLNEKKLEKYLLDHLDAELDQYNVNLITHSKDYAPDEIKKQITALESRMRRIGDRYEDGDISREEYRNKRYEITHRINTLRSLIAKNPTPIHLADDWQAVYQGFDAEHKHQFWRSIIERIDVPVKDSYHIKIHFC

SEQ ID NO: 8869 - protein, 447 aa, Unknown
  Description of Unknown: Integrase B8870 sequence
  PTHR30461:SF3,SM00857,IPR006118,G3DSA:1.10.10.2600,IPR036162, PF13408,PS51737,G3DSA:3.40.50.1390,IPR025827,IPR006119, IPR038109,SSF53041,IPR011109,PTHR30461,PS00397, PS51736,cd00338,PF00239
MSITNVAIYVRVSTDRQAKKGDSIDEQLSTCKNYIASKENMVLAGVYIDDGISGRKIKRGDFEQLLDDVRLGRVDLIIFTKLDRWFRSLRHYLNTQAILEANHCDWLAVDQPYFDTTTPHGRAFVAQSMTFAELEAENDSVRIRDVFDYKYRQGEVLSGKAPLGYSIENKHLVLNQDADKALHIFQFYAECGSLNQTIAHLESDMGIIMSQDNLKKSILKNKKYIGVFRDNDHYCPAIIPVDLFERVQELLAINIKSSQKYSYVFSGLLRCAHCGQAFSGFTQKAKKKAGGFYKYPYYKCHGAYPNKRCINRKMVPESYIEKYLLINVKDLLQEHIVEYEIASAKIVDYDSRRATLLKKIDKLKDLYINDIITMDELKMDKEKYMKELEDLPRSQNQKDLAPIKKLLKMDLDSIYKTLEPAERRQLWRSVIKEIQIDDHKNLKIIFL

SEQ ID NO: 8870 - protein, 447 aa, Unknown
  Description of Unknown: Integrase B8871 sequence
  PTHR30461:SF3,IPR036162,PS51737,IPR011109,PTHR30461, PS00397,PF00239,G3DSA:1.10.10.2600,IPR006119,SSF53041, cd00338,SM00857,IPR025827,IPR038109,PS51736, IPR006118,PF13408,G3DSA:3.40.50.1390,Coil
MSITNVAIYVRVSTDRQAKKGDSIDEQLSTCKNYIASKENMVLAGVYIDDGISGRKIKRGDFEQLLDDVRLGRVDLIIFTKLDRWFRSLRHYLNTQAILEANHCDWLAVDQPYFDTTTPHGRAFVAQSMTFAELEAENDSVRIRDVFDYKYRQGEVLSGKVPLGYSIENKHLVPNQDADKALRIFQFYAECGSLNQTITHLESDMGIIMSQDNLKKSILKNKKYIGVFRDNDHYCPAIIPADLFDRVQELLAINVKSSQKYSYVFSGLLRCAHCGQAFSGFTQKAKKKAGGFYKYPYYKCHGAYPNKRCINRKMVPESYIEKYLLINVKGLLQKHIAEYEIASAKIVDYDSRRATLLKKIDKLKDLYINDIITMDELKMDKEKYMKELEDLPRNQNQKDLAPIKKLLKMDLDSIYKTLEPAERRQLWRSVIKEIQIDDHKNLKIIFL

SEQ ID NO: 8871 - protein, 447 aa, Unknown
  Description of Unknown: Integrase B8872 sequence
  PTHR30461:SF3,IPR036162,PS51737,IPR011109,PTHR30461, PS00397,PF00239,G3DSA:1.10.10.2600,IPR006119,SSF53041, cd00338,SM00857,IPR025827,IPR038109,PS51736, IPR006118,PF13408,G3DSA:3.40.50.1390,Coil
MSITNVAIYVRVSTDRQAKKGDSIDEQLSTCKAYIASKENMVLAGTYIDDGISGRKIKRGDFEQLLDDVRLGRVNLIIFTKLDRWFRSLRHYLNTQAILEANHCDWLAVDQPYFDTTTPHGRAFVAQSMTFAELEAENDSVRIRDVFDYKYRQGEVLAGKAPLGFSVENKHLVPNQDAEKVLHIFQFYAACNSLNQTITHLESDMGIVMTQSNLKTAILKNKKYIGVFRDNDHYCPAIIPLDLFERVQELLAINVKISQKYNYIFSGLLRCAHCGHSFSGATRKIKKKAGGFYKYPLYKCHGAYPSKRCSNRKVIFESCIERYLIANIKPLLQEHIAEYEITSAKVIDYDSRRAALLRKIDKLKDLYVNDIITMDELKRDKEKYIKELENLPRNQEQKDLAPIRKLLKMDLDSIYQTLEPAERRQLWRSVIKEIQIDDHKNLKVIFL

SEQ ID NO: 8872 - protein, 447 aa, Unknown
  Description of Unknown: Integrase B8873 sequence
  PTHR30461:SF3,IPR036162,PS51737,IPR011109,PTHR30461, PS00397,PF00239,G3DSA:1.10.10.2600,IPR006119,SSF53041, cd00338,SM00857,IPR025827,IPR038109,PS51736, IPR006118,PF13408,G3DSA:3.40.50.1390,Coil
MSITNVAIYVRVSTDRQAKKGDSIDEQLSTCKAYIASKENMVLAGTYIDDGISGRKIKRGDFEQLLDDVRLGRVNLIIFTKLDRWFRSLRHYLNTQAVLEANHCDWLAVNQPYFDTTTPHGRAFVAQSMTFAELEAENDSVRIRDVFDYKYRQGEVLAGKAPLGFSIENKHLVPNQDAEKVLHIFQFYAACNSLNQTITHLESDMGIVMTQSNLKTAILKNKKYIGVFRDNDHYCPAIIPLDLFERVQELLAINVKISQKYNYIFSGLLRCAHCGHSFSGATRKIKKKAGGFYKYPLYKCHGAYPSKRCSNRKVIFESCIERYLIANIKPLLQEHIAEYEITSAKVIDYDSRRAALLRKIDKLKDLYVNDIITMDELKRDKEKYIKELENLPRNQEQKDLAPIRKLLKMDLESIYQTLEPAERRQLWRSVIKEIQIDDHKNLKVIFL

SEQ ID NO: 8873 - protein, 447 aa, Unknown
  Description of Unknown: Integrase B8874 sequence
  SM00857,IPR006118,G3DSA:1.10.10.2600,IPR036162,PF13408, IPR025827,PS51737,Coil,G3DSA:3.40.50.1390,IPR006119, IPR038109,IPR011109,SSF53041,PTHR30461,PS00397, PS51736,cd00338,PF00239
MVKKHVALYVRVSTEEQKNHGLSVDSQIDALEKYCAEHDYAIFHIYNDAGHSAAKRYTTRPALLQLMEDCSHGMFDLILFTRLDRWFRSVPDYYQVQSVLDHNHIAWRAIWEDYETETSEGVFKVNIMLSIAQAEAQRTSEKIRSVLQYKRDSGGYVGQPPMGYIRINKRDLIFDDSIKDAIRELFKVYLTTNSIVKAVQSAHDNGLQISAQQAYRILKKEAYAGLAVGGYKCPAYISWEDHEKILSMMKQHTRKTTPARTYYFSGLLFCENCGYRLAAGASHKRSASGEDYYIKYYRCNGFRTMRSDCPGSYLNEKKLEKYLLDHLNAELDQYNVNLMTHSKDYDPDEIKKQIVALESRMRRIGDRYEDGDISREEYRNKRYEITYRINTLRSLIAKNPTPIHLADDWMAVYQGFDAEHKRQFWRSIIERMDVPVEDSYHVKIHFC

SEQ ID NO: 8874 - protein, 447 aa, Unknown
  Description of Unknown: Integrase B8875 sequence
  PTHR30461:SF3,IPR036162,PS51737,IPR011109,PTHR30461, PS00397,PF00239,G3DSA:1.10.10.2600,IPR006119,SSF53041, cd00338,SM00857,IPR025827,IPR038109,PS51736, IPR006118,PF13408,G3DSA:3.40.50.1390,Coil
MSITNVAIYVRVSTDRQAKKGDSIDEQLSTCKAYIASKENMVLAGTYIDDGISGRKIKRGDFEQLLDDVRLGRVNLIIFTKLDRWFRSLRHYLNTQAVLEANHCDWLAVDQPYFDTTTPHGRAFVAQSMTFAELEAENDSVRIRDVFDYKYRQGEVLSGKAPLGFSVENKHLVPNQDAEKVLHIFQFYAACNSLNQTTAHLESDMGIVMTQSNLKTAILKNKKYIGVFRDNDHYCPAIIPLDLFERVQELLAINVKISQKYNYIFSGLLRCAHCGHSFSGATRKIKKKTGGFYKYPFYKCHGAYPSKRCSNRKVMFESCIERYLIANIKPLLQEHIAEYEITSAKVIDYDSRRTALLKKIDKLKDLYINDIITMDELKRDKEKYIKELENLPRNQEQKDLAPIRKLLKMDLESIYQTLEPAERRQLWRSVIKEIQIDDHKNLKVIFL

SEQ ID NO: 8875 - protein, 447 aa, Unknown
  Description of Unknown: Integrase B8876 sequence
  PTHR30461:SF3,IPR036162,PS51737,IPR011109,PTHR30461, PS00397,PF00239,G3DSA:1.10.10.2600,IPR006119,SSF53041, cd00338,SM00857,IPR025827,IPR038109,PS51736, IPR006118,PF13408,G3DSA:3.40.50.1390,Coil
MSITNVAIYVRVSTDRQAKKGDSIDEQLSTCKAYIASKENMVLAGTYIDDGISGRKIKRGDFEQLLDDVRLGRVNLIIFTKLDRWFRSLRHYLNTQAVLEANHCDWLAVDQPYFDTTTPHGRAFVAQSMTFAELEAENDSVRIRDVFDYKYRQGEVLAGKAPLGFSIENKHLVPNQDAEKVLHIFQFYATCNSLNQTITHLESDMGIVMTQSNLKTAILKNKKYIGVFRDNDHYCPAIIPLDLFERVQELLAINVKISQKYNYIFSGLLRCAHCGHSFSGATRKIKKKAGGFYKYPLYKCHGAYPSKRCSNRKVIFESCIERYLIANIKPLLQEHIAEYEITSAKVIDYDSRRAALLRKIDKLKDLYVNDIITMDELKRDKEKYIKELENLPRNQEQKDLAPIRKLLKMDLESIYQTLEPAERRQLWRSVIKEIQIDDHKNLKVIFL

SEQ ID NO: 8876 - protein, 447 aa, Unknown
  Description of Unknown: Integrase B8877 sequence
  PTHR30461:SF3,IPR036162,PS51737,IPR011109,PTHR30461, PS00397,PF00239,G3DSA:1.10.10.2600,IPR006119,SSF53041, cd00338,SM00857,IPR025827,IPR038109,PS51736, IPR006118,PF13408,G3DSA:3.40.50.1390,Coil
MSITNVAIYVRVSTDRQAKKGDSIDEQLSTCKAYIASKENMVLAGTYIDDGISGRKIKRGDFEQLLDDVRLGRVNLIIFTKLDRWFRSLRHYLNTQAVLEANHCDWLAVDQPYFDTTTPHGRAFVAQSMTFAELEAENDSVRIRDVFDYKYRQGEVLAGKAPLGFSIENKHLVPNQDAEKVLHIFQFYAACNSLNQTITHLESDMGIVMTQSNLKTAILKNKKYIGVFRDNDHYCPAIIPLDLFERVQELLAINVKISQKYNYIFSGLLRCAHCGHSFSGATRKIKKKAGGFYKYPLYKCHGAYPSKRCSNRKVIFESCIERYLIANIKPLLQEHIAEYEITSAKVIDYDSRRAALLKKIDKLKDLYINDIITMDELKRDKEKYIKELENIPRNQEQKDLAPIRKLLKMDLDSIYQTLEPAERRQLWRSVIKEIQIDDHKNLKVIFL

SEQ ID NO: 8877 - protein, 447 aa, Unknown
  Description of Unknown: Integrase B8878 sequence
  PTHR30461:SF3,IPR036162,PS51737,IPR011109,PTHR30461, PS00397,PF00239,G3DSA:1.10.10.2600,IPR006119,SSF53041, cd00338,SM00857,IPR025827,IPR038109,PS51736, IPR006118,PF13408,G3DSA:3.40.50.1390,Coil
MSITNVAIYVRVSTDRQAKKGDSIDEQLSTCKAYIASKENMVLAGTYIDDGISGRKIKRGDFEQLLDDVRLGRVNLIIFTKLDRWFRSLRHYLNTQAVLEANHCDWLAVDQPYFDTTTPHGRAFVAQSMTFAELEAENDSVRIRDVFDYKYRQGEVLAGKAPLGFSIENKHLVPNQDAEKVLHIFQFYAACNSLNQTITHLESDMGIVMTQSNLKTAILKNKKYIGVFRDNDHYCPAIIPLDLFERVQELLAINVKISQKYNYIFSGLLRCAHCGHSFSGATRKIKKKAGGFYKYPLYKCHGAYPSKRCSNRKVIFESCIERYLIANIKPLLQEHIADYEITSAKVIDYDSRRATLLRKIDKLKDLYVNDIITMDELKRDKEKYIKELENLPRNQEQKDLAPIRKLLNMDLESIYQTLEPAERRQLWRSVIKEIQIDDHKNLKVIFL

SEQ ID NO: 8878 - protein, 447 aa, Unknown
  Description of Unknown: Integrase B8879 sequence
  PTHR30461:SF3,IPR036162,PS51737,IPR011109,PTHR30461, PS00397,PF00239,G3DSA:1.10.10.2600,IPR006119,SSF53041, cd00338,SM00857,IPR025827,IPR038109,PS51736, IPR006118,PF13408,G3DSA:3.40.50.1390,Coil
MCQKIVVTLPNNLRIRVALYIRVSTEEQAKHGLSLADQREALIAYAAAHGMEVVGIYEDAGISARKPYKKRPALMRLLDDCRAGKIDTILFVKLDRWFRNVAGYYAVQEVLDKNHVAWQAIREDYETRTASGRLKVNIMLSVAQDEADRTSERIKAINEGKRAKGQPTNGRTPIGIKTENRAYVIDAETADIARDMFLAFIRLQSVLALRRYMAETWGVRRSYNKYKQALSNHLYIGEAFGIENALPPLIDRKTFDLAGELLQRRSQRNAGTDDRVYLFSGLLRCRECGRTMQSETVKKVYTYYRCRTHMLDPADCPHALRIREDVLEEYLLKEITGIAERYYSKAKGAQKKTAKTAEQIRRKMQKLKELYLSDLIELDDYRRDYTELKQQLSQAEPQEEKAFDIGTLQRGLEAYPGLDRQGKKEFWTRTIKRLEADNNGAFFVTPV

SEQ ID NO: 8879 - protein, 447 aa, Unknown
  Description of Unknown: Integrase B8880 sequence
  PTHR30461:SF3,IPR036162,PS51737,IPR011109,PTHR30461, PS00397,PF00239,G3DSA:1.10.10.2600,IPR006119,SSF53041, cd00338,SM00857,IPR025827,IPR038109,PS51736, IPR006118,PF13408,G3DSA:3.40.50.1390,Coil
MSIINVAIYVRVSTDRQAKKGDSIDEQLSTCKAYIASKENMVLAGVYIDDGISGRKIKRGDFEQLLDDVRLGRVDLIIFTKLDRWFRSLRHYLNTQAILEANHCDWLAVDQPYFDTTTPHGRAFVAQSMTFAELEAENDSVRIRDVFDYKYRQGEVLSGKVPLGYSIENKHLVLNQDADKALHIFQFYAECGSLNQTIAHLESDMGIIMSQDNLKKSILKNKKYIGAFRDNDHYCPAIIPVDLFERVQELLAINIKSSQKYSYVFSGLLRCAHCGQAFSGFTQKAKKKAGGFYKYPYYKCHGAYPNKRCINRKMVPESYIEKYLLINVKDLLQEHIAEYEIASAKIVDYDSRRATLLKKIDKLKDLYINDIITMDELKMDKEKYMKELEDLPRNQNQKDLAPIKKLLKMDLDSIYKTLEPAERRQLWRSVIKEIQIDDHKNLKIIFL

SEQ ID NO: 8880 - protein, 446 aa, Unknown
  Description of Unknown: Integrase B8881 sequence
  PTHR30461:SF3,IPR036162,PS51737,IPR011109,PTHR30461, PS00397,PF00239,G3DSA:1.10.10.2600,IPR006119,SSF53041, cd00338,SM00857,IPR025827,IPR038109,PS51736, IPR006118,PF13408,G3DSA:3.40.50.1390,Coil
MKRAALYIRVSTEEQARHGLSLEDQKNNLTQFSKSHGMKIAGIYEDAGISARKPYKKRPALLRLLEDCKAGKIDLILFIKLDRWFRNVGNYYAVQEILDQYNVSWQATQEDYETTTASGRLKVNIMLSVAQDEADRTSERIKFVFEGKRARLEPLTGNIPFGYKIEGKSFKKDESKEALVNDFFKKYLASGSISKTSEFIREKYGVLMRYHLIDKMLRSTTYYGKYYNMDGMCPAYITKEDHEQIQAMRRKVVRKAKNNRTYLFSGLVVCPECGNRMGARINTKQTYVFYNCNGHYTKQNGCQNRVNLGERKIEEYLLATVANKFHEYKANFSALKNAEINKRSRAEISAAKSKLNKLKDLYLNDIITLEELKTDRESLLAKISDLEKAALPEQKQDFESIDRVLIENWKESYDGLNREEKREFWRIIIKEIKIYPDRHIEYSLNV

SEQ ID NO: 8881 - protein, 446 aa, Unknown
  Description of Unknown: Integrase B8882 sequence
  PTHR30461:SF3,SM00857,IPR006118,G3DSA:1.10.10.2600,IPR036162, PF13408,IPR025827,PS51737,G3DSA:3.40.50.1390,IPR006119, IPR038109,SSF53041,IPR011109,PTHR30461,PS00397, PS51736,cd00338,PF00239
MCQKIVVTLPNNLRIRVALYIRVSTEEQAKHGLSLADQRDALIAYAAAHGMEVVGIYEDAGISARKPYKKRPALMRLLDDCRAGKIDTILFVKLDRWFRNVAGYYAVQEVLDKNHVDWQAIREDYETRTASGRLKVNIMLSVAQDEADRTSERIKAINEGKRAKGQPTNGKTPIGICVKNRRYDIDEKTADAARDMFPAFIRLQSILALRRYMATEWGIKRSYNKYKDALRSRLYLGEAFGVENALPALVDRETFDLAGKILERRSQRNASADRIYLFTGILRCRECGRNMQPETVKQVYKYYRCRTHTLDPADCPHILRIREDVLEDYLLREFEGIAKKYYSKSKTAEKKPPKTAEQIKRKMQKLKDLYLSDLIEIEEYKKDYTELKQQLATINPEPIKEFDLETLRRELKEYPDLDRQAKKEFWVRTIQRIDADNDGAFFVTPS

SEQ ID NO: 8882 - protein, 446 aa, Unknown
  Description of Unknown: Integrase B8883 sequence
  PTHR30461:SF3,cd00338,SM00857,IPR036162,PS51736, PF13408,G3DSA:3.40.50.1390,IPR025827,IPR006119,SSF53041, PTHR30461,mobidb-lite,Coil,PF00239
MNIAIYPRKSKKDDNSESMEQQIDDCKKYINKTYHNANIIVYSGDYAITGHSTAKRKDFQRMMDDVRAGRINAVVIMRYDRIARNMRDFCNLYHDMESAGCNLISVSQQIDTSTPYGKNFMYQMANMAELEWAVISERYKDTAAYKIREGKAYTGRVPIGFKIEKIDGVKKVVHDNEEQTRAIFDYLLATKSKRGTVLWVRENFIPDFTRHKLDTMIKSDLYIGKVRENDHFCEPYFTKDQMEEIRSVNQIKYAPSGHIYLFSGLFRCPICGRKMASFYSIDKKTKKHRQYQRCWFGGNEKLHKTKLVSEAKTEKYLLENLDATLKNLEFDVKKEAGKPKRNLNKKLNDAIGERERLNYLFEKGRIDIPEYEKKYSVLSEKINSITEELSNNKVVRIEEFKKQIPEDWKELYEQLDQKGKQEFWHRIIKEIYLNEAFEITGFIFYI

SEQ ID NO: 8883 - protein, 446 aa, Unknown
  Description of Unknown: Integrase B8884 sequence
  PTHR30461:SF3,SM00857,IPR006118,G3DSA:1.10.10.2600, IPR036162,PF13408,PS51737,G3DSA:3.40.50.1390, IPR025827,IPR006119,IPR038109,IPR011109, SSF53041,PTHR30461,PS00397,PS51736,cd00338,PF00239
MCQKIVVTLPNNLRIRVALYIRVSTEEQAKHGLSLADQREALIAYAAAHGMEVVGIYEDAGISARKPYKKRPALMRLLDDCRAGKIDTILFVKLDRWFRNVAGYYAVQEVLDKNHVDWQAIREDYETRTASGRLKVNIMLSVAQDEADRTSERIKAINEGKRLKGQPTTWRTPIGICVKDRHYAIDEETADAARDMFPAFIRLQSILALRRYMATEWGIKRSYNKYKDALSNRLYLGEAFGVENVLPALVDQETFNLAGRILEQRSQRNASADRIYLFTGILRCRECGRNMQPETVKQVYKYYRCRTHTLDPADCPHILRIREDVLEDYLLREFEGIAKKYYSKSKTAEKKPPKTAEQIKRKMQKLKDLYLSDLIEIEEYKKDYTELKQQLAAINPEPIKEFDLETLRRELKEYPDLDRQAKKEFWVRTIQRIDADNDGAFFVTPS

SEQ ID NO: 8884 - protein, 446 aa, Unknown
  Description of Unknown: Integrase B8885 sequence
  PTHR30461:SF3,cd00338,SM00857,IPR036162,PF13408, IPR025827,PS51736,G3DSA:3.40.50.1390,IPR006119,SSF53041, PTHR30461,mobidb-lite,Coil,PF00239
MNIAIYPRKSKKDDNSESMEQQIDDCKKYIDKTYHNANIIVYSGDYAITGHSTAKRKDFQRMMDDVRAGRINAVVIMRYDRIARNMRDFCNLYHDMESAGCNLISVSQQIDTSTPYGKNFMYQMANMAELEWAVISERYKDTAAYKIREGKAYTGRVPIGFKIEKTDGVKKVVHDNEEQTRAIFDYLLATKSKRGTVLWVRENLIPDFTRHKLDTMIKSDLYIGKVRENENFCEPYFTKEQMEEIRSVNQIKYAPSGHIYLFSGLFRCPICGRKMASFYSIDRKTKKHRQYQRCWFGGNEKLHKTKLVSEAKTEKYLLENLDAALKNLEFDVKKEAGKPKRNLNKKLNDAIGERERLNYLFEKGRIDIPEYEKKYSILSGKINLISEELSNNKIVKIEEFKKQIPSNWKVLYEQLDQKGKQEFWHRIIKEIYLNEAFEITGFIFYI

SEQ ID NO: 8885 - protein, 446 aa, Unknown
  Description of Unknown: Integrase B8886 sequence
  PTHR30461:SF3,cd00338,SM00857,IPR036162, PF13408,IPR025827,G3DSA:3.40.50.1390,PS51736, IPR006119,SSF53041,PTHR30461,mobidb-lite, Coil,PF00239
MNIAIYPRKSKKDDNSESMEQQIDDCRKYINKTYPDANIIVYSGDYAITGHSTAKRKDFQRMMDDVRAGRINAVVIMRYDRIARNMRDFCNLYHDMESSGCNLISVSQQIDTSTPYGKNFMYQMANMAELEWAVISERYKDTAAYKIREGKAYTGRVPIGFKIEKIDGVKKVVHDNEEQTRAIFDYLLATKSKRGTVLWVRENFIPDFTRHKLDTMIKSDLYIGKVRENENFCEPYFTKEKMEEIRSVNQIKYAPSGHIYLFSGLFRCPICGRKMASFYSIDRKTKKHRQYQRCWFGGNEKLHKTKLVSEAKTEKYLLENLDAALKNLEFDVKKEAGKPKQNLNKKLNDAIGERERLNYLFEKGRIDIPEYEKKYSVLSEKINSITEELSNNKVVRIEEFKKQIPEDWKELYEQLDQKGKQEFWHRIIKEIYLNEAFEITGFIFYI

SEQ ID NO: 8886 - protein, 446 aa, Unknown
  Description of Unknown: Integrase B8887 sequence
  PTHR30461:SF3,SM00857,IPR006118,G3DSA:1.10.10.2600,IPR036162, PF13408,IPR025827,G3DSA:3.40.50.1390,PS51737,IPR006119, IPR038109,IPR011109,SSF53041,PTHR30461,PS00397, PS51736,cd00338,PF00239
MCQKIVVTLPNNLRIRVALYIRVSTEEQAKHGLSLADQRDALIAYAAAHGMEVVGIYEDAGISARKPYKKRPALMRLLDDCRAGKIDTILFVKLDRWFRNVAGYYAVQEVLDKNHVDWQAIREDYETRTASGRLKVNIMLSVAQDEADRTSERIKAINEGKRAKGQPTNGKTPIGICVKNRRYAIDEETADAARDMFPAFIRLQSILALRRYMATEWGIKRSYNKYKDALRSRLYLGEAFGVENALPALVDRETFDLAGKILERRSQRNASADRIYLFTGILRCRECGRNMQPETVKQVYKYYRCRTHTLDPADCPHILRIREDVLEDYLLREFEGIAKKYYSKSKTAEKKPPKTAEQIKRKMQKLKDLYLSDLIEIEEYKKDYTELKQQLAAINPEPIKEFDLETLRRELKEYPDLDRQAKKEFWVRTIQRIDADNDGAFFVTPS

SEQ ID NO: 8887 - protein, 446 aa, Unknown
  Description of Unknown: Integrase B8888 sequence
  PTHR30461:SF3,SM00857,PS51736,PF13408,IPR025827, IPR036162,G3DSA:3.40.50.1390,IPR006119,SSF53041,PF00239, PTHR30461,mobidb-lite,Coil,cd00338
MNIAIYPRKSKKDDNSESMEQQIDDCRKYIDKTYHNANIIVYSGDYAITGHSTAKRKDFQRMMDDVRAGRINAVVIMRYDRIARNMRDFCNLYHDMESAGCNLISVSQQIDTSTPYGKNFMYQMANMAELEWAVISERYKDTAAYKIREGKAYTGRVPIGFKIEKIDGIKKVVHDNEEQTRAIFDYLLATKSKRGTVLWVRENLIPDFTRHKLDTMIKSDLYIGKVRENENFCEPYFTQKQMEEIRSVNQIKYAPSGHIYLFSGLFRCPICGRKMASFYSIDKKTKKHRQYQRCWFGGNEKLHKTKLVSEAKTEKYLLENLDAALKNLEFDVKKEAGKPKRNLNKKLNDAIAERDRLNYLFEKGRIDIPEYEKKYSVLSEKINSITEELSNNKVVRIEEFKKQIPEDWKVLYEQLDQKGKQEFWHRIIKEIYLNEAFEITGFIFYI

SEQ ID NO: 8888 - protein, 446 aa, Unknown
  Description of Unknown: Integrase B8889 sequence
  PTHR30461:SF3,IPR036162,PS51737,IPR011109, PTHR30461,PS00397,PF00239,G3DSA:1.10.10.2600, IPR006119,SSF53041,cd00338,SM00857,IPR025827,IPR038109 ,PS51736,IPR006118,PF13408,G3DSA:3.40.50.1390,Coil
MQRAALYIRVSTEEQARHGLSLEDQKNSLTQFSKSHGMKIVGIYEDAGISARKPYKKRPALLKLLDDCRVGKIDLILFIKLDRWFRNVGNYYAVQEILDQYGVSWQATQEDYETTTASGRLKVNIMLSVAQDEADRTSERIKFVFEGKRARLEPLTGNIPFGYKIEGKSFKKDESKEALVNDFFKKYLASGSISKTSEFIREKYGVLMRYHLIDKMLRSTTYYGKYYNMDGMCPAYITKEDHEQIQAMRRKVVRKAKNNRTYLFSGLVVCPECGNRMGARINTKQTYVFYNCNGHYTKQNGCQNRVNLGERKIEEYLLATVANKFHEYKANFSALKNAEINKRSRAEISAAKSKLNKLKDLYLNDIITLEELKTDREALLAKISDLEKAALPEQKQDFESIDRVLTENWKESYDGLNREEKREFWRIIVKEIKIYPDRHIEYSLNV

SEQ ID NO: 8889 - protein, 446 aa, Unknown
  Description of Unknown: Integrase B8890 sequence
  PTHR30461:SF3,SM00857,IPR006118,G3DSA:1.10.10.2600,IPR036162, PF13408,IPR025827,PS51737,G3DSA:3.40.50.1390,IPR006119, IPR038109,IPR011109,SSF53041,PTHR30461,PS00397, PS51736,cd00338,PF00239
MCQKIVVTLPNNLRIRVALYIRVSTEEQAKHGLSLADQRDALIAYAAAHGMEVVGIYEDAGISARKPYKKRPALMRLLDDCRAGKIDTILFVKLDRWFRNVAGYYAVQEVLDKNHVDWQAIREDYETRTASGRLKVNIMLSVAQDEADRTSERIKAINEGKRAKGQPTNGKTPIGICVRNRRYDIDEETADAARDMFPAFIRLQSILALRRYMATEWGIKRSYNKYKDALRSRLYLGEAFGVENALPALIDQETFDLAGKILERRSQRNASADRIYLFTGILRCRECGRNMQPETVKKVYKYYRCRTHTLDPADCPHILRIREDVLEDYLLREFEGIAKKYYSKSKTAEKKPPKTAEQIKRKMQKLKDLYLSDLIEIEEYKKDYTELKQQLAAINPEPIKEFDLETLRRELKEYPDLDRQAKKEFWVRTIQRIDADNDGAFFVTPS

SEQ ID NO: 8890 - protein, 446 aa, Unknown
  Description of Unknown: Integrase B8891 sequence
  PTHR30461:SF3,SM00857,IPR006118,G3DSA:1.10.10.2600,IPR036162, PF13408,PS51737,IPR025827,G3DSA:3.40.50.1390,IPR006119, IPR038109,IPR011109,SSF53041,PTHR30461,PS00397, PS51736,cd00338,PF00239
MCQKIVVTLPNILRIRVALYIRVSTEEQAKHGLSLADQREALTDYATAHNMEVVGIYEDAGISARKPYKKRPALMRLLDDCNAGKVDTILFVKLDRWFRNVAGYYAVQEVLDKNHVAWQAIREDYETRTASGRLKVNIMLSVAQDEADRTSERIKDINEGKRAKGQPTNGRTPIGICVKNRRYAIDEETADAARDMFPAFIRLQSILALRRYMATEWGIKRSYNKYKDALGNRLYLGEAFGVENALPALIDQETFDLAGKILERRSQRNASADRIYLFTGILRCRECGRNMQPETVKQVYKYYRCRTHTLDPADCPHILRIREDVLEDYLLREFEGIAKKYYSKSKTAEKKPPKTAEQIKRKMQKLKDLYLSDLIEIEEYKKDYTDLKQQLAAINPEPIKEFDLETLRRELKEYPDLDRQAKKEFWVRTIQRIDADNDGAFFVTPS

SEQ ID NO: 8891 - protein, 446 aa, Unknown
  Description of Unknown: Integrase B8892 sequence
  PTHR30461:SF3,SM00857,IPR006118,G3DSA:1.10.10.2600,IPR036162, PF13408,IPR025827,G3DSA:3.40.50.1390,PS51737,IPR006119, IPR038109,IPR011109,SSF53041,PTHR30461,PS00397, PS51736,cd00338,PF00239
MCQKIVVTLPNNLRIRVALYIRVSTEEQAKHGLSLADQREALIAYAAAHGMEVVGIYEDAGISARKPYKKRPALMRLLDDCRAGKIDTILFVKLDRWFRNVAGYYAVQEVLDKNHVDWQAIREDYETRTASGRLKVNIMLSVAQDEADRTSERIKAINEGKRAKGQPTNGKTPIGICVKNRRYAIDEETAAAARDMFPAFIRLQSILALRRYMATEWGIKRSYNKYKDALRSRLYLGEAFGVENALPALVDRETFDLAGKILERRSQRNASADRIYLFTGILRCRECGRNMQPETVKQVYKYYRCRTHTLDPADCPHILRIREDVLEDYLLREFEGIAKKYYSKSKTAEKKPPKTAEQIKRKMQKLKDLYLSDLIEIEEYKKDYTELKQQLAAINPEPIKEFDLETLRRELKEYPDLDRQAKKEFWVRTIQRIDADNDGAFFVTPS

SEQ ID NO: 8892 - protein, 446 aa, Unknown
  Description of Unknown: Integrase B8893 sequence
  PTHR30461:SF3,SM00857,IPR006118,G3DSA:1.10.10.2600,IPR036162, PF13408,IPR025827,G3DSA:3.40.50.1390,PS51737,IPR006119, IPR038109,IPR011109,SSF53041,PTHR30461,PS00397, PS51736,cd00338,PF00239
MCQKIVVTLPNNLRIRVALYIRVSTEEQAKHGLSLADQREALIAYAAAHGMEVVGIYEDAGISARKPYKKRPALMRLLDDCRAGKIDTILFVKLDRWFRNVAGYYAVQEVLDKNHVDWQAIREDYETRTASGRLKVNIMLSVAQDEADRTSERIKAINEGKRAKGQPTNGKTPIGICVKNRRYAIDEETADAARDMFPAFIRLQSILALRRYMATEWGIKRSYNKYKDALRSRLYLGEAFGVENALPALVDRETFDLAGKILERRSQRNASADRIYLFTGILRCRECGRNMQPETVKQVYKYYRCRTHTLDPADCPHILRIREDVLEDYLLREFEGIAKKYYSKSKTAEKKPPKTAEQIKRKMQKLKDLYLSDLIEIEEYKKDYTELKQQLAAINPEPIKEFDLETLRRELKEYPDLDRQAKKEFWVRTIQRIDADNDGAFFVTPS

SEQ ID NO: 8893 - protein, 446 aa, Unknown
  Description of Unknown: Integrase B8894 sequence
  PTHR30461:SF3,SM00857,IPR006118,G3DSA:1.10.10.2600,IPR036162, PF13408,IPR025827,PS51737,G3DSA:3.40.50.1390,IPR006119, IPR038109,IPR011109,SSF53041,PTHR30461,PS00397, PS51736,cd00338,PF00239
MCQKIVVTLPNNLRIRVALYIRVSTEEQAKHGLSLADQRDALIAYAAAHGMEVVGIYEDAGISARKPYKKRPALMRLLDDCRAGKIDTILFVKLDRWFRNVAGYYAVQEVLDKNHVDWQAIREDYETRTASGRLKVNIMLSVAQDEADRTSERIKAINEGKRAKGQPTNGKTPIGICVKNRRYAIDEETADAARDMFPAFIRLQSILALRRYMATEWGIKRSYNKYKDALRSRLYLGEAFGVENALPALIDQETFDLAGKILERRSQRNASADRIYLFTGILRCRECGRNMQPETVKQVYKYYRCRTHTLDPADCPHILRIREDVLEDYLLREFEGIAKKYYSKSKTAEKKPPKTAEQIKRKMQKLKDLYLSDLIEIEEYKKDYTELKQQLAAINPEPIKEFDLETLRRELKEYPDLDRQAKKEFWVRTIQRIDADNDGAFFVTPS

SEQ ID NO: 8894 - protein, 446 aa, Unknown
  Description of Unknown: Integrase B8895 sequence
  PTHR30461:SF3,cd00338,SM00857,PS51736,IPR036162, PF13408,G3DSA:3.40.50.1390,IPR025827,IPR006119,SSF53041, PTHR30461,mobidb-lite,Coil,PF00239
MNIAIYPRKSKKDDNSESMEQQIDDCKKYIDKTYHNANIIVYSGDYAITGHSTAKRKDFQRMMDDVRAGRINAVVIVRYDRIARNMRDFCNLYHDMESAGCNLISVSQQIDTSTPYGKNFMYQMANMAELEWAVISERYKDTAAYKIREGKAYTGRVPIGFKIEKIDGVKKVVHDNEEQTRAIFDYLLATKSKRGTVLWVRKNFIPDFTRHKLDTMIKSDLYIGKVRDNDHFCDPYFTKEQMEEIRSVNQIKYAPSGHIYLFSGLFRCPICGRKMSSFYSIDRKTKKHRQYQRCWFGGNEKLHKTKLVSEAKTEKYLLENLDAALKNLEFDVKKEAGKPKQNLNKKLNDAIGERERLNYLFEKGRIDIPEYEKKYSILSEKINSITEELSNNKVVRIEEFKKQIPEDWKELYEQLDQKGKQEFWHRIIKEIYLNEAFEITGFIFYI

SEQ ID NO: 8895 - protein, 446 aa, Unknown
  Description of Unknown: Integrase B8896 sequence
  PTHR30461:SF3,cd00338,SM00857,IPR036162,PS51736,PF13408, G3DSA:3.40.50.1390,IPR025827,IPR006119,SSF53041,PTHR30461 ,mobidb-lite,Coil,PF00239
MNIAIYPRKSKKDDNSESMEQQIDDCKKYIDKTYHNANIIVYSGDYAITGHSTAKRKDFQRMMDDVRAGRINAVVIMRYDRIARNMRDFCNLYHDMESAGCNLISVSQQIDTSTPYGKNFMYQMANMAELEWAVISERYKDTAAYKIREGKAYTGRVPIGFKIEKIDGIKKVVHDNEEQTRAIFDYLLATKSKRGTVLWVRENLIPDFTRHKLDTMIKSDLYIGKVRENENFCEPYFTQKQMEEIRSVNQIKYAPSGHIYLFSGLFRCPICGRKMSSFYSIDRKTKKHRQYQRCWFGGNEKLHKTKLVSEAKTEKYLLENLDAALKNLEFDVKKEAGKPKRNLNKKLNDAIGERDRLNYLFEKGRIDIPEYEKKYSVLSEKINSITEELSNNKVVRIEEFKKQIPEDWKELYEQLDQKGKQEFWHRIIKEIYLNEAFEITGFIFYI

SEQ ID NO: 8896 - protein, 446 aa, Unknown
  Description of Unknown: Integrase B8897 sequence
  PTHR30461:SF3,cd00338,SM00857,IPR036162,PS51736, PF13408,G3DSA:3.40.50.1390,IPR025827,IPR006119,SSF53041, PTHR30461,mobidb-lite,Coil,PF00239
MNIAIYPRKSKKDDNSESMEQQIDDCKKYINKTYHNANIIVYSGDYAITGHSTAKRKDFQRMMDDVRAGRINAVVIMRYDRIARNMRDFCNLYHDMESAGCNLISVSQQIDTSTPYGKNFMYQMANMAELEWAVISERYKDTAAYKIREGKAYTGRVPIGFKIEKIDGVKKVVHDNEEQTRAIFDYLLATKSKRGTVLWVRENLIPDFTRHKLDTMIKSDLYIGKVRENENFCEPYFTKEQMEEIRSVNQIKYAPSGHIYLFSGLFRCPICGRKMSSFYSIDRKTKKHRQYQRCWFGGNEKLHKTKLVSEAKTEKYLLENLDAALKNLEFDVKKEAGKPKRNLNKKLNDAIGERDRLNYLFEKGRIDIPEYEKKYSVLSEKINSITEELSNNKVVRIEEFKKQIPEDWKELYEQLDQKGKQEFWHRIIKEIYLNEAFEITGFIFYI

SEQ ID NO: 8897 - protein, 446 aa, Unknown
  Description of Unknown: Integrase B8898 sequence
  PTHR30461:SF3,cd00338,SM00857,IPR036162,PS51736,PF13408, G3DSA:3.40.50.1390,IPR025827,IPR006119,SSF53041,PTHR30461 ,mobidb-lite,Coil,PF00239
MNIAIYPRKSKKDDNSESMEQQIDDCRKYINKTYPDANIIVYSGDYAITGHSTAKRKDFQRMMDDVRAGRINAVVIMRYDRIARNMRDFCNLYHDMESAGCNLISVSQQIDTSTPYGKNFMYQMANMAELEWAVISERYKDTAAYKIREGKAYTGRVPIGFKIEKIDGVKKVVHDNEEQTRAIFDYLLATKSKRGTVLWVRENFIPDFTRHKLDTMIKSDLYIGKVRENDHFCEPYFTKDQMEEIRSVNQIKYAPSGHIYLFSGLFRCPICGRKMSSFYSIDRKTKKHRQYQRCWFGGNEKLHKTKLVSEAKTEKYLLENIDTALKNLEFDVKKEESKPKRNLNKKLNDAIGERDRLNYLFEKGRIDIPEYEKKYSILSGKINSISEELSNNKVVKIEEFKKQIPSDWRVLYEQLDQKGKQEFWHRIIKEIYLNEAFEITGFIFYI

SEQ ID NO: 8898 - protein, 446 aa, Unknown
  Description of Unknown: Integrase B8899 sequence
  PTHR30461:SF3,SM00857,IPR006118,G3DSA:1.10.10.2600,IPR036162, PF13408,IPR025827,G3DSA:3.40.50.1390,PS51737,IPR006119, IPR038109,SSF53041,IPR011109,PTHR30461,PS00397, PS51736,cd00338,PF00239
MCQKIVVTLPNNLRIRVALYIRVSTEEQAKHGLSLADQRDALIAYAAAHGMEVVGIYEDAGISARKPYKKRPALMRLLDDCRAGKIDTILFVKLDRWFRNVAGYYAVQEVLDKNHVDWQAIREDYETRTASGRLKVNIMLSVAQDEADRTSERIKAINEGKRAKGQPTNGKTPIGICVKNRRYAIDEETADAARDMFPAFIRLQSILALRRYMATEWGIKRSYNKYKDALRSRLYLGEAFGVENALPALVDRETFDLAGKILERRSQRNASADRIYLFTGILRCRECGRNMQPETVKQVYKYYRCRTHTLDPADCPHILRIREDVLEDYLLREFEGIAKKYYSKSKTAEKKPPKTAEQIKRKMKKLKDLYLSDLIEIEEYKKDYTELKQQLAAINPEPIKEFDLETLQRELKEYPDLDRQAKKEFWVRTIQRIDADNDGAFFVTPS

SEQ ID NO: 8899 - protein, 446 aa, Unknown
  Description of Unknown: Integrase B8900 sequence
  PTHR30461:SF3,cd00338,SM00857,IPR036162,PF13408, IPR025827,G3DSA:3.40.50.1390,PS51736,IPR006119,SSF53041, PTHR30461,mobidb-lite,Coil,PF00239
MNIAIYPRKSKKDDNSESMEQQIDDCKKYINKTYHNANIIVYSGDYAITGHSTAKRKDFQRMMDDVRAGRINAVVIMRYDRIARNMRDFCNLYHDMESAGCNLISVSQQIDTSTPYGKNFMYQMANMAELEWAVISERYKDTAAYKIREGKAYTGRVPIGFKIEKIDGVKKVVHDNEEQTRAIFDYLLATKSKRGTVLWVRENLIPDFTRHKLDTMINSDLYIGKVRENENFCEPYFTKEQMEEIRSVNQIKYAPSGHIYLFSGLFRCPICGRKMASFYSIDRKTKKHRQYQRCWFGGNEKLHKTKLVSEAKTEKYLLENLDAALKNLEFDVKKEAGKPKQNLNKKLNDAIGERDRLNYLFEKGRIDIPEYEKKYSVLSEKINSITEELSNNKVVRIEEFKKQIPEDWKELYEQLDQKGKQEFWHRIIKEIYLNEAFEITGFIFYI

SEQ ID NO: 8900 - protein, 446 aa, Unknown
  Description of Unknown: Integrase B8901 sequence
  PTHR30461:SF3,cd00338,SM00857,PS51736, IPR036162,PF13408,IPR025827,G3DSA:3.40.50.1390, IPR006119,SSF53041,PTHR30461,mobidb-lite, Coil,PF00239
MNIAIYPRKSKKDDNSESMEQQIDDCKKYINKTYPNANIIVYSGDYAITGHSTAKRKDFQRMMDDVRAGRINAVVIMRYDRIARNMRDFCNLYHDMESAGCNLISVSQQIDTSTPYGKNFMYQMANMAELEWAVISERYKDTAAYKIREGKAYTGRVPIGFKIEKIDGVKKVVHDNEEQTRAIFDYLLATKSKRGTVLWVRENLISDFTRHKLDSMINSDLYIGKVRENENFCEPYFTKEQMEEIRSVNQIKYAPSGHIYLFSGLFRCPICGRKMASFYSIDRKTKKHRQYQRCWFGGNEKLHKTKLVSEAKTEKYLLENLDTALKNLEFDVKKEAGKPKRNLNKKLNDAIGERDRLNYLFEKGRIDIPEYEKKYSVLSEKINSITEELSNNKVVRIEEFKKQIPEDWKELYEQLDQKGKQEFWHRIIKEIYLNEAFEITGFIFYI

SEQ ID NO: 8901 - protein, 446 aa, Unknown
  Description of Unknown: Integrase B8902 sequence
  PTHR30461:SF3,cd00338,SM00857,IPR036162,PS51736, PF13408,G3DSA:3.40.50.1390,IPR025827,IPR006119,SSF53041, PTHR30461,mobidb-lite,Coil,PF00239
MNIAIYPRKSKKDDNSESMEQQIDDCRKYINKTYPDANIIVYSGDYAITGHSTAKRKDFQRMMDDVRAGRINAVVIMRYDRIARNMRDFCNLYHDMESAGCNLISVSQQIDTSTPYGKNFMYQMANMAELEWAIISERYKDTAAYKIREGKAYTGRVPIGFKIEKIDGVKKVVHDNEEQTRAIFDYLLATKSKRGTVLWVRENLIPDFTRHKLDTMIKSDLYIGKVRENDHFCQPYFTKDQMEEIRSVNQIKYAPSGHIYLFSGLFRCPICGRKMSSFYSIDRKTKKHRQYQRCWFGGNEKLHKTKLVSEAKTEKYLLENLDAALKNLEFDVKKEAGKPKQNLNKKLNDAIGERERLNYLFEKGRIDIPEYEKKYSVLSEKINSITEELSNNKVVRIEEFKKQIPEDWKELYEQLDQKGKQEFWHRIIKEIYLNEAFEITGFIFYI

SEQ ID NO: 8902 - protein, 446 aa, Unknown
  Description of Unknown: Integrase B8903 sequence
  PTHR30461:SF3,cd00338,SM00857,IPR036162, PF13408,IPR025827,G3DSA:3.40.50.1390,PS51736, IPR006119,SSF53041,PTHR30461,mobidb-lite, Coil,PF00239
MNIAIYPRKSKKDDNSESMEQQIDDCRKYINKTYPDANIIVYSGDYAITGHSTAKRKDFQRMMDDVRAGRINAVVIMRYDRIARNMRDFCNLYHDMESAGCNLISVSQQIDTSTPYGKNFMYQMANMAELEWAVISERYKDTAAYKIREGKAYTGRVPIGFKIEKIDGVKKVVHDNEEQTRAIFDYLLATKSKRGTVLWVRENLIPDFTRHKLDTMIKSDLYIGKVRENENFCEPYFTQKQMEEIRSVNQIKYAPSGHIYLFSGLFRCPICGRKMASFYSIDKKTKKHRQYQRCWFGGNEKLHKTKLVSEAKTEKYLLENLDAALKNLEFDVKKEAGKPKRNLNKKLNDAIGERDRLNYLFEKGRIDIPEYEKKYSILSGKINSISEELSNNKVVRIEEFKKQIPSNWKVLYEQLDQKGKQEFWHRIIKEIYLNEAFEITGFIFYI

SEQ ID NO: 8903 - protein, 446 aa, Unknown
  Description of Unknown: Integrase B8904 sequence
  PTHR30461:SF3,cd00338,SM00857,IPR036162,PF13408, IPR025827,G3DSA:3.40.50.1390,PS51736,IPR006119,SSF53041, PTHR30461,mobidb-lite,Coil,PF00239
MNIAIYPRKSKKDDNSESMEQQIDDCRKYINKTYPDANIIVYSGDYAITGHSTAKRKDFQRMMDDVRAGRINAVVIMRYDRIARNMRDFCNLYHDMESAGCNLISVSQQIDTSTPYGKNFMYQMANMAELEWAVISERYKDTAAYKIREGKAYTGRVPIGFKIEKIDGIKKVVHDNEEQTRAIFDYLLATKSKRGTVLWVRENLIPDFTRHKLDTMIKSDLYIGKVRENENFCEPYFTQKQMEEIRSVNQIKYAPSGHIYLFSGLFRCPICGRKMSSFYSIDRKTKKHRQYQRCWFGGNEKLHKTKLVSETKTEKYLLENLDAALKNLEFDVKKEAGKPKRNLNKKLNDAIAERDRLNYLFEKGRIDIPEYEKKYSILSGKINSISEELSNNKVVKIEEFKKQIPSDWKVLYEQLDQKGKQEFWHRIIKEIYLNEAFEISGFIFYI

SEQ ID NO: 8904 - protein, 446 aa, Unknown
  Description of Unknown: Integrase B8905 sequence
  PTHR30461:SF3,cd00338,SM00857,IPR036162, PF13408,IPR025827,G3DSA:3.40.50.1390,mobidb-lite, IPR006119,SSF53041,PTHR30461,PS51736, Coil,PF00239
MNIAIYPRKSKKDDNSESMEQQIDDCKKYIDKTYTNANIIVYSGDYAITGHSTAKRKDFQRMMDDVRAGRINAVVIMRYDRIARNMRDFCNLYHDMESAGCNLISVSQQIDTSTPYGKNFMYQMANMAELEWAVISERYKDTAAYKIREGKAYTGRVPIGFKIEKIDGVKKVVHDNEEQTRAIFDYLLATKSKRGTVLWVRENFIPDFTRHKLDTMIKSDLYIGKVRENENFCEPYFTKEKMEEIRSVNQIKYAPSGHIYLFSGLFRCPICGRKMASFYSIDRKTKKHRQYQRCWFGGNEKLHKTKLVSEAKTEKYLLENLDAALKNLEFDVKKEAGKPKRNLNKKLNDAIAERDRLNYLFEKGRIDIPEYEKKYSILSGKINSISEELSNNKVVRIEEFKKQIPSNWKVLYEQLDQKGKQEFWHRIIKEIYLNEAFEITGFIFYI

SEQ ID NO: 8905 - protein, 446 aa, Unknown
  Description of Unknown: Integrase B8906 sequence
  PTHR30461:SF3,SM00857,IPR006118,G3DSA:1.10.10.2600,IPR036162, PF13408,IPR025827,G3DSA:3.40.50.1390,PS51737,IPR006119, IPR038109,IPR011109,SSF53041,PTHR30461,PS00397, PS51736,cd00338,PF00239
MCKKIVVTLPNNLRIRVALYIRVSTEEQAKHGLSLADQREALIAYAAAHGMEVVGIYEDAGISARKPYKKRPALLRLLDDCSAGKIDTILFVRLDRWFRNVAGYYAVQEVLDKNHVDWQAIREDYETRTASGRLKVNIMLSVAQDEADRTSERIKAINEGKRAKGQPTNGKTPIGICVKNRRYTIDEETADAARDMFPAFIRLQSILALRRYMATEWGIKRSYNKYKDALGNRLYLGEAFGVENALPALIDQETFDLAGKILERRSQRNASADRIYLFTGILRCRECGRNMQPETVKQVYKYYRCRTHTLDPADCPHILRIREDVLEDYLLREFEGIAKKYYSKSKTAEKKPPKTAEQIKRKMQKLKDLYLSDLIEIEEYKKDYTELKQQLAAINPEPIKEFDLETLRRELKEYPDLDRQAKKEFWVRTIQRIDADNDGAFFVTPS

SEQ ID NO: 8906 - protein, 446 aa, Unknown
  Description of Unknown: Integrase B8907 sequence
  PTHR30461:SF3,cd00338,SM00857,IPR036162,PF13408, IPR025827,G3DSA:3.40.50.1390,mobidb-lite,IPR006119,SSF53041, PTHR30461,PS51736,Coil,PF00239
MNIAIYPRKSKKDDNSESMEQQIDDCKKYIDKTYTNANIIVYSGDYAITGHSTAKRKDFQRMMDDVRAGRINAVVIMRYDRIARNMRDFCNLYHDMESAGCNLISVSQQIDTSTPYGKNFMYQMANMAELEWAVISERYKDTAAYKIREGKAYTGRVPIGFKIEKIDGVKKVVHDNEEQTRAIFDYLLATKSKRGTVLWVRENFIPDFTRHKLDTMIKSDLYIGKVRENENFCEPYFTKEKMEEIRSVNQIKYAPSGHIYLFSGLFRCPICGRKMASFYSIDRKTKKHRQYQRCWFGGNEKLHKTKLVSEAKTEKYLLENLDAALKNLEFDVKKEAGKPKRNLNKKLNDAIGERDRLNYLFEKGRIDIPEYEKKYSVLSEKINSITEELSNNKVVRIEEFKKQIPEDWKELYEQLDQKGKQEFWHRIIKEIYLNEAFEITGFIFYI

SEQ ID NO: 8907 - protein, 446 aa, Unknown
  Description of Unknown: Integrase B8908 sequence
  PTHR30461:SF3,SM00857,IPR006118,G3DSA:1.10.10.2600, IPR036162,PF13408,IPR025827,PS51737, G3DSA:3.40.50.1390,IPR006119,IPR038109,SSF53041, IPR011109,PTHR30461,PS00397,PS51736,cd00338,PF00239
MCQKIVVTLPNNLRIRVALYIRVSTEEQAKHGLSLADQRDALIAYAAAHGMEVVGIYEDAGISARKPYKKRPALMRLLDDCRAGKIDTILFVKLDRWFRNVAGYYAVQEVLDKNHVDWQAIREDYETRTASGRLKVNIMLSVAQDEADRTSERIKAINEGKRAKGQPTNGKTPIGICVKNRRYDIDEKTADAARDMFPAFIRLQSILALRRYMATEWGIKRSYNKYKDALRSRLYLGEAFGVENALPALVDRETFDLAGKILERRSQRNASADRIYLFTGILRCRECGRNMQPETVKQVYKYYRCRTHTLDPADCPHILRIREDVLEDYLLREFEGIAKKYYSKSKTAEKKPPKTAEQIKRKMQKLKDLYLSDLIEIEEYKKDYTELKQQLAAINPEPIKEFDLETLRRELKEYPDLDRQAKKEFWVRTIQRIDADNDGAFFVTPS

SEQ ID NO: 8908 - protein, 446 aa, Unknown
  Description of Unknown: Integrase B8909 sequence
  PTHR30461:SF3,SM00857,IPR006118,G3DSA:1.10.10.2600,IPR036162, PF13408,IPR025827,PS51737,G3DSA:3.40.50.1390,IPR006119, IPR038109,SSF53041,IPR011109,PTHR30461,PS00397, PS51736,cd00338,PF00239
MCQKIVVTLPNNLRIRVALYIRVSTEEQAKHGLSLADQREALTDYAAAHNMEVVGIYEDAGISARKPYKKRPALLRLLDDCRAGKIDTILFVKLDRWFRNVAGYYAVQEVLDKNHVDWQAIREDYETRTASGRLKVNIMLSVAQDEADRTSERIKAINEGKRAKGQPTNGKTPIGICVKNRRYDIDEETADAARDMFPAFIRLQSILALRRYMATEWGIKRSYNKYKDALRSRLYLGEAFGVENALPALVDRETFDLAGKILERRSQRNASADRIYLFTGILRCRECGRNMQPETVKQVYKYYRCRTHTLDPADCPHILRIREDVLEDYLLREFEGIAKKYYSKSKTAEKKPPKTAEQIKRKMQKLKDLYLSDLIEIEEYKKDYTELKQQLAAINPEPIKEFDLETLRRELKEYPDLDRQAKKEFWVRTIQRIDADNDGAFFVTPS

SEQ ID NO: 8909 - protein, 446 aa, Unknown
  Description of Unknown: Integrase B8910 sequence
  PTHR30461:SF3,SM00857,PS51736,IPR036162,PF13408, G3DSA:3.40.50.1390,IPR025827,IPR006119,SSF53041,PF00239, PTHR30461,mobidb-lite,Coil,cd00338
MNIAIYPRKSKKDDNSESMEQQIDDCRKYINKTYPDANIIVYSGDYAITGHSTAKRKDFQRMMDDVRAGRINAVVIMRYDRIARNMRDFCNLYHDMESAGCNLISVSQQIDTSTPYGKNFMYQMANMAELEWAVISERYKDTAAYKIREGKAYTGRVPIGFKIEKIDGVKKVVHDNEEQTRAIFDYLLATKSKRGTVLWVRENFIPDFTRHKLDTMIKSDLYIGKVRENDHFCEPYFTEDQMEEIRSVNQIKYAPSGHIYLFSGLFRCPICGRKMASFYSIDRKTKKHRQYQRCWFGGNEKLHNTKLVSEAKTEKYLLENLDAALKNLEFDVKKEAGKPKRNLNKKLNDAIAERDRLNYLFEKGRIDIPEYEKKYSVLSEKINSINEELSNNKVVRIEEFKKQIPEDWKELYEQLDQKGKQEFWHRIIKEIYLNEAFEITGFIFYI

SEQ ID NO: 8910 - protein, 446 aa, Unknown
  Description of Unknown: Integrase B8911 sequence
  PTHR30461:SF3,IPR036162,PS51737,IPR011109, PTHR30461,PS00397,PF00239,G3DSA:1.10.10.2600, IPR006119,SSF53041,cd00338,SM00857,IPR025827,IPR038109 ,PS51736,IPR006118,PF13408,G3DSA:3.40.50.1390,PF07508,Coil
MVTALYARVSTDAQAEEGYSIDIQGERLEAYCKLKGYKSFEHYVDGGYTGSNLNRPAMTRLIEDCKCGEVERVVVFKLDRLSRSQKDTLYLIEEVFLPHNVDFVSISESFDTATPFGRAMIGILSVFAQLERENIKERTKAGMLGRVREGYWPGGGRTPFGYDYDPKLKTLVPNKDAETVRKIYDLYIGGCSTYEIQRILGMKYDRLAEQILARKTNTGVIVYNGVEYQGKHEPIISLETYERAMACMKKRSAAPTPRNNVYLLTGLLVCGVCGAKMRYQGGHIYCYSRQKSKAYLVKDPNCDNESHNVQDIENAVLSIFFQNTSRFTRAESYDVKTNVLDELMQQKKGLEQKIKRLYGLYGDGGDDYLIEAIEESKQQLVRIADKIANEEERNKEEAKRRKLVEKVSNIRDRWNTMAPEEQREVLHEAIKQITITHDKINIDFNL

SEQ ID NO: 8911 - protein, 446 aa, Unknown
  Description of Unknown: Integrase B8912 sequence
  PTHR30461:SF3,SM00857,IPR036162,PF13408,IPR025827, G3DSA:3.40.50.1390,PS51736,IPR006119,SSF53041,PF00239, PTHR30461,mobidb-lite,Coil,cd00338
MNIAIYPRKSKKDDNSESMEQQIDDCKKYIDKTYHNANIIVYSGDYAITGHSTAKRKDFQRMMDDVRAGRINAVVIMRYDRIARNMRDFCNLYHDMESAGCNLISVSQQIDTSTPYGKNFMYQMANMAELEWAVISERYKDTAAYKIREGKAYTGRVPIGFKIEKIDGVKKVVHDNEEQTRSIFDYLLATKSKRGTVLWVRENLIPDFTRHKLDTMIKSDLYIGKVRENENFCEPYFTKDQMEEIRSVNQIKYAPSGHIYLFSGLFRCPICGRKMASFYSIDRKTKKHRKYQRCWFGGNEKLHKTKLVSEAKTEKYLLENLDTALKNLEFDVKKEAGKPKRNLNKKLNDAIGERDRLNYLFEKGRIDIPEYEKKYSVLSEKINSITEELSNNKVVRIEEFKKQIPEDWKELYEQLDQKGKQEFWHRIIKEIYLNEAFEITGFIFYI

SEQ ID NO: 8912 - protein, 446 aa, Unknown
  Description of Unknown: Integrase B8913 sequence
  PTHR30461:SF3,cd00338,SM00857,IPR036162, PF13408,IPR025827,G3DSA:3.40.50.1390,mobidb-lite, IPR006119,SSF53041,PTHR30461,PS51736, Coil,PF00239
MNIAIYPRKSKKDDNSESMEQQIDDCKKYIDKTYTNANIIVYSGDYAITGHSTAKRKDFQRMMDDVRAGRINAVVIMRYDRIARNMRDFCNLYHDMESAGCNLISVSQQIDTSTPYGKNFMYQMANMAELEWAVISERYKDTAAYKIREGKAYTGRVPIGFKIEKIDGVKKVVHDNEEQTRAIFDYLLATKSKRGTVLWVRENLIPDFTRHKLDTMIKSDLYIGKVRENENFCEPYFTKEQMEEIRSVNQIKYAPSGHIYLFSGLFRCPICGRKMSSFYSIDRKTKKHRQYQRCWFGGNEKLHKTKLVSEAKTEKYLLENLDAALKNLEFDVKKEAGKPKRNLNKKLNDAIGERDRLNYLFEKGRIDIPEYEKKYSVLSEKINSITEELSNNKVVRIEEFKKQIPEDWKELYEQLDQKGKQEFWHRIIKEIYLNEAFEITGFIFYI

SEQ ID NO: 8913 - protein, 446 aa, Unknown
  Description of Unknown: Integrase B8914 sequence
  PTHR30461:SF3,cd00338,SM00857,IPR036162,PF13408, IPR025827,G3DSA:3.40.50.1390,PS51736,IPR006119,SSF53041, PTHR30461,mobidb-lite,Coil,PF00239
MNIAIYPRKSKKDDNSESMEQQIDDCKKYINKTYHNANILVYSGDYAITGHSTAKRKDFQRMMDDVRAGRINAVVIMRYDRIARNMRDFCNLYHDMESAGCNLISVSQQIDTSTPYGKNFMYQMANMAELEWAVISERYKDTAAYKIREGKAYTGRVPIGFKIEKIDGVKKVVHDNEEQTRAIFDYLLATKSKRGTVLWVRENFIPDFTRHKLDTMIKSDLYIGKVRENDHFCEPYFTKEQMEEIRSVNQIKYAPSGHIYLFSGLFRCPICGRKMASFYSIDRKTKKHRQYQRCWFGGNEKLHKTKLVSEAKTEKYLLENLDAALKNLEFDVKKEAGKPKRNLNKKLNDAIAERDRLNYLFEKGRIDIPEYEKKYSVLSEKINSINEELSNNKVVRIEEFKKQIPEDWKELYEQLDQKGKQEFWHRIIKEIYLNEAFEITGFIFYI

SEQ ID NO: 8914 - protein, 446 aa, Unknown
  Description of Unknown: Integrase B8915 sequence
  PTHR30461:SF3,SM00857,IPR006118,G3DSA:1.10.10.2600, IPR036162,PF13408,IPR025827,G3DSA:3.40.50.1390, PS51737,IPR006119,IPR038109,IPR011109, SSF53041,PTHR30461,PS00397,PS51736,cd00338,PF00239
MCQKIVVTLPNNLRIRVALYIRVSTEEQAKHGLSLADQREALIAYAAAHGMEVVGIYEDAGISARKPYKKRPALMRLLDDCSAGKIDTILFVKLDRWFRNVAGYYAVQEVLDKNHVDWQAIREDYETRTASGRLKVNIMLSVAQDEADRTSERIKAINEGKRAKGQPTNGKTPIGICVKNRRYDIDEETADAARDMFQAFIRLQSILALRRYMATEWGIKRSYNKYKDALRSRLYLGEAFGVENALPALVDQETFDLAGKILERRSQRNASADRIYLFTGILRCRECGRNMQPETVKQVYKYYRCRTHTLDPADCPHILRIREDVLEDYLLREFEGIAKKYYSKSKTAEKKPPKTAEQIKRKMQKLKDLYLSDLIEIEEYKKDYTELKQQLAAINPEPMKEFDLETLRRELKEYPDLDRQAKKEFWVRTIQRIDADNDGAFFVTPS

SEQ ID NO: 8915 - protein, 446 aa, Unknown
  Description of Unknown: Integrase B8916 sequence
  PTHR30461:SF3,cd00338,SM00857,PS51736,PF13408, IPR025827,G3DSA:3.40.50.1390,IPR036162,IPR006119,SSF53041, PTHR30461,mobidb-lite,Coil,PF00239
MNIAIYPRKSKKDDNSESMEQQIDDCRKYINKTYPDANIIVYSGDYAITGHSTAKRKDFQRMMDDVRAGRINAVVIMRYDRIARNMRDFCNLYHDMESAGCNLISVSQQIDTSTPYGKNFMYQMANMAELEWAVISERYKDTAAYKIREGKAYTGRVPIGFKIEKIDGVKKVVHDNEEQTRAIFDYLLATKSKRGTVLWVRENFIPDFTRHKLDTMIKSDLYIGKVRENDHFCEPYFTKEQMEEIRSVNQIKYAPSGHIYLFSGLFRCPICGRKMASFYSIDRKTKKHRQYQRCWFGGNEKLHKTKLVSEAKTEKYLLENLDAALKNLEFDVKKEAGKPKRNLNKKLNDAIAERDRLNYLFEKGRIDIPEYEKKYSVLSEKINSINEELSNNKVVRIEEFKKQIPEDWKELYEQLDQKGKQEFWHRIIKEIYLNEAFEITGFIFYI

SEQ ID NO: 8916 - protein, 446 aa, Unknown
  Description of Unknown: Integrase B8917 sequence
  PTHR30461:SF3,cd00338,SM00857,IPR036162,PS51736,PF13408, G3DSA:3.40.50.1390,IPR025827,IPR006119,SSF53041,PTHR30461 ,mobidb-lite,Coil,PF00239
MNIAIYPRKSKKDDNSESMEQQIDDCRKYINKTYPDANIIVYSGDYAITGHSTAKRKDFQRMMDDVRAGRINAVVIMRYDRIARNMRDFCNLYHDMESAGCNLISVSQQIDTSTPYGKNFMYQMANMAELEWAVISERYKDTAAYKIREGKAYTGRVPIGFKIEKIDGVKKVVHDNEEQTRAIFDYLLATKSKRGTVLWVRENLIPDFTRHKLDSMIKSDLYIGKVRENDHFCEPYFTKDQMEEIRSVNQIKYAPSGHIYLFSGLFRCPICGRKMSSFYSIDRKTKKHRQYQRCWFGGNEKLHKTKLVSEAKTEKYLLENIDTALKNLEFDVKKEESKPKRNLNKKLNDAIGERDRLNYLFEKGRIDIPEYEKKYSVLSEKINSITEELSNNKVVRIEEFKKQIPEDWKGLYEQLDQKGKQEFWHRIIKEIYLNEAFEITGFIFYI

SEQ ID NO: 8917 - protein, 446 aa, Unknown
  Description of Unknown: Integrase B8918 sequence
  PTHR30461:SF3,SM00857,IPR006118,G3DSA:1.10.10.2600,IPR036162, PF13408,IPR025827,G3DSA:3.40.50.1390,PS51737,IPR006119, IPR038109,IPR011109,SSF53041,PTHR30461,PS00397, PS51736,cd00338,PF00239
MCQKIVVTLPNNLRIRVALYIRVSTEEQAKHGLSLADQREALTAYAAAHSMEVVGIYEDAGISARKPYKKRPALMRLLDDCRAGKIDTILFVKLDRWFRNVAGYYAVQEVLDKNHVDWQAIREDYETRTASGRLKVNIMLSVAQDEADRTSERIKAINEGKRAKGQPTNGKTPIGICVKNRRYDIDEKTADAARDMFPAFIRLQSILALRRYMATEWGIKRSYNKYKDALRSRLYLGEAFGVENALPALVDRETFDLAGKILERRSQRNASADRIYLFTGILRCRECGRNMQPETVKQVYKYYRCRTHTLDPADCPHILRIREDVLEDYLLREFEGIAKKYYSKSKTAEKKPPKTAEQIKRKMQKLKDLYLSDLIEIEEYKKDYTELKQQLAAINPEPIKEFDLETLRRELKEYPDLDRQAKKEFWVRTIQRIDADNDGAFFVTPS

SEQ ID NO: 8918 - protein, 446 aa, Unknown
  Description of Unknown: Integrase B8919 sequence
  PTHR30461:SF3,SM00857,IPR036162,PF13408,IPR025827, G3DSA:3.40.50.1390,mobidb-lite,IPR006119,SSF53041,PF00239, PTHR30461,PS51736,Coil,cd00338
MNIAIYPRKSKKDDNSESMEQQIDDCRKYINKTYPNANIIVYSGDYAITGHSTAKRKDFQRMMDDVRAGRINAVVIMRYDRIARNMRDFCNLYHDMESAGCNLISVSQQIDTSTPYGKNFMYQMANMAELEWAVISERYKDTAAYKIREGKAYTGRLPIGFKIEKIDGVKKVVHDNEEQTRAIFDYLLATKSKRGTVLWVRENLIPDFTRHKLDSMIKSDLYIGKVRENENFCEPYFTKEQMEEIRSVNQIKYAPSGHIYLFSGLFRCPICGRKMSSFYSIDRKTKKHRQYQRCWFGGNEKLHKTKLVSEAKTEKYLLENIDTALKNLEFDVKKEESKPKRNLNKKLTDAIGERDRLNYLFEKGRIDIPEYEKKYSILSGKINSISEELSNNKVVKIEEFKKQIPSDWRVLYEQLDQKGKQEFWHRIIKEIYLNEAFEITGFIFYI

SEQ ID NO: 8919 - protein, 446 aa, Unknown
  Description of Unknown: Integrase B8920 sequence
  PTHR30461:SF3,cd00338,SM00857,IPR036162, PF13408,IPR025827,G3DSA:3.40.50.1390,PS51736, IPR006119,SSF53041,PTHR30461,mobidb-lite, Coil,PF00239
MNIAIYPRKSKKDDNSESMEQQIDDCRKYINKTYPDANIIVYSGDYAITGHSTAKRKDFQRMMDDVRAGRINAVVIMRYDRIARNMRDFCNLYHDMESAGCNLISVSQRIDTSTPYGKNFMYQMANMAELEWAIISERYKDTAAYKIREGKAYTGRVPIGFKIEKIDGVKKVVHDNEEQTRAIFDYLLATKSKRGTVLWVRENLIPDFTRHKLDSMIKSDLYIGKVRENENFCEPYFTKDQMEEIRSVNQIKYAPSGHIYLFSGLFRCPICGRKMASFYSIDRKTKKHRQYQRCWFGGNEKLHKTKLVSEAKTEKYLLENLDAALKNLEFDVKKEAGKPKRNLNKKLNDAIAERDRLNYLFEKGRIDIPEYEKKYSVLSEKINSINEELSNNKVVRIEEFKKQIPEDWKELYEQLDQKGKQEFWHRIIKEIYLNEAFEITGFIFYI

SEQ ID NO: 8920 - protein, 446 aa, Unknown
  Description of Unknown: Integrase B8921 sequence
  PTHR30461:SF3,IPR036162,PS51737,IPR011109,PTHR30461, PS00397,PF00239,G3DSA:1.10.10.2600,IPR006119,SSF53041, cd00338,SM00857,IPR025827,IPR038109,PS51736, IPR006118,PF13408,G3DSA:3.40.50.1390,Coil
MIKQKVRLYARVSTEEQARKKNSIPAQLNKLYAYCKENDYEVVNEYIDEGISASTIKKRKALLRMLNDLQRNDIILFTNLDRFSRNVLDANKMIEMFEPLNVSFKAIGEEDIDITTADGRFLFNLKVNLAERERAKVSERILTVFDYKLSQGKLINGRLPRGYTRSADGYAVINDDADFIRDVYRTFEDVRQIRTLTRVINNKYKLDLCSKTYRRILKQQAYIGLYRDKYIFPPIIKNEQFERVQRIFDGNTIKATKNQTYIFSGLIKCKVCGMRLGGSSSNGNSGDRKLKYKMYKCPKCQRGNGTHQCLAEKKLEKHLLPIVMDAIQNKIYTLSAYESQITQNRDIIDATKDKIKRLQDLYIDGKISKEQFDNKYEGLNKILDEESKKTNLKMIAKAKEDYEKLLNMNISEIYDQFDDNGKSVFWHSFIDYIVVNDYDNIDIFLQ

SEQ ID NO: 8921 - protein, 446 aa, Unknown
  Description of Unknown: Integrase B8922 sequence
  PTHR30461:SF3,SM00857,IPR006118,G3DSA:1.10.10.2600,IPR036162, PF13408,IPR025827,PS51737,G3DSA:3.40.50.1390,IPR006119, IPR038109,IPR011109,SSF53041,PTHR30461,PS00397, PS51736,cd00338,PF00239
MCPKIVVTLPNNLRIRVALYIRVSTEEQAKHGLSLADQREALIAYAAAHGMEVVGIYEDAGISARKPYKKRPALMRLLDDCSAGKIDTILFVKLDRWFRNVAGYYAVQEVLDKNHVDWQAIREDYETRTASGRLKVNIMLSVAQDEADRTSERIKAINEGKRAKGQPTNGKTPIGICVKNRLYAIDEETADAARDMFPAFIRLQSILALRRYMATEWGIKRSYNKYKDALRSRLYLGEAFGVENALPALVDQETFDLAGKILERRSQRNASADRIYLFTGILRCRECGRNMQPETVKQVYKYYRCRTHTLDPADCPHILRIREDALEDYLLREFEGIAKKYYSKSKTAEKKPPKTAEQIKRKMQKLKDLYLSDLIEIEEYKKNYTELKQQLAAINPEPIKEFDLETLRRELKEYPDLDRQAKKEFWVRTIQRIDADNDGAFFVTPS

SEQ ID NO: 8922 - protein, 446 aa, Unknown
  Description of Unknown: Integrase B8923 sequence
  PTHR30461:SF3,SM00857,IPR006118,G3DSA:1.10.10.2600,IPR036162, PF13408,IPR025827,G3DSA:3.40.50.1390,PS51737,IPR006119, IPR038109,SSF53041,IPR011109,PTHR30461,PS00397, PS51736,cd00338,PF00239
MCQKIVVTLPNNLRIRVALYIRVSTEEQAKHGLSLADQREALTDYAAAHNMEVVGIYEDAGISARKPYKKRPALLRLLDDCRAGKIDTILFVKLDRWFRNVAGYYAVQEVLDKNHVDWQAIREDYETRTASGRLKVNIMLSVAQDEADRTSERIKAINEGKRAKGQPTNGKTPIGICVKNRRYAIDEETAAAARDMFPAFIRLQSILALRRYMATEWGIKRSYNKYKDALRSRLYLGEAFGVENALPALVDRETFDLAGKILERRSQRNASADRIYLFTGILRCRECGRNMQPETVKQVYKYYRCRTHTLDPADCPHILRIREDVLEDYLLREFEGIAKKYYSKSKTAEKKPPKTAEQIKRKMQKLKDLYLSDLIEIEEYKKDYTELKQQLAAINPEPIKEFDLETLRRELKEYPDLDRQAKKEFWVRTIQRIDADNDGAFFVTPS

SEQ ID NO: 8923 - protein, 446 aa, Unknown
  Description of Unknown: Integrase B8924 sequence
  PTHR30461:SF3,SM00857,IPR006118,G3DSA:1.10.10.2600,IPR036162, PF13408,PS51737,IPR025827,G3DSA:3.40.50.1390,IPR006119, IPR038109,IPR011109,SSF53041,PTHR30461,PS00397, PS51736,cd00338,PF00239
MCQKIVVTLPNNLRIRVALYIRVSTEEQAKHGLSLADQREALIAYAATHGMEVVGIYEDAGISARKPYKKRPALMRLLDDCRAGKIDTILFVKLDRWFRNVAGYYAVQEVLDKNHVDWQAIREDYETRTASGRLKVNIMLSVAQDEADRTSERIKAINEGKRAKGQPTNGKTPIGICVKNRRYVIDEETADAARDMFPAFIRLQSILALRRYMATEWGIKRSYNKYKDALSNRLYLGEAFGVENALPALVDQETFDLAGKILERRSQRNASADRIYLFTGILRCRECGRNMQPETVKQVYKYYRCRTHTLDPADCPHILRIREDVLEDYLLREFEGIAKKYYSKSKTAEKKPPKTAEQIKRKMQKLKDLYLSDLIEIEEYKKDYTELKQQLAAINPEPIKEFDLETLRRELKEYPDLDRQAKKEFWVRTIQRIDADNDGAFFVTPS

SEQ ID NO: 8924 - protein, 446 aa, Unknown
  Description of Unknown: Integrase B8925 sequence
  PTHR30461:SF3,IPR036162,PS51737,IPR011109,PTHR30461, PS00397,PF00239,G3DSA:1.10.10.2600,IPR006119,SSF53041, cd00338,SM00857,IPR025827,IPR038109,PS51736, IPR006118,PF13408,G3DSA:3.40.50.1390,Coil
MCQKIVVTLPNNLRIRVALYIRVSTEEQAKHGLSLADQREALTDYAAAHNMEVVGIYEDAGISARKPYKKRPALMRLLDDCNAGKVDTILFVKLDRWFRNVAGYYAVQEVLDKNHVAWQAIREDYETRTASGRLKVNIMLSVAQDEADRTSERIKDINEGKRAKGQPTNGRTPIGICVKNRRYAIDEETADAARDMFPAFIRLQSILALRRYMATEWGIKRSYNKYKDALGNRLYLGEAFGVENALPALIDQETFDLAGKILERRSQRNASADRIYLFTGILRCRECGRNMQPETVKQVYKYYRCRTHTLDPADCPHILRIREDVLEDYLLREFEGIAKKYYSKSKTAEKKPPKTAEQIKRKMQKLKELYLSDLIEIEEYKKDYTGLKQQLAAINSEPIKEFDLETLRRELKEYPNLDRQAKKEFWVRTIQRIDADNDGAFFVTPS

SEQ ID NO: 8925 - protein, 446 aa, Unknown
  Description of Unknown: Integrase B8926 sequence
  PTHR30461:SF3,SM00857,IPR006118,G3DSA:1.10.10.2600,IPR036162, PF13408,IPR025827,G3DSA:3.40.50.1390,PS51737,IPR006119, IPR038109,IPR011109,SSF53041,PTHR30461,PS00397, PS51736,cd00338,PF00239
MCQKIVVTLPNNLRIRVALYIRVSTEEQAKHGLSLADQREALIAYAAAHGMEVVGIYEDAGISARKPYKKRPALMRLLDDCSAGKIDTILFVKLDRWFRNVAGYYAVQEVLDKNHVDWQAIREDYETRTASGRLKVNIMLSVAQDEADRTSERIKAINEGKRAKGQPTNGKTPIGICVKNRRYAIDEETADAARDMFPAFIRLQSILALRRYMATEWGIKRSYNKYKDALRSRLYLGEAFGVENALPALVDRETFDLAGKILERRSQRNASADRIYLFTGILRCRECGRNMQPETVKQVYKYYRCRTHTLDPADCPHILRIREDVLEDYLLREFEGIAKKYYSKSKTAEKKPPKTAEQIKRKMQKLKDLYLSDLIEIEEYKKDYTELKQQLAAINPEPIKEFDLETLRRELKEYPDLDRQAKKEFWVRTIQRIDADNDGAFFVTPS

SEQ ID NO: 8926 - protein, 446 aa, Unknown
  Description of Unknown: Integrase B8927 sequence
  PTHR30461:SF3,SM00857,IPR006118,G3DSA:1.10.10.2600,IPR036162, PF13408,PS51737,G3DSA:3.40.50.1390,IPR025827,IPR006119, IPR038109,IPR011109,SSF53041,PTHR30461,PS00397, PS51736,cd00338,PF00239
MCQKIVVTLPNNLRIRVALYIRVSTEEQAKHGLSLADQREALIAYAAAHGMEVVGIYEDAGISARKPYKKRPALMRLLDDCRAGKIDTILFVKLDRWFRNVAGYYAVQEVLDKNHVDWQAIREDYETRTASGRLKVNIMLSVAQDEADRTSERIKAINEGKRAKGQPTNGKTPIGICVKNRRYAIDEETADAARDMFPAFIRLQSILALRRYMATEWGIKRSYNKYKDALKSRLYLGEAFGVENALPALVDQETFDLAGKILERRSQRNASADRIYLFTGILRCRECGRNMQPETVKQVYKYYRCRTHTLDPADCPHILRIREDVLEDYLLREFEGIAKKYYSKSKTAEKKQPKTAEQIKRKMQKLKDLYLSDLIEIEEYKKDYTELKQQLAAINPEPIKEFDLETLRRELKEYPDLDRQAKKEFWVRTIQRIDADNDGAFFVTPS

SEQ ID NO: 8927 - protein, 446 aa, Unknown
  Description of Unknown: Integrase B8928 sequence
  PTHR30461:SF3,cd00338,SM00857,IPR036162,PF13408, IPR025827,G3DSA:3.40.50.1390,PS51736,IPR006119,SSF53041, PTHR30461,mobidb-lite,Coil,PF00239
MNIAIYPRKSKKDDNSESMEQQIDDCRKYIDKTYHNANIIVYSGDYAITGHSTAKRKDFQRMMDDVRAGRINAVVIMRYDRIARNMRDFCNLYHDMESAGCNLISVSQQIDTSTPYGKNFMYQMANMAELEWAVISERYKDTAAYKIREGKAYTGRVPIGFKIEKIDGVKKVVHDNEEQTRAIFDYLLATKSKRGTVLWVRENLIPDFTRHKLDSMIKSDLYIGKVRENDHFCEPYFTKDQMEEIRSVNQIKYAPSGHIYLFSGLFRCPICGRKMSSFYSIDRKTKKHRQYQRCWFGGNEKLHKTKLVSEAKTEKYLLENLDAALKNLEFDVKKEAGKPKRNLNKKLNDAIGERERLNYLFEKGRIDITEYEKKYSVLSEKINSITEELSNNKVVRIEEFKKQIPEDWKELYEQLDQKGKQEFWHRIIKEIYLNEAFEITGFIFYI

SEQ ID NO: 8928 - protein, 446 aa, Unknown
  Description of Unknown: Integrase B8929 sequence
  PTHR30461:SF3,cd00338,SM00857,PS51736, IPR036162,G3DSA:3.40.50.1390,IPR006119,SSF53041, PTHR30461,mobidb-lite,Coil,PF00239
MNIAIYPRKSKKDDNSESMEQQIDDCRKYINKTYHNANIIVYSGDYAITGHSTAKRKDFQRMMDDVRAGRINAVVIMRYDRIARNMRDFCNLYHDMESVGCNLISVSQQIDTSTPYGKNFMYQMANMAELEWAVISERYKDTAAYKIREGKAYTGRVPIGFKIEKIDGVKKVVHDNEEQTRAIFDYLLATKSKRGTVLWVRENLIPDFTRHKLDTMIKSDLYIGKVRENENFCEPYFTKEQMEEIRSVNQIKYAPSGHIYLFSELFRCPICGRKMSSFYSIDRKTKKHRQYQRCWFGGNEKLHKTKLVSEAKTEKYLLENLDTALKNLEFDVKKEAGKPKRNLNKKLNDAIGERERLNYLFEKGRIDIPEYEKKYSVLSEKINSITEELSNNKVVKIEEFKKQIPSDWRVLYEQLDQKGKQEFWHRIIKEIYLNEAFEITGFIFYI

SEQ ID NO: 8929 - protein, 446 aa, Unknown
  Description of Unknown: Integrase B8930 sequence
  PTHR30461:SF3,SM00857,IPR036162,PS51736,PF13408, G3DSA:3.40.50.1390,IPR025827,IPR006119,SSF53041,PF00239, PTHR30461,mobidb-lite,Coil,cd00338
MNIAIYPRKSKKDDNSESMEQQIDDCKKYINKTYHNANIIVYSGDYAITGHSTAKRKDFQRMMDDVRAGRINAVVIMRYDRIARNMRDFCNLYHDMESAGCNLISVSQQIDTSTPYGKNFMYQMANMAELEWAVISERYKDTAAYKIREGKAYTGRVPIGFKIEKIDGIKKVVHDNEEQTRAIFDYLLATKSKRGTVLWVRENFIPDFTRHKLDTMIKSDLYIGKVRENENFCEPYFTKEKMEEIRSVNQIKYAPSGHIYLFSGLFRCPICGRKMASFYSIDRKTKKHRQYQRCWFGGNEKLHKTKLVSEAKTEKYLLENLDAALKNLEFDVKKEAGKPKRNLNKKLNDAIAERDRLNYLFEKGRIDIPEYEKKYSVLSEKINSITEELSNNKVIRIEEFKKQIPEDWKELYEQLDQKGKQEFWHRIIKEIYLNEAFEITGFIFYI

SEQ ID NO: 8930 - protein, 446 aa, Unknown
  Description of Unknown: Integrase B8931 sequence
  PTHR30461:SF3,SM00857,IPR006118,G3DSA:1.10.10.2600, IPR036162,PF13408,IPR025827,PS51737, G3DSA:3.40.50.1390,IPR006119,IPR038109,IPR011109, SSF53041,PTHR30461,PS00397,PS51736,cd00338,PF00239
MQVIRGAGYIRVSTTEQATRGLSLEAQEAEIRRYAKERGIVLVQIYVDRGITARKKLHRREAFAQMMRDVDAGLIDRIIVMRLDRWFRNVYDYHKMMNEHLIPHNVDWCAVKEDYDTTTTNGRLMINLRLAIAEQECDTDGDRIRDVQENMIQKGCWPFGQAPLGYRIVNKHLEKDPEQEECIRYFFEHMLLNGSLRAALFATNERYGTTYEYKRAQHLSRASVYYGEYGTNKSFCPAYITREEHERIRYLASKNIRVRKSPDKVAHLFSGLLICSDCGRRLSGQTIRRPSGVYVTYRCAHAYDNNGCPNTKSFSERIVENYLLHYMESELEEFIFTVEAESKTISLPIDNTEQIRAKQEKVKELFINDLIDLSEYKKRIDELESKIIVTAPKPRANTERLKKLLETNALSFYQTFTRDEKRAFWRGIIKELHIYRGTVQGPPIFL

SEQ ID NO: 8931 - protein, 446 aa, Unknown
  Description of Unknown: Integrase B8932 sequence
  PTHR30461:SF3,IPR036162,PS51737,IPR011109,PTHR30461, PS00397,PF00239,G3DSA:1.10.10.2600,IPR006119,SSF53041, cd00338,SM00857,IPR025827,IPR038109,PS51736, IPR006118,PF13408,G3DSA:3.40.50.1390,Coil
MIKQKVRLYARVSTEEQARKKNSIPAQLNKLYAYCKENDYEVVNEYIDEGISASTIKKRKALLRMLNDLQHNDIILFTNLDRFSRNVLDANKMIEMFEPLNVSFKAIGEEDIDITTADGRFLFNLKVNLAERERAKVSERILTVFDYKLSQGKLINGRLPRGYTRSADGYAVINDDADFIRDVYRTFEDVRQIRTLTRVINNKYKLDLCSKTYRRILKQQAYIGLYRDKYIFPPIIKNEQFERVQRIFDGNTIKATKNQTYIFSGLIKCKVCGMRLGGSSSNGNSGDRKLKYKMYKCPKCQRGNGTHQCLAEKKLEKHLLPIVMDAIQNKIYTLSAYESQITQNRDIIDATKDKIKRLQDLYIDGKISKEQFDNKYEGLNKILDEESKKTNLKMIAKAKEDYEKLLNMNISEIYDQFDDNGKSVFWHSFIDYIVVNDYDNIDIFLQ

SEQ ID NO: 8932 - protein, 446 aa, Unknown
  Description of Unknown: Integrase B8933 sequence
  PTHR30461:SF3,cd00338,SM00857,IPR036162,PF13408, IPR025827,G3DSA:3.40.50.1390,PS51736,IPR006119,SSF53041, PTHR30461,mobidb-lite,Coil,PF00239
MNIAIYPRKSKKDDNSESMEQQIDDCRKYINKTYHNANIIVYSGDYAITGHSTAKRKDFQRMMDDVRAGRINAVVIMRYDRIARNMRDFCNLYHDMESAGCNLISVSQQIDTSTPYGKNFMYQMANMAELEWAVISERYKDTAAYKIREGKAYTGRVPIGFKIEKIDGVKKVVHDNEEQTRAIFDYLLATKSKRGTVLWVRENLIPDFTRHKLDTMIKSDLYIGKVRENENFCEPYFTKEQMEEIRSINQIKYAPSGHIYLFSGLFRCPICGRKMASFYSIDRKTKKHRQYQRCWFGGNEKLHKTKLVSEAKTEKYLLENLDAALKNLEFDVKKEAGKPKRNLNKKLNDAIGERDRLNYLFEKGRIDIPEYEKKYSVLSEKINSITEELSNNKVVRIEEFKKQIPEDWKELYEQLDQKGKQEFWHRIIKEIYLNEAFEITGFIFYI

SEQ ID NO: 8933 - protein, 446 aa, Unknown
  Description of Unknown: Integrase B8934 sequence
  PTHR30461:SF3,cd00338,SM00857,PS51736,PF13408,IPR025827, G3DSA:3.40.50.1390,IPR036162,IPR006119,SSF53041,PTHR30461 ,mobidb-lite,Coil,PF00239
MNIAIYPRKSKKDDNSESMEQQIDDCRKYINKTYPNANIIVYSGDYAITGHSTAKRKDFQHMMDDVRAGRINAVVIMRYDRIARNMRDFCNLYHDMESVGCNLISVSQQIDTSTPYGKNFMYQMANMAELEWAVISERYKDTAAYKIREGKAYTGRVPIGFKIEKIDGVKKVVHDNEEQTRAIFDYLLATKSKRGTVLWVRENLIPDFTRHKLDSMIKSDLYIGKVRENENFCEPYFTKEQMEEIRSVNQIKYAPSGHIYLFSGLFRCPICGRKMSSFYSIDRKTKKHRQYQRCWFGGNEKLHKTKLVSEAKTEKYLLENIDTALKNLEFDVKKGAGKPKSNLNKKLNDAIGERDRLNYLFEKGRIDIPEYEKKYSVLSEKINSITEELSNNKVVRIEEFKKRIPEDWKDIYEQLDQKGKQEFWHRIIKEIYLNEAFEITGFIFYI

SEQ ID NO: 8934 - protein, 446 aa, Unknown
  Description of Unknown: Integrase B8935 sequence
  PTHR30461:SF3,SM00857,IPR036162,PF13408,IPR025827, G3DSA:3.40.50.1390,PS51736,IPR006119,SSF53041,PF00239, PTHR30461,mobidb-lite,Coil,cd00338
MNIAIYPRKSKKDDNSESMEQQIDDCKKYINKTYPNANIIVYSGDYAITGHSTAKRKDFQRMMDDVRAGRINAVVIMRYDRIARNMRDFCNLYHDMESAGCNLISVSQQIDTSTPYGKNFMYQMANMAELEWAVISERYKDTAAYKIREGKAYTGRVPIGFKIEKIDGVKKVVHDNDEQTRAIFDYLLATKSKRGTVLWVRENFIPDFTRHKLDTMIKSDLYIGKVRENDHFCEPYFTKDQMEEIRSINQIKYAPSGHIYLFSGLFRCPICGRKMASFYSIDRKTKKHRQYQRCWFGGNEKLHKTKLVSEAKTEKYLLENLDAALKNLEFDVKKEAGKPKQNLNKKLNDAIGERERLNYLFEKGRIDIPEYEKKYSVLSEKINSITEELSNNKVVRIEEFKKQIPEDWKELYEQLDQKGKQEFWHRIIKEIYLNEAFEITGFIFYI

SEQ ID NO: 8935 - protein, 446 aa, Unknown
  Description of Unknown: Integrase B8936 sequence
  PTHR30461:SF3,IPR036162,PS51737,IPR011109, PTHR30461,PS00397,PF00239,G3DSA:1.10.10.2600, IPR006119,SSF53041,cd00338,SM00857,IPR025827,IPR038109 ,PS51736,IPR006118,PF13408,G3DSA:3.40.50.1390,Coil
MQRAALYIRVSTEEQARHGLSLEDQKNSLTKFSKSHGMKIVGIYEDAGISARKPYKKRPALLKLLDDCRVGKIDLILFIKLDRWFRNVGNYYAVQEILDQYGVSWQATQEDYETTTASGRLKVNIMLSVAQDEADRTSERIKFVFEGKRARLEPLTGNIPFGYKIEGKSFKKDESKEALVNDFFKKYLASGSISKTTEFIREKYGVLMRYHLIDKMLRSTTYYGKYYNMDGMCPAYITKEDHEQIQAMRRKVVRKTKNNRTYLFSGLVVCPECGNRMGARINTKQTYVFYNCNGHYTKQNGCQNRVNLGERKIEEYLLATVANKFHEYKANFSALKNAEINKRSRAEISAAKSKLNKLKDLYLNDIITLEELKTDREALLAKISDLEKAALPEQKQDFESIDRVLTENWKESYDGLNREEKREFWRIIVKEIKIYPDRHIEYSLNV

SEQ ID NO: 8936 - protein, 446 aa, Unknown
  Description of Unknown: Integrase B8937 sequence
  PTHR30461:SF3,SM00857,IPR006118,IPR036162,PF13408, IPR025827,G3DSA:3.40.50.1390,PS51737,IPR006119,IPR011109, SSF53041,PTHR30461,PS00397,PS51736,cd00338, PF00239
MRCALYIRVSSDEQKRKGYSLPEQRHALTQYAEEKGYTVVDLYADEGVSSSKNPQRRHEFQRMLSDVRNRKIDIIVFLKLDRWFRNVGDYYITQEILDQNGVKWECVTEHYDTTTRTGKLNLNIKLTIAEDEAANTSERVKFVQAGKVRNREPITGNQPFGYKIATIDGVKRIIKDPETQAECEDMFNTFFATGSGGATGKYINAKYGRSLAENAIPRRLKNPAYTGEYRGIPDYYPPYITKEQHARILSIFAKRTRSTKRKKVYLFAGLIKCPVCGRTMVSCTMNKKTLGYRCRHHYMNKCTFVHTITEERIESFLLENIGSMLEQYLISYKEQNKAKKKPDPRKLEDRLSRLNNIYMMGNISDSEYTKKANEIAAQIAAIKCANSNDLPIPEESIKLLSDKRFATLYADLPRESRKALWMSIIDSIEVEGLYPKQVFFIGQERL

SEQ ID NO: 8937 - protein, 446 aa, Unknown
  Description of Unknown: Integrase B8938 sequence
  PTHR30461:SF3,cd00338,SM00857,PS51736,PF13408, IPR025827,IPR036162,G3DSA:3.40.50.1390,IPR006119,SSF53041, PTHR30461,mobidb-lite,Coil,PF00239
MNIAIYPRKSKKDDNSESMEQQIDDCRKYINKTYPNANIIVYSGDYAITGHSTAKRKDFQRMMDDVRAGRINAVVIMRYDRIARNMRDFCNLYHDMESAGCNLISVSQQIDTSTPYGKNFMYQMANMAELEWAVISERYKDTAAYKIREGKAYTGRVPIGFKIEKIDGVKKVVHDNEKQTRAIFDYLLATKSKRGTVLWVRENFIPDFTRHKLDTMIKSDLYIGKVRENDHFCEPYFTKDQMEEIRSINQIKYAPSGHIYLFSGLFRCPICGRKMASFYSIDRKTKKHRQYQRCWFGGNEKLHKTKLVSEAKTEKYLLENLDAALKNLEFDVKKEAGKPKRNLNKKLNDAIGERDRLNYLFEKGRIDIPEYEKKYSVLSEKINSINEELSNNKVVRIEEFKKQIPEDWKVLYEQLDPKGKQEFWHRIIKEIYLNEAFEITGFIFYI

SEQ ID NO: 8938 - protein, 446 aa, Unknown
  Description of Unknown: Integrase B8939 sequence
  PTHR30461:SF3,IPR036162,PS51737,IPR011109, PTHR30461,PS00397,PF00239,G3DSA:1.10.10.2600, IPR006119,SSF53041,cd00338,SM00857,IPR025827,IPR038109 ,PS51736,IPR006118,PF13408,G3DSA:3.40.50.1390,PF07508,Coil
MVTALYARVSTDAQAEEGYSIDIQGERLEAYCKLKGYKSFEHYVDGGYTGSNLNRPAMTRLIEDCKCGEVERVVVFKLDRLSRSQKDTLYLIEEVFLPHNVDFVSISESFDTATPFGRAMIGILSVFAQLERENIKERTKAGMLGRVREGYWPGGGRTPFGYDYDPKLKTLVPNKDAETVRKIYDLYIGGCSTYEIQRILGMKYDRLAEQILARKTNTGVIVYNGVEYQGKHEPIISLETYERAMACMKKRSAAPTPRNNVYLLTGLLVCGVCGAKMRYQGGHIYCYSRQKSKAYLVKDPNCDNESHNVQDIENAVLTIFFQNTSRFNKAEAYDIKTNVLDELVQQKKTLEQKIRRLYGLYGDGGDDYLIEAIEESKQQLVRIADKIVNEEDREKEETKRRRLVEKVGNIRDRWDTMAPEEQREVLHEAIKQITITHDKINIDFNL

SEQ ID NO: 8939 - protein, 446 aa, Unknown
  Description of Unknown: Integrase B8940 sequence
  PTHR30461:SF3,cd00338,SM00857,IPR036162,PS51736, PF13408,G3DSA:3.40.50.1390,IPR025827,IPR006119,SSF53041, PTHR30461,mobidb-lite,Coil,PF00239
MNIAIYPRKSKKDDNSESMEQQIDDCRKYINKTYPDANIIVYSGDYAITGHSTAKRKDFQRMMDDVRAGRINAVVIMRYDRIARNMRDFCNLYHDMESAGCNLISVSQQIDTSTPYGKNFMYQMANMAELEWAVISERYKDTAAYKIREGKAYTGRVPIGFKIEKIDGVKKVVHDNEEQTRAIFDYLLATKSKRGTVLWVRENLIPDFTRHKLDTMIKSDLYIGKVRENENFCEPYFTKDQMEEIRSVNQIKYAPSGHIYLFSGLFRCPICGRKMSSFYSIDRKTKKHRQYQRCWFGGNEKLHKTKLVSEAKTEKYLLENLDAAFKNLEFDVKKEAGKPKRNLNKKLNDAIGERDRLNYLFEKGRIDIPEYEKKYSVLSEKINSITEELSNNKVVRIEEFKKQIPEDWKELYEQLDQKGKQEFWHRIIKEIYLNEAFEITGFIFYI

SEQ ID NO: 8940 - protein, 446 aa, Unknown
  Description of Unknown: Integrase B8941 sequence
  PTHR30461:SF3,cd00338,SM00857,IPR036162,PS51736,PF13408, G3DSA:3.40.50.1390,IPR025827,IPR006119,SSF53041,PTHR30461 ,mobidb-lite,Coil,PF00239
MNIAIYPRKSKKDDNSESMEQQIDDCRKYINKTYPDANIIVYSGDYAITGHSTAKRKDFQRMMDDVRAGRINAVVIMRYDRIARNMRDFCNLYHDMESAGCNLISVSQQIDTSTPYGKNFMYQMANMAELEWAVISERYKDTAAYKIREGKAYTGRVPIGFKIEKIDGVKKVVHDNEEQTRAIFDYLLATKSKRGTVLWVRENLIPDFTRHKLDTMIKSDLYIGKVRENDHFCEPYFTKDQMEEIRSVNQIKYAPSGHIYLFSGLFRCPICGRKMSSFYSIDRKTKKHRQYQRCWFGGNEKLHKTKLVSEAKTEKYLLENLDAALKNLEFDVKKEAGKPKRNLNKKLNDAIGERERLNYLFEKGRIDIPEYEKKYSILSGKINSISEELSNNKVVRIEEFKKQIPEDWKELYEQLDQKGKQEFWHRIIKEIYLNEAFEITGFIFYI

SEQ ID NO: 8941 - protein, 446 aa, Unknown
  Description of Unknown: Integrase B8942 sequence
  PTHR30461:SF3,cd00338,SM00857,IPR036162,PF13408, IPR025827,G3DSA:3.40.50.1390,mobidb-lite,IPR006119,SSF53041, PTHR30461,PS51736,Coil,PF00239
MNIAIYPRKSKKDDNSESMEQQIDDCRKYINKTYPNANMIVYSGDYAITGHSTAKRKDFQRMMDDVRAGRINAVVIMRYDRIARNMRDFCNLYHDMESAGCNLISVSQQIDTSTPYGKNFMYQMANMAELEWAVISERYKDTAAYKIREGKAYTGRVPIGFKIEKIDGVKKVVHDNEEQTRAIFDYLLATKSKRGTVLWVRENLISDFTRHKLDSMINSDLYIGKVRENENFCEPYFTKEQMEEIRSVNQIKYAPSGHIYLFSGLFRCPICGRKMSSFYSIDRKTKKHRQYQRCWFGGNEKLHKTKLVSEAKTEKYLLENLDAALKNLEFDVKKEAGKPKRNLNKKLNDAIGERERLNYLFEKGRIDIPEYEKKYSVLSEKINSITEELSNNKVVRIEEFKKQIPEDWKELYEQLDQKGKQEFWHRIIKEIYLNEAFEITGFIFYI

SEQ ID NO: 8942 - protein, 446 aa, Unknown
  Description of Unknown: Integrase B8943 sequence
  SM00857,IPR006118,G3DSA:1.10.10.2600,IPR036162, PF13408,IPR025827,PS51737,Coil, G3DSA:3.40.50.1390,IPR006119,IPR038109,SSF53041, IPR011109,PTHR30461,PS00397,PS51736,cd00338,PF00239
MCQKIVVTLPNILRIRVALYIRVSTEEQAKHGLSLADQREALTDYAAAHNMEVVGIYEDAGISARKPYKKRPALLRLLDDCRAGKIDTILFVKLDRWFRNVAGYYAVQEVLDKNHVDWQAIREDYETRTASGRLKVNIMLSVAQDEADRTSERIKAINEGKRAKGQPTNGKTPIGICVKNRRYAIDEETADAARDMFPAFIRLQSILALRRYMATEWRIKRSYNKYKDALGNRLYLGEAFGVENALPALVDQETFDLAGKILERRSQRNASADRIYLFTGILRCRECGRNMQPETVKKVYKYYRCRTHILDPADCPHILRIREDVLEDYLLREFEGIAKKYYSKSKTAEKKPPKTAEQIKRKMQKLKELYLSDLIEIEEYKKDYTGLKQQLAAINSETIKEFDLETLRRELKEYSNLDRQAKKEFWVRTIQRIDADNDGAFFVTPS

SEQ ID NO: 8943 - protein, 446 aa, Unknown
  Description of Unknown: Integrase B8944 sequence
  PTHR30461:SF3,SM00857,IPR036162,PF13408,IPR025827, G3DSA:3.40.50.1390,mobidb-lite,IPR006119,SSF53041,PF00239, PTHR30461,PS51736,Coil,cd00338
MNIAIYPRKSKKDDNSESMEQQIDDCRKYINKTYPNANIIVYSGDYAITGHSTAKRKDFQRMMDDVRAGRINAVVIMRYDRIARNMRDFCNLYHDMESAGCNLISVSQQIDTSTPYGKNFMYQMANMAELEWAVISERYKDTAAYKIREGKAYTGRVPIGFKIEKIDGVKKVVHDNEEQTRAIFDYLLATKSKRGTVLWVRENFIPDFTRHKLDSMIKSDLYIGKVRENENFCEPYFTKEQMEEIRSVNQIKYAPSGHIYLFSGLFRCPICGRKMSSFYSIDRKTKKHRQYQRCWFGGNEKLHKTKLVSEAKTEKYLLENIDTALKNLEFDVKKEESKPKRNLNKKLNDAIGERDRLNYLFEKGRIDIPEYEKKYSILSGKINSISEELSNNKVVKIEEFKKQIPSDWRVLYEQLDQKGKQEFWHRIIKEIYLNEAFEITGFIFYI

SEQ ID NO: 8944 - protein, 446 aa, Unknown
  Description of Unknown: Integrase B8945 sequence
  SM00857,IPR006118,G3DSA:1.10.10.2600,IPR036162, PF13408,PS51737,IPR025827,Coil, G3DSA:3.40.50.1390,IPR006119,IPR038109,IPR011109, SSF53041,PTHR30461,PS00397,PS51736,cd00338,PF00239
MKVIRGAGYVRVSTAEQALRGLSLESQEMDIRAYAETHGIQLVRIYVDKGITARKALNKRQAFQEMMRDVDDGKIDRIIVMRLDRWFRNVYDYHRMMNEHLIPHGVDWCAVKEDYDTTTTNGRLMINLRLAIAEQECDTDGDRIRDVQHNMILKGRWPFGMAPLGYKLENKRLVKDPDTQAHVDFFFRHLLANGSLRGALHATNDAFGTHYEYKRAQTMAHRSIYYGEYDQQREFCPAYITKEEHERILYLVSKNIRVRKSPDAGIHLFSSLLICDDCGRRLNAQIIRRPSGTYTTYRCAHAMDNQLCPNNRSLSERVVEKYLLDYIQNDLAQYMVEVEVQGASQRPAQDNTDVIRAKQERVKELFIDGLISLDEYKARIDELERKIIVLPQRSGPNLGRLKQLMEGDFQTIYNGLSREEKRSFWRSILRELHVYRGTIQGPPVFL

SEQ ID NO: 8945 - protein, 446 aa, Unknown
  Description of Unknown: Integrase B8946 sequence
  PTHR30461:SF3,cd00338,SM00857,PS51736,PF13408, IPR025827,G3DSA:3.40.50.1390,IPR036162,IPR006119,SSF53041, PTHR30461,mobidb-lite,Coil,PF00239
MNIAIYPRKSKKDDNSESMEQQIDDCKKYIDKTYHNANIIVYSGDYAITGHSTAKRKDFQRMMDDVRAGRINAVVIMRYDRIARNMRDFCNLYHDMESVGCNLISVSQQIDTSTPYGKNFMYQMANMAELEWAVISERYKDTAAYKIREGKAYTGRVPIGFKIEKIDGIKKVVHDNEEQTRAIFDYLLATKSKRGTVLWVRENFIPDFTRHKLDTMIKSDLYIGKVRENENFCEPYFTKEKMEEIRSVNQIKYAPSGHIYLFSGLFRCPICGRKMSSFYSIDRKTKKHRQYQRCWFGGNEKLHKTKLVSEAKTEKYLLENLDAALKNLEFDVKKEAGKPKRNLNKKLNDAIGERDRLNYLFEKGRIDIPEYEKKYSVLSEKINSITEELSNNKVVRIEEFKKQIPEDWKELYEQLDQKGKQEFWHRIIKEIYLNEAFEITGFIFYI

SEQ ID NO: 8946 - protein, 446 aa, Unknown
  Description of Unknown: Integrase B8947 sequence
  PTHR30461:SF3,SM00857,IPR006118,G3DSA:1.10.10.2600, IPR036162,PF13408,PS51737,IPR025827, G3DSA:3.40.50.1390,IPR006119,IPR038109,IPR011109, SSF53041,PTHR30461,PS00397,PS51736,cd00338,PF00239
MCQKIVITLPNILRIRVALYIRVSTEEQAKHGLSLADQREALTDYATAHNMEVVGIYEDAGISARKPYKKRPALMRLLDDCNAGKVDTILFVKLDRWFRNVAGYYAVQEVLDKNHVAWQAIREDYETRTASGRLKVNIMLSVAQDEADRTSERIKDINEGKRAKGQPTNGRTPIGICVKNRRYAIDEETADAARDMFPAFIRLQSILALRRYMATEWGIKRSYNKYKDALGNRLYLGEAFGVENALPALIDQETFDLAGKILERRSQRNASADRIYLFTGILRCRECGRNMQPETVKQVYKYYRCRTHTLDPADCPHILRIREDVLEDYLLREFEGIAKKYYSKSKTAEKKPPKTAEQIKRKMQKLKDLYLSDLIEIEEYKKDYTDLKQQLAAINPEPIKEFDLETLRRELKEYPDLDRQAKKEFWVRTIQRIDADNDGAFFVTPS

SEQ ID NO: 8947 - protein, 446 aa, Unknown
  Description of Unknown: Integrase B8948 sequence
  PTHR30461:SF3,SM00857,IPR036162,PS51736,PF13408, G3DSA:3.40.50.1390,IPR025827,IPR006119,SSF53041,PF00239, PTHR30461,mobidb-lite,Coil,cd00338
MNIAIYPRKSKKDDNSESMEQQIDDCRKYINKTYPDANIIVYSGDYAITGHSTAKRKDFQRMMDDVRAGRINAVVIMRYDRIARNMRDFCNLYHDMESAGCNLISVSQQIDTSTPYGKNFMYQMANMAELEWAVISERYKDTAAYKIREGKAYTGRVPIGFKIEKIDGIKKVVHDNEEQTRAIFDYLLATKSKRGTVLWVRENLIPDFTRHKLDTMINSDLYIGKVRENENFCEPYFTKEQMEEIRSVNQIKYAPSGHIYLFSGLFRCPICGRKMSSFYSIDRKTKKHRQYQRCWFGGNEKLHKTKLVSEAKTEKYLLENLDAALKNLEFDVKKEAGKPKRNLNKKLNDAIAERDRLNYLFEKGRIDIPEYEKKYSVLSEKINSITEELSNNKVVRIEEFKKQIPEDWKELYEQLDQKGKQEFWHRIIKEIYLNEAFEITGFIFYI

SEQ ID NO: 8948 - protein, 446 aa, Unknown
  Description of Unknown: Integrase B8949 sequence
  PTHR30461:SF3,cd00338,SM00857,IPR036162, PF13408,IPR025827,PS51736,G3DSA:3.40.50.1390, IPR006119,SSF53041,PTHR30461,mobidb-lite, Coil,PF00239
MNIAIYPRKSKKDDNSESMEQQIDDCRKYINKTYHNANIIVYSGDYAITGHSTAKRKDFQRMMDDVRAGRINAVVIMRYDRIARNMRDFCNLYHDMESAGCNLISVSQQIDTSTPYGKNFMYQMANMAELEWAVISERYKDTAAYKIREGKAYTGRVPIGFKIEKIDGVKKVVHDNEEQTRAIFDYLLATKSKRGTVLWVRENFIPDFTRHKLDTMIKSDLYIGKVRENDHFCEPYFTKEQMEEIRSVNQIKYAPSGHIYLFSGLFRCPICGRKMASFYSIDRKTKKHRQYQRCWFGGNEKLHKTKLVSEAKTEKYLLENLDAALKNLEFDVKKEAGKPKQNLNKKLNDAIGERERLNYLFEKGRIDIPEYEKKYSILSGKINSLSEELSNNKVVRIEEFKKQIPEDWKELYEQLDQKGKQEFWHRIIKEIYLNEAFEITGFIFYI

SEQ ID NO: 8949 - protein, 446 aa, Unknown
  Description of Unknown: Integrase B8950 sequence
  PTHR30461:SF3,IPR036162,PS51737,IPR011109,PTHR30461, PS00397,PF00239,G3DSA:1.10.10.2600,IPR006119,SSF53041, cd00338,SM00857,IPR025827,IPR038109,PS51736, IPR006118,PF13408,G3DSA:3.40.50.1390,Coil
MKRAALYIRVSTEEQARHGLSLEDQKNNLTQFSKSHGMKIAGIYEDAGISARKPYKKRPALLRLLEDCKAGKIDLILFIKLDRWFRNVGNYYAVQEILDQYNVSWQATQEDYETTTASGRLKVNIMLSVAQDEADRTSERIKFVFEGKRARLEPLTGNIPFGYKIEGKAFKKDESKEALVNDFFKKYLASGSISKTSEFIREKYGISMRYHLIDKMLRSTTYYGKYYNMDGMCPAYITKEDHEKIQAMRRKVVRKAKNNRTYLFSGLVVCPECGNRMGARINTKQTYVFYNCNGHYTKQNGCQNRVNLGERKIEEYLLATVDNKFHEYKANFSALKNAEINKRARAEISAAKSKLNKLKDLYLNDIITLEELKADRESLLAKISDLEKAALPEQKQDFESIDRVLIENWKESYDGLNREEKREFWRIIIKEIKIYPDRHIEYSLNV

SEQ ID NO: 8950 - protein, 446 aa, Unknown
  Description of Unknown: Integrase B8951 sequence
  PTHR30461:SF3,SM00857,IPR036162,PS51736,PF13408, G3DSA:3.40.50.1390,IPR025827,IPR006119,SSF53041,PF00239, PTHR30461,mobidb-lite,Coil,cd00338
MNIAIYPRKSKKDDNSESMEQQIDDCRKYINKTYPDANIIVYSGDYAITGHSTAKRKDFQRMMDDVRAGRINAVVIMRYDRIARNMRDFCNLYHDMESAGCNLISVSQQIDTSTPYGKNFMYQMANMAELEWAVISERYKDTAAYKIREGKAYTGRVPIGFKIEKIDGVKKVVHDNEEQTRAIFDYLLATKSKRGTVLWVRENLISDFTRHKLDSMINSDLYIGKVRENENFCEPYFTKEQMEEIRSVNQIKYAPSGHIYLFSGLFRCPICGRKMASFYSIDKKTKKHRQYQRCWFGGNEKLHKTKLVSEAKTEKYLLENLDAALKNLEFDVKKEAGKPKRNLNKKLNDAIGERDRLNYLFEKGRIDIPEYEKKYSVLSEKINSITEELSNNKVVRIEEFKKQIPEDWKELYEQLDQKGKQEFWHRIIKEIYLNEAFEITGFIFYI

SEQ ID NO: 8951 - protein, 446 aa, Unknown
  Description of Unknown: Integrase B8952 sequence
  PTHR30461:SF3,cd00338,SM00857,IPR036162, PF13408,IPR025827,G3DSA:3.40.50.1390,PS51736, IPR006119,SSF53041,PTHR30461,mobidb-lite, Coil,PF00239
MNIAIYPRKSKKDDNSESMEQQIDDCKKYINKTYHNANIIVYSGDYAITGHSTAKRKDFQRMMDDVRAGRINAVVIMRYDRIARNMRDFCNLYHDMESAGCNLISVSQQIDTSTPYGKNFMYQMANMAELEWAVISERYKDTAAYKIREGKAYTGRVPIGFKIEKTDGVKKVVHDNEEQTRAIFDYLLATKSKRGTVLWVRENFIPDFTRHKLDTMIKSDLYIGKVRENDHFCEPYFTKDQMEEIRSVNQIKYAPSGHIYLFSGLFRCPICGRKMASFYSIDRKTKKHRQYQRCWFGGNEKLHKTKLVSEAKTEKYLLENLDAALKNLEFDVKKEAGKPKRNLNKKLNDAIGERDRLNYLFEKGRIDIPEYEKKYSILSGKINSISEELSNNKVVRIEEFKKQIPSNWKVLYEQLDQKGKQEFWHRIIKEIYLNEAFEITGFIFYI

SEQ ID NO: 8952 - protein, 446 aa, Unknown
  Description of Unknown: Integrase B8953 sequence
  PTHR30461:SF3,SM00857,IPR006118,G3DSA:1.10.10.2600,IPR036162, PF13408,IPR025827,G3DSA:3.40.50.1390,PS51737,IPR006119, IPR038109,IPR011109,SSF53041,PTHR30461,PS00397, PS51736,cd00338,PF00239
MCQKIVVTLPNNLRIRVALYIRVSTEEQAKHGLSLADQREALIAYAAAHGMEVVGIYEDAGISARKPYKKRPALMRLLDDCSAGKIDTILFVKLDRWFRNVAGYYAVQEVLDKNHVDWQAIREDYETRTASGRLKVNIMLSVAQDEADRTSERIKAINEGKRAKGQPTNGKTPIGICVKNRRYAIDEETADAARDMFPAFIRLQSILALRRYMATEWGIKRSYNKYKDALRSRLYLGEAFGVENALPALVDQETFDLAGKILERRSQRNASVDRIYLFTGILRCRECGRNMQPETVKQVYKYYRCRTHTLDPADCPHILRIREDVLEDYLLREFEGIAKKYYSKSKTAEKKPPKTAEQIKRKMQKLKDLYLSDLIEIEEYKKDYTELKQQLAAINPEPIKEFDLETLRRELKEYPDLDRQAKKEFWVRTIQRIDADNDGAFFVTPS

SEQ ID NO: 8953 - protein, 446 aa, Unknown
  Description of Unknown: Integrase B8954 sequence
  PTHR30461:SF3,SM00857,PS51736,PF13408,IPR025827, IPR036162,G3DSA:3.40.50.1390,IPR006119,SSF53041,PF00239, PTHR30461,mobidb-lite,Coil,cd00338
MNIAIYPRKSKKDDNSESMEQQIDDCRKYINKTYPNANIIVYSGDYAITGHSTAKRKDFQRMMDDVRAGRINAVVIMRYDRIARNMRDFCNLYHDMESAGCNLISVSQQIDTSTPYGKNFMYQMANMAELEWAVISERYKDTAAYKIREGKAYTGRVPIGFKIEKIDGVKKVVHDNEEQTRAIFDYLLATKSKRGTVLWVRENLIPDFTRHKLDSMIKSDLYIGKVRENENFCEPYFTKEQMEEIRSVNQIKYAPSGHIYLFSGLFRCPICGRKMSSFYSIDRKTKKHRQYQRCWFGGNEKLHKTKLVSEAKTEKYLLENLDSALKNLEFDVKKEAGKPKRNLNKKLNDAIAERDRLNYLFEKGRIDIPEYEKKYSILSGKINLIIEELSNNKVVKIEEFKKQIPSDWKVLYEQLDQKGKQEFWHRIIKEIYLNEAFEITGFIFYI

SEQ ID NO: 8954 - protein, 446 aa, Unknown
  Description of Unknown: Integrase B8955 sequence
  PTHR30461:SF3,SM00857,IPR006118,G3DSA:1.10.10.2600, IPR036162,PF13408,IPR025827,PS51737, G3DSA:3.40.50.1390,IPR006119,IPR038109,IPR011109, SSF53041,PTHR30461,PS00397,PS51736,cd00338,PF00239
MCQKIVVTLPNNLRIRVALYIRVSTEEQAKHGLSLADQRDALIAYAAAHGMEVVGIYEDAGISARKPYKKRPALMRLLDDCRAGKIDTILFVKLDRWFRNVAGYYAVQEVLDKNHVDWQAIREDYETRTASGRLKVNIMLSVAQDEADRTSERIKAINEGKRAKGQPTNGKTPIGICVRNRRYDIDEETADAARDMFPAFIRLQSILALRRYMATEWGIKRSYNKYKDALRSRLYLGEAFGVENALPALIDQETFDLAGKILERRSQRNASADRIYLFTGILRCRECGRNMQPETVKKVYKYYRCRTHTLDPADCPHILRIREDVLEDYLLREFEGIAEKYYSKSKTAEKKPPKTAEQIKRKMQKLKDLYLSDLIEIEEYKKDYTELKQQLAAINPEPIKEFDLETLRRELKEYPDLDRQAKKEFWVRTIQRIDADNDGAFFVTPS

SEQ ID NO: 8955 - protein, 446 aa, Unknown
  Description of Unknown: Integrase B8956 sequence
  PTHR30461:SF3,SM00857,IPR036162,PF13408,IPR025827, G3DSA:3.40.50.1390,PS51736,IPR006119,SSF53041,PF00239, PTHR30461,mobidb-lite,Coil,cd00338
MNIAIYPRKSKKDDNSESMEQQIDDCRKYINKTYPDANIIVYSGDYAITGHSTAKRKDFQRMMDDVRAGRINAVVIMRYDRIARNMRDFCNLYHDMESAGCNLISVSQQIDTSTPYGKNFMYQMANMAELEWAVISERYKDTAAYKIREGKAYTGRVPIGFKIEKIDGIKKVVHDNEEQTRAIFDYLLATKSKRGTVLWVRENLIPDFTRHKLDTMIKSDLYIGKVRENENFCEPYFTQKQMEEIRSVNQIKYAPSGHIYLFSGLFRCPICGRKMSSFYSIDRKTKKHRQYQRCWFGGNEKLHKTKLVSETKTEKYLLENLDAALKNLEFDVKKEAGKPKQNLNKKLNDAIGERERLNYLFEKGRIDIPEYEKKYSVLSEKINSITEELSNNKVVRIEEFKKQIPEDWKVLYEQLDPKGKQEFWHRIIKEIYLNEAFEITGFIFYI

SEQ ID NO: 8956 - protein, 446 aa, Unknown
  Description of Unknown: Integrase B8957 sequence
  PTHR30461:SF3,SM00857,IPR006118,G3DSA:1.10.10.2600, IPR036162,PF13408,PS51737,IPR025827, G3DSA:3.40.50.1390,IPR006119,IPR038109,IPR011109, SSF53041,PTHR30461,PS00397,PS51736,cd00338,PF00239
MCQKIVVTLPNNLRIRVALYIRVSTEEQAKHGLSLADQREALIAYAAAHGMEVVGIYEDAGISARKPYKKRPALMRLLDDCRAGKIDTILFVKLDRWFRNVAGYYAVQEVLDKNHVDWQAIREDYETRTASGRLKVNIMLSVAQDEADRTSERIKAINEGKRAKGQPTNGKTPIGICVKNRRYAIDEETADAARDMFPAFIRLQSILALRRYMATEWGIKRSYNKYKDALRSRLYLGEAFGVENALPALVDQETFNLARRILEQRSQRNASADRIYLFTGILRCRECGRNMQPETVKQVYKYYRCRTHTLDPADCPHILRIREDVLEDYLLREFEGIAKKYYSKSKTAEKKPPKTAEQIKRKMQKLKDLYLSDLIEIEEYKKDYTELKQQLAAINPEPIKEFDLETLRRELKEYPDLDRQAKKEFWVRTIQRIDADNDGAFFVTPS

SEQ ID NO: 8957 - protein, 446 aa, Unknown
  Description of Unknown: Integrase B8958 sequence
  PTHR30461:SF3,cd00338,SM00857,IPR036162,PF13408, IPR025827,G3DSA:3.40.50.1390,PS51736,IPR006119,SSF53041, PTHR30461,mobidb-lite,Coil,PF00239
MNIAIYPRKSKKDDNSESMEQQIDDCKKYINKTYPNANIIVYSGDYAITGHSTAKRKDFQRMMDDVRAGRINAVVIMRYDRIARNMRDFCNLYHDMESAGCNLISVSQQIDTSTPYGKNFMYQMANMAELEWAVISERYKDTAAYKIREGKAYTGRVPIGFKIEKIDGVKKVVHDNEEQTRAIFDYLLATKSKRGTVLWVRENLIPDFTRHKLDTMIKSDLYIGKVRENENFCEPYFTKEKMEEIRSVNQIKYAPSGHIYLFSGLFRCPICGRKMASFYSIDRKTKKHRQYQRCWFGGNEKLHKTKLVSEAKTEKYLLENLDAALKNLEFDVKKEAGKPKRNLNKKLNDAIGERDRLNYLFEKGRIDIPEYEKKYSVLSEKINSITEELSNNKVVRIEEFKKQIPEDWKELYEQLDQKGKQEFWHRIIKEIYLNEAFEITGFIFYI

SEQ ID NO: 8958 - protein, 446 aa, Unknown
  Description of Unknown: Integrase B8959 sequence
  PTHR30461:SF3,SM00857,IPR006118,G3DSA:1.10.10.2600, IPR036162,PF13408,PS51737,G3DSA:3.40.50.1390, IPR025827,IPR006119,IPR038109,SSF53041, IPR011109,PTHR30461,PS00397,PS51736,cd00338,PF00239
MCQKIVVTLPNNLRIRVALYIRVSTEEQAKHGLSLADQRDALIAYAAAHGMEVVGIYEDAGISARKPYKKRPALMRLLDDCRAGKIDTILFVKLDRWFRNVAGYYAVQEVLDKNHVDWQAIREDYETRTASGRLKVNIMLSVAQDEADRTSERIKAINEGKRAKGQPTNGKTPIGICVKNRRYAIDEETADAARDMFPAFIRLQSILALRRYMATEWGIKRSYNKYKDALRSRLYLGEAFGVENALPALVDQETFDLAGKILERRSQRNASADRIYLFTGILRCRECGRNMQPETVKKVYKYYRCRTHTLDPADCPHILRIREDVLEDYLLREFEGIAKKYYSKSKTAEKKPPKTAEQIKRKMQKLKDLYLSDLIEIEEYKKDYTELKQQLAAINPEPIKEFDLETLRRELKEYPDLDRQAKKEFWVRTIQRIDADNDGAFFVTPS

SEQ ID NO: 8959 - protein, 446 aa, Unknown
  Description of Unknown: Integrase B8960 sequence
  PTHR30461:SF3,cd00338,SM00857,PS51736,IPR036162, PF13408,G3DSA:3.40.50.1390,IPR025827,IPR006119,SSF53041, PTHR30461,mobidb-lite,Coil,PF00239
MNIAIYPRKSKKDDNSESMEQQIDDCKKYINKTYPNANIIVYSGDYAITGHSTAKRKDFQRMMDDVRAGRINAVVIMRYDRIARNMRDFCNLYHDMESAGCNLISVSQQIDTSTPYGKNFMYQMANMAELEWAVISERYKDTAAYKIREGKAYTGRVPIGFKIEKIDGVKKVVHDNEEQTRAIFDYLLATKSKRGTVLWVRENLISDFTRHKLDSMINSDLYIGKVRENENFCEPYFTKEQMEEIKSVNQIKYAPSGHIYLFSGLFRCPICGRKMSSFYSIDRKTKKHRQYQRCWFGGNEKLHKTKLVSEAKTEKYLLENLDAALKNLEFDVKKEAGKPKRNLNKKLNDAIGERERLNYLFEKGRIDIPEYEKKYSVLSEKINSITEELSNNKVVRIEEFKKQIPEDWKELYEQLDQKGKQEFWHRIIKEIYLNEAFEITGFIFYI

SEQ ID NO: 8960 - protein, 446 aa, Unknown
  Description of Unknown: Integrase B8961 sequence
  PTHR30461:SF3,SM00857,IPR006118,G3DSA:1.10.10.2600, IPR036162,PF13408,IPR025827,G3DSA:3.40.50.1390, PS51737,IPR006119,IPR038109,SSF53041, IPR011109,PTHR30461,PS00397,PS51736,cd00338,PF00239
MCQKIVVTLPNNLRIRVALYIRVSTEEQAKHGLSLADQREALIAYAAAHGMEVVGIYEDAGISARKPYKKRPALLRLLDDCRAGKIDTILFAKLDRWFRNVAGYYAVQEVLDKNHVDWQAIREDYETRTASGRLKVNIMLSVAQDEADRTSERIKAINEGKRAKGQPTNGKTPIGICVKNRRYAIDEETADAARDMFPAFIRLQSILALRRYMATEWGIKRSYNKYKDALRSRLYLGEAFGVENVLPALVDRETFDLAGKILERRSQRNASADRIYLFTGILRCRECGRNMQPETVKQVYKYYRCRTHTLDPADCPHILRIREDVLEDYLLREFEGIAKKYYSKSKTAEKKPPKTAEQIKRKMQKLKDLYLSDLIEIEEYKKDYTELKQQLAAINPEPIKEFDLETLRRELKEYPDLDRQAKKEFWVRTIQRIDADNDGAFFVTPS

SEQ ID NO: 8961 - protein, 446 aa, Unknown
  Description of Unknown: Integrase B8962 sequence
  PTHR30461:SF3,SM00857,IPR006118,G3DSA:1.10.10.2600,IPR036162, PF13408,PS51737,IPR025827,G3DSA:3.40.50.1390,IPR006119, IPR038109,SSF53041,IPR011109,PTHR30461,PS00397, PS51736,cd00338,PF00239
MCQKIVVTLPNNLRIRVALYIRVSTEEQAKHGLSLADQREALIAYAAAHGMEVVGIYEDAGISARKPYKKRPALMRLLDDCRAGKIDTILFVKLDRWFRNVAGYYAVQEVLDKNHVDWQAIREDYETRTASGRLKVNIMLSVAQDEADRTSERIKAINEGKRAKGRPTNGKTPIGICVKNRRYAIDEETADAARDMFPAFIRLQSILALRRYMATEWGIKRSYNKYKDALRSRLYLGEAFGVENALPALVDQETFDLAGKILERRSQRNASADRIYLFTGILRCRECGRNMQPETVKKVYKYYRCRTHTLDPADCPHILRIREDVLEDYLLREFEGIAEKYYSKSKTAEKKPPKTAEQIKRKMQKLKDLYLSDLIEIEEYKKDYTELKQQLAAINPEPIKEFDLETLRRELKEYPDLDRQAKKEFWVRTIQRIDADNDGAFFVTPS

SEQ ID NO: 8962 - protein, 446 aa, Unknown
  Description of Unknown: Integrase B8963 sequence
  PTHR30461:SF3,SM00857,IPR036162,PS51736,PF13408, G3DSA:3.40.50.1390,IPR025827,IPR006119,SSF53041,PTHR30461, mobidb-lite,cd00338,PF00239
MNIAIYPRKSKKDDNSESMEQQIDDCRKYINKTYPDANIIVYSGDYAITGHSTAKRKDFQRMMDDVRAGRINAVVIMRYDRIARNMRDFCNLYHDMESAGCNLISVSQQIDTSTPYGKNFMYQMANMAELEWAVISERYKDTAAYKIREGKAYTGRVPIGFKIEKIDGVKKVVHDNEAQTRVIFDYLLATKSKRGTVLWVRENLIPDFTRHKLDSMIKSDLYIGKVRENENFCEPYFTKEQMEEIRSVNQIKYAPSGHIYLFSGLFRCPICGRKMSSFYSIDRKTKKHRQYQRCWFGGNEKLHKTKLVSEAKTEKYLLENIDTALKNLEFDVKKESGKPKQNLNKKLNDAIGERDRLNYLFEKGRIDIPEYEKKYSILSGKINSISEELSNNKVVKIEEFKKQIPSDWKVLYEQLDQKGKQEFWHRIIKEIYLNEAFEITGFIFYI

SEQ ID NO: 8963 - protein, 446 aa, Unknown
  Description of Unknown: Integrase B8964 sequence
  PTHR30461:SF3,SM00857,IPR006118,G3DSA:1.10.10.2600, IPR036162,PF13408,IPR025827,G3DSA:3.40.50.1390, PS51737,IPR006119,IPR038109,IPR011109, SSF53041,PTHR30461,PS00397,PS51736,cd00338,PF00239
MCQKIVVTLPNNLRIRVALYIRVSTEEQAKHGLSLADQREALIAYAAAHGMEVVGIYEDAGISARKPYKKRPALMRLLDDCSAGKIDTILFVKLDRWFRNVAGYYAVQEVLDKNHVDWQAIREDYETRTASGRLKVNIMLSVAQDEADRTSERIKAINEGKRAKGQPTNGKTPIGICVKNRRYAIDEETADAARDMFPAFIRLQSILALRRYMATEWGIKRSYNKYKDALSNRLYLGEAFGVENALPALVDQETFNLARRILEQRSQRNASADRIYLFTGILRCRECGRNMQPETVKQVYKYYRCRTHTLDPADCPHILRIREDVLEDYLLREFEGIAKKYYSKSKTAEKKPPKTAEQIKRKMQKLKDLYLSDLIEIEEYKKDYTELKQQLAAINPEPIKEFDLETLRRELKEYPDLDRQAKKEFWVRTIQRIDADNDGAFFVTPS

SEQ ID NO: 8964 - protein, 446 aa, Unknown
  Description of Unknown: Integrase B8965 sequence
  PTHR30461:SF3,cd00338,SM00857,IPR036162,PF13408, IPR025827,G3DSA:3.40.50.1390,mobidb-lite,IPR006119,SSF53041, PTHR30461,PS51736,Coil,PF00239
MNIAIYPRKSKKDDNSESMEQQIDDCKKYIDKTYTNANIIVYSGDYAITGHSTAKRKDFQRMMDDVRAGRINAVVIMRYDRIARNMRDFCNLYHDMESAGCNLISVSQQIDTSTPYGKNFMYQMANMAELEWAVISERYKDTAAYKIREGKAYTGRVPIGFKIEKIDGVKKVVHDNEEQTRAIFDYLLATKSKRGTVLWVRENLIPDFTRHKLDTMIKSDLYIGKVRENENFCEPYFTKEKMEEIRSVNQIKYAPSGHIYLFSGLFRCPICGRKMASFYSIDRKTKKHRQYQRCWFGGNEKLHNTKLVSEAKTEKYLLENLDAALKNLEFDVKKEAGKPKRNLNKKLNDAIGERDRLNYLFEKGRIDIPEYEKKYSVLSEKINSITEELSNNKVVRIEEFKKQIPEDWKVLYEQLDQKGKQEFWHRIIKEIYLNEAFEISGFIFYI

SEQ ID NO: 8965 - protein, 446 aa, Unknown
  Description of Unknown: Integrase B8966 sequence
  PTHR30461:SF3,SM00857,PS51736,IPR036162, PF13408,G3DSA:3.40.50.1390,IPR025827,IPR006119, SSF53041,PTHR30461,Coil,mobidb-lite, cd00338,PF00239
MNIAIYPRKSKKDDNSESMEQQIDDCRKYINKTYPDANIIVYSGDYAITGHSTAKRKDFQRMMDDVRAGRINAVVIMRYDRIARNMRDFCNLYHDMESAGCNLISVSQQIDTSTPYGKNFMYQMANMAELEWAVISERYKDTAAYKIREGKAYTGRVPIGFKIEKIDGVKKVVHDNEEQTRAIFDYLLATKSKRGTVLWVRKNFIPDFTRHKLDTMIKSDLYIGKVRDNDHFCDPYFTKEQMEEIRSVNQIKYAPSGHIYLFSGLFRCPICGRKMASFYSIDRKTKKHRQYQRCWFGGNEKLHKTKLVSEAKTEKYLLENLDAALKNLEFDVKKEAGKPKQNLNKKLNDAIGERERLNYLFEKGRIDIPEYEKKYSVLSEKINSITEELSNNKVVRIEEFKKQIPEDWKVLYEQLDPKGKQEFWHRIIKEIYLNEAFEITGFIFYI

SEQ ID NO: 8966 - protein, 446 aa, Unknown
  Description of Unknown: Integrase B8967 sequence
  PTHR30461:SF3,SM00857,IPR006118,G3DSA:1.10.10.2600,IPR036162, PF13408,PS51737,IPR025827,G3DSA:3.40.50.1390,IPR006119, IPR038109,IPR011109,SSF53041,PTHR30461,PS00397, PS51736,cd00338,PF00239
MRCALYIRVSSDEQKRNGFSLPEQRHALMQYAKEKGYTIVDLYADEGVSSSKNPQRRHEFQRMLSDVKKGKIDIIVFLKLDRWYRNVGDYYLTQAILDQYGVKWECVVEKYDTTTRTGKLGLNIKLTVAEDESANASERVKFVQAGKVRNREPITGNQPFGYKIETIDGVKRIVKDPETQAECEDMFETFFATGSGGATSKYINAKYGRSLAENAIPRRLKNPFYTGEYRGVPDYCPAYITKEQHARILAIFAKRTRSTKRKKVYLFAGLIKCPVCGRTMVSCTMNKKTLGYRCRHHYMNKCTFVHTITEERIESFLLENIGSMLEQYLISYKEQNKAKKKPDPRKLEDRLSRLNNIYMMGNISDSEYTKKANEITAQIAAIKCANSNDLPIPEESIKLLSDKRFATLYADLPRESRKALWMSLIDSIEVEGLYPKQVFFIGQERL

SEQ ID NO: 8967 - protein, 446 aa, Unknown
  Description of Unknown: Integrase B8968 sequence
  PTHR30461:SF3,SM00857,IPR006118,G3DSA:1.10.10.2600,IPR036162, PF13408,PS51737,IPR025827,G3DSA:3.40.50.1390,IPR006119, IPR038109,SSF53041,IPR011109,PTHR30461,PS00397, PS51736,cd00338,PF00239
MRCALYIRVSSDEQKRNGFSLPEQRHALMQYAKEKGYTIVDLYADEGVSSSKNPQRRHEFQRMLSDVKKGKIDIIVFLKLDRWYRNVGDYYLTQAILDQYGVKWECVVEKYDTTTRTGKLGLNIKLTVAEDEAANASERVKFVQAGKVRNREPITGNQPFGYKIETIDGVKRIVKDPETQAECEDMFETFFATGSGGATSKYINAKYGRSLAENAIPRRLKNPFYTGEYRGVPDYCPAYITKEQHARILAIFAKRTRSTKRKKVYLFAGLIKCPVCRRTMVSCTMNKKTLGYRCRHHYMNKCTFVHTITEERIESFLLENIGSMLEQYLISYKEQNKAKKKPDPRKLEDRLSRLNNIYMMGNISDSEYTKKANEITAQIAAIKCANSNDLPIPEESIKLLSDKRFATLYADLPRESRKALWMSLIDSIEVEGLYPKQVFFIGQESL

SEQ ID NO: 8968 - protein, 446 aa, Unknown
  Description of Unknown: Integrase B8969 sequence
  PTHR30461:SF3,SM00857,PS51736,PF13408,IPR025827, IPR036162,G3DSA:3.40.50.1390,IPR006119,SSF53041,PF00239, PTHR30461,mobidb-lite,Coil,cd00338
MNIAIYPRKSKKDDNSESMEQQIDDCKKYINKTYHNANILVYSGDYAITGHSTAKRKDFQRMMDDVRAGRINAVVIMRYDRIARNMRDFCNLYHDMESAGCNLISVSQQIDTSTPYGKNFMYQMANMAELEWAVISERYKDTAAYKIREGKAYTGRVPIGFKIEKIDGVKKVVHDNEEQTRAIFDYLLATKSKRSTVLWVRENLIPDFTRHKLDTMIKSDLYIGKVRENENFCEPYFTKEQMAEIRSVNQIKYAPSGHIYLFSGLFRCPICGRKMSSFYSIDRKTKKHRQYQRCWFGGNEKLHKTKLVSEAKTEKYLIENLDAALKNLEFDVKKEAGKPKRNLNKKLNDAIGERDRLNYLFEKGRIDIPEYEKKYSVLSEKINSITEELSNNKVVRIEEFKKQIPEDWKELYEQLDQKGKQEFWHRIIKEIYLNEAFEITGFIFYI

SEQ ID NO: 8969 - protein, 446 aa, Unknown
  Description of Unknown: Integrase B8970 sequence
  PTHR30461:SF3,SM00857,IPR006118,G3DSA:1.10.10.2600, IPR036162,PF13408,PS51737,G3DSA:3.40.50.1390, IPR025827,IPR006119,IPR038109,IPR011109, SSF53041,PTHR30461,PS00397,PS51736,cd00338,PF00239
MQVIRGAGYIRVSTTEQATRGLSLEAQEAEIRRYAKERGIVLVQIYVDRGITARKKLHRREAFAQMMRDVDAGLIDRIIVMRLDRWFRNVYDYHKMMNEHLIPHNVDWCAVKEDYDTTTTNGRLMINLRLAIAEQECDTDGDRIRDVQENMIQKGCWPFGQAPLGYRIVNKHLEKDPEQEECIRYFFEHMLLNGSLRAALFATNERYGTTYEYKRAQHLSRASVYYGEYGTNKSFCPAYITREEHERIRYLASKNIRVRKSPDKVAHLFSGLLICSDCGRRLSGQTIRRPSGVYVTYRCAHAYDNNGCPNTKSFSERIVENYLLHYMESELEEFIFTVEAESKTISLPIDNTEQIRAKQEKVKELFINDLIDLSEYKKRIDELESKIIVTAPKPRANTARLKKLLETNALSFYQTFTRDEKRAFWRGIIKELHIYRGTVQGPPIFL

SEQ ID NO: 8970 - protein, 446 aa, Unknown
  Description of Unknown: Integrase B8971 sequence
  PTHR30461:SF3,SM00857,IPR036162,PF13408,IPR025827, G3DSA:3.40.50.1390,mobidb-lite,IPR006119,SSF53041,PF00239, PTHR30461,PS51736,Coil,cd00338
MNIAIYPRKSKKNDNSESMEQQIDDCRKYINKTYPNANIIVYSGDYAITGHSTAKRKDFQRMMDDVRAGRINAVVIMRYDRIARNMRDFCNLYHDMESAGCNLISVSQQIDTSTPYGKNFMYQMANMAELEWAVISERYKDTAAYKIREGKAYTGRVPIGFKIEKIDGVKKVVHDNEEQTRAIFDYLLATKSKRGTVLWVRENLISDFTRHKLDSMINSDLYIGKVRENENFCEPYFTKEQMEEIRSVNQIKYAPSGHIYLFSGLFRCPICGRKMSSFYSIDRKTKKHRQYQRCWFGGNEKLHNTKLVSEAKTEKYLLENLDTALKNLEFDVKKEAGKPKRNLNKKLNDAIGERDRLNYLFEKGRIDIPEYEKKYSVLSEKINSITEELSNNKVVRIEEFKKQIPEDWKELYEQLDQKGKQEFWHRIIKEIYLNEAFEITGFIFYI

SEQ ID NO: 8971 - protein, 446 aa, Unknown
  Description of Unknown: Integrase B8972 sequence
  PTHR30461:SF3,SM00857,IPR036162,PS51736, PF13408,G3DSA:3.40.50.1390,IPR025827,IPR006119, SSF53041,PF00239,PTHR30461,mobidb-lite, Coil,cd00338
MNIAIYPRKSKKDDNSESMEQQIDDCKKYINKTYPNANIIVYSGDYAITGHSTAKRKDFQRMMDDVRAGRINAVVIMRYDRIARNMRDFCNLYHDMESAGCNLISVSQQIDTSTPYGKNFMYQMANMAELEWAVISERYKDTAAYKIREGKAYTGRVPIGFKIEKIDGVKKVVHDNEEQTRAIFDYLLATKSKRGTVLWVRENLIPDFTRHKLDTMIKSDLYIGKVRENENFCEPYFTKEQMEEIRSVNQIKYAPSGHIYLFSGLFRCPICGRKMSSFYSIDRKTKKHRQYQRCWFGGNEKLHKTKLVSEAKTEKYLLENLDAALKNLEFDVKKEAGKPKQNLNKKLNDAIGERERLNYLFEKGRIDIPEYEKKYSVLSEKINSITEELSNNKVVRIDEFKKQIPEDWKVLYEQLDQKGKQEFWHRIIKEIYLNEAFEITGFIFYI

SEQ ID NO: 8972 - protein, 446 aa, Unknown
  Description of Unknown: Integrase B8973 sequence
  PTHR30461:SF3,cd00338,SM00857,IPR036162,PS51736, PF13408,G3DSA:3.40.50.1390,IPR025827,IPR006119,SSF53041, PTHR30461,mobidb-lite,Coil,PF00239
MNIAIYPRKSKKDDNSESMEQQIDDCRKYIDKTYPNANIIVYSGDYAITGHSTAKRKDFQRMMDDVRAGRINAVVIMRYDRIARNMRDFCNLYHDMESAGCNLISVSQQIDTSTPYGKNFMYQMANMAELEWAVISERYKDTAAYKIREGKAYTGRVPIGFKIEKIDGVKKVVHDNEEQTRAIFDYLLATKSKRGTVLWVRENLIPDFTRHKLDTMIKSDLYIGKVRENENFCEPYFTKEQMEEIRSVNQIKYAPSGHIYLFSGLFRCPICGRKMSSFYSIDRKTKKHRQYQRCWFGGNEKLHKTKLVSEAKTEKYLLENLDTALKNLEFDVKKEAGKPKRNLNKKLNDAIGERERLNYLFEKGRIDIPEYEKKYSVLSEKINSITEELSNNKVVRIEEFKKRIPEDWKDIYEQLDQKGKQEFWHRIIKEFYLNEAFEITGFIFYI

SEQ ID NO: 8973 - protein, 446 aa, Unknown
  Description of Unknown: Integrase B8974 sequence
  PTHR30461:SF3,SM00857,IPR006118,G3DSA:1.10.10.2600, IPR036162,PF13408,IPR025827,PS51737, G3DSA:3.40.50.1390,IPR006119,IPR038109,SSF53041, IPR011109,PTHR30461,PS00397,PS51736,cd00338,PF00239
MCQKIVVTLPNNLRIRVALYIRVSTEEQAKHGLSLADQREALTDYAAAHNMEVVGIYEDAGISARKPYKKRPALLRLLDDCRAGKIDTILFVKLDRWFRNVAGYYAVQEVLDKNHVDWQAIREDYETRTASGRLKVNIMLSVAQDEADRTSERIKAINEGKRAKGQPTNGKTPIGICVKNRRYAIDEETADAARDMFPAFIRLQSILALRRYMATEWGIKRSYNKYKDALSNRLYLGEAFGVENALPALVDQETFDLAGKILERRSQRNASADRIYLFTGILRCRECGRNMQPETVKKVYKYYRCRTHILDPADCPHILRIREDVLEDYLLREFEGIAKKYYSKSKTAEKKPPKTAEQIKRKMQKLKELYLSDLIEIEEYKKDYTDLKQQLAAINPEPVKEFDLETLRRELKEYPDLDRQAKKEFWVRTIQRIDADNDGAFFVTPS

SEQ ID NO: 8974 - protein, 446 aa, Unknown
  Description of Unknown: Integrase B8975 sequence
  PTHR30461:SF3,SM00857,IPR006118,IPR036162,PF13408, PS51737,G3DSA:3.40.50.1390,IPR025827,IPR006119,SSF53041, IPR011109,PTHR30461,PS00397,PS51736,cd00338, PF00239
MRCALYIRVSSDEQKRKGYSLPEQRHVLTQYAEEKGYTVVDLYADEGVSSSKNPQRRHEFQRMLSDVRNGKIDIIVFLKLDRWFRNVGDYYITQEILDQNGVKWECVTEHYDTTTRTGKLNLNIKLTIAEDEAANTSERVKFVQAGKVRNREPITGNQPFGYKIATIDGVKRIIKDPETQAECEDMFNTFFATGSGGATGKYINAKYGRSLAENAIPRRLKNPAYTGEYRGIPDYYPPYITKEQHARILSIFAKRTRSTKRKKVYLFAGLIKCPVCGRTMVSCTMNKKTLGYRCRHHYTYHCTFIHTITEERIESFLLENIGSMLEQYLISYKEQNKTKKKPDPRKLEDRLSRLNNIYMMGNISDSEYTKKANEITAQIAAIKCANSNDLPIPEESIKLLSDKRFATLYADLPRESRKALWMSLIDSIEVEGLYPKQVFFIGQERL

SEQ ID NO: 8975 - protein, 446 aa, Unknown
  Description of Unknown: Integrase B8976 sequence
  PTHR30461:SF3,cd00338,SM00857,IPR036162,PS51736, PF13408,G3DSA:3.40.50.1390,IPR025827,IPR006119,SSF53041, PTHR30461,mobidb-lite,Coil,PF00239
MNIAIYPRKSKKDDNSESMEQQIDDCRKYINKTYPDANIIVYSGDYAITGHSTAKRKDFQRMMDDVRAGRINAVVIMRYDRIARNMRDFCNLYHDMESAGCNLISVSQQIDTSTPYGKNFMYQMANMAELEWAVISERYKDTAAYKIREGKAYTGRVPIGFKIEKTDGVKKVVHDNEEQTRAIFDYLLATKSKRGTVLWVRENFIPDFTRHKLDTMIKSDLYIGKVRENDHFCEPYFTKDQMEEIRSVNQIKYAPSGHIYLFSGLFRCPICGRKMSSFYSIDRKTKKHRQYQRCWFGGNEKLHKTKLVSEAKTEKYLLENLDAALKNLEFDVKKEAGKPKRNLNKKLNDAIGERDRLNYLFEKGRIDIPEYEKKYSVLSEKINSITEELSNNKVVRIEEFKKQIPEDWKELYKQLDQKGKQEFWHRIIKEIYLNEAFEITGFIFYI

SEQ ID NO: 8976 - protein, 446 aa, Unknown
  Description of Unknown: Integrase B8977 sequence
  PTHR30461:SF3,SM00857,IPR036162,PF13408, IPR025827,G3DSA:3.40.50.1390,mobidb-lite,IPR006119, SSF53041,PF00239,PTHR30461,PS51736, Coil,cd00338
MNIAIYPRKSKKDDNSESMEQQIDDCRKYINKTYPNANMIVYSGDYAITGHSTAKRKDFQRMMDDVRAGRINAVVIMRYDRIARNMRDFCNLYHDMESAGCNLISVSQQIDTSTPYGKNFMYQMANMAELEWAVISERYKDTAAYKIREGKAYTGRVPIGFKIEKIDGVKKVVHDNEEQTRAIFDYLLATKSKRGTVLWVRENLIPDFTRHKLDTMIKSDLYIGKVRENENFCEPYFTKEQMEEIRSVNQIKYAPSGHIYLFSGLFRCPICGRKMSSFYSIDRKTKKHRQYQRCWFGGNEKLHKTKLVSEAKTEKYLLENLDAALKNLEFDVKKEAGKPKRNLNKKLNDAIGERDRLNYLFEKGRIDIPEYEKKYSVLSEKINSITEELSNNKVVRIEEFKKQIPEDWKELYEQLDQKGKQEFWHRIIKEIYLNEAFEITGFIFYI

SEQ ID NO: 8977 - protein, 446 aa, Unknown
  Description of Unknown: Integrase B8978 sequence
  PTHR30461:SF3,SM00857,IPR006118,G3DSA:1.10.10.2600,IPR036162, PF13408,IPR025827,G3DSA:3.40.50.1390,PS51737,IPR006119, IPR038109,SSF53041,IPR011109,PTHR30461,PS00397, PS51736,cd00338,PF00239
MCQKIVVTLPNNLRIRVALYIRVSTEEQAKHGLSLADQRDALIAYAAAHGMEVVGIYEDAGISARKPYKKRPALMRLLDDCRAGKINTILFVKLDRWFRNVAGYYAVQEVLDKNHVDWQAIREDYETRTASGRLKVNIMLSVAQDEADRTSERIKAINEGKRAKGQPTNGKTPIGICVRNRRYDIDEETADAARDMFPAFIRLQSILALRRYMATEWGIKRSYNKYKDALRSRLYLGEAFGVENALPALVDQETFDLAGKILERRSQRNASADRIYLFTGILRCRECGRNMQPETVKKVYKYYRCRTHTLDPADCPHILRIREDVLEDYLLREFEGIAKKYYSKSKTAEKKPPKTAEQIKRKMQKLKELYLSDLIEIEEYKKDYTDLKQQLAAINPEPIKEFDLETLRRELKEYPDLDRQAKKEFWVRTIQRIDADNDGAFFVTPS

SEQ ID NO: 8978 - protein, 446 aa, Unknown
  Description of Unknown: Integrase B8979 sequence
  PTHR30461:SF3,cd00338,SM00857,IPR036162,PF13408, IPR025827,G3DSA:3.40.50.1390,PS51736,IPR006119,SSF53041, PTHR30461,mobidb-lite,Coil,PF00239
MNIAIYPRKSKKDDNSESMEQQIDDCKKYINKTYPNANIIVYSGDYAITGHSTAKRKDFQRMMDDVRAGRINAVVIMRYDRIARNMRDFCNLYHDMESAGCNLISVSQQIDTSTPYGKNFMYQMANMAELEWAVISERYKDTAAYKIREGKAYTGRVPIGFKIEKIDGVKKVVHDNEEQTRAIFDYLLATKSKRGTVLWVRENLIPDFTRHKLDSMIKSDLYIGKVRENENFCEPYFTKEQMEEIRSVNQIKYAPSGHIYLFSGLFRCPICGRKMASFYSIDRKTKKHRQYQRCWFGGNEKLHKTKLVSEAKTEKYLLENLDTALKNLEFDVKKEAGKPKRNLNKKLNDAIGERDRLNYLFEKGRIDIPEYEKKYSVLSEKINSITEELSNNKVVRIDEFKKQIPEDWKVLYEQLDQKGKQEFWHRIIKEIYLNEAFEITGFIFYI

SEQ ID NO: 8979 - protein, 446 aa, Unknown
  Description of Unknown: Integrase B8980 sequence
  PTHR30461:SF3,cd00338,SM00857,IPR036162, PF13408,IPR025827,PS51736,G3DSA:3.40.50.1390, IPR006119,SSF53041,PTHR30461,mobidb-lite, Coil,PF00239
MNIAIYPRKSKKDDNSESMEQQIDDCRKYINKTYHNANIIVYSGDYAITGHSTAKRKDFQRMMDDVRAGRINAVVIMRYDRIARNMRDFCNLYHDMESAGCNLISVSQQIDTSTPYGKNFMYQMANMAELEWAVISERYKDTAAYKIREGKAYTGRVPIGFKIEKIDGIKKVVHDNEEQTRAIFDYLLATKSKRGTVLWVRENLIPDFTRHKLDTMIKSDLYIGKVRENENFCEPYFTQKQMEEIRSVNQIKYAPSGHIYLFSGLFRCPICGRKMASFYSIDKKTKKHRQYQRCWFGGNEKLHKTKLVSEAKTEKYLLENLDAALKNLEFDVKKEAGKPKRNLNKKLNDAIGERDRLNYLFEKGRIDIPEYEKKYSILSGKINSISEELSNNKVVKIEEFKKQIPSNWEVLYEQLDQKGKQEFWHRIIKEIYLNEAFEITGFIFYI

SEQ ID NO: 8980 - protein, 446 aa, Unknown
  Description of Unknown: Integrase B8981 sequence
  PTHR30461:SF3,cd00338,SM00857,IPR036162,PF13408, IPR025827,PS51736,G3DSA:3.40.50.1390,IPR006119,SSF53041, PTHR30461,mobidb-lite,Coil,PF00239
MNIAIYPRKSKKDDNSESMEQQIDDCRKYINKTYHNANIIVYSGDYAITGHSTAKRKDFQRMMDDVRAGRINAVVIMRYDRIARNMRDFCNLYHDMESAGCNLISVSQQIDTSTPYGKNFMYQMANMAELEWAVISERYKDTAAYKIREGKAYTGRVPIGFKIEKIDGVKKVVHDNEEQTRAIFDYLLATKSKRGTVLWVRENFIPDFTRHKLDTMIKSDLYIGKVRENEYFCEPYFTKEKMEEIRSVNQIKYAPSGHIYLFSGLFRCPICGRKMASFYSIDRKTKKHRQYQRCWFGGNEKLHKTKLVSEAKTEKYLLENLDVALKNLEFDVKKEAGKPKRNLNKKLNDAIAERDRLNYLFEKGRIDIPEYEKKYSVLSEKINSITEELSNNKVVRIEEFKKQIPEDWKELYEQLDQKGKQEFWHRIIKEIYLNEAFEITGFIFYI

SEQ ID NO: 8981 - protein, 446 aa, Unknown
  Description of Unknown: Integrase B8982 sequence
  PTHR30461:SF3,SM00857,IPR006118,G3DSA:1.10.10.2600, IPR036162,PF13408,PS51737,G3DSA:3.40.50.1390, IPR025827,IPR006119,IPR038109,IPR011109, SSF53041,PTHR30461,PS00397,PS51736,cd00338,PF00239
MCQKIVVTLPNNLRIRVALYIRVSTEEQAKHGLSLADQREALTAYAAAHNMEVVGIYEDAGISARKPYKKRPALMRLLDDCSAGKVDTILFVKLDRWFRNVAGYYAVQEVLDKNHVDWQAIREDYETRTASGRLKVNIMLSVAQDEADRTSERIKAINEGKRAKGQPTNGKTPIGICVKNRHYAIDKETADAAQDMFPAFIRLQSILALRRYMATEWGIKRSYNKYKDALGNRLYLGEAFGVENALPALIDQETFDLAGKILERRSQRNASADRIYLFTGILRCRECGRNMQPETVKQVYKYYRCRTHTLDPADCPHILRIREDVLEDYLLREFEGIAKKYYSKSKTAEKKPPKTAEQIKRKMQKLKDLYLSDLIEIEEYKKDYTELKQQLAAINPEPIKEFDLETLRRELKEYPNLDRQAKKEFWVRTIQRIDADNDGAFFVTPS

SEQ ID NO: 8982 - protein, 446 aa, Unknown
  Description of Unknown: Integrase B8983 sequence
  PTHR30461:SF3,cd00338,SM00857,PS51736,IPR036162, PF13408,IPR025827,G3DSA:3.40.50.1390,IPR006119,SSF53041, PTHR30461,mobidb-lite,Coil,PF00239
MNIAIYPRKSKKDDNSESMEQQIDDCKKYINKTYPNANIIVYSGDYAITGHSTAKRKDFQRMMDDVRAGRINAVVIMRYDRIARNMRDFCNLYHDMESAGCNLISVSQQIDTSTPYGKNFMYQMANMAELEWAVISERYKDTAAYKIREGKAYTGRVPIGFKIEKIDGVKKVVHDNEEQTRAIFDYLLATKSKRGTVLWVRENFIPDFTRHKLDTMIKSDLYIGKVRENENFCEPYFTKEQMEEIRSVNQIKYAPSGHIYLFSGLFRCPICGRKMASFYSIDRKTKKHRQYQRCWFGGNEKLHKTKLVSEAKTEKYLLENLDTALKNLEFDVKKEAGKPKRNLNKKLNDAIGERDRLNYLFEKGRIDIPEYEKKYSVLSEKINSITEELSNNKVVRIEEFKKQIPEDWKELYEQLDQKGKQEFWHRIIKEIYLNEAFEITGFIFYI

SEQ ID NO: 8983 - protein, 446 aa, Unknown
  Description of Unknown: Integrase B8984 sequence
  PTHR30461:SF3,cd00338,SM00857,IPR036162,PS51736,PF13408, G3DSA:3.40.50.1390,IPR025827,IPR006119,SSF53041,PTHR30461 ,mobidb-lite,Coil,PF00239
MNIAIYPRKSKKDDNSESMEQQIDDCRKYINKTYHNANIIVYSGDYAITGHSTAKRKDFQRMMDDVRAGRINAVVIMRYDRIARNMRDFCNLYHDMESAGCNLISVSQQIDTSTPYGKNFMYQMANMAELEWAVISERYKDTAAYKIREGKAYTGRVPIGFKIEKIDGVKKVVHDNEEQTRAIFDYLLATKSKRGTVLWVRENLISDFTRHKLDSMINSDLYIGKVRENENFCEPYFTKEQMEEIRSVNQIKYAPSGHIYLFSGLFRCPICGRKMSSFYSIDRKTKKHRQYQRCWFGGNEKLHKTKLVSEAKTEKYLLENLDAALKNLEFDVKKEAGKPKRNLNKKLNDAIAERDRLNYLFEKGRIDIPEYEKKYSVLSEKINSITEELSNNKVVRIEEFKKQIPEDWKELYEQLDQKGKQEFWHRIIKEIYLNEAFEITGFIFYI

SEQ ID NO: 8984 - protein, 446 aa, Unknown
  Description of Unknown: Integrase B8985 sequence
  PTHR30461:SF3,cd00338,SM00857,IPR036162,PF13408, IPR025827,G3DSA:3.40.50.1390,PS51736,IPR006119,SSF53041, PTHR30461,mobidb-lite,Coil,PF00239
MNIAIYPRKSKKDDNSESMEQQIDDCKKYINKTYPNANIIVYSGDYAITGHSTAKRKDFQRMMDDVRAGRINAVVIMRYDRIARNMRDFCNLYHDMESAGCNLISVSQQIDTSTPYGKNFMYQMANMAELEWAVISERYKDTAAYKIREGKAYTGRVPIGFKIEKIDGVKKVVHDNEEQTRAIFDYLLATKSKRGTVLWVRENLISDFTRHKLDSMINSDLYIGKVRENENFCEPYFTKEKMEEIRSVNQIKYAPSGHIYLFSGLFRCPICGRKMSSFYSIDRKTKKHRQYQRCWFGGNEKLHKTKLVSEAKTEKYLLENLDAALKNLEFDVKKEAGKPKRNLNKKLNDAIGERDRLNYLFEKGRIDIPEYEKKYSILSGKINSISEELSNNKVVKIEEFKKQIPSDWRVLYEQLDQKGKQEFWHRIIKEIYLNEAFEITGFIFYI

SEQ ID NO: 8985 - protein, 446 aa, Unknown
  Description of Unknown: Integrase B8986 sequence
  PTHR30461:SF3,SM00857,IPR036162,PF13408, IPR025827,G3DSA:3.40.50.1390,PS51736,IPR006119, SSF53041,PF00239,PTHR30461,mobidb-lite, Coil,cd00338
MNIAIYPRKSKKDDNSESMEQQIDDCKKYIDKTYPDANIIVYSGDYAITGHSTAKRKDFQRMMDDVRAGRINAVVIMRYDRIARNMRDFCNLYHDMESAGCNLISVSQQIDTSTPYGKNFMYQMANMAELEWAVISERYKDTAAYKIREGKAYTGRVPIGFKIEKIDGVKKVVHDNEEQTRAIFDYLLATKSKRGTVLWVRENLIPDFTRHKLDTMIKSDLYIGKVRENENFCEPYFTKEQMEEIRSVNQIKYAPSGHIYLFSGLFRCPICGRKMSSFYSIDRKTKKHRQYQRCWFGGNEKLHKTKLVSEAKTEKYLLENLDAALKNLEFDVKKEAGKPKRNLNKKLNDAIGERDRLNYLFEKGRIDIPEYEKKYSVLSEKINSITEELSNNKVVRIEEFKKQIPEDWKELYEQLDQKGKQEFWHRIIKEIYLNEAFEITGFIFYI

SEQ ID NO: 8986 - protein, 446 aa, Unknown
  Description of Unknown: Integrase B8987 sequence
  PTHR30461:SF3,cd00338,SM00857,IPR036162,PF13408, IPR025827,G3DSA:3.40.50.1390,PS51736,IPR006119,SSF53041, PTHR30461,mobidb-lite,Coil,PF00239
MNIAIYPRKSKKDDNSESMEQQIDDCRKYIDKTYPNANIIVYSGDYAITGHSTAKRKDFQRMMDDVRAGRINAVVIMRYDRIARNMRDFCNLYHDMESAGCNLISVSQQIDTSTPYGKNFMYQMANMAELEWAVISERYKDTAAYKIREGKAYTGRVPIGFKIEKIDGIKKVVHDNEEQTRAIFDYLLATKSKRGTVLWVRENLIPDFTRHKLDTMIKSDLYIGKVRENENFCEPYFTQKQMEEIRSVNQIKYAPSGHIYLFSGLFRCPICGRKMASFYSIDRKTKKHRQYQRCWFGGNEKLHKTKLVSEAKTEKYLLENLDAALKNLEFDVKKEAGKPKRNLNKKLNDAIGERDRLNYLFEKGRIDIPEYEKKYSVLSEKINSITEELSNNKVVRIEEFKKQIPEDWKELYEQLDQKGKQEFWHRIIKEIYLNEAFEITGFIFYI

SEQ ID NO: 8987 - protein, 446 aa, Unknown
  Description of Unknown: Integrase B8988 sequence
  PTHR30461:SF3,SM00857,IPR036162,PF13408, IPR025827,G3DSA:3.40.50.1390,mobidb-lite,IPR006119, SSF53041,PTHR30461,PS51736,cd00338, PF00239
MNIAIYPRKSKKDDNSESMEQQIDDCRKYINKTYPNANIIVYSGDYAITGHSTAKRKDFQRMMDDVRAGRINAVVIMRYDRIARNMRDFCNLYHDMESAGCNLISVSQQIDTSTPYGKNFMYQMANMAELEWAVISERYKDTAAYKIREGKAYTGRLPIGFKIEKIDGVKKVVHDNEEQTRAIFDYLLATKSKRGTVLWVRENFIPDFTRHKLDTMIKSNLYIGKVRENDHFCEPYFTKEQMEEIRSVNQIKYAPSGHIYLFSGLFCCPICGRKMASFYSIDRKTKKHRQYQRCWFGGNEKLHKTKLVSEAKTEKYLLENLDTALKNLEFDVKKESGKPKQNLNKKLNDAIGERDRLNYLFEKGRIDIPEYEKKYSILSGKINSISEELSNNKVVRIEEFKKQIPSNWKVLYEQLDQKGKQEFWHRIIKEIYLNEAFEITGFIFYI

SEQ ID NO: 8988 - protein, 446 aa, Unknown
  Description of Unknown: Integrase B8989 sequence
  PTHR30461:SF3,SM00857,G3DSA:1.10.10.2600,IPR036162,PF13408, PS51737,G3DSA:3.40.50.1390,IPR025827,IPR006119,IPR038109, PF07508,IPR011109,SSF53041,PTHR30461,PS51736, cd00338,PF00239
MKIVTEIGAIAPIKKLKKVCAYARVSKDKDAMLQSLSSQVSHYNKLISSNPEWQFAGVYADEGISGTKEDRPEFIRMVEDAKAGKIDMIITKSISRFGRNTETVIKTVRMLKAINVDVYFESQKMHTLSEEGEFMLTVLASYYQEEARSVSENMKWRIKKDFEQGIAWGGNDNFGYKLNGRTLEIVPEQAQIVKRIFDMYINGLGVLAIAKALNEEGIKPTMGGKWIKSNVLRVITNINYIGDRVLQTTFRPDFLSKKKKINKGELKQYYVEDDHEPIIDKETFMKAQLIKEERAKRFKLDVSKRNITYPFTQKIRCSCCGSTYQHKTTKYNQYWICSTFNMKGKKFCNDSKQIPEEKLYEAINSYLGIDEFDEDLFNKKIDYIIAKPNNVLEIHLFDGKIDEIKWTDPTRKNSWTPEMKEKARIKSKEIEKNLKRGADGKWVKSE

SEQ ID NO: 8989 - protein, 446 aa, Unknown
  Description of Unknown: Integrase B8990 sequence
  PTHR30461:SF3,SM00857,PS51736,IPR036162,PF13408, G3DSA:3.40.50.1390,IPR025827,IPR006119,SSF53041,PF00239, PTHR30461,mobidb-lite,Coil,cd00338
MNIAIYPRKSKKDDNSESMEQQIDDCRKYINKTYPNANIIVYSGDYAITGHSTAKRKDFQRMMDDVRAGRINAVVIMRYDRIARNMRDFCNLYHDMESAGCNLISVSQQIDTSTPYGKNFMYQMANMAELEWAVISERYKDTAAYKIREGKAYTGRVPIGFKIEKIDGVKKVVHDNEEQTRAIFDYLLATKSKRGTVLWVRENLIPDFTRHKLDTMIKSDLYIGKVRENENFCEPYFTKEQMEEIRSVNQIKYAPSGHIYLFSGLFRCPICGRKMSSFYSIDRKTKKHRQYQRCWFGGNEKLHKTKLVSEAKTEKYLLENIDTALKNLEFDVKKEESKPKRNLNKKLNDAIGERDRLNYLFEKGRIDIPEYEKKYSILSGKINSISEELSNNKVVKIEEFKKQIPSDWRVLYEQLDQKGKQEFWHRIIKEIYLNEAFEITGFIFYI

SEQ ID NO: 8990 - protein, 446 aa, Unknown
  Description of Unknown: Integrase B8991 sequence
  PTHR30461:SF3,SM00857,IPR036162,PF13408, IPR025827,G3DSA:3.40.50.1390,PS51736,IPR006119, SSF53041,PF00239,PTHR30461,mobidb-lite, Coil,cd00338
MNIAIYPRKSKKDDNSESMEQQIDDCKKYINKTYPNANIIVYSGDYAITGHSTAKRKDFQRMMDDVRAGRINAVVIMRYDRIARNMRDFCNLYHDMESAGCNLISVSQQIDTSTPYGKNFMYQMANMAELEWAVISERYKDTAAYKIREGKAYTGRVPIGFKIEKIDGVKKVVHDNEEQTRAIFDYLLATKSKRGTVLWVRKNFIPDFTRHKLDTMIKSDLYIGKVRDNDHFCDPYFTKEQMEEIRSVNQIKYAPSGHIYLFSGLFRCPICGRKMSSFYSIDRKTKKHRQYQRCWFGGNEKLHKTKLVSEAKTEKYLLENLDAALKNLEFDVKKEAGKPKQNLNKKLNDAIGERERLNYLFEKGRIDIPEYEKKYSVLSEKINSITEELSNNKVVRIEEFKKQIPEDWKELYEQLDQKGKQEFWHRIIKEIYLNEAFEITGFIFYI

SEQ ID NO: 8991 - protein, 446 aa, Unknown
  Description of Unknown: Integrase B8992 sequence
  PTHR30461:SF3,cd00338,SM00857,IPR036162,PS51736, PF13408,IPR025827,G3DSA:3.40.50.1390,IPR006119,SSF53041, PTHR30461,mobidb-lite,Coil,PF00239
MNIAIYPRKSKKDDNSESMEQQIDDCKKYIDKTYPNANIIVYSGDYAITGHSTAKRKDFQRMMDDVRAGRINAVVIMRYDRIARNMRDFCNLYHDMESAGCNLISVSQQIDTSTPYGKNFMYQMANMAELEWAVISERYKDTAAYKIREGKAYTGRVPIGFKIEKIDGVKKVVHDNEEQTRAIFDYLLATKSKRGTVLWVRENLIPDFTRHKLDSMIKSDLYIGKVRENDHFCEPYFTKDQMEEIRSINQIKYAPSGHIYLFSGLFRCPICGRKMASFYSIDRKTKKHRQYQRCWFGGNEKLHKTKLVSETKTEKYLLENLDAALKNLEFDVKKEAGKPKQNLNKKLNDAIGERERLNYLFEKGRIDIPEYEKKYSVLSEKINSITEELSNNKVVRIEEFKKQIPEDWKVLYEQLDPKGKQEFWHRIIKEIYLNEAFEITGFIFYI

SEQ ID NO: 8992 - protein, 446 aa, Unknown
  Description of Unknown: Integrase B8993 sequence
  PTHR30461:SF3,SM00857,IPR006118,G3DSA:1.10.10.2600, IPR036162,PF13408,IPR025827,G3DSA:3.40.50.1390, PS51737,IPR006119,IPR038109,IPR011109, SSF53041,PTHR30461,PS00397,PS51736,cd00338,PF00239
MCQKIVVTLPNNLRIRVALYIRVSTEEQAKHGLSLADQREALIAYAAAHDMEVVGIYEDAGISARKPYKKRPALMRLLDDCRAGKIDTILFVKLDRWFRNVAGYYAVQEVLDKNHVDWQAIREDYETRTASGRLKVNIMLSVAQDEADRTSERIKAINEGKRAKGQPTNGKTPIGICVKNRRYDIDEETADAARDMFPAFIRLQSILALRRYMATEWGIKRSYNKYKDALRSRLYLGEAFGVENALPALVDRETFDLAGKILERRSQRNASADRIYLFTGILRCRECGRNMQPETVKQVYKYYRCRTHTLDPADCPHILRIREDVLEDYLLREFEGIAKKYYSKSKTAEKKPPKTAEQIKRKMQKLKDLYLSDLIEIEEYKKDYTELKQQLAAINPEPIKEFDLETLRRELKEYPDLDRQAKKEFWVRTIQRIDADNDGAFFVTPS

SEQ ID NO: 8993 - protein, 446 aa, Unknown
  Description of Unknown: Integrase B8994 sequence
  PTHR30461:SF3,SM00857,IPR006118,G3DSA:1.10.10.2600,IPR036162, PF13408,IPR025827,G3DSA:3.40.50.1390,PS51737,IPR006119, IPR038109,SSF53041,IPR011109,PTHR30461,PS00397, PS51736,cd00338,PF00239
MCQKIVVTLPNNLRIRVALYIRVSTEEQAKHGLSLADQREALIAYAAAHGMEVVGIYEDAGISARKPYKKRPALMRLLDDCRAGKIDTILFVKLDRWFRNVAGYYAVQEVLDKNHVDWQAIREDYETRTASGRLKVNIMLSVAQDEADRTSERIKAINEGKRAKGQPTNGKTPIGICVKNRRYDIDEETAAAARDMFPAFIRLQSILALRRYMATEWGIKRSYNKYKDALRSRLYLGEAFGVENALPALVDRETFDLAGKILERRSQRNASADRIYLFTGILRCRECGRNMQPETVKQVYKYYRCRTHTLDPADCPHILRIREDVLEDYLLREFEGIAKKYYSKSKTAEKKPPKTAEQIKRKMQKLKELYLSDLIEIEEYKKDYTDLKQQLAAINPEPIKEFDLETLRRELKEYPDLDRQAKKEFWVRTIQRIDADNDGAFFVTPS

SEQ ID NO: 8994 - protein, 446 aa, Unknown
  Description of Unknown: Integrase B8995 sequence
  PTHR30461:SF3,cd00338,SM00857,PS51736,PF13408, IPR025827,IPR036162,G3DSA:3.40.50.1390,IPR006119,SSF53041, PTHR30461,mobidb-lite,Coil,PF00239
MNIAIYPRKSKKDDNSESMEQQIDDCKKYINKTYPNANIIVYSGDYAITGHSTAKRKDFQRMMDDVRAGRINAVVIMRYDRIARNMRDFCNLYHDMESAGCNLISVSQQIDTSTPYGKNFMYQMANMAELEWAVISERYKDTAAYKIREGKAYTGRVPIGFKIEKIDGIKKVVHDNEEQTRAIFDYLLATKSKRGTVLWVRENLIPDFTRHKLDSMIKSDLYIGKVRENENFCEPYFTKEQMEEIRSVNQIKYAPSGHIYLFSGLFRCPICGRKMASFYSIDRKTKKHRQYQRCWFGGNEKLHKTKLVSEAKTEKYLLENLDAALKNLEFDVKKEAGKPKRNLNKKLNDAIGERDRLNYLFEKGRINIPEYEKKYSVLSEKINSITEELSNNKVVRIEEFKKQIPEDWKELYEQLDQKGKQEFWHRIIKEIYLNEAFEITGFIFYI

SEQ ID NO: 8995 - protein, 446 aa, Unknown
  Description of Unknown: Integrase B8996 sequence
  PTHR30461:SF3,IPR036162,PS51737,IPR011109, PTHR30461,PS00397,PF00239,G3DSA:1.10.10.2600, IPR006119,SSF53041,cd00338,SM00857,IPR025827,IPR038109 ,PS51736,IPR006118,PF13408,G3DSA:3.40.50.1390,Coil
MCQKIVVTLPNNLRIRVALYIRVSTEEQAKHGLSLADQREALIAYAAAHGMEVVGIYEDAGISARKPYKKRPALMRLLDDCSAGKIDTILFVKLDRWFRNVAGYYAVQEVLDKNHVDWQAIREDYETRTASGRLKVNIMLSVAQDEADRTSERIKAINEGKRTKGQPTNGKTPIGICVKNRRYAIDEETADAARDMFPAFIRLQSILALRRYMATEWGIKRSYNKYKDALSNRLYLGEAFGVENALPALVDQETFDLAGKILERRSQRNASADRIYLFTGILRCRECGRNMQPETVKKVYKYYRCRTHTLDPADCPHILRIREDVLENYLLREFEGIAKKYYSKSKTAEKKPPKTAEQIKRKMQKLKDLYLSDLIEIEEYKKDYTELKQQLAAINTEPIKEFDLETLRRELKEYPDLDRQAKKEFWVRTIQRIDADNDGAFFVTPS

SEQ ID NO: 8996 - protein, 445 aa, Unknown
  Description of Unknown: Integrase B8997 sequence
  SM00857,IPR006118,G3DSA:1.10.10.2600,IPR036162,PS51737, G3DSA:3.40.50.1390,Coil,IPR006119,IPR038109,SSF53041, IPR011109,PTHR30461,PS00397,PS51736,cd00338, PF00239
MKRAALYVRVSTQEQKNSGLSVDSQIDALEKYCEEQGYTVAGIYNDAGISARKKYTKRPALLRLLEDCKKHEIDIILFTRLDRWFRAVAGYYEVQNVLDACKVPWRAIWEDYETETSQGIFKVNIMLSVAQAEADRDSEKIRSVMEFKRQNKEYIGGKVPVGYRVEGKTIVKDEKTRGIIEDMFEHYFQTFSKMGTADYILNKYPDFIRTRTRIVKIMSSPAYHGEMYGVKNYCEPYITEEQAQKINEVSSQKTWTDCKRRIYIFSGLMKCPICGCRLSGCAIGKKGKKYKVYHCPHSVAQKHKTYTRSEKKLETYMLNHIEEKIQLDVLRAEGRVKAGGNDVEKRKKKLSSELGRINKMFEKGRITEEYYDERYEAISKELKELSQTAATEELETKKKIQSRFPDGWKDMYMQLGEQDKQVFWKSIVKEIKISPDTYVEDIIFF

SEQ ID NO: 8997 - protein, 445 aa, Unknown
  Description of Unknown: Integrase B8998 sequence
  SM00857,IPR006118,G3DSA:1.10.10.2600,IPR036162,PF13408, IPR025827,G3DSA:3.40.50.1390,PS51737,Coil,IPR006119, IPR038109,IPR011109,SSF53041,PTHR30461,PS00397, PS51736,cd00338,PF00239
MKRAALYVRVSTQEQKNSGLSVDSQIDALEKYCEKQGYTVAGIYNDAGISARKKYTKRPALLQLLEDCRKHEIDIILFTRLDRWFRAVAGYYEVQSVLDACKVPWRAIWEDYETETSQGIFKVNIMLSVAQAEADRDSEKIRSVMEFKRQNKEYIGGKVPVGYRVEGKKIVKDENMREIIEDMFEHYFQTFSKWGTADYILSKYPDFIRTRNRIVKIMSSPAYHGEMYGVKNYCEPYITEEQAQRIKEVSSQKSWVDCKRRIYIFSGLIRCPICGYKFSGCTMVKKEKRYKVYRCPRSAAKKHKTYTRSEPKLETYMLNHIEEKIQSDVLRAEGRVKAAGNDIGKRKKKLSSELGRINKMFEKGRITEEYYDERYEAISKELKELSQTAATEELETKKKIQSKFPDGWKCMYMQLDEQGKQVFWKSIVKEIKISPNEFVEDIIFF

SEQ ID NO: 8998 - protein, 445 aa, Unknown
  Description of Unknown: Integrase B8999 sequence
  SM00857,IPR006118,G3DSA:1.10.10.2600,IPR036162,PF13408, IPR025827,PS51737,G3DSA:3.40.50.1390,Coil,IPR006119, IPR038109,SSF53041,IPR011109,PTHR30461,PS00397, PS51736,cd00338,PF00239
MKRAALYVRVSTQEQKNSGLSVDSQIDALEKYCKEQGYTVVGIYNDAGISARKKYTKRPALLQLLEDCKKHEIDIILFTRLDRWFRAVAGYYEVQNVLDACKVPWRAIWEDYETETSQGIFKVNIMLSVAQAEADRDSEKIRSVMEFKRQNKEYIGGKVPVGYRVEGKKIVKDEKMRGIIEDMFEHYFQTFSKMETADYILSKYPDFIRTRTRIVKIMSSPAYHGEMYGVKNYCEPYITEEQAQRIKEVSSQKSWVDCKRRIYIFSGLIRCPICGYRFSGRTMAKKEKRYKVYQCPRSAAKKHKTYTRSEPKLETYMLNHIEEKIQLDVLRVEGRVKAAGSDVGKRKKKLSSELGRINKMFEKGRITEEYYDERYEAISKELKELSQTAATEELETKKKIQSRFPDGWKDMYMQLDEQGKQVFWKSIVKEIKISPNEFVEDIIFF

SEQ ID NO: 8999 - protein, 445 aa, Unknown
  Description of Unknown: Integrase B9000 sequence
  SM00857,IPR006118,G3DSA:1.10.10.2600,IPR036162,PS51737, G3DSA:3.40.50.1390,Coil,IPR006119,IPR038109,SSF53041, IPR011109,PTHR30461,PS00397,PS51736,cd00338, PF00239
MKRAALYVRVSTQEQKNSGLSVDSQIDALEKYCEEQGYTVAGIYNDAGISARKKYTKRPALLQLLEDCKKHEIDIILFTRLDRWFRAVAGYYEVQSVLDACKVPWRAIWEDYETETSQGIFKVNIMLSVAQAEVDRDSEKIRSVMEFKRNNKEYIGGKVPVGYRVEGKKIVKDEKTRGIIEDMFEHYFQTFSKAGTADYILSKYPDFVRTRTRLVKIMSSPAYRGEMYGVKNYCEPYITEEQAQKINEVSSQKTWTDCKRRIYIFSGLMKCPLCGCRLSGCAIGKKGKKYKVYHCPHSVAQKHKTYTRSEKKLETYMLDHIEEKIQLDVLRAEGRVKATGNDAEKRKKKLSSELGRINKMFEKGRITEEYYDERYEAISKELKELSQTAATEELETKKKIQSRFPDGWKDMYMQLDEQGKQVFWKSIVKEIKISPNEFVEDIIFF

SEQ ID NO: 9000 - protein, 445 aa, Unknown
  Description of Unknown: Integrase B9001 sequence
  PTHR30461:SF3,IPR036162,PS51737,IPR011109,PTHR30461, PS00397,PF00239,G3DSA:1.10.10.2600,IPR006119,SSF53041, cd00338,SM00857,IPR025827,IPR038109,PS51736, IPR006118,PF13408,G3DSA:3.40.50.1390,Coil
MNVIRGVGYIRVSTAEQATRGLSLDAQEAEIRAYAKAHGIELFNIYVDAGITARKRLDRREAFGQMMKDVDSGLIDEIIVMRLDRWFRNIYDYHKMMNEHLIPHGVNWSAVKEDYDTKTTNGRLMINLRLAIAEQECDTDGDRIRDIHDNQIANGIWIGGCAPPGYRIENKRLSIDPDMQPAVSYFFERLLSCGSVRRAMLDMNERHNLHFEYGQAIRMARSTTYCGVRRENYNYCPTYISQDEHAQIMAALEHNVRVRSADNARIHIFSGLLVCACCGRRLAANTVRKKSVTWTAYRCHRAFGDHVCDNRHLVDERKVEAWLLDYLENGLSDYIVSASVADAQPVVVDNTAAIRERQERVKELFINGFIDLQEYKRRAAELEAKIQVPEKQPPRSMEKLKSLLERGVRAIYNDLSRGERQEFWRSIIREIPVNNGAVSGDPIFL

SEQ ID NO: 9001 - protein, 445 aa, Unknown
  Description of Unknown: Integrase B9002 sequence
  SM00857,IPR006118,G3DSA:1.10.10.2600,IPR036162,PF13408, IPR025827,G3DSA:3.40.50.1390,PS51737,Coil,IPR006119, IPR038109,IPR011109,SSF53041,PTHR30461,PS00397, PS51736,cd00338,PF00239
MKRAALYVRVSTQEQKNSGLSVDSQIDALEKYCEEQGYTVAGIYNDAGISARKKYTKRPALLQLLEDCKKHEIDIILFTRLDRWFRAVAGYYEVQSVLDACKVPWRAIWEDYETETSQGIFKVNIMLSVAQAEADRDSEKIRSVMEFKRQNKEYIGGKVPVGYRVEGKKIVKDEKMRGIIEDMFEHYFQTFSKMETADYILSKYPDFIRTRTRIVKIMSSPAYHGEMYGVKNYCEPYITEEQAQRIKEVSSQKSWVDCKRRIYIFSGLIRCPICGYRFSGRTMAKKEKRYKVYQCPRSAAKKHKTYTRSEPKLETYMLNHIEEKIQLDVLRVEGRAKAAGSDVGKRKKKLSSELGRINKMFEKGRITEEYYDERYEAISKELKELSQTAATEELETKKKIQSRFPDGWKDMYMQLDEQGKQVFWKSIVKEIKISPNEFVEDIIFF

SEQ ID NO: 9002 - protein, 445 aa, Unknown
  Description of Unknown: Integrase B9003 sequence
  SM00857,IPR006118,G3DSA:1.10.10.2600,IPR036162,PS51737, G3DSA:3.40.50.1390,Coil,IPR006119,IPR038109,IPR011109, SSF53041,PTHR30461,PS00397,PS51736,cd00338, PF00239
MKRAALYVRVSTQEQKNSGLSVDSQIDALEKYCEEHGYMVAGVYNDAGISARKKYTKRPALLQLLEDCRKHEIDIILFTRLDRWFRAVAGYYEVQNVLDACKVPWRAIWEDYETETSQGIFKVNIMLSVAQAEADRDSEKIRSVMEFKRNNKEYIGGKVPVGYRIEGKKIVKDEKTRGIIEDMFEHYFQTFSKAGTADYILSKYPGFVRTRTRLVKIMSSPAYRGEMYGVKNYCEPYITEEQAQKISEVSSQKTWTDCKRRIYIFSGLMKCPLCGCRLSGCAIGKKGKKYKVYHCPHSVAQKHKTYTRSEKKLETYMLDHIEEKIQLDVLRAEGRVKATGNDAEKRKKKLSSELGRINKMFEKGRITEEYYDERYEAISKELKELSQTAATEELETKKKIQSRFPDGWKDMYMQLGEQDKQVFWKSIVKEIKISPDTYVEDIIFF

SEQ ID NO: 9003 - protein, 445 aa, Unknown
  Description of Unknown: Integrase B9004 sequence
  SM00857,IPR006118,G3DSA:1.10.10.2600,IPR036162,PS51737, G3DSA:3.40.50.1390,Coil,IPR006119,IPR038109,SSF53041, IPR011109,PTHR30461,PS00397,PS51736,cd00338, PF00239
MKRAALYVRVSTQEQKNSGLSVDSQIDALEKYCEEQGYTVAGIYNDAGISARKKYTKRPALLQLLEDCKKHEIDIILFTRLDRWFRAVAGYYEVQSVLDACKVPWRAIWEDYETETSQGIFKVNIMLSVAQAEADRDSEKIRSVMEFKRNNKEYIGGKVPVGYRIEGKKIVKDEKTRGIIEDMFEHYFQTFSKAGTADYILSKYPGFVRTRTRLVKIMSSPAYRGEMYGVKNYCEPYITEEQAQKINEVSSQKTWTDCRRRIYIFSGLMKCPICGCRLSGCAIGKKGKKYKVYHCPHSVAQKHKTYTRSEKKLETYMLNHIEEKIQLDVLRAEGRVKAGGNDAEKRKKKLSSELGRINKMFEKGRITEEYYDERYEAISKELKELSQTAATEELETKKKIQSRFPDGWKDMYIQLGEQDKQVFWKSIVKEIKISPDTYVEDIIFF

SEQ ID NO: 9004 - protein, 445 aa, Unknown
  Description of Unknown: Integrase B9005 sequence
  SM00857,IPR006118,G3DSA:1.10.10.2600,IPR036162,PF13408, IPR025827,PS51737,G3DSA:3.40.50.1390,IPR006119,IPR038109, IPR011109,SSF53041,PTHR30461,PS00397,PS51736, cd00338,PF00239
MFAVRGKGAGVMTRAALYIRVSTEEQAKHGLSMDEQESNLRDYAKAHGMKVVDCYLDAGKSARKRYTKRPEFMRLLADIESDKIDMVLFIKLDRWFRNISDYYEVQRVLDAHNVTWRATQEDYETVTASGRFKVNIMLSVAQDEADRTSERIKFVFEGKKERNEPITGKVPRGYKLDGKSVVIDPVTGPMVRSAFDMYLETGSISKVIKAYPQLELTYFSARYMFSNPAYMGQFAGISIPAIISQDEYKKADSLRGRIVRKTTQNRVYLFSGLLICPECGNRLGGFSASRVYKETHYYGCSSHRKMTGCPNNKSYNEEKIEEYMLDRIEAKVQTSIISRNEQRAVSHKSQRDAIQRKLSKLSELYISDLISLQDYKKQFRALNDELAAIPEDIPDIDIEALKSRFWGDWRQLYDDLPRDGKQSFWRKTVKKIYLSSDSVADFDLI

SEQ ID NO: 9005 - protein, 445 aa, Unknown
  Description of Unknown: Integrase B9006 sequence
  PTHR30461:SF3,cd00338,SM00857,G3DSA:1.10.10.2600,IPR036162, PF13408,PS51737,G3DSA:3.40.50.1390,IPR025827,IPR006119, IPR038109,IPR011109,SSF53041,PTHR30461,PS51736, Coil,PF00239
MKRVALYMRVSTEEQALHGYSLPAQKDALHQYAKDHNMTVVGEYVDEGISGRKSASKRPALARMLRDVEAGKIDQILFIKLDRWFRSVKEYYRVQEVLDRNNVTWRTILEDYNTESADGILKVNIMLSVAQNEAERTGERIKFVLDNKAQKKQVVGKQPYGYKIAIVEGEKKSVIDEETAPVVHDIFNTFDRTNSASLTTKYINEKHGTDFSAVFIRRLLHRSAYAGEYMGISGYRPQYISRERFDKNQEIFRGSHIKRTPTGRVYIFTGILFCAHCGHRMKGKYTTVKYYCCPRATDDYSCENHKHISELKIEKYLVSHIRRLMSEYIVAAETKESATKRSDAASEVMSLRQKIERLNDIYLEGNMDKETYRRRTEQLKQNLAQAEEQYQRSQPKNISHLKEILNTDFLADYDLLTDENKRSLWRRIITRIEMNDQQNLKVFFS

SEQ ID NO: 9006 - protein, 445 aa, Unknown
  Description of Unknown: Integrase B9007 sequence
  SM00857,IPR006118,G3DSA:1.10.10.2600,IPR036162,PS51737, G3DSA:3.40.50.1390,Coil,IPR006119,IPR038109,IPR011109, SSF53041,PTHR30461,PS00397,PS51736,cd00338, PF00239
MKRAALYVRVSTQEQKNSGLSVDSQIDALEKYCEEQGYTVAGIYNDAGISARKKYTKRPALLQLLEDCRQHKIDIILFTRLDRWFRAVAGYYEVQSVLDACKVPWRAIWEDYETETSQGIFKVNIMLSVAQAEADRDSEKIRSVMEFKRNNKEYIGGKVPVGYRIEEKKIVKDEKTRGIIEDMFEHYFQTFSKAGTADYILSKYPDFARTRTRLVKIMSSPAYRGEMYGVKNYCEPYITEEQAQKINEVSSQKTWTDCKRRIYIFSGLMKCPLCGCRLSGCAIGKKEKKYKVYHCPHSVAQKHKTYTRSEKKLETYMLNHIEEKIQLDVLRAECRVKAGGNDAEKRKKKLSSELGRINKMFEKGRITEEYYDERYEAISKELKELSQTAATEELETKKKIQSRFPEGWKDMYMQLDEQGKQVFWKSIVKEIKISPNEFVEDIIFF

SEQ ID NO: 9007 - protein, 445 aa, Unknown
  Description of Unknown: Integrase B9008 sequence
  SM00857,IPR006118,G3DSA:1.10.10.2600,IPR036162,PS51737, G3DSA:3.40.50.1390,Coil,IPR006119,IPR038109,IPR011109, SSF53041,PTHR30461,PS00397,PS51736,cd00338, PF00239
MKRAALYVRVSTQEQKNSGLSVDSQIDALEKYCEEQGYTVAGIYNDAGISARKKYTKRPALLQLLEDCKKHEIDIILFTRLDRWFRAVAGYYEVQSVLDACKVPWRAIWEDYETETSQGIFKVNIMLSVAQAEADRDSEKIRSVMEFKRNNKEYIGGKVPVGYRIEGKKIVKDEKTRGIIEDMFDHYFQTFSKAGTADYILSKYPDFVRTRTRLVKIMSSPAYRGEMYGVKNYCEPYITEEQAQKINEVSSQKTWTDCRRRIYIFSGLMKCPLCGCRLSGCAIGKKGKKYKVYHCPHSVAQKHKTYTRSEKKLETYMLDHIEEKIQLDVLRAEGRVKAGGNDAEKRKKKLSSELGRINKMFEKGRITEEYYDERYEAISKELKELSQTAATEELETKKKIQSRFPDGWKDMYMQLGEQDKQVFWKSIVKEIKISPDTYVEDIIFF

SEQ ID NO: 9008 - protein, 445 aa, Unknown
  Description of Unknown: Integrase B9009 sequence
  SM00857,IPR006118,G3DSA:1.10.10.2600,IPR036162,PS51737, G3DSA:3.40.50.1390,Coil,IPR006119,IPR038109,IPR011109, SSF53041,PTHR30461,PS00397,PS51736,cd00338, PF00239
MKRAALYVRVSTQEQKNSGLSVDSQIDALEKYCDEQGYTVAGIYNDAGISARKKYTKRPALLQLLEDCKKHEIDIILFTRLDRWFRAVAGYYEVQNVLDACKVPWRAIWEDYETETSQGIFKVNIMLSVAQAEADRDSEKIRSVMEFKRNNKEYIGGKVPVGYRIEGKKIVKDEKTRGIIEDMFEHYFQTFSKAGTADYILSKYPDFVRTRTRLVKIMSSPAYRGEMYGVKNYCEPYITEEQAQKINEVSSQKTWTDCRRRIYVFSGLMKCPICGCRLSGCAIGKKEKKYKVYHCPHSVAQKHKTYTRSEKKLETYMLNHIEEKIQLDVLRAECRVKAGGNDAEKRKKKLSSELGRINKMFEKGRITEEYYDERYEAISKELKELSQTAATEELETKKKIQSRFPEGWKDMYMQLDEQGKQVFWKSIVKEIKISPNEFVEDIIFF

SEQ ID NO: 9009 - protein, 445 aa, Unknown
  Description of Unknown: Integrase B9010 sequence
  SM00857,IPR006118,G3DSA:1.10.10.2600,IPR036162,PF13408, PS51737,G3DSA:3.40.50.1390,IPR025827,Coil,IPR006119, IPR038109,IPR011109,SSF53041,PTHR30461,PS00397, PS51736,cd00338,PF00239
MKRAALYVRVSTQEQKNSGLSVDSQIDALERYCEEQGYTVAGVYNDAGISARKKYTKRPALLQLLEDCKKHEIDIILFTRLDRWFRAVAGYYEVQSVLDACKVPWRAIWEDYETETSQGIFKVNIMLSVAQAEADRDSEKIRSVMEFKRQNKEYIGGKVPVGYRVEGKKIVKDEKMREVIEDMFEHYFQTFSKMETADYILNKYPDFIRTRTRIVKIMSSPAYHGEMYGVKNYCEPYITEEQAQRIKEVSSQKSWVDCKRRIYIFSGLIRCPICGYRFSGRTMVKKEKRYKVYQCPRSAAKKHKTYTRSEPKLEKYMLDHIEEKIQLDILRAEGRVKAAGNDVGNRKKKLSSELGRLNKMFEKGRITEEYYDERYEAISKELKELSQTAATEELETKKKIQSRFPDGWKDMYMQLDEQGKQVFWKSIVKEIKISPDTYVEDIIFF

SEQ ID NO: 9010 - protein, 445 aa, Unknown
  Description of Unknown: Integrase B9011 sequence
  PTHR30461:SF3,SM00857,IPR006118,G3DSA:1.10.10.2600,IPR036162, PF13408,IPR025827,G3DSA:3.40.50.1390,PS51737,IPR006119, IPR038109,SSF53041,IPR011109,PTHR30461,PS00397, PS51736,cd00338,PF00239
MFAVRGKGAEVMTRAALYIRVSTEEQAKHGLSMDEQESNLRDYAKAHGMKVVDCYLDAGKSARKRYTKRPEFMRLLADIESDKIDMVLFIKLDRWFRNISDYYEVQRVLDAHNVTWRATQEDYETVTASGRFKVNIMLSVAQDEADRTSERIKFVFEGKKERNEPITGKVPRGYKLDGKSVVIDPVTGPMVRAAFDMYLETGSVSKVIKAYPQLELTYFSARYMFSNPAYMGQFAGISIPAIISPDEYKKAGSLRGRIVRKTTQNRVYLFSGLLICPECGNRLGGFSASRVYKETHYYGCSSHRKMTGCPNNKSYNEEKIEEYMLDRIEAKVQTSIISRNEQRAVSHKFQRDAIQRKLSKLSELYISDLISIQDYKKQFRALNDELAAIPEDIPDIDIEALKSRFWGDWRQLYDDLPRDGKQSFWRKTVKKIYLSSDSVADFDLI

SEQ ID NO: 9011 - protein, 445 aa, Unknown
  Description of Unknown: Integrase B9012 sequence
  PTHR30461:SF3,IPR036162,PS51737,IPR011109,PTHR30461, PS00397,PF00239,G3DSA:1.10.10.2600,IPR006119,SSF53041, cd00338,SM00857,IPR025827,IPR038109,PS51736, IPR006118,PF13408,G3DSA:3.40.50.1390,Coil
MRAALYIRVSTEEQARHGLSLEDQKNNLTQFSKSHGMKIAGIYEDAGISARKPYKKRPALLRLLEDCKAGKIDLILFIKLDRWFRNVGNYYAVQEILDQYNVSWQATQEDYETTTASGRLKVNIMLSVAQDEADRTSERIKFVFEGKRARLEPLTGNIPFGYKIEGKAFKKDESKEALVNDFFKKYLASGSISKTSEFIREKYGISMRYHLIDKMLRSTTYYGKYYNMDGMCPAYITKEDHEKIQAMRRKVVRKAKNNRTYLFSGLVVCPECGNRMGARINTKQTYVFYNCNGHYTKQNGCQNRVNLGERKIEEYLLATVDNKFHEYKANFSALKNAEINKRARAEISAAKSKLNKLKDLYLNDIITLEELKADRESLLAKISDLEKAALPEQKQDFESIDRVLIENWKESYDGLNREEKREFWRIIIKEIKIYPDRHIEYSLNV

SEQ ID NO: 9012 - protein, 445 aa, Unknown
  Description of Unknown: Integrase B9013 sequence
  SM00857,IPR006118,G3DSA:1.10.10.2600,IPR036162,PS51737, G3DSA:3.40.50.1390,PS00397,IPR006119,IPR038109,IPR011109, SSF53041,PTHR30461,Coil,PS51736,cd00338, PF00239
MKRAALYVRVSTQEQKNSGLSVDSQIDALEKYCEEQGYTVAGIYNDAGISARKKYTKRPALLRLLEDCKKHEIDIILFTRLDRWFRAVAGYYEVQNVLDACKVPWRAIWEDYETETSQGIFKVNIMLSVAQAEADRDSEKIRSVMEFKRNNKEYIGGKVPVGYRIEGKKIVKDEKTRGIIEDMFEHYFQTFSKAGTADYILSKYPDFVRTRTRLVKIMSSPAYRGEMYGVKNYCEPYITEEQAQKINEVSSQKTWTDCRRRIYIFSGLMKCPLCGCRLSGCAIGKKGKKYKVYHCPHSVAQKHKTYTRSEKKLETYMLDHIEEKIQLDVLRAEGRVKAAGNDVGKRKKKLSSELGRINKMFEKGRITEEYYDERYEAISKELKELSQTAATEELETKKKIQSRFPDGWKDMYMQLGEQDKQVFWKSIVKEIKISPDTYVEDIIFF

SEQ ID NO: 9013 - protein, 445 aa, Unknown
  Description of Unknown: Integrase B9014 sequence
  SM00857,IPR006118,G3DSA:1.10.10.2600,IPR036162,PF13408, IPR025827,G3DSA:3.40.50.1390,PS51737,Coil,IPR006119, IPR038109,SSF53041,IPR011109,PTHR30461,PS00397, PS51736,cd00338,PF00239
MKRAALYVRVSTQEQKNSGLSVDSQIDALEKYCEEQGYTVAGVYNDAGISARKKYTKRPALLQLLEDCKRHEIDIILFTRLDRWFRAVAGYYEVQNVLDACKVPWRAIWEDYETETSQGVFKVNIMLSVAQAEADRDSEKIRSVMEFKRQNKEYIGGKVPVGYRVEGKKIVKDEKMRGIIEDMFEHYFQTFSKWGTADYILSKYPDFIRTRTRIVKIMSSPAYHGEMYGVKNYCEPYITEEQAQRIKEVSSQKSWVDCKRRIYIFSGLIRCPICGYRFSGRTMAKKEKRYKVYQCPRSAAKKHKTYTRSEPKLETYMLNHIEEKIQLDILRAEGRVKAAGNDVEKRKKKLSSELGRINKMFEKGRITEEYYDERYEAISKELKELSQTAATEELETKKKIQSRFPDGWKDMYMQLDEQGKQVFWKSIVKEIKISPDTYVEDIIFF

SEQ ID NO: 9014 - protein, 445 aa, Unknown
  Description of Unknown: Integrase B9015 sequence
  SM00857,IPR006118,G3DSA:1.10.10.2600,IPR036162,PS51737, G3DSA:3.40.50.1390,Coil,IPR006119,IPR038109,SSF53041, IPR011109,PTHR30461,PS00397,PS51736,cd00338, PF00239
MKRAALYVRVSTQEQKNSGLSVDSQIDALEKYCEEQGYTVAGIYNDAGISARKKYTKRPALLQLLDDCRQCKIDIILFTRLDRWFRAVAGYYEVQNVLDACKVPWRAIWEDYETETSQGIFKVNIMLSVAQAEADRDSEKIRSVMEFKRNNKEYIGGKVPVGYRIEGKKIVKDEKTRGIIEDMFEHYFQTFSKAGTADYILSKYPGFVRTRTRLVKIMSSPAYRGEMYGVKNYCEPYITEEQAQKISEVSSQKTWTDCKRRIYIFSGLMKCPLCGCRLSGCAIGKKEKKYKVYHCPHSVAQKHKTYTRSEKKLETYMLNHIEEKIQLDVLRAECRVKAGGNDAEKRKKKLSSELGRINKMFEKGRITEEYYDERYEAISKELKELSQTAATEELETKKKIQSRFPEGWKDMYMQLDEQGKQVFWKSIVKEIKISPNEFVEDIIFF

SEQ ID NO: 9015 - protein, 445 aa, Unknown
  Description of Unknown: Integrase B9016 sequence
  SM00857,IPR006118,G3DSA:1.10.10.2600,IPR036162,PS51737, G3DSA:3.40.50.1390,Coil,IPR006119,IPR038109,IPR011109, SSF53041,PTHR30461,PS00397,PS51736,cd00338, PF00239
MKRAALYVRVSTQEQKNSGLSVDSQIDALKKYCEEQGYTVAGIYNDAGISARKKYTKRPALLKLLEDCKKHEIDIILFTRLDRWFRAVAGYYEVQNVLDACKVPWRAIWEDYETETSQGIFKVNIMLSVAQAEADRDSEKIRSVMEFKRNNKEYIGGKVPVGYRIEGKKIVKDEKTRGIIEDMFEHYFQTFSKAGTADYILSKYPDFVRTRTRLVKIMSSPAYRGEMYGVKNYCEPYITEEQAQKISEVSSQKTWTDCKRRIYIFSGLMKCPLCGCRLSGCAIGKKGKKYKVYHCPHSVAQKHKTYTRSEKKLETYMLDHIEEKIQLDVLKAEGRVKASGNDAEKRKKKLSSELGRINKMFEKGRITEEYYDERYEAISKELKELSQTAATEELEAKKKIQSRFPDGWKDMYMQLDEQGKQVFWKSIVKEIKISPNEFVEDIIFF

SEQ ID NO: 9016 - protein, 445 aa, Unknown
  Description of Unknown: Integrase B9017 sequence
  SM00857,IPR006118,G3DSA:1.10.10.2600,IPR036162,PF13408, IPR025827,G3DSA:3.40.50.1390,PS51737,PS00397,IPR006119, IPR038109,IPR011109,SSF53041,PTHR30461,Coil, PS51736,cd00338,PF00239
MKRAALYVRVSTQEQKNSGLSVDSQIDALKKYCEEQGYTIAGIYNDAGISARKKYTKRPALLQLLEDCKKHEIDIILFTRLDRWFRAVAGYYEVQSVLDACKVPWRAIWEDYETETSQGIFKVNIMLSVAQAEADRDSEKIRSVMEFKRNNKEYIGGKVPVGYRVEGKKIVKDEKMRGIIEDMFEHYFQTFSKMETADYILSKYPDFIRTRTRIVKIMSSPAYHGEMYGVKNYCEPYITEEQAQRIKEVSSQKSWVDCKRRIYIFSGLIRCPICGYRFSGRTMAKKEKRYKVYQCPRSAAKKHKTYTRSEPKLEKYMLDHIEEKIQLDVLRVEGRVKAAGNDVGKRKKKLSSELGRINKMFEKGRITEEYYDERYEAISKELKELSQTAATEELETKKKIQSKFPDGWKDMYMQLDEQGKQVFWKSIVKEIKISPDKFVEDIIFF

SEQ ID NO: 9017 - protein, 445 aa, Unknown
  Description of Unknown: Integrase B9018 sequence
  SM00857,IPR006118,G3DSA:1.10.10.2600,IPR036162,PS51737, G3DSA:3.40.50.1390,Coil,IPR006119,IPR038109,SSF53041, IPR011109,PTHR30461,PS00397,PS51736,cd00338, PF00239
MKRAALYVRVSTQEQKNSGLSVDSQIDALEKYCEEQGYVVAGIYNDAGISARKKYTKRPALLQLLEDCRKHEIDIILFTRLDRWFRAVAGYYEVQSVLDACKVPWRAIWEDYETETSQGIFKVNIMLSVAQAEADRDSEKIRSVMEFKRNNKEYIGGKVPVGYRIEGKKIVKDEKTRGIIEDMFEHYFQTFSKAGTADYILSKYPDFVRTRTRLVKIMSSPAYRGEMYGVKNYCEPYITEEQAQKISEVSSQKTWTDCKRRIYIFSGLMKCPLCGCRLSGCAIGKKGKKYKVYHCPHSVAQKHKTYTRSEKKLETYMLDHIEEKIQLDVLRAEGRVKASGNDAEKRKKKLSSELGRINKMFEKGRITEEYYDERYEAISKELKELSQTAATEELETKKKIQSRFPDGWKDMYMQLGEQDKQVFWKSIVKEIKISPDTYVEDIIFF

SEQ ID NO: 9018 - protein, 445 aa, Unknown
  Description of Unknown: Integrase B9019 sequence
  SM00857,IPR006118,G3DSA:1.10.10.2600,IPR036162,PS51737, G3DSA:3.40.50.1390,Coil,IPR006119,IPR038109,SSF53041, IPR011109,PTHR30461,PS00397,PS51736,cd00338, PF00239
MKRAALYVRVSTQEQKNSGLSVDSQIDALEKYCEEQGYTVAGIYNDAGISARKKYTKRPALLQLLEDCKKHEIDIILFTRLDRWFRAVAGYYEVQSVLDACKVPWRAIWEDYETETSQGIFKVNIMLSVAQAEADRDSEKIRSVMEFKRNNKEYIGGKVPVGYRIEGKKIVKDEKTRGIIEDMFEHYFQTFSKAGTADYILSKYPDFVRTRTRLVKIMSSPAYRGEMYGVKNYCEPYITEEQAQKINEVSSQKTWTDCRRRIYIFSGLMKCPICGCRLSGCAIGKKGKKYKVYHCPHSVAQKHKTYTRSEKKLETYMLNHIEEKIQLDVLRAEGRVKAGGNDAEKRKKKLSSELGRINKMFEKGRITEEYYDERYEAISKELKELSQTAATEELETKKKIQSRFPDGWKDMYMQLGEQDKQVFWKSIVKEIKISPDTYVEDIIFF

SEQ ID NO: 9019 - protein, 445 aa, Unknown
  Description of Unknown: Integrase B9020 sequence
  SM00857,IPR006118,G3DSA:1.10.10.2600,IPR036162,PS51737, G3DSA:3.40.50.1390,Coil,IPR006119,IPR038109,IPR011109, SSF53041,PTHR30461,PS00397,PS51736,cd00338, PF00239
MKRAALYVRVSTQEQKNSGLSVDSQIDALEKYCEEQGYTVAGIYNDAGISARKKYTKRPALLQLLEDCRQHKIDIILFTRLDRWFRAVAGYYEVQSVLDACKVPWRAIWEDYETETSQGIFKVNIMLSVAQAEADRDSEKIRSVMEFKRSNKEYIGGKVPVGYRVEGKKIVKDEETRGIIEDMFEHYFQTFSKAGTADYILNKYPDFIRTRTRIVKIMSSPAYHGEMYGVKNYCEPYITEEQAQKINEVSSQKTWTDCRRRIYIFSGLMKCPICGCRLSGCAIGKKGKKYKVYHCPHSVAQKHKTYTRSEKKLETYMLNHIEEKIQLDVLRAEGRVKAGGNDAEKRKKKLSSELGRINKMFEKGRITEKYYDERYEAISKELKELSQTAATEELETKKKIQSRFPDGWKDMYMQLGEQDKQVFWKSIVKEIKISPDTYVEDIIFF

SEQ ID NO: 9020 - protein, 445 aa, Unknown
  Description of Unknown: Integrase B9021 sequence
  SM00857,IPR006118,G3DSA:1.10.10.2600,IPR036162,PF13408, IPR025827,G3DSA:3.40.50.1390,PS51737,Coil,IPR006119, IPR038109,IPR011109,SSF53041,PTHR30461,PS00397, PS51736,cd00338,PF00239
MKRAALYVRVSTQEQKNSGLSVDSQIDALEKYCEEQGYTVAGIYNDAGISARKKYTKRPALLQLLEDCKKHEIDIILFTRLDRWFRAVAGYYEVQSVLDACKVPWRAIWEDYETETSQGIFKVNIMLSVAQAEADRDSEKIRSVMEFKRQNKEYIGGKVPVGYRVEGKTIVKDEKTRAIIEDMFEHYFQTFSKMETADYILSKYPDFIRTRTRIVKIMSSPAYHGEMYGVKNYCEPYITEEQAQRIKEVSSQKSWIDCKRRIYIFSGLIRCPICGYRFSGRTMVKKEKRYKVYQCPRSAAKKHKTYTRSEPKLETYMLNHIEEKIQLDILRAEGRVKAAGNDVEKRKKKLSSELGRINKMFEKGRITEEYYDERYEAISKELKELSQTAATEELETKKKIQSRFPDGWKDMYMQLGEQDKQVFWKSIVKEIKISPDTYVEDIIFF

SEQ ID NO: 9021 - protein, 445 aa, Unknown
  Description of Unknown: Integrase B9022 sequence
  SM00857,IPR006118,G3DSA:1.10.10.2600,IPR036162,PS51737, G3DSA:3.40.50.1390,Coil,IPR006119,IPR038109,SSF53041, IPR011109,PTHR30461,PS00397,PS51736,cd00338, PF00239
MKRAALYVRVSTQEQKNSGLSVDSQIDALEKYCEEQGYVVAGIYNDAGISARKKYTKRPALLQLLEDCRQRKIDIILFTRLDRWFRAVAGYYEVQNVLDACKVPWRAIWEDYETETSQGIFKVNIMLSVAQAEADRDSEKIRSVMEFKRNNKEYIGGKVPVGYRIEGKKIVKDEKTRGIIEDMFEHYFQTFSKAGTADYILSKYPGFVRTRTRLVKIMSSPAYRGEMYGVKNYCEPYITEEQAQKISEVSSQKTWTDCKRRIYIFSGLMKCPLCGCRLSGCAIGKKGKKYKVYHCPHSVAQKHKTYTRSEKKLETYMLDHIEEKIQLDVLRAEGRVKAAGNDVGKRKKKLSSELGRINKMFEKGRITEEYYDERYEAISKELKELSQTAATEELETKKKIQSRFPDGWKDMYMQLGEQDKQVFWKSIVKEIKISPDTYVEDIIFF

SEQ ID NO: 9022 - protein, 445 aa, Unknown
  Description of Unknown: Integrase B9023 sequence
  SM00857,IPR006118,G3DSA:1.10.10.2600,IPR036162,PS51737, G3DSA:3.40.50.1390,Coil,IPR006119,IPR038109,IPR011109, SSF53041,PTHR30461,PS00397,PS51736,cd00338, PF00239
MKRAALYVRVSTQEQKNSGLSVDSQIDALEKYCEEQGYTVAGIYNDAGISARKKYTKRPALLRLLEDCKKHEIDIILFTRLDRWFRAVAGYYEVQNVLDACKVPWRAIWEDYETETSQGIFKVNIMLSVAQAEADRDSEKIRSVMEFKRSNKEYIGGKVPVGYRVEGKKIVKDEETRGIIEDMFEHYFQTFSKAGTADYILNKYPDFIRTRTRIVKIMSSPAYHGEMYGVKNYCEPYITEEQAQKINEVSSQKTWTDCRRRIYIFSGLMKCPICGCRLSGCAIGKKGKKYKVYHCPHSVAQKHKTYTRSEKKLETYMLNHIEEKIQLDVLRAEGRVKAGGNDAEKRKKKLSSELGRINKMFEKGRITEEYYDERYEAISKELKELSQTAATEELETKKKIQSRFPDGWKDMYMQLGEQDKQVFWKSIVKEIKISPDTYVEDIIFF

SEQ ID NO: 9023 - protein, 445 aa, Unknown
  Description of Unknown: Integrase B9024 sequence
  SM00857,IPR006118,G3DSA:1.10.10.2600,IPR036162,PF13408, PS51737,G3DSA:3.40.50.1390,IPR025827,Coil,IPR006119, IPR038109,IPR011109,SSF53041,PTHR30461,PS00397, PS51736,cd00338,PF00239
MKRAALYVRVSTQEQKNSGLSVDSQIDALEKYCEEQEYIVAGIYNDAGISARKKYTKRPALLRLLEDCKKHEIDIILFTRLDRWFRAVAGYYEVQNVLDACKVPWRAIWEDYETETSQGIFKVNIMLSVAQAEADRDSEKIRSVMEFKRQNKEYIGGKVPVGYRVEGKKIVKDEKMRGIIEDMFEHYFQTFSKMETADYILSKYPDFIRTRTRIVKIMSSPAYHGEMYGVKNYCEPYITEEQAQRIKEVSSQKSWVDCKRRIYIFSGLIRCPICGYRFSGRTMAKKEKRYKVYQCPRSAAKKHKTYTRSEPKLETYMLNHIEEKIQLDVLRVEGRVKAAGSDVGKRKKKLSSELGRINKMFEKGRITEEYYDERYEAISKELKELSQTAATEELETKKKIQSRFPDGWKDMYMQLDEQGKQVFWKSIVKEIKISPNEFVEDIIFF

SEQ ID NO: 9024 - protein, 445 aa, Unknown
  Description of Unknown: Integrase B9025 sequence
  SM00857,IPR006118,G3DSA:1.10.10.2600,IPR036162,PF13408, IPR025827,PS51737,G3DSA:3.40.50.1390,IPR006119,IPR038109, SSF53041,IPR011109,PTHR30461,PS00397,PS51736, cd00338,PF00239
MFAVRGKGAGVMTRAALYIRVSTEEQAKHGLSMDEQESNLRDYAKAHGMKVVDCYLDAGKSARKRYTKRPEFMRLLADIESDKIDMVLFIKLDRWFRNISDYYEVQRVLDAHNVTWRATQEDYETVTASGRFKVNIMLSVAQDEADRTSERIKFVFEGKKERNEPITGKVPRGYKLDGKSVVIDPVTGPMVRAAFDMYLETGSISKVIKAYPQLELTYFSARYMFSNPAYMGQFAGISIPAIISQDEYKKADSLRGRIVRKTTQNRVYLFSGLLICPECGNRLGGFSASRVYKETHYYGCSSHRKMTGCPNNKSYNEEKIEEYMLDRIEAKVQTSIISRNEQRAVSHKSQRDAIQRKLSKLSELYISDLISLQDYKKQFRALNDELAAIPEDIPDIDIEALKSRFWGDWRQLYDDLPRDGKQSFWRKTVKKIYLSSDSVADFDLI

SEQ ID NO: 9025 - protein, 445 aa, Unknown
  Description of Unknown: Integrase B9026 sequence
  SM00857,IPR006118,G3DSA:1.10.10.2600,IPR036162,PS51737, G3DSA:3.40.50.1390,Coil,IPR006119,IPR038109,SSF53041, IPR011109,PTHR30461,PS00397,PS51736,cd00338, PF00239
MKRAALYVRVSTQEQKNSGLSVDSQIDALEKYCEEQGYTVAGIYNDAGISARKKYTKRPALLQLLEDCKKHEIDIILFTRLDRWFRAVAGYYEVQNILDACKVPWRAIWEDYETETSQGIFKVNIMLSVAQAEADRDSEKIRSVMEFKRNNKEYIGGKVPVGYRIEGKKIVKDEKTRGIIEDMFEHYFQTFSKAGTADYILSKYPDFVRTRTRLVKIMSSPAYRGEMYGVKNYCEPYITEEQAQKINEVSSQKTWTDCRRRIYIFSGLMKCPLCGCRLSGCAIGKKGKKYKVYHCPHSVAQKHKTYTRSEKKLETYMLNHIEEKIQLDVLRAEGRVKAGGNDAEKRKKKLSSELGRINKMFEKGRITEEYYDERYEAISKELKELSQTAATEELETKKKIQSRFPDGWKDMYMQLGEQDKQVFWKSIVKEIKISPDTYVEDIIFF

SEQ ID NO: 9026 - protein, 445 aa, Unknown
  Description of Unknown: Integrase B9027 sequence
  SM00857,IPR006118,G3DSA:1.10.10.2600,IPR036162,PS51737, G3DSA:3.40.50.1390,Coil,IPR006119,IPR038109,IPR011109, SSF53041,PTHR30461,PS00397,PS51736,cd00338, PF00239
MKRAALYVRVSTQEQKNSGLSVDSQIDALEKYCEEQGYTVAGIYNDAGISARKKYTKRPALLRLLEDCKKHEIDIILFTRLDRWFRAVAGYYEVQNVLDACKVPWRAIWEDYETETSQGIFKVNIMLSVAQAEADRDSEKIRSVMEFKRNNKEYIGGKVPVGYRIEGKKIVKDEKTRGIIEDMFEHYFQTFSKAGTADYILSKYPDFVRTRTRLVKIMSSPAYRGEMYGVKNYCEPYITEEQAQKINEVSSQKTWTDCRRRIYIFSGLMKCPICGCRLSGCAIGKKGKKYKVYHCPHSVAQKHKTYTRSEKKLETYMLNHIEEKIQLDVLRAEGRVKATGNDAEKRKKKLSSELGRINKMFEKGRITEEYYDERYEAISKELKELSQTAATEELETKKKIQSRFPDGWKDMYMQLGEQDKQVFWKSIVKEIKISPDTYVEDIIFF

SEQ ID NO: 9027 - protein, 445 aa, Unknown
  Description of Unknown: Integrase B9028 sequence
  SM00857,IPR006118,G3DSA:1.10.10.2600,IPR036162,PS51737, G3DSA:3.40.50.1390,Coil,IPR006119,IPR038109,SSF53041, IPR011109,PTHR30461,PS00397,PS51736,cd00338, PF00239
MKRAALYVRVSTQEQKNSGLSVDSQIDALEKYCEEQGYTVAGIYNDAGISARKKYTKRPALLQLLEDCKQCKIDIILFTRLDRWFRAVAGYYEVQSVLDACKVPWRAIWEDYETETSQGIFKVNIMLSVAQAEADRDSEKIRSVMEFKRNNKEYIGGKVPVGYRIEGKKIVKDEKTRGIIEDMFEHYFQTFSKAGTADYILSKYPGFVRTRTRLVKIMSSPAYRGEMYGVKNYCEPYITEEQAQKINEVSSQKTWTDCRRRIYIFSGLMKCPLCGCRLSGCAIGKKGKKYKVYHCPHSVAQKHKTYTRSEKKLETYMLNHIEEKIQLDVLRAEGRVKAGGNDAEKRKKKLSSELGRINKMFEKGRITEEYYDERYEAISKELKELSQTAATEELETKKKIQSRFPDGWKDMYMQLGEQDKQVFWKSIVKEIKISPDTYVEDIIFF

SEQ ID NO: 9028 - protein, 445 aa, Unknown
  Description of Unknown: Integrase B9029 sequence
  SM00857,IPR006118,G3DSA:1.10.10.2600,IPR036162,PS51737, G3DSA:3.40.50.1390,Coil,IPR006119,IPR038109,SSF53041, IPR011109,PTHR30461,PS00397,PS51736,cd00338, PF00239
MKRAALYVRVSTQEQKNSGLSVDSQIDALEKYCEEQGYTVAGIYNDAGISARKKYTKRPALLQLLEDCKKHEIDIILFTRLDRWFRAVAGYYEVQSVLDACKVPWRAIWEDYETETSQGIFKVNIMLSVAQAEADRDSEKIRSVMEFKRNNKEYIGGKVPVGYRIEGKKIVKDEKTRGIIEDMFEHYFQTFSKAGTADYILSKYPGFVRTRTRLVKIMSSPAYRGEMYGVKNYCEPYITEEQAQKINEVSSQKTWTDCRRRIYIFSGLMKCPICGCRLSGCAIGKKGKKYKVYHCPHSVAQKHKTYTRSEKKLETYMLNHIEEKIQLDVLRAEGRVKAGGNDAEKRKKKLSSELGRINKMFEKGRITEEYYDERYEAISKELKELSQTAATEELETKKKIQSRFPDGWKDMYMQLGEQDKQVFWKSIVKEIKISPDTYVEDIIFF

SEQ ID NO: 9029 - protein, 445 aa, Unknown
  Description of Unknown: Integrase B9030 sequence
  PTHR30461:SF3,IPR036162,PS51737,IPR011109,PTHR30461, PS00397,PF00239,G3DSA:1.10.10.2600,IPR006119,SSF53041, cd00338,SM00857,IPR025827,IPR038109,PS51736, IPR006118,PF13408,G3DSA:3.40.50.1390,Coil
MNVIRGVGYIRVSTAEQATRGLSLDAQEAEIRTYAKAHGIELFNIYVDAGITARKRLDRREAFGQMMKDVDSGLIDEIIVMRLDRWFRNIYDYHKMMNEHLIPHGVNWSAVKEDYDTKTTNGRLMINLRLAIAEQECDTDGDRIRDIHDNQIANGIWIGGCAPPGYRIENKRLSIDPDMQPAVSYFFERLLSCGSVRRAMLDMNERHNLHFEYGQAIRMARSTTYCGVRRENYNYCPTYISQDEHAQIMAALEHNVRVRSADNARIHIFSGLLVCACCGRRLAANTVRKKSVTWTAYRCHRAFGDHVCDNRHLVDERKVEAWLLDYLENGLSDYIVSASVADAQPVVVDNTAAIRERQERVKELFINGFIDLQEYKRRAAELEAKIQVPEKQPPRSMEKLKSLLERGVRAIYNDLSRGERQEFWRSIIREIPVNNGAVSGDPIFL

SEQ ID NO: 9030 - protein, 445 aa, Unknown
  Description of Unknown: Integrase B9031 sequence
  SM00857,IPR006118,G3DSA:1.10.10.2600,IPR036162,PS51737, G3DSA:3.40.50.1390,Coil,IPR006119,IPR038109,IPR011109, SSF53041,PTHR30461,PS00397,PS51736,cd00338, PF00239
MKRAALYVRVSTQEQKNSGLSVDSQIDALEKYCEEQGYTVAGIYNDAGISARKKYTKRPALLQLLEDCKKHEIDIILFTRLDRWFRAVAGYYEVQNVLDACKVPWRAIWEDYETETSQGIFKVNIMLSVAQAEADRDSEKIRSVMEFKRNNKEYIGGKVPVGYRIEGKKIVKDEKTRGIIEDMFEHYFQTFSKAGTADYILNKYPDFARTRTRLVKIMSSPAYRGEMYGVKNYCEPYITEEQAQKINEVSSQKTWTDCRRRIYIFSGLMKCPICGCRLSGCAIGKKGKKYKVYHCPHSVAQKHKTYTRSEKKLETYMLNHIEEKIQLDVLRAEGRVKAGGNDAEKRKKKLSSELGRINKMFEKGRITEEYYDERYEAISKELKELSQTAATEELETKKKIQSKFPDGWKDMYMQLDEQGKQVFWKSIVKEIKISPNEFVEDIIFF

SEQ ID NO: 9031 - protein, 445 aa, Unknown
  Description of Unknown: Integrase B9032 sequence
  SM00857,IPR006118,G3DSA:1.10.10.2600,IPR036162,PS51737, G3DSA:3.40.50.1390,Coil,IPR006119,IPR038109,IPR011109, SSF53041,PTHR30461,PS00397,PS51736,cd00338, PF00239
MKRAALYVRVSTQEQKNSGLSVDSQIDALEKYCEEHGYMVAGVYNDAGISARKKYTKRPALLQLLEDCKQCKIDIILFTRLDRWFRAVAGYYEVQSVLDACKVPWRAIWEDYETETSQGIFKVNIMLSVAQAEADRDSEKIRSVMEFKRNNKEYIGGKVPVGYRIEGKKIVKDEKTRGIIEDMFEHYFQTFSKAGTADYILSKYPGFVRTRTRLVKIMSSPAYRGEMYGVKNYCEPYITEEQAQKINEVSSQKTWTDCRRRIYIFSGLMKCPICGCRLSGCAIGKKGKKYKVYHCPHSVAQKHKTYTRSEKKLETYMLNHIEEKIQLDVLRAEGRVKAGGNDAEKRKKKLSSELGRINKMFEKGRITEEYYDERYEAISKELKELSQTAATEELETKKKIQSRFPDGWKDMYMQLGEQDKQVFWKSIVKEIKISPDTYVEDIIFF

SEQ ID NO: 9032 - protein, 445 aa, Unknown
  Description of Unknown: Integrase B9033 sequence
  SM00857,IPR006118,G3DSA:1.10.10.2600,IPR036162,PS51737, G3DSA:3.40.50.1390,Coil,IPR006119,IPR038109,SSF53041, IPR011109,PTHR30461,PS00397,PS51736,cd00338, PF00239
MKRAALYVRVSTQEQKNSGLSVDSQIDALEKYCEEQGYTVAGIYNDAGISARKKYTKRPALLQLLEDCKKHEIDIILFTRLDRWFRAVAGYYEVQSVLDACKVPWRAIWEDYETETSQGIFKVNIMLSVAQAEADRDSEKIRSVMEFKRNNKEYIGGKVPVGYRIEGKKIVKDEKTRGIIEDMFEHYFQTFSKAGTADYILSKYPGFVRTRTRLVKIMSSPAYRGEMYGVKNYCEPYITEEQAQKINEVSSQKTWTDCKRRIYIFSGLMKCPLCGCRLSGCAIGKKGKKYKVYHCPHSVAQKHKTYTRSEKKLETYMLDHIEEKIQLDVLRAEGRVKATGNDAEKRKKKLSSELGRINKMFEKGRITEEYYDERYEAISKELKELSQTAATEELETKKKIQSRFPDGWKDMYMQLGEQDKQVFWKSIVKEIKISPDTYVEDIIFF

SEQ ID NO: 9033 - protein, 445 aa, Unknown
  Description of Unknown: Integrase B9034 sequence
  SM00857,IPR006118,G3DSA:1.10.10.2600,IPR036162,PS51737, G3DSA:3.40.50.1390,Coil,IPR006119,IPR038109,SSF53041, IPR011109,PTHR30461,PS00397,PS51736,cd00338, PF00239
MKRAALYVRVSTQEQKNSGLSVDSQIDALEKYCEEQGYTVAGIYNDAGISARKKYTKRPALLQLLEDCKKHEIDIILFTRLDRWFRAVAGYYEVQSVLDACKVPWRAIWEDYETETSQGIFKVNIMLSVAQAEADRDSEKIRSVMEFKRNNKEYIGGKVPVGYRVENKKIVKDEKMRGIIEDMFEHYFQTFSKMETADYILSKYPDFIRTRTRIVKIMSSPAYHGEMYGVKNYCEPYITEEQAQRIKEVSSQKSWVDCKRRIYIFSGLMKCPICGCRLSGCAIGKKGKKYKVYHCPHSVAQKHKTYTRSEKKLETYMLNHIEEKIQLDVLRAEGRVKAGGNDAEKRKKKLSSELGRINKMFEKGRITEEYYDERYEAISKELKELSQTAATEELETKKKIQSRFPDGWKDMYMQLGEQDKQVFWKSIVKEIKISPDTYVEDIIFF

SEQ ID NO: 9034 - protein, 445 aa, Unknown
  Description of Unknown: Integrase B9035 sequence
  SM00857,IPR006118,G3DSA:1.10.10.2600,IPR036162,PS51737, G3DSA:3.40.50.1390,Coil,IPR006119,IPR038109,SSF53041, IPR011109,PTHR30461,PS00397,PS51736,cd00338, PF00239
MKRAALYVRVSTQEQKNSGLSVDSQIDALEKYCEEQGYTVAGIYNDAGISARKKYTKRPALLQLLEDCKKHEIDIILFTRLDRWFRAVAGYYEVQSVLDACKVPWRAIWEDYETETSQGIFKVNIMLSVAQAEADRDSEKIRSVMEFKRNNKEYIGGKVPVGYRIEGKKIVKDEKTRGIIEDMFEHYFQTFSKAGTADYILSKYPDFVRTRTRLVKIMSSPAYRGEMYGVKNYCEPYITEEQAQKINEVSSQKTWTDCRRRIYIFSGLMKCPLCGCRLSGCAIGKKGKKYKVYHCPHSVAQKHKTYTRSEKKLETYMLDHIEEKIQLDVLRAEGRVKAGGNDAEKRKKKLSSELGRINKMFEKGRITEEYYDERYEAISKELKELSQTAATEELETKKKIQSRFPDGWKDMYMQLDEQGKQVFWKSIIKEIKISPNEFVEDIIFF

SEQ ID NO: 9035 - protein, 445 aa, Unknown
  Description of Unknown: Integrase B9036 sequence
  SM00857,IPR006118,G3DSA:1.10.10.2600,IPR036162,PS51737, G3DSA:3.40.50.1390,Coil,IPR006119,IPR038109,SSF53041, IPR011109,PTHR30461,PS00397,PS51736,cd00338, PF00239
MKRAALYVRVSTQEQKNSGLSVDSQIDALEKYCEEQGYTVAGIYNDAGISARKKYTKRPALLQLLEDCKQCKIDIILFTRLDRWFRAVAGYYEVQSVLDACKVPWRAIWEDYETETSQGIFKVNIMLSVAQAEADRDSEKIRSVMEFKRNNKEYIGGKVPVGYRIEGKKIVKDEKTRGIIEDMFEHYFQTFSKAGTADYILSKYPGFVRTRTRLVKIMSSPAYRGEMYGVKNYCEPYITEEQAQKISEVSSQKTWTDCKRRIYIFSGLMKCPLCGCRLSGCAIGKKGKKYKVYHCPHSVAQKHKTYTRSEKKLETYMLDHIEEKIQLDVLKAEGRVKASGNDVEKRKKKLSSELGRINKMFEKGRITEEYYDERYEAISKELKELSQTAATEELETKKKIQSRFPDGWKDMYMQLNEQGKQVFWKSIVKEIKISPNEFVEDIIFF

SEQ ID NO: 9036 - protein, 445 aa, Unknown
  Description of Unknown: Integrase B9037 sequence
  PTHR30461:SF3,SM00857,IPR006118,IPR036162,PF13408, IPR025827,G3DSA:3.40.50.1390,PS51737,Coil,IPR006119, IPR011109,SSF53041,PTHR30461,PS00397,PS51736, cd00338,PF00239
MEGKKRAAIYVRVSTAEQKEHGLSVDNQLDALKNYCQERGFSIAGIYNDAGISARKKYKSRPALLQLLEDCKKHKIDIILFTKLDRWFRSVADYYAVQQVLDGAKVPWRAIWEDYETETSAGVFKVNIMLSVAQAESDRTSERIKAVLEYKREHGHIIAGRMPLGYIRTSSSTIDYDPATKDAMQAFFDTYLNTYSPVAAMDAARKLGLRMSRKTAHFILDKEPYYGTYYGVDVPAYITPEQHKIIENARVHYPRTPKDDRVYIFTGVIFCASCGARMCSKLSKHIRANGETIERGYYQCCTKVRRKDICENPAFVMEHKLEDYLIEHMSELITDYEASIAQSQEKAKDAEKEISRIKGKLQRLKDVYLDGDMSRAEYVDKTSQLKANMAELESQRVPLSPIKRLPDNWEEMYWQLSKDGKRDFWHRTIRRIEIDGKKVSKVFFI

SEQ ID NO: 9037 - protein, 445 aa, Unknown
  Description of Unknown: Integrase B9038 sequence
  SM00857,IPR006118,G3DSA:1.10.10.2600,IPR036162,PF13408, PS51737,IPR025827,G3DSA:3.40.50.1390,PS00397,IPR006119, IPR038109,IPR011109,SSF53041,PTHR30461,Coil, PS51736,cd00338,PF00239
MKRAALYVRVSTQEQKNSGLSVDSQIDALEKYCEKQGYTVAGIYNDAGISARKKYTKRPALLQLLEDCRQRKIDIILFTRLDRWFRAVAGYYEVQSVLDACKVPWRAIWEDYETETSQGIFKVNIMLSVAQAEADRDSEKIRSVMEFKRSNKEYIGGKVPVGYRVEGKTIVKDEKMRGIIEDMFEHYFQTFSKMETADYILSKYPDFIRTRTRIVKIMSSPAYHGEMYGVKNYCEPYITEEQAQRIKEVSSQKSWVDCKRRIYIFSGLIRCPICGYRFSGRTMAKKEKRYKVYQCPRSAAKKHKTYTRSEPKLETYMLNHIEEKIQLDILRAEGRLKAAGNDVEKRKKKLSSELGRINKMFEKGRITEEYYDERYEAISKELKELSQTAATEELETKKKIQSKFPDGWKDMYMQLDEQGKQVFWKSIVKEIKISPNEFVEDIIFF

SEQ ID NO: 9038 - protein, 445 aa, Unknown
  Description of Unknown: Integrase B9039 sequence
  SM00857,IPR006118,G3DSA:1.10.10.2600,IPR036162,PS51737, G3DSA:3.40.50.1390,Coil,IPR006119,IPR038109,IPR011109, SSF53041,PTHR30461,PS00397,PS51736,cd00338, PF00239
MKRAALYVRVSTQEQKNSGLSVDSQIDALEKYCEEQGYTVAGIYNDAGISARKKYTKRPALLQLLEDCKQCKIDIILFTRLDRWFRAVAGYYEVQSVLDACKVPWRAIWEDYETETSQGIFKVNIMLSVAQAEADRDSEKIRSVMGFKRNNKEYIGGKVPVGYRIEGKKIVKDEKTRGIIEDMFEHYFQTFSKAGTADYILSKYPDFVRTRTRLVKIMSSPAYRGEMYGVKNYCEPYITEEQAQKINEVSSQKTWTDCRRRIYIFSGLMKCPICGCRLSGCAIGKKGKKYKVYHCPHSVAQKHKTYTRSEKKLETYMLNHIEEKIQLDVLRAEGRVKAGGNDAEKRKKKLSSELGRINKMFEKGRITEEYYDERYEAISKELKELSQTAATEELETKKKIQSRFPDGWKDMYMQLGEQDKQVFWKSIVKEIKISPDTYVEDIIFF

SEQ ID NO: 9039 - protein, 445 aa, Unknown
  Description of Unknown: Integrase B9040 sequence
  SM00857,IPR006118,G3DSA:1.10.10.2600,IPR036162,PF13408, PS51737,G3DSA:3.40.50.1390,IPR025827,Coil,IPR006119, IPR038109,IPR011109,SSF53041,PTHR30461,PS00397, PS51736,cd00338,PF00239
MKRAALYVRVSTQEQKNSGLSVDSQIDALEKYCEEQGYTVAGIYNDAGISARKKYTKRPALLQLLEDCRQRKIDIILFTRLDRWFRAVAGYYEVQNVLDACKVPWRAIWEDYETETSQGIFKVNIMLSVAQAEADRDSEKIRSVMEFKRQNKEYIGGKVPVGYRVEGKKIVKDEKMRAIIEDMFEHYFQTFSKWGTADYILNKYPDFIRTRTRIVKIMSSPAYHGEMYGVKNYCEPYITEEQAQRIKEVSSQKSWIDCKRRIYIFSGLIRCPICGYRFSGRTMAKKEKRYKVYQCPRSAAKKHKTYTRSEPKLETYMLNHIEERIQLDVLKAEGRVKAAGNDAGKKKKKLSSELGRLNKMFEKGRITEEYYDERYEAISKELKELSQTAATEELETKKKIQSKFPDGWKDMYMQLDEQGKQVFWKSIVKEIKISPNEFVEDIIFF

SEQ ID NO: 9040 - protein, 445 aa, Unknown
  Description of Unknown: Integrase B9041 sequence
  SM00857,IPR006118,G3DSA:1.10.10.2600,IPR036162,PS51737, G3DSA:3.40.50.1390,Coil,IPR006119,IPR038109,IPR011109, SSF53041,PTHR30461,PS00397,PS51736,cd00338, PF00239
MKRAALYVRVSTQEQKNSGLSVDSQIDALEKYCEEQGYTVAGIYNDAGISARKKYTKRPALLQLLEDCRQHKIDIILFTRLDRWFRAVAGYYEVQSVLDACKVPWRAIWEDYETETSQGIFKVNIMLSVAQAEADRDSEKIRSVMEFKRSNKEYIGGKVPVGYRVEGKKIVKDEETRGIIEDMFEHYFQTFSKAGTADYILNKYPDFIRTRTRIVKIMSSPAYHGEMYGVKNYCEPYITEEQAQKINEVSSQKTWTDCRRRIYIFSGLMKCPICGCRLSGCAIGKKGKKYKVYHCPHSVAQKHKTYTRSEKKLETYMLNHIEEKIQLDVLRAEGRVKAGGNDAEKRKKKLSSELGRINKMFEKGRITEEYYDERYEAISKELKELSQTAATEELETKKKIQSRFPDGWKDMYMQLGEQDKQVFWKSIVKEIKISPDTYVEDIIFF

SEQ ID NO: 9041 - protein, 445 aa, Unknown
  Description of Unknown: Integrase B9042 sequence
  SM00857,IPR006118,G3DSA:1.10.10.2600,IPR036162,PS51737, G3DSA:3.40.50.1390,Coil,IPR006119,IPR038109,SSF53041, IPR011109,PTHR30461,PS00397,PS51736,cd00338, PF00239
MKKAALYVRVSTQEQKNSGLSVDSQIDALEKYCEEQGYTVAGIYNDAGISARKKYTKRPALLQLLEDCRQCKIDIILFTRLDRWFRAVAGYYEVQNVLDACKVPWRAIWEDYETETSQGIFKVNIMLSVAQAEADRDSEKIRSVMEFKRNNKEYIGGKVPVGYRIEGKKIVKDEKTRGIIEDMFEHYFQTFSKAGTADYILSKYPGFVRTRTRLVKIMSSPAYRGEMYGVKNYCEPYITEEQAQKINEVSSQKTWTDCKRRIYIFSGLMKCPICGCRLSGCAIGKKGKKYKVYHCPHSVAQKHKTYTRSEKKLETYMLNHIEEKIQLDVLRAEGRVKATGNDAEKRKKKLSSELGRINKMFEKGRITEEYYDERYEAISKELKELSQTAATEELETKKKIQSRFPDGWKDMYMQLGEQDKQVFWKSIVKEIKISPDTYVEDIIFF

SEQ ID NO: 9042 - protein, 445 aa, Unknown
  Description of Unknown: Integrase B9043 sequence
  SM00857,IPR006118,G3DSA:1.10.10.2600,IPR036162,PS51737, G3DSA:3.40.50.1390,Coil,IPR006119,IPR038109,IPR011109, SSF53041,PTHR30461,PS00397,PS51736,cd00338, PF00239
MKRAALYVRVSTQEQKNSGLSVDSQIDALEKYCEEQGYTVAGIYNDAGISARKKYTKRPALLQLLEDCKKHEIDIILFTRLDRWFRAVAGYYEVQSVLDACKVPWRAIWEDYETETSQGIFKVNIMLSVAQAEADRDSEKIRSVMEFKRQNKEYIGGKVPVGYRVEGKTIVKDEKTRGIIEDMFEHYFQTFSKMGTADYILNKYPDFIRTRTRIVKIMSSPAYHGEMYGVKNYCEPYITEEQAQKINEVSSQKTWTDCKRRIYIFSGLMKCPICGCRLSGCAIGKKGKKYKVYHCPHSVAQKHKTYTRSEKKLETYMLNHIEEKIQLDVLRAEGRVKAGGNDVEKRKKKLSSELGRINKMFEKGRITEEYYDERYEAISKELKELSQTAATEELETKKKIQSRFPDGWKDMYMQLGEQDKQVFWKSIVKEIKISPDTYVEDIIFF

SEQ ID NO: 9043 - protein, 445 aa, Unknown
  Description of Unknown: Integrase B9044 sequence
  SM00857,IPR006118,G3DSA:1.10.10.2600,IPR036162,PS51737, G3DSA:3.40.50.1390,Coil,IPR006119,IPR038109,IPR011109, SSF53041,PTHR30461,PS00397,PS51736,cd00338, PF00239
MKRAALYVRVSTQEQKNSGLSVDSQIDALEKYCEEQGYIVAGIYNDAGISARKKYTKRPALLRLLEDCKKHEIDIILFTRLDRWFRAVAGYYEVQSVLDACKVPWRAIWEDYETETSQGIFKVNIMLSVAQAEADRDSEKIRSVMEFKRNNKEYIGGKVPVGYRIEGKKIVKDEKTRGIIEDMFEHYFQTFSKAGTADYILSKYPDFVITRTRLVKIMSSPAYRGEMYGVKNYCEPYITEEQAQKINEVSSQKTWTDCRRRIYIFSGLMKCPLCGCRLSGCAIGKKEKKYKVYHCPHSVAQKHKTYTRSEKKLETYMLNHIEEKIQLDVLRAEGRVKAGGNDAEKRKKKLSSELGRINKMFEKGRITEEYYDERYEAISKELKELSQTAATEELETKKKIQSRFPDGWKDMYMQLGEQDKQVFWKSIVKEIKISPDTYVEDIIFF

SEQ ID NO: 9044 - protein, 445 aa, Unknown
  Description of Unknown: Integrase B9045 sequence
  SM00857,IPR006118,G3DSA:1.10.10.2600,IPR036162,PS51737, G3DSA:3.40.50.1390,Coil,IPR006119,IPR038109,IPR011109, SSF53041,PTHR30461,PS00397,PS51736,cd00338, PF00239
MKRAALYVRVSTQEQKNSGLSVDSQIDALEKYCEEQGYVVAGIYNDAGISARKKYTKRPALLQLLEDCRQHKIDIILFTRLDRWFRAVAGYYEVQSVLDACKVPWRAIWEDYETETSQGIFKVNIMLSVAQAEADRDSEKIRSVMEFKRSNKEYIGGKVPVGYRVEGKKIVKDEETRGIIEDMFEHYFQTFSKAGTADYILNKYPDFIRTRTRIVKIMSSPAYHGEMYGVKNYCEPYITEEQAQKINEVSSQKTWTDCRRRIYIFSGLMKCPICGCRLSGCAIGKKGKKYKVYHCPHSVAQKHKTYTRSEKKLETYMLNHIEEKIQLDVLRAEGRVKAGGNDAEKRKKKLSSELGRINKMFEKGRITEEYYDERYEAISKELKELSQTAATEELETKKKIQSRFPDGWKDMYMQLGEQDKQVFWKSIVKEIKISPDTYVEDIIFF

SEQ ID NO: 9045 - protein, 445 aa, Unknown
  Description of Unknown: Integrase B9046 sequence
  SM00857,IPR006118,G3DSA:1.10.10.2600,IPR036162,PS51737, G3DSA:3.40.50.1390,Coil,IPR006119,IPR038109,SSF53041, IPR011109,PTHR30461,PS00397,PS51736,cd00338, PF00239
MKRAALYVRVSTQEQKNSGLSVDSQIDALEKYCEEQGYTVAGIYNDAGISARKKYTKRPALLQLLDDCRQCKIDIILFTRLDRWFRAVAGYYEVQNVLDACKVPWRAIWEDYETETSQGIFKVNIMLSVAQAEADRDSEKIRSVMEFKRNNKEYIGGKVPVGYRIEGKKIVKDEKTRGIIEDMFEHYFQTFSKAGTADYILSKYPDFVRTRTRLVKIMSSPAYRGEMYGVKNYCEPYITEEQAQKINEVSSQKTWTDCRRRIYIFSGLMKCPICGCRLSGCAIGKKGKKYKVYHCPHSVAQKHKTYTRSEKKLETYMLDHIEEKIQLDVLRAEGRVKAGGNDAEKRKKKLSSELGRINKMFEKGRITEEYYDERYEAISKELKELSQTAATEELETKKKIQSRFPDGWKDMYMQLGEQDKQVFWKSIVKEIKISPDTYVEDIIFF

SEQ ID NO: 9046 - protein, 445 aa, Unknown
  Description of Unknown: Integrase B9047 sequence
  SM00857,IPR006118,G3DSA:1.10.10.2600,IPR036162,PS51737, G3DSA:3.40.50.1390,PS00397,IPR006119,IPR038109,SSF53041, IPR011109,PTHR30461,Coil,PS51736,cd00338, PF00239
MKRAALYVRVSTQEQKNSGLSVDSQIDALEKYCEEQGYTVAGIYNDAGISARKKYTKRPALLQLLEDCKKHEIDIILFTRLDRWFRAVAGYYEVQSVLDACKVPWRAIWEDYETETSQGIFKVNIMLSVAQAEADRDSEKIRSIMGFKRNNKEYIGGKVPVGYRIEGKKIVKDEKTRGIIEDMFEHYFQTFSKAGTADYILSKYPGFVRTRTRLVKIMSSPAYRGEMYGVKNYCEPYITEEQAQKINEVSSQKTWTDCRRRIYIFSGLMKCPICGCRLSGCAIGKKGKKYKVYHCPHSVAQKHKTYTRSEKKLETYMLNHIEEKIQLDVLRAEGRVKAGGNDAEKRKKKLSSELGRINKMFEKGRITEEYYDERYEAISKELKELSQTAATEELETKKKIQSRFPDGWKDMYMQLGEQDKQVFWKSIVKEIKISPDTYVEDIIFF

SEQ ID NO: 9047 - protein, 445 aa, Unknown
  Description of Unknown: Integrase B9048 sequence
  SM00857,IPR006118,G3DSA:1.10.10.2600,IPR036162,PS51737, G3DSA:3.40.50.1390,Coil,IPR006119,IPR038109,SSF53041, IPR011109,PTHR30461,PS00397,PS51736,cd00338, PF00239
MKRAALYVRVSTQEQKNSGLSVDSQIDALEKYCEEQGYTVAGIYNDAGISARKKYTKRPALLQLLEDCKQCKIDIILFTRLDRWFRAVAGYYEVQSVLDACKVPWRAIWEDYETETSQGIFKVNIMLSVAQAEADRDSEKIRSVMEFKRNNKEYIGGKVPVGYRIEGKKIVKDEKTRGIIEDMFEHYFQTFSKAGTADYILSKYPGFVRTRTRLVKIMSSPAYRGEMYGVKNYCEPYITEEQAQKISEVSSQKTWTDCKRRIYIFSGLMKCPLCGCRLSGCAIGKKGKKYKVYHCPHSVAQKHKTYTRSEKKLETYMLDHIEEKIQLDVLRAEGRVKAGGNDAEKRKKKLSSELGRINKMFEKGRITEEYYDERYEAISKELKELSQTAATEELETKKKIQSRFPDGWKDMYMQLGEQDKQVFWKSIVKEIKISPDTYVEDIIFF

SEQ ID NO: 9048 - protein, 445 aa, Unknown
  Description of Unknown: Integrase B9049 sequence
  SM00857,IPR006118,G3DSA:1.10.10.2600,IPR036162,PS51737, G3DSA:3.40.50.1390,PS00397,IPR006119,IPR038109,SSF53041, IPR011109,PTHR30461,Coil,PS51736,cd00338, PF00239
MKRAALYVRVSTQEQKNSGLSVDSQIDALEKYCEEQGYTVAGIYNDAGISARKKYTKRPALLQLLEDCKKHEIDIILFTRLDRWFRAVAGYYEVQSVLDACKVPWRAIWEDYETETSQGIFKVNIMLSVAQAEADRDSEKIRSVMEFKRNNKEYIGGKVPVGYRIEGKKIVKDEKTRGIIEDMFEHYFQTFSKAGTADYILSKYPGFVRTRTRLVKIMSSPAYRGEMYGVKNYCEPYITEEQAQKISEVSSQKTWTDCKRRIYIFSGLMKCPLCGCRLSGCAIGKKGKKYKVYHCPHSVAQKHKTYTRSEKKLETYMLDHIEEKIQLDVLRAEGRVKATGNDAEKRKKKLSSELGRINKMFEKGRITEEYYDERYEAISKELKELSQTAATEELETKKKIQSRFPDGWKDMYMQLGEQDKQVFWKSIVKEIKISPDTYVEDIIFF

SEQ ID NO: 9049 - protein, 445 aa, Unknown
  Description of Unknown: Integrase B9050 sequence
  SM00857,IPR006118,G3DSA:1.10.10.2600,IPR036162,PS51737, G3DSA:3.40.50.1390,Coil,IPR006119,IPR038109,SSF53041, IPR011109,PTHR30461,PS00397,PS51736,cd00338, PF00239
MKRAALYVRVSTQEQKNSGLSVDSQIDALEKYCEEQGYTVAGIYNDAGISARKKYTKRPALLQLLEDCKQCKIDIILFTRLDRWFRAVAGYYEVQSVLDACKVPWRAIWEDYETETSQGIFKVNIMLSVAQAEADRDSEKIRSVMEFKRNNKEYIGGKVPVGYRIEGKKIVKDEKTRGIIEDMFEHYFQTFSKAGTADYILGKYPDFARTRTRLVKIMSSPAYRGEMYGVKNYCEPYITEEQAQKINEVSSQKTWTDCRRRIYIFSGLMKCPLCGCRLSGCAIGKKGKKYKVYHCPHSVAQKHKTYTRSEKKLETYMLNHIEEKIQLDVLRAEGRVKAGGNDAEKRKKKLSSELGRINKMFEKGRITEEYYDERYEAISKELKELSQTAATEELETKKKIQSRFPDGWKDMYMQLGEQDKQVFWKSIVKEIKISPDTYVEDIIFF

SEQ ID NO: 9050 - protein, 445 aa, Unknown
  Description of Unknown: Integrase B9051 sequence
  SM00857,IPR006118,G3DSA:1.10.10.2600,IPR036162,PF13408, PS51737,G3DSA:3.40.50.1390,IPR025827,Coil,IPR006119, IPR038109,IPR011109,SSF53041,PTHR30461,PS00397, PS51736,cd00338,PF00239
MKRAALYVRVSTQEQKNSGLSVDSQINALEKYCEEQGYAIAGIYNDAGISARKKYTKRPALLQLLEDCRQRKIDIILFTRLDRWFRAVAGYYEVQNVLDACKVPWRAIWEDYETETSQGIFKVNIMLSVAQAEADRDSEKIRSVMEFKRQNKEYIGGKVPVGYRVEGKKIVKDEKMRAIIEDMFEHYFQTFSKWGTADYILNKYPDFIRTRTRIVKIMSSPAYHGEMYGVKNYCEPYITEEQAQRIKEVSSQKSWIDCKRRIYIFSGLIRCPICGYRFSGRTMAKKEKRYKVYQCPRSAAKKHKTYTRSEPKLETYMLNHIEERIQLDVLKAECRVKAAGNDAGKKKKKLSSELGRLNKMFEKGRITEEYYDERYEAISKELKELSQTAATEELETKKKIQSKFPDGWKDMYMQLDEQGRQVFWKSIVKEIKISPNEFVEDIIFF

SEQ ID NO: 9051 - protein, 445 aa, Unknown
  Description of Unknown: Integrase B9052 sequence
  PTHR30461:SF3,SM00857,IPR036162,PF13408,PS51737, IPR025827,G3DSA:3.40.50.1390,IPR006119,IPR011109,SSF53041, PF00239,PTHR30461,PS51736,Coil,cd00338
MKRVALYMRVSTEEQALHGYSLPAQKDALHQYAKDHSMTVVGEYVDEGISGRKSASKRPALARMLRDVEAGKIDQILFIKLDRWFRSVKEYYRVQEVLDRNKVTWRTILEDYNTESADGILKVNIMLSVAQNEAERTGERIKFVLDNKVQKKQVVGKQPYGYKIAIVEGEKKSVIDEETAPVVHDIFNTFDRTNSASLTTKYINEKHGTDFSAVFIRRLLHRSAYAGEYMGISGYRPQYISRERFDKNQEIFRGSHIKRTPTGRVYIFTGILFCAHCGHRMKGKYTTVKYYCCPRATDDYSCENHKHISELKIEKYLTSHIRRLMSEYILAAETKESVTKRSDAASEVMSLRQKIERLNDIYLEGNMNKETYRRRTEQLKQNLVQAEEQYQRSQPKNVSHLKEILNTDFLSDYDLLTDENKRSLWRRIITRIEMDDQQNLKVFFS

SEQ ID NO: 9052 - protein, 445 aa, Unknown
  Description of Unknown: Integrase B9053 sequence
  cd00338,SM00857,IPR006118,G3DSA:1.10.10.2600, IPR036162,PS51737,G3DSA:3.40.50.1390,IPR006119, IPR038109,IPR011109,SSF53041,PTHR30461, PS00397,PS51736,Coil,PF00239
MKRAALYVRVSTQEQKNSGLSVDSQIDALEKYCEEQGYTVAGIYNDAGISARKKYTKRPALLQLLEDCKQCKIDIILFTRLDRWFRAVAGYYEVQSVLDACKVPWRAIWEDYETETSQGIFKVNIMLSVAQAEADRDSEKIRSVMEFKRNNKEYIGGKVPVGYRIEGKKIVKDEKTRGIIEDMFEHYFQTFSKAGTADYILSKYPGFVRTRTRLVKIMSSPAYRGEMYGVKNYCEPYITEEQAQKISEVSSQKTWTDCKRRIYIFSGLMKCPICGCRLSGCAIGKKGKKYKVYHCPHSVAQKHKTYTRSEKKLETYMLNHIEEKIQLDILRAEGRVKAAGNDVGKRKKKLSSELGRINKMFEKGRITEEYYDERYEAISKELKELSQTAATEELETKKKIQSRFPDGWKDMYMQLGEQDKQVFWKSIVKEIKISPDTYVEDIIFF

SEQ ID NO: 9053 - protein, 445 aa, Unknown
  Description of Unknown: Integrase B9054 sequence
  SM00857,IPR006118,G3DSA:1.10.10.2600,IPR036162,PF13408, IPR025827,PS51737,Coil,G3DSA:3.40.50.1390,IPR006119, IPR038109,SSF53041,IPR011109,PTHR30461,PS00397, PS51736,cd00338,PF00239
MKRAALYVRVSTQEQKNSGLSVDSQIDALEKYCEEQEYIVAGIYNDAGISARKKYTKRPALLRLLEDCKKHEIDIILFTRLDRWFRAVAGYYEVQSVLDACKVPWRAIWEDYETETSQGIFKVNIMLSVAQAEADRDSEKIRSVMEFKRQNKEYIGGKVPVGYRVEGKKIVKDENMREIIEDMFEHYFQTFSKWGTADYILSKYPDFIRTRNRIVKIMSSPAYHGEMYGVKNYCEPYITEEQAQRIKEVSSQKSWVDCKRRIYIFSGLIRCPICGYKFSGCTMVKKEKRYKVYRCPRSAAKKHKTYTRSEPKLETYMLNHIEEKIQSDVLRAEGRVKAAGNDIGKRKKKLSSELGRINKMFEKGRITEEYYDERYEAISKELKELSQTAATEELETKKKIQSRFPDGWKDMYMQLDEQGKQVFWKSIVKEIKISPNEFVEDIIFF

SEQ ID NO: 9054 - protein, 445 aa, Unknown
  Description of Unknown: Integrase B9055 sequence
  SM00857,IPR006118,G3DSA:1.10.10.2600,IPR036162,PF13408, IPR025827,PS51737,G3DSA:3.40.50.1390,Coil,IPR006119, IPR038109,IPR011109,SSF53041,PTHR30461,PS00397, PS51736,cd00338,PF00239
MKRCALYVRVSTQEQKNSGLSVDSQIAALEKYCEEQGYTVAGVYNDAGISARKKYTKRPALLQLLEDCKQRKIDIILFTRLDRWFRAVAGYYEVQSVLDACKVPWRAIWEDYETETSQGIFKVNIMLSVAQAEADRDSEKIRSVMEFKRQNKEYIGGKVPVGYRVEGKKIVKDEKMRGIIEDMFEHYFQTFSKWGTADYILSKYPDFIRTRTRIVKIMSSPAYHGEMYGVKNYCEPYITEEQAQRIKEVSSQKSWVNCKRRIYIFSGLIRCPICGYRFSGRTMAKKEKRYKVYQCPRSAAKKHKTYTRSEPKLEKYMLDHIEEKIQLDVLRAEGRVKAAGNDVGKRKKKLSSELGRINKMFEKGRITEEYYDERYEAISKELKELSQTAATEELETKEKIQSSFPDGWKDMYMQLDEQGKQVFWKSIVKEIKISPNEFVEDIIFF

SEQ ID NO: 9055 - protein, 445 aa, Unknown
  Description of Unknown: Integrase B9056 sequence
  SM00857,IPR006118,G3DSA:1.10.10.2600,IPR036162,PS51737, G3DSA:3.40.50.1390,Coil,IPR006119,IPR038109,SSF53041, IPR011109,PTHR30461,PS00397,PS51736,cd00338, PF00239
MKRAALYVRVSTQEQKNSGLSVDSQIDALEKYCEEQGYTVAGIYNDAGISARKKYTKRPALLQLLEDCKKHEIDIILFTRLDRWFRAVAGYYEVQSVLDACKVPWRAIWEDYETETSQGIFKVNIMLSVAQAEADRDSEKIRSVMEFKRNNKEYIGGKVPVGYRIEGKKIVKDEKTRGIIEDMFEHYFQTFSKAGTADYILNKYPDFIRTRTRIVKIMSSPAYHGEMYGVKNYCEPYITEEQAQKINEVSSQKTWTDCKRRIYVFSGLMKCPICGCRLSGCAIGKKEKKYKVYHCPHSVAQKHKTYTRSEKKLETYMLNHIEEKIQLDVLRAECRVKAGGNDAEKRKKKLSSELGRINKMFEKGRITEEYYDERYEAISKELKELSQTAATEELETKKKIQSRFPEGWKDMYMQLDEQGKQVFWKSIVKEIKISPNEFVEDIIFF

SEQ ID NO: 9056 - protein, 445 aa, Unknown
  Description of Unknown: Integrase B9057 sequence
  SM00857,IPR006118,G3DSA:1.10.10.2600,IPR036162,PS51737, G3DSA:3.40.50.1390,Coil,IPR006119,IPR038109,IPR011109, SSF53041,PTHR30461,PS00397,PS51736,cd00338, PF00239
MKRAALYVRVSTQEQKNSGLSVDSQIDALKKYCEEQGYTVAGIYNDAGISARKKYTKRPALLKLLEDCKKHEIDIILFTRLDRWFRAVAGYYEVQNVLDACKVPWRAIWEDYETETSQGIFKVNIMLSVAQAEADRDSEKIRSVMEFKRNNKEYIGGKVPVGYRIEGKKIVKDEKTRGIIEDMFEHYFQTFSKAGTADYILSKYPDFVRTRTRLVKIMSSPAYRGEMYGVKNYCEPYITEEQAQKISEVSSQKTWTDCKRRIYIFSGLMKCPLCGCRLSGCAIGKKGKKYKVYHCPHSVAQKHKTYTRSEKKLETYMLDHIEEKIQLDVLKAEGRVKASGNDAEKRKKKLSSELGRINKMFEKGRITEEYYDERYEAISKELKELSQTAATEELETKKKIQSRFPDGWKDMYMQLDEQGKQVFWKSIVKEIKISPNEFVEDIIFF

SEQ ID NO: 9057 - protein, 445 aa, Unknown
  Description of Unknown: Integrase B9058 sequence
  SM00857,IPR006118,G3DSA:1.10.10.2600,IPR036162,PS51737, G3DSA:3.40.50.1390,Coil,IPR006119,IPR038109,SSF53041, IPR011109,PTHR30461,PS00397,PS51736,cd00338, PF00239
MKRAALYVRVSTQEQKNSGLSVDSQIDALEKYCEEQGYTVAGIYNDAGISARKKYTKRPALLQLLEDCKKHEIDIILFTRLDRWFRAVAGYYEVQNILDACKVPWRAIWEDYETETSQGIFKVNIMLSVAQAEADRDSEKIRSVMEFKRNNKEYIGGKVPVGYRIEGKKIVKDEKTRGIIEDMFEHYFQTFSKAGTADYILSKYPDFVRTRTRLVKIMSSPAYRGEMYGVKNYCEPYITEEQAQKINEVSSQKTWTDCRRRIYIFSGLMKCPLCGCRLSGCAIGKKGKKYKVYHCPHSVAQKHKTYTRSEKKLETYMLNHIEEKIQLDVLRAEGRVKAGGNDAEKRKKKLSSELGRINKMFEKGRITEEYYDERYEAISKELKELSQTAATEELETKKKIQSRFSDGWKDMYMQLGEQDKQVFWKSIVKEIKISPDTYVEDIIFF

SEQ ID NO: 9058 - protein, 445 aa, Unknown
  Description of Unknown: Integrase B9059 sequence
  SM00857,IPR006118,G3DSA:1.10.10.2600,IPR036162,PS51737, G3DSA:3.40.50.1390,Coil,IPR006119,IPR038109,IPR011109, SSF53041,PTHR30461,PS00397,PS51736,cd00338, PF00239
MKRAALYVRVSTQEQKNSGLSVDSQIDALEKYCEEQGYTVAGIYNDAGISARKKYTKRPALLRLLEDCKKHEIDIILFTRLDRWFRAVAGYYEVQNVLDACKVPWRAIWEDYETETSQGIFKVNIMLSVAQAEADRDSEKIRSVMEFKRNNKEYIGGKVPVGYRIEGKKIVKDEKTRGIIEDMFEHYFQTFSKAGTADYILSKYPDFVRTRTRLVKIMSSPAYRGEMYGVKNYCEPYITEEQAQKINEVSSQKTWTDCRRRIYIFSGLMKCPLCGCRLSGCAIGKKGKKYKVYHCPHSVAQKHKTYTRSEKKLETYMLDHIEEKIQLDVLRAEGRVKAGGNDAEKRKKKLSSELGRINKMFEKGRITEEYYDERYEAISKELKELSQTAATEELETKKKIQSRFPDGWKDMYMQLGEQDKQVFWKSIVKEIKISPDTYVEDIIFF

SEQ ID NO: 9059 - protein, 445 aa, Unknown
  Description of Unknown: Integrase B9060 sequence
  SM00857,IPR006118,G3DSA:1.10.10.2600,IPR036162,PS51737, G3DSA:3.40.50.1390,Coil,IPR006119,IPR038109,SSF53041, IPR011109,PTHR30461,PS00397,PS51736,cd00338, PF00239
MKRAALYVRVSTQEQKNSGLSVDSQIDALKKYCEEQGYTVAGIYNDAGISARKKYTKRPALLQLLEDCKKHEIDIILFTRLDRWFRAVAGYYEVQNVLDACKVPWRAIWEDYETETSQGIFKVNIMLSVAQAEADRDSEKIRSVMEFKRQNKEYIGGKVPVGYRVEGKTIVKDEKTRGIIEDMFEHYFQTFSKMGTADYILNKYPDFIRTRTRIVKIMSSPAYHGEMYGVKNYCEPYITEEQAQRIKEVSSQKSWVDCRRRIYIFSGLMKCPICGCRLSGCAIGKKGKKYKVYHCPHSVAQKHKTYTRSEKKLETYMLNHIEEKIQLDVLRAEGRVKAGGNDAEKRKKKLSSELGRINKMFEKGRITEEYYDERYEAISKELKELSQTAATEELETKKKIQSRFPDGWKDMYMQLGEQDKQVFWKSIVKEIKISPDTYVEDIIFF

SEQ ID NO: 9060 - protein, 445 aa, Unknown
  Description of Unknown: Integrase B9061 sequence
  SM00857,IPR006118,G3DSA:1.10.10.2600,IPR036162,PS51737, G3DSA:3.40.50.1390,Coil,IPR006119,IPR038109,SSF53041, IPR011109,PTHR30461,PS00397,PS51736,cd00338, PF00239
MKRAALYVRVSTQEQKNSGLSVDSQIDALEKYCEEQGYVVAGIYNDAGISARKKYTKRPALLRLLEDCKKHEIDIILFTRLDRWFRAVAGYYEVQNILDACKVPWRAIWEDYETETSQGIFKVNIMLSVAQAEADRDSEKIRSVMEFKRNNKEYIGGKVPVGYRIEGKKIVKDEKTRGIIEDMFEHYFQTFSKAGTADYILSKYPDFVRTRTRLVKIMSSPAYRGEMYGVKNYCEPYITEEQAQKINEVSSQKTWTDCRRRIYIFSGLMKCPLCGCRLSGCAIGKKGKKYKVYHCPHSVAQKHKTYTRSEKKLETYMLNHIEEKIQLDVLRAEGRVKAGGNDAEKRKKKLSSELGRINKMFEKGRITEEYYDERYEAISKELKELSQTAATEELETKKKIQSRFPDGWKDMYMQLGEQDKQVFWKSIVKEIKISPDTYVEDIIFF

SEQ ID NO: 9061 - protein, 445 aa, Unknown
  Description of Unknown: Integrase B9062 sequence
  PTHR30461:SF3,IPR036162,PS51737,IPR011109,PTHR30461, PS00397,PF00239,G3DSA:1.10.10.2600,IPR006119,SSF53041, cd00338,SM00857,IPR025827,IPR038109,PS51736, IPR006118,PF13408,G3DSA:3.40.50.1390,Coil
MNVIRGVGYIRVSTAEQATRGLSLDAQEAEIRTYAKAHGIELFNIYVDAGITARKRLDRREAFGQMMKDVDSGLIDEIIVMRLDRWFRNIYDYHKMMNEHLIPHGVNWSAVKEDYDTKTTNGRLMINLRLAIAEQECDTDGDRIRDIHDNQIANGIWIGGCAPPGYRIENKRLSIDPDMQPAVSYFFERLLSCGSVRRAMLDMNERHNLHFEYGQAIRMARSTTYCGVRRENYNYCPTYISQDEHAQIMAALEHNVRVRSADNARIHIFSGLLVCACCGRRLAANTVRKKSVTWTAYRCHRAFGDHVCDNRHLVDERKVEAWLLDYLENGLSDYIVSASVADAQPVVVDNTAAIRERQERVKELFINGFIDLQEYKRRATELEAKIQVPEKQPPRSMEKLKSLLERGVRAIYNDLSRGERQEFWRSIIREIPVNNGAVSGDPIFL

SEQ ID NO: 9062 - protein, 445 aa, Unknown
  Description of Unknown: Integrase B9063 sequence
  SM00857,IPR006118,G3DSA:1.10.10.2600,IPR036162,PS51737, G3DSA:3.40.50.1390,Coil,IPR006119,IPR038109,SSF53041, IPR011109,PTHR30461,PS00397,PS51736,cd00338, PF00239
MKRAALYVRVSTQEQKNSGLSVDSQIDALEKYCEEQGYTVAGIYNDAGISARKKYTKRPALLRLLEDCKKHEIDIILFTRLDRWFRAVAGYYEVQNVLDACKVPWRAIWEDYETETSQVIFKVNIMLSVAQAEADRDSEKIRSVMEFKRSNKEYIGGKVPVGYRVEGKKIVKDEETRGIIEDMFEHYFQTFSKAGTADYILNKYPDFIRTRTRIVKIMSSPAYHGEMYGVKNYCEPYITEEQAQKINEVSSQKTWTDCRRRIYIFSGLMKCPICGCRLSGCAIGKKGKKYKVYHCPHSVAQKHKTYTRSEKKLETYMLNHIEEKIQLDVLRAEGRVKAGGNDAEKRKKKLSSELGRINKMFEKGRITEEYYDERYEAISKELKELSQTAATEELETKKKIQSRFPDGWKDMYMQLGEQDKQVFWKSIVKEIKISPDTYVEDIIFF

SEQ ID NO: 9063 - protein, 445 aa, Unknown
  Description of Unknown: Integrase B9064 sequence
  PTHR30461:SF3,IPR036162,PS51737,IPR011109,PTHR30461, PS00397,PF00239,G3DSA:1.10.10.2600,IPR006119,SSF53041, cd00338,SM00857,IPR025827,IPR038109,PS51736, IPR006118,PF13408,G3DSA:3.40.50.1390,PF07508,Coil
MKNKRVALYIRVSTEEQARQGLSLDAQLTDLRSYADKHKYNIVGVYTDDGASARKKPFSRRAFKQLIEDIRQNKIDRVLFIKLDRWFRSVKDYYKAQEILDMHKVDWETTQEDYNTTTTNGRLMLNIKLSIAQNESDMTSDRIHFIFAQKRARHEICSGKIPFGYSVQDKKLVPNENAKYVQPLFEHFVKTQNLTEAARWMCGHGFYYTYASISHVLKNERYIGRSHGDDNFCQPLVTEEIFYKAQKIIKSKKMIKRTPTGRIFLFTGLIRCPMCGHPYTGIGCVGKNNGKTYYYYQCPQSVSPFKACTHRGRVAEKKIEESLLDSFDEAYKDFQYSVKKKQKQQPVTTDVDKLKRKLERLKELFLNELIDLDEYKKTHAELSAAIAEVETPKIPTSTPLNYYLPGGIRPYYEKMTREQRRQFWQQTVDRIDLDEDNTPRITFLS

SEQ ID NO: 9064 - protein, 445 aa, Unknown
  Description of Unknown: Integrase B9065 sequence
  SM00857,IPR006118,G3DSA:1.10.10.2600,IPR036162,PF13408, IPR025827,G3DSA:3.40.50.1390,PS51737,Coil,IPR006119, IPR038109,IPR011109,SSF53041,PTHR30461,PS00397, PS51736,cd00338,PF00239
MKRAALYVRVSTQEQKNSGLSVDSQIDALEKYCEEQGYTVAGVYNDAGISARKKYTKRPALLQLLEDCKKHEIDIILFTRLDRWFRAVAGYYEVQSVLDACKVPWRAIWEDYETETSQGIFKVNIMLSVAQAEADRDSEKIRSVMEFKRNNKEYIGGKVPVGYRVENKKIVKDEKMQGIIEDMFEHYFQTFSKMETADYILSKYPDFIRTRTRIVKIMSSPAYHGEMYGVKNYCEPYITEEQAQRIKEVSSQKSWVDCKRRIYIFSGLIRCPICGYKFSGRTMAKKEKRYKVYQCPRSAAKKHKTYTRSEPKLETYMLNHIEEKIQSDVLRAEGRVRAAGNDAGKKKKKLSSELGRLNKMFEKGRITEEYYDERYEAISKELKELSQTAATEELETKKKIQGRFPDGWKDMYMQLDEQGKQVFWKSIVKEIKISPNEFVEDIIFF

SEQ ID NO: 9065 - protein, 445 aa, Unknown
  Description of Unknown: Integrase B9066 sequence
  SM00857,IPR006118,G3DSA:1.10.10.2600,IPR036162,PS51737, G3DSA:3.40.50.1390,Coil,IPR006119,IPR038109,IPR011109, SSF53041,PTHR30461,PS00397,PS51736,cd00338, PF00239
MKRAALYVRVSTQEQKNSGLSVDSQIDALEKYCEEQGYMVAGIYNDAGISARKKYTKRPALLRLLEDCKKHEIDIILFTRLDRWFRAVAGYYEVQSVLDACKVPWRAIWEDYETETSQGIFKVNIMLSVAQAEADRDSEKIRSVMEFKRNNKEYIGGKVPVGYRIEGKKIVKDEKTREIIEDMFEHYFQTFSKAGTADYILSKYPDFVRTRTRLVKIMSSPAYRGEMYGVKNYCEPYITEEQAQKINEVSSQKTWTDCKRRIYIFSGLMKCPICGCRLSGCAIGKKGKKYKVYHCPHSVAQKHKTYTRSEKKLETYMLNHIEEKIQLDVLRAEGRVKAGGNDVEKRKKKLSSELGRINKMFEKGRITEEYYDERYEAISKELKELSQTAATEELETKKKIQSKFPDGWKDMYMQLDEQGKQVFWKSIVKEIKISPNEFVEDIIFF

SEQ ID NO: 9066 - protein, 445 aa, Unknown
  Description of Unknown: Integrase B9067 sequence
  PTHR30461:SF3,IPR036162,PS51737,IPR011109,PTHR30461, PS00397,PF00239,G3DSA:1.10.10.2600,IPR006119,SSF53041, cd00338,SM00857,IPR025827,IPR038109,PS51736, IPR006118,PF13408,G3DSA:3.40.50.1390,PF07508,Coil
MKNNRVALYIRVSTEEQARQGLSLDAQLTDLRSYADKHKYNIVGVYTDDGASARKKPFSRRAFKQLIEDIKQNKIDRVLFIKLDRWFRSVKDYYKAQEILDSHKVDWETTQEDYNTTTTNGRLMLNIKLSIAQNESDMTSDRIHFVFAQKRARHEICSGKIPFGYSVQDKKLVPNENAKYVQPLFEHFVKTQNLTESARWMCGHGFYYTYASISHVLKNERYIGRSHGDDSFCQPLVTEDIFYRAQKIIKSKKLIKRTPTGRIFLFTGLIRCPMCGHPYTGIGCVGKNNGKTYYYYQCPQSVSPFKACTHRGRVSEKKIEEALLDSFDEAYKDFQYSVKKKQKPQPVTTDVEKLKRKLERLKELFLNELIDLDEYKKTHAELTAAIAEVETPKIPTSTPLNYYLPGGIRPYYEKMTREQRRQFWQQTVDRIDLDEDDTPRITFLS

SEQ ID NO: 9067 - protein, 445 aa, Unknown
  Description of Unknown: Integrase B9068 sequence
  SM00857,IPR006118,G3DSA:1.10.10.2600,IPR036162,PF13408, PS51737,G3DSA:3.40.50.1390,IPR025827,Coil,IPR006119, IPR038109,SSF53041,IPR011109,PTHR30461,PS00397, PS51736,cd00338,PF00239
MKRAALYVRVSTQEQKNSGLSVDSQIDALEKYCEEQGYTVTGIYNDAGISARKKYTKRPALLKLLEDCKKHEIDIILFTRLDRWFRAVAGYYEVQSVLDACKVPWRAIWEDYETETSQGIFKVNIMLSVAQAEADRDSEKIRSVMEFKRQNKEYIGGKVPVGYRVEGKKIVKDEKMRAIIEDMFEHYFQTFSKMETADYILSKYPDFIRTRTRIVKIMSSPAYHGEMYGVKNYCEPYITEEQAQRIKEVSSQKSWVDCKRRIYIFSGLIRCPICGYRFSGRTMAKKEKRYKVYQCPRSAAKKHKTYTRSEPKLETYMLNHIEEKIQLDILRAEGRVKAAGNDAGKRKKKLSSELGRINKMYEKGRITEEYYDERYEAISKELKELSQTAATEELETKKKIQSKFPDGWKDMYMQLDEQGKQVFWKSIVKEIKISPNEFVEDIIFF

SEQ ID NO: 9068 - protein, 445 aa, Unknown
  Description of Unknown: Integrase B9069 sequence
  SM00857,IPR006118,G3DSA:1.10.10.2600,IPR036162,PS51737, G3DSA:3.40.50.1390,Coil,IPR006119,IPR038109,IPR011109, SSF53041,PTHR30461,PS00397,PS51736,cd00338, PF00239
MKRAALYVRVSTQEQKNSGLSVDSQIDALKKYCEEQGYTVAGIYNDAGISARKKYTKRPALLKLLEDCKKHEIDIILFTRLDRWFRAVAGYYEVQNVLDACKVPWRAIWEDYETETSQGIFKVNIMLSVAQAEADRDSEKIRSVMEFKRNNKEYIGGKVPVGYRIEGKKIVKDEKTRGIIEDMFEHYFQTFSKAGTADYILSKYPDFVRTRTRLVKIMSSPAYRGEMYGVKNYCEPYITEEQAQKISEVSSQKTWTDCKRRIYIFSGLMKCPLCGCRLSGCAIGKKGKKYKVYHCPHSVAQKHKTYTRSEKKLETYMLDHIEEKIQLDVLKAEGRVKASGNDAEKRKKKLSSELGRINKMFEKGRITEEYYDERYEAISKELKELSQTAATEELETKKKIQSRFPDGWKDMYMQLDEQGRQVFWKSIVKEIKISPNEFVEDIIFF

SEQ ID NO: 9069 - protein, 445 aa, Unknown
  Description of Unknown: Integrase B9070 sequence
  SM00857,IPR006118,G3DSA:1.10.10.2600,IPR036162,PS51737, G3DSA:3.40.50.1390,Coil,IPR006119,IPR038109,IPR011109, SSF53041,PTHR30461,PS00397,PS51736,cd00338, PF00239
MKRAALYVRVSTQEQKNSGLSVDSQIDALEKYCEEQGYTVAGIYNDAGISARKKYTKRPALLQLLEDCKQCKIDIILFTRLDRWFRAVAGYYEVQSVLDACKVPWRAIWEDYETETSQGIFKVNIMLSVAQAEADRDSEKIRSVMGFKRNNKEYIGGKVPVGYRIEGKKIVKDEKTRGIIEDMFEHYFQTFSKAGTADYILSKYPDFVRTRTRLVKIMSSPAYRGEMYGVKNYCEPYITEEQAQKINEVSSQKTWTDCRRRIYIFSGLMKCPICGCRLSGCAIGKKGKKYKVYHCPHSVAQKHKTYTRSEKKLETYMLDHIEEKIQLDVLRAEGRVKAGGNDAEKRKKKLSSELGRINKMFEKGRITEEYYDERYEAISKELKELSQTAATEELETKKKIQSRFPDGWKDMYMQLGEQDKQVFWKSIVKEIKISPDTYVEDIIFF

SEQ ID NO: 9070 - protein, 445 aa, Unknown
  Description of Unknown: Integrase B9071 sequence
  SM00857,IPR006118,G3DSA:1.10.10.2600,IPR036162,PS51737, G3DSA:3.40.50.1390,Coil,IPR006119,IPR038109,SSF53041, IPR011109,PTHR30461,PS00397,PS51736,cd00338, PF00239
MKRAALYVRVSTQEQKNSGLSVDSQIDALEKYCEEQGYTVAGIYNDAGISARKKYTKRPALLQLLEDCKQCKIDIILFTRLDRWFRAVAGYYEVQSVLDACKVPWRAIWEDYETETSQGIFKVNIMLSVAQAEADRDSEKIRSVMEFKRNNKEYIGGKVPVGYRIEGKKIVKDEKTRGIIEDMFEHYFQTFSKAGTADYILSKYPGFVRTRTRLVKIMSSPAYRGEMYGVKNYCEPYITEEQAQKISEVSSQKTWTDCKRRIYIFSGLMKCPLCGCRLSGCAIGKKGKKYKVYHCPHSVAQKHKTYTRSEKKLETYMLDHIEEKIQLDVLRAEGRVKAAGNDVGKRKKKLSSELGRINKMFEKGRITEEYYDERYEAISKELKELSQTAATEELETKKKIQSRFPDGWKDMYMQLGEQDKQVFWKSIVKEIKISPDTYVEDIIFF

SEQ ID NO: 9071 - protein, 445 aa, Unknown
  Description of Unknown: Integrase B9072 sequence
  SM00857,IPR006118,G3DSA:1.10.10.2600,IPR036162,PF13408, IPR025827,G3DSA:3.40.50.1390,PS51737,Coil,IPR006119, IPR038109,SSF53041,IPR011109,PTHR30461,PS00397, PS51736,cd00338,PF00239
MKRAALYVRVSTQEQKNSGLSVDSQIDALEKYCEEQGYTVAGVYNDAGISARKKYTKRPALLQLLEDCKRHEIDIILFTRLDRWFRAVAGYYEVQSVLDACKVPWRAIWEDYETETSQGIFKVNIMLSVAQAEADRDSEKIRSVMEFKRQNKEYIGGKVPVGYRVEGKKIVKDEKMRGIIEDMFEHYFQTFSKMETADYILSKYPDFIRTRTRIVKIMSSPAYHGEMYGVKNYCEPYITEEQAQRIKEVSSQKSWADCKRRIYIFSGLIRCPICGYRFSGRTMAKKEKRYKVYQCPRSAAKKHKTYTRSEPKLEKYMLNHIEEKIQLDILRAEGRVKAAGNDVGKRKKKLSSELGRINKMFEKGRITEEYYDERYEAISKELKELSQTAATEELETKKKIQSKFPDGWKDMYMQLDEQGKQVFWKSIVKEIKISPNEFVEDIIFF

SEQ ID NO: 9072 - protein, 445 aa, Unknown
  Description of Unknown: Integrase B9073 sequence
  SM00857,IPR006118,G3DSA:1.10.10.2600,IPR036162,PS51737, G3DSA:3.40.50.1390,Coil,IPR006119,IPR038109,SSF53041, IPR011109,PTHR30461,PS00397,PS51736,cd00338, PF00239
MKRAALYVRVSTQEQKNSGLSVDSQIDALEKYCEEQGYTVAGIYNDAGISARKKYTKRPALLQLLEDCKKHEIDIILFTRLDRWFRAVAGYYEVQNVLDACKVPWRAIWEDYETETSQGIFKVNIMLSVAQAEADRDSEKIRSVMEFKRQNKEYIGGKVPVGYRVEGKTIVKDEKTRGIIEDMFEHYFQTFSKAGTADYILSKYPDFVRTRTRLVKIMSSPAYRGEMYGVKNYCEPYITEEQAQKINEVSSQKTWTDCRRRIYIFSGLMKCPICGCRLSGCAIGKKGKKYKVYHCPHSVAQKHKTYTRSEKKLETYMLNHIEEKIQLDVLRAEGRVKATGNDAEKRKKKLSSELGRINKMFEKGRITEEYYDERYEAISKELKELSQTAATEELETKKKIQSRFPDGWKDMYMQLGEQDKQVFWKSIVKEIKISPDTYVEDIIFF

SEQ ID NO: 9073 - protein, 445 aa, Unknown
  Description of Unknown: Integrase B9074 sequence
  SM00857,IPR006118,G3DSA:1.10.10.2600,IPR036162,PF13408, PS51737,IPR025827,G3DSA:3.40.50.1390,Coil,IPR006119, IPR038109,SSF53041,IPR011109,PTHR30461,PS00397, PS51736,cd00338,PF00239
MKRAALYVRVSTQEQKNSGLSVDSQIDALEKYCEEQGYTVAGVYNDAGISARKKYTKRPALLQLLEDCKKHEIDIILFTRLDRWFRAVAGYYEVQSVLDACKVPWRAIWEDYETETSQGIFKVNIMLSVAQAEADRDSEKIRSVMEFKRQNKEYIGGKVPVGYRVEGKKIVKDEKMRGIIEDMFEHYFQTFSKWGTADYILSKYPDFIRTRNRIVKIMSSPAYHGEMYGVKNYCEPYITEEQAQRIKEVSSQKSWVDCKRRIYIFSGLIRCPICGYKFSGRTMAKKEKRYKVYQCPRSAAKKHKTYTRSEPKLETYMLNHIEEKIQSDVLRAEGRVKAAGNDVEKRKKKLSSELGRINKMFEKGRITEEYYDERYEAISKELKELSQTAATEELETKKKIQSRFPDGWKDMYMQLDEQGKQVFWKSIVKEIKISPDTYVEDIIFF

SEQ ID NO: 9074 - protein, 445 aa, Unknown
  Description of Unknown: Integrase B9075 sequence
  SM00857,IPR006118,G3DSA:1.10.10.2600,IPR036162,PS51737, G3DSA:3.40.50.1390,Coil,IPR006119,IPR038109,IPR011109, SSF53041,PTHR30461,PS00397,PS51736,cd00338, PF00239
MKRAALYVRVSTQEQKNSGLSVDSQIDALEKYCEEQGYTVAGIYNDAGISARKKYTKRPALLQLLEDCKKQEIDIILFTRLDRWFRAVAGYYEVQSVLDACKVPWRAIWEDYETETSQGIFKVNIMLSVAQAEADRDSEKIRSVMEFKRNNKEYIGGKVPVGYRIEGKKIVKDEKTRGIIEDMFEHYFQTFSKAGTADYILSKYPGFVRTRTRLVKIMSSPAYRGEMYGVKNYCEPYITEEQAQKISEVSSQKTWTDCKRRIYIFSGLMKCPLCGCRLSGCAIGKKGKKYKVYHCPHSVAQKHKTYTRSEKKLETYMLDHIEEKIQLDVLKAEGRVKASGNDVEKRKKKLSSELGRINKMFEKGRITEEYYDERYEAISKELKELSQTAATEELETKKKIQSRFPDGWKDMYMQLNEQGKQVFWKSIVKEIKISPNEFVEDIIFF

SEQ ID NO: 9075 - protein, 445 aa, Unknown
  Description of Unknown: Integrase B9076 sequence
  SM00857,IPR006118,G3DSA:1.10.10.2600,IPR036162,PS51737, G3DSA:3.40.50.1390,Coil,IPR006119,IPR038109,IPR011109, SSF53041,PTHR30461,PS00397,PS51736,cd00338, PF00239
MKRAALYVRVSTQEQKNSGLSVDSQIDALEKYCEEQGYTVAGIYNDAGISARKKYTKRPALLRLLEDCRQCKIDIILFTRLDRWFRAVAGYYEVQSVLDACKVPWRAIWEDYETETSQGIFKVNIMLSVAQAEADRDSEKIRSVMEFKRQNKEYIGGKVPVGYRVEGKTIVKDEKTRGIIEDMFEHYFQTFSKMGTADYILNKYPDFIRTRTRIVKIMSSPAYHGEMYGVKNYCEPYITEEQAQKINEVSSQKTWTDCRRRIYIFSGLMKCPLCGCRLSGCAIGKKGKKYKVYHCPHSVAQKHKTYTRSEKKLETYMLNHIEEKIQLDVLRAEGRVKATGNDAEKRKKKLSSELGRINKMFEKGRITEEYYDERYEAISKELKELSQTAATEELETKKKIQSRFPDGWKDMYMQLGEQDKQVFWKSIVKEIKISPNEFVEDIIFF

SEQ ID NO: 9076 - protein, 445 aa, Unknown
  Description of Unknown: Integrase B9077 sequence
  SM00857,IPR006118,G3DSA:1.10.10.2600,IPR036162,PF13408, IPR025827,G3DSA:3.40.50.1390,PS51737,Coil,IPR006119, IPR038109,IPR011109,SSF53041,PTHR30461,PS00397, PS51736,cd00338,PF00239
MKRAALYVRVSTQEQKNSGLSVDSQIDALEKYCEEQGYTVAGIYNDAGISARKKYTKRPALLQLLEDCKKHEIDIILFTRLDRWFRAVAGYYEVQSVLDACKVPWRAIWEDYETETSQGIFKVNIMLSVAQAEADRDSEKIRSVMEFKRQNKEYIGGKVPVGYRVEGKKIVKDEKMRGIIEDMFEHYFQTFSKMETADYILSKYPDFIRTRTRIVKIMSSPAYHGEMYGVKNYCEPYITEEQAQRIKEVSSQKSWVDCKRRIYIFSGLIRCPICGYRFSGRTMAKKEKRYKVYQCPRSAAKKHKTYTRSEPKLETYMLNHIEEKIQLDVLRVEGRVKAAGSDVGKRKKKLSSELGRINKMFEKGRITEEYYDERYEAISKELKELSQTAATEELETKKKIQSRFPDGWKDMYMQLDEQGKQVFWKSIVKEIKISPNEFVEDIIFF

SEQ ID NO: 9077 - protein, 445 aa, Unknown
  Description of Unknown: Integrase B9078 sequence
  SM00857,IPR006118,G3DSA:1.10.10.2600,IPR036162,PS51737, G3DSA:3.40.50.1390,Coil,IPR006119,IPR038109,SSF53041, IPR011109,PTHR30461,PS00397,PS51736,cd00338, PF00239
MKRAALYVRVSTQEQKNSGLSVDSQIDALEKYCEEQGYTVAGIYNDAGISARKKYTKRPALLQLLDDCRQCKIDIILFTRLDRWFRAVAGYYEVQNVLDACKVPWRAIWEDYETETSQGIFKVNIMLSVAQAEADRDSEKIRSVMEFKRNNKEYIGGKVPVGYRIEGKKIVKDEKTRGIIEDMFEHYFQTFSKAGTADYILSKYPDFVRTRTRLVKIMSSPAYRGEMYGVKNYCEPYITEEQAQKINEVSSQKTWTDCRRRIYIFSGLMKCPLCGCRLSGCAIGKKGKKYKVYHCPHSVAQKHKTYTRSEKKLETYMLDHIEEKIQLDVLRAEGRVKAAGNDVGKRKKKLSSELGRINKMFEKGRITEEYYDERYEAISKELKELSQTAATEELETKKKIQSRFPDGWKDMYMQLGEQDKQVFWKSIVKEIKISPDTYVEDIIFF

SEQ ID NO: 9078 - protein, 445 aa, Unknown
  Description of Unknown: Integrase B9079 sequence
  SM00857,IPR006118,G3DSA:1.10.10.2600,IPR036162,PF13408, IPR025827,PS51737,G3DSA:3.40.50.1390,Coil,IPR006119, IPR038109,IPR011109,SSF53041,PTHR30461,PS00397, PS51736,cd00338,PF00239
MKRAALYVRVSTQEQKNSGLSVDSQIDALEKYCEEQGYTVAGVYNDAGISARKKYTKRPALLQLLEDCKKHEIDIILFTRLDRWFRAVAGYYEVQSVLDACKVPWRAIWEDYETETSQGVFKVNIMLSVAQAEADRDSEKIRSVMEFKRNNKEYIGGKVPVGYRVENKKIVKDEKMRGIIEDMFEHYFQTFSKWGTADYILSKYPDFIRTRTRIVKIMSSPAYHGEMYGVKNYCEPYITEEQAQRIKEVSSQKSWVDCKRRIYIFSGLIRCPICGYKFSGCTMVKKEKRYKVYRCPRSAAKKHKTYTRSEPKLETYMLNHIEEKIQLDVLRAEGRVKAAGNDVGKRKKKLSSELGRINKMFEKGRITEEYYDERYEAISKELKQLSQTAATEELETKKKIQSKFPDGWKDMYMQLDEQGKQVFWKSIVKEIKISPNEFVEDIIFF

SEQ ID NO: 9079 - protein, 445 aa, Unknown
  Description of Unknown: Integrase B9080 sequence
  SM00857,IPR006118,G3DSA:1.10.10.2600,IPR036162,PF13408, IPR025827,G3DSA:3.40.50.1390,PS51737,Coil,IPR006119, IPR038109,IPR011109,SSF53041,PTHR30461,PS00397, PS51736,cd00338,PF00239
MKRAALYVRVSTQEQKNSGLSVDSQIDALEKYCEEQGYIVAGIYNDAGISARKKYTKRPALLQLLEDCKKHEIDIILFTRLDRWFRAVAGYYEVQSVLDACKVPWRAIWEDYETETSQGIFKVNIMLSVAQAEADRDSEKIRSVMEFKRQNKEYIGGKVPVGYRVEGKKIVKDEKMRGIIEDMFEHYFQTFSKWGTADYILSKYPDFIRTRTRIVKIMSSPAYHGEMYGVKNYCEPYITEEQAQRIKEVSSQKSWVNCKRRIYIFSGLIRCPICGYRFSGRTMAKKEKRYKVYQCPRSAAKKHKTYTRSEPKLEKYMLDHIEEKIQLDVLRAEGRVKAAGNDVGKRKKKLSSELGRINKMFEKGRITEEYYDERYEAISKELKELSQTAATEELETKKKIQSKFPDGWKDIYMQLDEQGKQVFWKSIVKEIKISPNEFVEDIIFF

SEQ ID NO: 9080 - protein, 445 aa, Unknown
  Description of Unknown: Integrase B9081 sequence
  SM00857,IPR006118,G3DSA:1.10.10.2600,IPR036162,PS51737, G3DSA:3.40.50.1390,Coil,IPR006119,IPR038109,SSF53041, IPR011109,PTHR30461,PS00397,PS51736,cd00338, PF00239
MKRAALYVRVSTQEQKNSGLSVDSQIDALEKYCEEQGYTVAGIYNDAGISARKKYTKRPALLQLLEDCKQCKIDIILFTRLDRWFRAVAGYYEVQSVLDACKVPWRAIWEDYETETSQGIFKVNIMLSVAQAEADRDSEKIRSVMEFKRNNKEYIGGKVPVGYRIEGKKIVKDEKTRGIIEDMFEHYFQTFSKAGTADYILSKYPGFVRTRTRLVKIMSSPAYRGEMYGVKNYCEPYITEEQAQKINEVSSQKTWTDCRRRIYIFSGLMKCPICGCRLSGCAIGKKGKKYKVYHCPHSVAQKHKTYTRSEKKLETYMLNHIEEKIQLDVLRAEGRVKAGGNDAEKRKKKLSSELGRINKMFEKGRITEEYYDERYEAISKELKELSQTAATEELETKKKIQSRFPDGWKDMYMQLGEQDKQVFWKSIVKEIKISPDTYVEDIIFF

SEQ ID NO: 9081 - protein, 445 aa, Unknown
  Description of Unknown: Integrase B9082 sequence
  SM00857,IPR006118,G3DSA:1.10.10.2600,IPR036162,PS51737, G3DSA:3.40.50.1390,Coil,IPR006119,IPR038109,SSF53041, IPR011109,PTHR30461,PS00397,PS51736,cd00338, PF00239
MKRAALYVRVSTQEQKNSGLSVDSQIDALEKYCEEQGYTVAGIYNDAGISARKKYTKRPALLQLLEDCKQCKIDIILFTRLDRWFRAVAGYYEVQSVLDACKVPWRAIWEDYETETSQGIFKVNIMLSVAQAEADRDSEKIRSIMGFKRNNKEYIGGKVPVGYRIEGKKIVKDEKTRGIIEDMFEHYFQTFSKAGTADYILSKYPGFVRTRTRLVKIMSSPAYRGEMYGVKNYCEPYITEEQAQKINEVSSQKTWTDCRRRIYIFSGLMKCPICGCRLSGCAIGKKGKKYKVYHCPHSVAQKHKTYTRSEKKLETYMLNHIEEKIQLDVLRAEGRVKAGGNDAEKRKKKLSSELGRINKMFEKGRITEEYYDERYEAISKELKELSQTAATEELETKKKIQSRFPDGWKDMYMQLGEQDKQVFWKSIVKEIKISPDTYVEDIIFF

SEQ ID NO: 9082 - protein, 445 aa, Unknown
  Description of Unknown: Integrase B9083 sequence
  PTHR30461:SF3,IPR036162,PS51737,IPR011109,PTHR30461, PS00397,PF00239,G3DSA:1.10.10.2600,IPR006119,SSF53041, cd00338,SM00857,IPR025827,IPR038109,PS51736, IPR006118,PF13408,G3DSA:3.40.50.1390,PF07508,Coil
MKNKRVALYIRVSTEEQARQGLSLDAQLTDLRAYADKHKYNIVGVYTDDGASARKKPFSRRAFKQLIEDIKQNKIDRVLFIKLDRWFRSVKDYYKAQEILDTHKVDWETTQEDYNTTTTNGRLMLNIKLSIAQNESDMTSDRIHFVFAQKRARHEICSGKIPFGYSVQGKKLIPNENAKYVQPLFEHFVKTQNLTEAARWMCGHGFYYTYASISHVLKNERYIGRSHGDDNFCQPLVTEELFYRAQKIIKSKKLIKRTPTGRIFLFTGLIRCPMCGHPYTGIGCVGKNNGKTYYYYQCPQSVSPFKACTHRGRVTEKKIEEALLDSFDEAYKDFQYSVKKKQKQQPVTTDVDKLKRKLERLKELFLNELIELDEYKKTHAELSAAIAEVEAPKIQPSAPLNYYLPGGIRPYYEKMTREQRRQFWQQTVDRIDLDEDNTPRITFLS

SEQ ID NO: 9083 - protein, 445 aa, Unknown
  Description of Unknown: Integrase B9084 sequence
  SM00857,G3DSA:1.10.10.2600,IPR036162,PS51737,G3DSA:3.40.50.1390, IPR006119,IPR038109,PF07508,IPR011109,SSF53041, PF00239,PTHR30461,PS51736,Coil,cd00338
MNCKVAIYARESTEKQDIDTLVSMCEAEAKKLGFTHYRIYKDIGTGYSNEREEYLKLLENIKLGKIKTIIIYEQSRMTRDELEHQILYRLFREHNVKLYVMNRGWIDPNDENDSFISGLLNLLEAKEGRTIAKRVRDRMMHLKDEGNWTGGPAPLGYKLIDKKLVIVPEEAEKVKEVFRLFINGENRTTIANLFGYEPKKVFRLLKNPVYIGRLKKNQIVIKNKKAIENKKFEIVNGKHEAIIDIGTFELAQDIINGIKREVGGIAALQDLLYCRCGSKIYKHGENYYSCKNLSCKSVAIKRSEVLETVLTSLESVINDLGEVEESEEDNILSKIYLYKKELKKLEVKKEKIFNKYLEDQIGEDLFNKNNKEVSNQIEIVKSQIENLKEFQNNKLRAQETRENIKVYYDKIKNTKDDKKINRLLKIIISKIEFVNDYRFYIHLKF

SEQ ID NO: 9084 - protein, 445 aa, Unknown
  Description of Unknown: Integrase B9085 sequence
  PTHR30461:SF3,IPR036162,PS51737,IPR011109,PTHR30461, PS00397,PF00239,G3DSA:1.10.10.2600,IPR006119,SSF53041, cd00338,SM00857,IPR025827,IPR038109, PS51736,IPR006118,PF13408,G3DSA:3.40.50.1390,Coil
MNVIRGVGYIRVSTAEQATRGLSLDAQEAEIRAYAKAHGIELFNIYVDAGITARKRLDRREAFGQMMKDVDSGLIDEIIVMRLDRWFRNIYDYHKMMNEHLIPHGVNWSAVKEDYDTKTTNGRLMINLRLAIAEQECDTDGDRIRDIHDNQIANGIWIGGCAPPGYRIENKRLSIDPDMQPAVSYFFERLLSCGSVRRAMLDMNERHNLHFEYGQAIRMARSTTYCGVRRENYNYCPTYISQDEHAQIMAALEHNVRVRSADNARIHIFSGLLVCSCCGRRLAANTVRKKSVTWTAYRCHRAFGDHVCDNRHLVDERKVEAWLLDYLENGLSDYIVSASVADAQPVVVDNTAAIRERQERVKELFINGFIDLQEYKRRAAELEAKIQVPEKQQPRSMEKLKSLLERGVRAIYNDLSRGERQEFWRSIIREIPVNNGAVSGDPIFL

SEQ ID NO: 9085 - protein, 445 aa, Unknown
  Description of Unknown: Integrase B9086 sequence
  PTHR30461:SF3,SM00857,G3DSA:1.10.10.2600,IPR036162,PF13408, PS51737,G3DSA:3.40.50.1390,IPR025827,IPR006119,IPR038109, IPR011109,SSF53041,PF00239,PTHR30461,PS51736, Coil,cd00338
MKRVALYMRVSTEEQALHGYSLPAQKDALHQYAKDHNMTVVGEYVDEGISGRKSASKRPALARMLRDVEAGKIDQILFIKLDRWFRSVKEYYRVQEVLDRNKVTWRTILEDYNTESADGILKVNIMLSVAQNEAERTGERIKFVLDNKAQKKQVVGKQPYGYKIAIVEGEKKSVIDEETAPVVHDIFNTFDRTNSASLTTKYINEKHGTDFSAVFIRRLLHRSAYAGEYMGISGYRPQYISRERFDKNQEIFRGSHIKRTPTGRVYIFTGILFCAHCGHRMKGKYTTVKYYCCPRATDDYSCENHKHISELKIEKYLVSHIRRLMSEYIVAAETKESATKRSDAASEVMSLRQKIERLNDIYLEGNMDKETYRRRTEQLKQNLAQAEEQYQRSQPKNISHLKEILNTDFLADYDLLTDENKRSLWRRIITRIEMNDQQNLKVFFS

SEQ ID NO: 9086 - protein, 445 aa, Unknown
  Description of Unknown: Integrase B9087 sequence
  SM00857,IPR006118,G3DSA:1.10.10.2600,IPR036162,PS51737, G3DSA:3.40.50.1390,Coil,IPR006119,IPR038109,SSF53041, IPR011109,PTHR30461,PS00397,PS51736,cd00338, PF00239
MKRAALYVRVSTQEQKNSGLSVDSQIDALEKYCEEQGYTVAGIYNDAGISARKKYTKRPALLQLLEDCKKHEIDIILFTRLDRWFRAVAGYYEVQSVLDACKVPWRAIWEDYETETSQGIFKVNIMLSVAQAEADRDSEKIRSVMEFKRNNKEYIGGKVPVGYRIEGKKIVKDEKTRGIIEDMFEHYFQTFSKAGTADYILNKYPNFARTRTRLVKIMSSPAYRGEMYGVKNYCEPYITEEQAQKINEVSSQKTWTDCRRRIYIFSGLMKCPICGCRLSGCAIGKKGKKYKVYHCPHSVAQKHKTYTRSEKKLETYMLNHIEEKIQLDVLRAEGRVKAAGNDVGKRKKKLSSELGRINKMFEKGRITEEYYDERYEAISKELKELSQTAATEELETKKKIQSRFPDGWKDMYMQLGEQDKQVFWKSIVKEIKISPDTYVEDIIFF

SEQ ID NO: 9087 - protein, 445 aa, Unknown
  Description of Unknown: Integrase B9088 sequence
  SM00857,IPR006118,G3DSA:1.10.10.2600,IPR036162,PF13408, PS51737,G3DSA:3.40.50.1390,IPR025827,Coil,IPR006119, IPR038109,IPR011109,SSF53041,PTHR30461,PS00397, PS51736,cd00338,PF00239
MKRAALYVRVSTQEQKNSGLSVDSQIDALEKYCEEQGYTVAGIYNDAGISARKKYTKRPALLQLLEDCKKHEIDIILFTRLDRWFRAVAGYYEVQSVLDACKVPWRAIWEDYETETSQGIFKVNIMLSVAQAEADRDSEKIRSVMEFKRQNKEYIGGKVPVGYRVEGKRIVKDEKMRAIIEDMFEHYFQTFSKMETADYILSKYPDFIRTRTRIVKIMSSPAYHGEMYGVKNYCEPYITEEQAQRIKEVSSQKSWIDCKRRIYIFSGLIRCPICGYRFSGRTMAKEEKRYKVYQCPRSAAKKHKTYTRSEPKLETYMLNHIEEKIQLDVLRVEGRVKAAGSDVGKRKKKLSSELGRINKMFEKGRITEEYYDERYEAISKELKELSQTAATEELETKKKIQSRFPDGWKDMYMQLDEQGKQVFWKSIVKEIKISPNEFVEDIIFF

SEQ ID NO: 9088 - protein, 445 aa, Unknown
  Description of Unknown: Integrase B9089 sequence
  SM00857,IPR006118,G3DSA:1.10.10.2600,IPR036162,PS51737, G3DSA:3.40.50.1390,Coil,IPR006119,IPR038109,IPR011109, SSF53041,PTHR30461,PS00397,PS51736,cd00338, PF00239
MKRAALYVRVSTQEQKNSGLSVDSQIDALEKYCEEQGYTVAGIYNDAGISARKKYTKRPALLQLLEDCRQHKIDIILFTRLDRWFRAVAGYYEVQSVLDACKVPWRAIWEDYETETSQGIFKVNIMLSVAQAEADRDSEKIRSVMEFKRSNKEYIGGKVPVGYRVEGKKIVKDEETRGIIEDMFEHYFQTFSKAGTADYILNKYPDFIRTRTRIVKIMSSPAYHGEMYGVKNYCEPYITEEQAQKINEISSQKTWTDCKRRIYIFSGLMKCPLCGCRLSGCAIGKKGKKYKVYHCPHSVAQKHKTYTRSEKKLETYMLDHIEEKIQLDVLKAEGRVKAGGNDAEKRKKKLSSELGRINKMFEKGRITEEYYDERYESISKELKELSQTAATEELETKKKIQSKFPDGWKDMYMQLDEQGKQVFWKSIVKEIKISPDTYVEDIIFF

SEQ ID NO: 9089 - protein, 445 aa, Unknown
  Description of Unknown: Integrase B9090 sequence
  cd00338,SM00857,IPR006118,G3DSA:1.10.10.2600,IPR036162, PF13408,PS51737,G3DSA:3.40.50.1390,IPR025827,IPR006119, IPR038109,IPR011109,SSF53041,PTHR30461,PS00397, PS51736,Coil,PF00239
MQNVRIYARVSTAEQKKKDISIPVQIDACRRYCTDHNYNIVGTYIDNGYSASSIKKRKEFKRMIEDVRRDEYILFTRLDRFSRNILDANKIVEALDKKNVSIVSIFEDDINTSTADGRFMFNLRVSLSQREIEKDSERILDVMQAKVAKGEVLTGRLPVGYKIENKKPVIDENQVEMVKDTFSTYIDTGNWDVAARILSKKYNTYISDTKVRGIIKNRRYIGEFRGIKDYFPRIIDDETFFEANNISKNKYVKHSKNEVTYLFSGLLRCEFCGRRMASSHRKNLSNSNYYICSRRENGKTAQHFAKSERKIELALLNEFEKLLNDRILELDKAERKRNTLSEDNISKIKNLKTKMKRIKNLYIDGFISENEFKSKYSRTEKELLELEMNCSTDIEQKRERYQYILDNKILTLYKTFSREQKAIFWRTIIDHIVVHKDDSLDIFLR

SEQ ID NO: 9090 - protein, 445 aa, Unknown
  Description of Unknown: Integrase B9091 sequence
  SM00857,IPR006118,G3DSA:1.10.10.2600,IPR036162,PS51737, G3DSA:3.40.50.1390,Coil,IPR006119,IPR038109,SSF53041, IPR011109,PTHR30461,PS00397,PS51736,cd00338, PF00239
MKRAALYVRVSTQEQKNSGLSVDSQIDALEKYCEEQGYTVAGIYNDAGISARKKYTKRPALLQLLEDCKKHEIDIILFTRLDRWFRAVAGYYEVQSVLDACKVPWRAIWEDYETETSQGIFKVNIMLSVAQAEVDRDSEKIRSVMEFKRNNKEYIGGKVPVGYRIEGKKIVKDEKTRGIIEDMFEHYFQTFSKAGTADYILSKYPGFVRTRTRLVKIMSSPAYRGEMYGVKNYCEPYITEEQAQKINEVSSQKTWTDCRRRIYIFSGLMKCPICGCRLSGCAIGKKGKKYKVYHCPHSVAQKHKTYTRSEKKLETYMLNHIEEKIQLDVLRAEGRVKAGGNDAEKRKKKLSSELGRINKMFEKGRITEEYYDERYEAISKELKELSQTAATEELETKKKIQSRFPDGWKDMYMQLGEQDKQVFWKSIVKEIKISPDTYVEDIIFF

SEQ ID NO: 9091 - protein, 445 aa, Unknown
  Description of Unknown: Integrase B9092 sequence
  SM00857,IPR006118,G3DSA:1.10.10.2600,IPR036162,PS51737, G3DSA:3.40.50.1390,Coil,IPR006119,IPR038109,SSF53041, IPR011109,PTHR30461,PS00397,PS51736,cd00338, PF00239
MKRAALYVRVSTQEQKNSGLSVDSQIDALEKYCEEQGYTVAGIYNDAGISARKKYTKRPALLQLLEDCKKHEIDIILFTRLDRWFRAVAGYYEVQSVLDACKVPWRAIWEDYETETSQGIFKVNIMLSVAQAEADRDSEKIRSVMEFKRNNKEYIGGKVPVGYRIEGKKIVKDEKTRGIIEDMFEHYFQTFSKAGTADYILSKYPGFVRTRTRLVKIMSSPAYRGEMYGVKNYCEPYITEEQAQKINEVSSQKTWTDCRRRIYIFSGLMKCPICGCRLSGCAIGKKGKKYKVYHCPHSVAQKHKTYTRSEKKLETYMLNHIEEKIQLDVLRVEGRVKAGGNDAEKRKKKLSSELGRINKMFEKGRITEEYYDERYEAISKELKELSQTAATEELETKKKIQSRFPDGWKDMYMQLGEQDKQVFWKSIVKEIKISPDTYVEDIIFF

SEQ ID NO: 9092 - protein, 445 aa, Unknown
  Description of Unknown: Integrase B9093 sequence
  SM00857,IPR006118,G3DSA:1.10.10.2600,IPR036162,PS51737, G3DSA:3.40.50.1390,Coil,IPR006119,IPR038109,IPR011109, SSF53041,PTHR30461,PS00397,PS51736,cd00338, PF00239
MKRAALYVRVSTQEQKNSGLSVDSQIDALEKYCKEQGYIVAGIYNDAGISARKKYTKRPALLRLLEDCKKHEIDIILFTRLDRWFRAVAGYYEVQSVLDACKVPWRAIWEDYETETSQGIFKVNIMLSVAQAEADRDSEKIRSVMEFKRNNKEYIGGKVPVGYRIEGKKIVKDEKTRGIIEDMFEHYFQTFSKAGTADYILSKYPNLVRTRTRLVKIMSSPAYRGEMYGVKNYCEPYITEEQAQKINEVSSQKTWTDCKRRIYIFSGLMKCPLCGCRLSGCAIGKKGKKYKVYHCPHSVAQKHKTYTRSEKKLETYMLDHIEEKIQLDVLKAEGRVKASGNDVEKRKKKLSSELGRINKMFEKGRITEEYYDERYEAISKELKELSQTAATEELETKKKIQSRFPDDWKDMYMQLDEQGKQVFWKSIVKEIKISPNEFVEDIIFF

SEQ ID NO: 9093 - protein, 445 aa, Unknown
  Description of Unknown: Integrase B9094 sequence
  SM00857,IPR006118,G3DSA:1.10.10.2600,IPR036162,PF13408, PS51737,G3DSA:3.40.50.1390,IPR025827,Coil,IPR006119, IPR038109,SSF53041,IPR011109,PTHR30461,PS00397, PS51736,cd00338,PF00239
MKRAALYVRVSTQEQKNSGLSVDSQIDALKKYCEEQGYIVAGIYNDAGISARKKYTKRPALLQLLEDCKKHEIDIILFTRLDRWFRAVAGYYEVQSVLDACKVPWRAIWEDYETETSQGIFKVNIMLSVAQAEADRDSEKIRSVMEFKRQNKEYIGGKVPVGYRVEGKKIVKDEKMRGIIEDMFEHYFQTFSKMETADYILSKYPDFIRTRTRIVKIMSSPAYHGEMYGVKNYCEPYITEEQAQRIKEVSSQKSWVDCKRRIYIFSGLIRCPICGYRFSGRTMAKKEKRYKVYQCPRSAAKKHKTYTRSEPKLETYMLNHIEEKIQLDVLRVEGRVKAAGSDVGKRKKKLSSELGRINKMFEKGRITEEYYDERYEAISKELKELSQTAATEELETKKKIQSRFPDGWKDMYMQLDEQGKQVFWKSIVKEIKISPNEFVEDIIFF

SEQ ID NO: 9094 - protein, 445 aa, Unknown
  Description of Unknown: Integrase B9095 sequence
  SM00857,IPR006118,G3DSA:1.10.10.2600,IPR036162,PS51737, G3DSA:3.40.50.1390,Coil,IPR006119,IPR038109,SSF53041, IPR011109,PTHR30461,PS00397,PS51736,cd00338, PF00239
MKRAALYVRVSTQEQKNSGLSVDSQIDALEKYCEEQGYTVAGIYNDAGISARKKYTKRPALLQLLEDCKKHEIDIILFTRLDRWFRAVAGYYEVQNILDACKVPWRAIWEDYETETSQGIFKVNIMLSVAQAEADRDSEKIRSVMEFKRNNKEYIGGKVPVGYRIEGKKIVKDEKTRGIIEDMFEHYFQTFSKAGTADYILSKYPDFVRTRTRLVKIMSSPAYRGEMYGVKNYCEPYITEEQAQKINEVSSQKTWTDCRRRIYIFSGLMKCPLCGCRLSGCAIGKKGKKYKVYHCPHSVAQKHKTYTRSEKKLETYMLNHIEEKIQLDVLRAEGRVKAGGNDAEKRKKKLSSELGRINKMFEKGRITEEYYDERYEAISKELKELSQTAATEELETKKKIQSRFPDGWKDMYMQLGEQDKQVFWKSIIKEIKISPDTYVEDIIFF

SEQ ID NO: 9095 - protein, 445 aa, Unknown
  Description of Unknown: Integrase B9096 sequence
  SM00857,IPR006118,G3DSA:1.10.10.2600,IPR036162,PS51737, G3DSA:3.40.50.1390,Coil,IPR006119,IPR038109,SSF53041, IPR011109,PTHR30461,PS00397,PS51736,cd00338, PF00239
MKRAALYVRVSTQEQKNSGLSVDSQIDALEKYCEEQGYTVAGIYNDAGISARKKYTKRPALLQLLEDCRQCKIDIILFTRLDRWFRAVAGYYEVQNVLDACKVPWRAIWEDYETETSQGIFKVNIMLSVAQAEADRDSEKIRSVMEFKRNNKEYIGGKVPVGYRIEGKKIVKDEKTRGIIEDMFEHYFQTFSKAGTADYILSKYPDFVRTRTRLVKIMSSPAYRGEMYGVKNYCEPYITEEQAQKINEVSSQKTWTDCRRRIYIFSGLMKCPLCGCRLSGCAIGKKGKKYKVYHCPHSVAQKHKTYTRSEKKLETYMLDHIEEKIQLDVLKAEGRVKAGGNDAEKRKKKLSSELGRINKMFEKGRITEEYYDERYEAISKELKELSQTAATEELETKKKIQSKFPDGWKDMYMQLDEQGKQVFWKSIVKEIKISPDTYVEDIIFF

SEQ ID NO: 9096 - protein, 445 aa, Unknown
  Description of Unknown: Integrase B9097 sequence
  SM00857,IPR006118,G3DSA:1.10.10.2600,IPR036162,PS51737, G3DSA:3.40.50.1390,Coil,IPR006119,IPR038109,SSF53041, IPR011109,PTHR30461,PS00397,PS51736,cd00338, PF00239
MKRAALYVRVSTQEQKNSGLSVDSQIDALEKYCEEQGYTVAGIYNDAGISARKKYTKRPALLQLLEDCKKHEIDIILFTRLDRWFRAVAGYYEVQSVLDACKVPWRAIWEDYETETSQGIFKVNIMLSVAQAEADRDSEKIRSVMEFKRNNKEYIGGKVPVGYRIEGKKIVKDEKTRGIIEDMFEHYFQTFSKAGTADYILSKYPGFVRTRTRLVKIMSSPAYRGEMYGVKNYCEPYITEEQAQKINEVSSQKTWTDCRRRIYIFSGLMKCPICGCRLSGCAIGKKGKKYKVYHCPHSVAQKHKTYTRSEKKLETYMLNHIEEKIQLDVLRAEGRVKAGGNDVEKRKKKLSSELGRINKMFEKGRITEEYYDERYEAISKELKELSQTAATEELETKKKIQSRFPDGWKDMYMQLGEQDKQVFWKSIVKEIKISPDTYVEDIIFF

SEQ ID NO: 9097 - protein, 445 aa, Unknown
  Description of Unknown: Integrase B9098 sequence
  SM00857,IPR006118,G3DSA:1.10.10.2600,IPR036162,PS51737, G3DSA:3.40.50.1390,Coil,IPR006119,IPR038109,IPR011109, SSF53041,PTHR30461,PS00397,PS51736,cd00338, PF00239
MKRAALYVRVSTQEQKNSGLSVDSQIDALEKYCEEQGYTVAGIYNDAGISARKKYTKRPALLQLLEDCKKHEIDVILFTRLDRWFRAVAGYYEVQSVLDACKVPWRAIWEDYETETSQGIFKVNIMLSVAQAEADRDSEKIRSVMEFKRNNKEYIGGKVPVGYRIEGKKIVKDEKTRGIIEDMFEHYFQTFSKAGTADYILSKYPGFVRTRTRLVKIMSSPAYRGEMYGVKNYCEPYITEEQAQKINEVSSQKTWTDCRRRIYIFSGLMKCPICGCRLSGCAIGKKGKKYKVYHCPHSVAQKHKTYTRSEKKLETYMLNHIEEKIQLDVLRAEGRVKAGGNDAEKRKKKLSSELGRINKMFEKGRITEEYYDERYEAISKELKELSQTAATEELETKKKIQSRFPDGWKDMYMQLEEQGKQVFWKSIVKEIKISPNEFVEDIIFF

SEQ ID NO: 9098 - protein, 445 aa, Unknown
  Description of Unknown: Integrase B9099 sequence
  SM00857,IPR006118,G3DSA:1.10.10.2600,IPR036162,PF13408, IPR025827,PS51737,Coil,G3DSA:3.40.50.1390,IPR006119, IPR038109,SSF53041,IPR011109,PTHR30461,PS00397, PS51736,cd00338,PF00239
MKRAALYVRVSTQEQKNSGLSVDSQIDALEKYCEEQEYIVAGIYNDAGISARKKYTKRPALLRLLEDCKKHEIDIILFTRLDRWFRAVAGYYEVQSVLDACKVPWRAIWEDYETETSQGIFKVNIMLSVAQAEADRDSEKIRSVMEFKRQNKEYIGGKVPVGYRVEGKKIVKDENMREIIEDMFEHYFQTFSKWGTADYILSKYPDFIRTRNRIVKIMSSPAYHGEMYGVKNYCEPYITEEQAQRIKEVSSQKSWVDCKRRIYIFSGLIRCPICGYKFSGCTMVKKEKRYKVYRCPRSAAKKHKTYTRSEPKLETYMLNHIEEKIQSDVLRAEGRVKAAGNDIGKRKKKLSSELGRINKMFEKGRITEEYYDERYEAISKELKELSQTAATEELETKKKIQSKFPDGWKDMYMQLDEQGKQVFWKSIVKEIKISPNEFVEDIIFF

SEQ ID NO: 9099 - protein, 445 aa, Unknown
  Description of Unknown: Integrase B9100 sequence
  PTHR30461:SF3,IPR036162,PS51737,IPR011109,PTHR30461, PS00397,PF00239,G3DSA:1.10.10.2600,IPR006119,SSF53041, cd00338,SM00857,IPR025827,IPR038109,PS51736, IPR006118,PF13408,G3DSA:3.40.50.1390,Coil
MRAALYIRVSTEEQARHGLSLEDQKNNLTQFSKSHGMKIAGIYEDAGISARKPYKKRPALLRLLEDCKAGKIDLILFIKLDRWFRNVGNYYAVQEILDQYGVSWQATQEDYETTTASGRLKVNIMLSVAQDEADRTSERIKFVFEGKRARLEPLTGNIPFGYKIEGKSFKKDESKEALVNDFFKKYLASGSISKTSEFIREKYGVLMRYHLIDKMLRSTTYYGKYYNMDGMCPAYITKEDHEQIQAMRRKVVRKAKNNRTYLFSGLVVCPECGNRMGARINTKQTYVFYNCNGHYTKQNGCQNRVNLGERKIEEYLLATVANKFHEYKANFSALKNAEINKRSRAEISAAKSKLNKLKDLYLNDIITLEELKTDREALLAKISDLEKAALPEQKQDFESIDRVLTENWKESYDGLNREEKREFWRIIVKEIKIYPDRHIEYSLNV

SEQ ID NO: 9100 - protein, 445 aa, Unknown
  Description of Unknown: Integrase B9101 sequence
  SM00857,IPR006118,IPR036162,PF13408,PS51737, G3DSA:3.40.50.1390,Coil,IPR025827,IPR006119,IPR011109, SSF53041,PTHR30461,PS00397,PS51736,cd00338, PF00239
MEGKKRAAIYVRVSTVEQKEHGLSVDNQLDALKNYCQERGFSIAGIYNDAGISARKKYKSRPALLKLLEDCQKHKIDIILFTKLDRWFRSVADYYAVQQVLDGAKVPWRAIWEDYETETSAGVFKVNIMLSVAQAESDRTSERIKAVLEYKREHGHIIAGRMPLGYIRTSPSTIDYDPATKDAMQAFFDTYLDTYSPVAAMDAARKLGLRMSRKTAHFILDKEPYYGTYYGVDVPAYITPEQHKIIENARVHYPRTPKDDRVYIFTGLIFCASCGARMGSKLSKHIRANGEIIERGCYQCCTKVRRKDVCEKPAFVMEHKLEDYLIEHMSELITDYEASIAQSQEKAKDAEKEISRIKGKLQRLKDVYLDGDMGRAEYVEKTSQLKADMAELESQRVPLSPIKRLPDNWEEMYWQLSKGGKRDFWHRTIRRIEIDGKKVSKVFFL

SEQ ID NO: 9101 - protein, 445 aa, Unknown
  Description of Unknown: Integrase B9102 sequence
  PTHR30461:SF3,IPR036162,PS51737,IPR011109,PTHR30461, PS00397,PF00239,G3DSA:1.10.10.2600,IPR006119,SSF53041, cd00338,SM00857,IPR025827,IPR038109,PS51736, IPR006118,PF13408,G3DSA:3.40.50.1390,PF07508,Coil
MKNKRVALYIRVSTEEQARQGLSLDAQLTDLRSYADKHKYNIVGIYTDDGASARKKPFSRRAFKQLIEDIKQNKIDRVLFIKLDRWFRSVKDYYKAQEILDTHKVDWETTQEDYNTTTTNGRLMLNIKLSIAQNESDMTSDRIHFVFAQKRARHEICSGKIPFGYSVQDKKLVPNENAKYVQPLFEHFVKTQNLTEAARWMCGHGFYYTYASISHVLKNERYIGRSHGDDNFCQPLVTEDVFYKAQKIIKSKKLIKRTPTGRIFLFTGLIRCPMCGHPYTGIGCVGKNNGKTYYYYQCPQSVSPFKACTHRGRVTEKKIEEALLDSFDEAYKDFQYSVKKKQKQQPVTTDIDKLKRKLERLKELFLNELIDLDEYKKTHAELSAAIAEAETPKIQPSTPLNYYLPGGIRPYYEKMTREQRRQFWHQTVDRIDIDEDDRPRITFIS

SEQ ID NO: 9102 - protein, 445 aa, Unknown
  Description of Unknown: Integrase B9103 sequence
  SM00857,IPR006118,G3DSA:1.10.10.2600,IPR036162,PS51737, G3DSA:3.40.50.1390,Coil,IPR006119,IPR038109,IPR011109, SSF53041,PTHR30461,PS00397,PS51736,cd00338, PF00239
MKRVALYVRVSTQEQKNSGLSVDSQIDALEKYCEEQGYTVAGIYNDAGISARKKYTKRPALLQLLEDCKKHEIDIILFTRLDRWFRAVAGYYEVQSVLDACKVPWRAIWEDYETETSQGIFKVNIMLSVAQAEADRDSEKIRSVMEFKRQNKEYIGGKVPVGYRIEGKKIVKDEKTRGIIEDMFDHYFQTFSKAGTADYILSKYPDFVRTRTRLVKIMSSPAYRGEMYGVKNYCEPYITEEQAQKINEVSSQKTWTDCRRRIYIFSGLMKCPLCGCRLSGCAIGKKGKKYKVYHCPHSVAQKHKTYTRSEKKLETYMLNHIEEKIQLDVLRAEGRVKAGGNDAEKRKKKLSSELGRINKMFEKGRITEEYYDERYEAISKELKELSQTAATEELETKKKIQSRFPDGWKDMYMQLGEQDKQVFWKSIVKEIKISPDTYVEDIIFF

SEQ ID NO: 9103 - protein, 445 aa, Unknown
  Description of Unknown: Integrase B9104 sequence
  SM00857,IPR006118,G3DSA:1.10.10.2600,IPR036162,PS51737, G3DSA:3.40.50.1390,Coil,IPR006119,IPR038109,SSF53041, IPR011109,PTHR30461,PS00397,PS51736,cd00338, PF00239
MKRAALYVRVSTQEQKNSGLSVDSQIDALEKYCEEQGYVVAGIYNDAGISARKKYTKRPALLQLLEDCKKHEIDIILFTRLDRWFRAVAGYYEVQSVLDACKVPWRAIWEDYETETSQGIFKVNIMLSVAQAEADRDSEKIRSVMEFKRNNKEYIGGKVPVGYRIEGKKIVKDEKTRGIIEDMFEHYFQTFSKAGTADYILSKYPDFVITRTRLVKIMSSPAYRGEMYGVKNYCEPYITEEQAQKINEVSSQKTWTDCKRRIYIFSGLMKCPLCGCRLSGCAIGKKEKKYKVYHCPHSVAQKHKTYTRSEKKLETYMLDHIEERIQLDVLKAEGRVKASGNDVEKRKKKLSSELGRINKMFEKGRITEEYYDERYEAISKELKELSQTAATEELETKKKIQSRFPDGWKDMYMQLDEQGRQVFWKSIVKEIKISPNEFVEDIIFF

SEQ ID NO: 9104 - protein, 445 aa, Unknown
  Description of Unknown: Integrase B9105 sequence
  SM00857,IPR006118,G3DSA:1.10.10.2600,IPR036162,PF13408, IPR025827,G3DSA:3.40.50.1390,PS51737,PS00397,IPR006119, IPR038109,IPR011109,SSF53041,PTHR30461,Coil, PS51736,cd00338,PF00239
MKRAALYVRVSTQEQKNSGLSVDSQIDALEKYCEEHGYMVAGVYNDAGISARKKYTKRPALLQLLEDCRKHEIDIILFTRLDRWFRAVAGYYEVQSVLDACKVPWRAIWEDYETETSQGIFKVNIMLSVAQAEADRDSEKIRSVMEFKRQNKEYIGGKVPVGYRVEGKKIVKDENMREIIEDMFEHYFQTFSKMETADYILSKYPDFIRTRTRIVKIMSSPAYHGEMYGVKNYCEPYITEEQAQRIKEVSSQKSWADCKRRIYIFSGLIRCPICGYRFSGRTMAKKEKRYKVYQCPRSAAKKHKTYTRSEPKLEKYMLDHIEEKIQLDVLRAEGHVKAAGNDVGKRKKKLSSELGRINKMFEKGRITEEYYDERYEAISKELKELSQTAATEELETKKKIQSKFPDGWKDMYMQLDEQGKQVFWKSIVKEIKISPDEFVEDIIFF

SEQ ID NO: 9105 - protein, 445 aa, Unknown
  Description of Unknown: Integrase B9106 sequence
  SM00857,IPR006118,G3DSA:1.10.10.2600,IPR036162,PF13408, IPR025827,PS51737,Coil,G3DSA:3.40.50.1390,IPR006119, IPR038109,SSF53041,IPR011109,PTHR30461,PS00397, PS51736,cd00338,PF00239
MKRAALYVRVSTQEQKNSGLSVDSQIDALEKYCEEQEYIVAGIYNDAGISARKKYTKRPALLRLLEDCKKHEIDIILFTRLDRWFRAVAGYYEVQSVLDACKVPWRAIWEDYETETSQGIFKVNIMLSVAQAEADRDSEKIRSVMEFKRQNKEYIGGKVPVGYRVEGKKIVKDENMREIIEDMFEHYFQTFSKWGTADYILSKYPDFIRTRNRIVKIMSSPAYHGEMYGVKNYCEPYITEEQAQRIKEVSSQKSWVDCKRRIYIFSGLIRCPICGYRFSGRTMAKKEKRYKVYQCPRSAAKKHKTYTRSEPKLETYMLNHIEEKIQLDVLRVEGRVKAAGSDVGKRKKKLSSELGRINKMFEKGRITEEYYDERYEAISKELKELSQTAATEELETKKKIQSRFPDGWKDMYMQLDEQGKQVFWKSIVKEIKISPNEFVEDIIFF

SEQ ID NO: 9106 - protein, 445 aa, Unknown
  Description of Unknown: Integrase B9107 sequence
  SM00857,IPR006118,G3DSA:1.10.10.2600,IPR036162,PS51737, G3DSA:3.40.50.1390,Coil,IPR006119,IPR038109,SSF53041, IPR011109,PTHR30461,PS00397,PS51736,cd00338, PF00239
MKRAALYVRVSTQEQKNSGLSVDSQIDALEKYCEEQGYAVAGIYNDAGISARKKYTKRPALLKLLEDCKKHEIDIILFTRLDRWFRAVAGYYEVQNVLDACKVPWRAIWEDYETETSQGIFKVNIMLSVAQAEADRDSEKIRSVMEFKRNNKEYIGGKVPVGYRIEGKKIVKDEKTRGIIEDMFERYFQTFSKAGTADYILSKYPDFVITRTRLVKIMSSPAYRGEMYGVKNYCEPYITEEQAQKINEVSSQKTWTDCKRRIYIFSGLMKCPLCGCRLSGCAIGKKEKKYKVYHCPHSVAQKHKTYTRSEKKLETYMLDHIEEKIQLDVLKAEGRVKVSGNDVEKRKKKLSSELGRINKMFEKGRITEEYYDERYEAISKELKELSQTAATEELETKKKIQSRFPDGWKDMYMQLDEQGRQVFWKSIVKEIKISPNEFVEDIIFF

SEQ ID NO: 9107 - protein, 445 aa, Unknown
  Description of Unknown: Integrase B9108 sequence
  PTHR30461:SF3,IPR036162,PS51737,IPR011109,PTHR30461, PS00397,PF00239,G3DSA:1.10.10.2600,IPR006119,SSF53041, cd00338,SM00857,IPR025827,IPR038109,PS51736, IPR006118,PF13408,G3DSA:3.40.50.1390,PF07508,Coil
MKKMNVGYLRVSTENQTEKYGLDLQKNKIIEKAEKEGDKWYIDGGYSGSTLDRPDIQRLLEDSKNGYIEKVYIYKLDRVSRDTIDTLVILYRTLPKYNVKIVSATEELSFDTPMDKMKIGIDALMGQYEREIISMRTKAGMLERVKSGLWMGGGRVPFGYYYDRNDGILHPKEDEAEKVRTMYRLYNDGYSCQKISDMLGMKGERIVIQILKRKSNVGYIEYKGNIYKGKHEAIIDEETFYKTQRFMEKRANNSYICNKFLLSGLCFCGKCGARMRYKKWANRHVLECYSRDGYKEYMVKNPNCDNKRPDAKDVEKEVSDCFKRFAVNITGRREKQISKKELIEKEMKSTVDKLKKLYELYATNESETLLEVIGKSEKRVKELRRELSKETRKKSLTTPERIEKIKKISDVWDKLDVKEQNKVLKECIDKIVITDGNIDIYFNLL

SEQ ID NO: 9108 - protein, 445 aa, Unknown
  Description of Unknown: Integrase B9109 sequence
  SM00857,IPR006118,G3DSA:1.10.10.2600,IPR036162,PF13408, PS51737,IPR025827,G3DSA:3.40.50.1390,Coil,IPR006119, IPR038109,IPR011109,SSF53041,PTHR30461,PS00397, PS51736,cd00338,PF00239
MKRCALYVRVSTQEQKNSGLSVDSQIAALEKYCEEQGYTVAGVYNDAGISARKKYTKRPALLQLLEDCKQRKIDIILFTRLDRWFRAVAGYYEVQSVLDACKVPWRAIWEDYETETSQGIFKVNIMLSVAQAEADRDSEKIRSVMEFKRQNKEYIGGKVPVGYRVEGKKIVKDENMRGIIEDMFEHYFQTFSKMETADYILSKYPDFIRTRTRIVKIMSSPAYHGEMYGVKNYCEPYITEEQAQRIKEVSSQKSWVDCKRRIYIFSGLIRCPICGYRFSGRTMAKKEKRYKVYQCPRSAAKKHKTYTRSEPKLEKYMLDHIEEKIQLDVLRAEGRVKAAGNDVGKRKKKLSSELGRINKMFEKGRITEEYYDERYEAISKELKELSQTAATEELETKKKIQSRFPDGWKDMYMQLDEQGKQVFWKSIVKEIKISPNEFVEDIIFF

SEQ ID NO: 9109 - protein, 445 aa, Unknown
  Description of Unknown: Integrase B9110 sequence
  PTHR30461:SF3,IPR036162,PS51737,IPR011109,PTHR30461, PS00397,PF00239,G3DSA:1.10.10.2600,IPR006119,SSF53041, cd00338,SM00857,IPR025827,IPR038109,PS51736, IPR006118,PF13408,G3DSA:3.40.50.1390,Coil
MNVIRGVGYIRVSTAEQATRGLSLDAQEAEIRTYAKAHGIELFNIYVDAGITARKRLDRREAFGQMMKDVDSGLIDEIIVMRLDRWFRNIYDYHKMMNEHLIPHGVNWSAVKEDYDTKTTNGRLMINLRLAIAEQECDTDGDRIRDIHDNQIANGIWIGGCAPPGYRIENKRLSIDPDMQPAVSYFFERLLSCGSVRRAMLDMNERHNLHFEYGQAIRMARSTTYCGVRRENYNYCPTYISQDEHARIMAALEHNVRVRSADNARIHIFSGLLVCSCCGRRLAANTVRKKSVTWTAYRCHRAFGDHVCDNRHLVDERKVEAWLLDYLENGLSDYIVSASVADAQPVVVDNTAAIRERQERVKELFINGFIDLQEYKKRATELEAKIQVPEKQPPRSMEKLKSLLERGVRAIYNDLSRGERQEFWRSIIREIPVNNGAVSGDPIFL

SEQ ID NO: 9110 - protein, 444 aa, Unknown
  Description of Unknown: Integrase B9111 sequence
  PTHR30461:SF3,cd00338,SM00857,IPR006118,IPR036162, PF13408,PS51737,G3DSA:3.40.50.1390,IPR025827,IPR006119, SSF53041,IPR011109,PTHR30461,PS00397,PS51736, Coil,PF00239
MEGKKRAAIYVRVSTAEQRDHGLSVDSQIDALQKYCRENGLEVAGIYNDAGISARKKYKARPALLQLIQDCKDHKIDIILFTKLDRWFRSVADYYEVQSQLDAAKVPWRAIWEDYETETSAGVFKVNIMLSIAQAESDRTSERIRAVNEYRKSQGYIIVGKMPLGYIRTSASTIDFDPQTKEAMQAFFDTYLNTYSPVQAMDAAAEKGLKMSRKTAHFLLDKEPYYGTYYGVSVPGYITPAQHELIQQARQHYPRQPKADRVYIFTGLIFCASCGARMGSKCTCYTSYGKPKEKLYYQCRMRTVRRGECKNAAFIMEHNLESYMIDHLEELIVDYNASVQKLAAKAKSTEGKIEKIKGRLERLKDIYLDGDMSRAEYLEKTKELKAQLAELESLAAPALPVSQMPDNWKEIYEQLSRQGKRDFWHRVVRRIEIKRHSVDKVYFV

SEQ ID NO: 9111 - protein, 444 aa, Unknown
  Description of Unknown: Integrase B9112 sequence
  PTHR30461:SF3,IPR036162,PS51737,IPR011109,PTHR30461, PS00397,PF00239,G3DSA:1.10.10.2600,IPR006119,SSF53041, cd00338,SM00857,IPR025827,IPR038109,PS51736, IPR006118,PF13408,G3DSA:3.40.50.1390,PF07508,Coil
MRKNLRVAGYARVSTDEQKKYGYSIQAQTEEITQWCNDNGHALQHIYIDEGFSASTMKRPQLQAMLSNLKNLDAIAFTRLDRLSRNVLEANKMLELLQQNNVAMISICEDDINTSTANGLFMFNLKVNLAEHELKKGSERIKAVFEYKIAQGQPITGNVPFGYRIATENGNKRIVIDESKAPIVKDIFDSFLLHQSVHHTVEYVNQKYGLSRPYMSYMHILKNEFYAGSYRGNANYAEPYITKETYNAVQTALQANIRTGIQRHVYLFTGLLRCPECRSKLVGVSHPKGGKRYYYYRCNNAHSVHTCSHKKHYAELATEKYLLSNLDTLLKDHIATISSITSETKDTTEKELKELRKELDNLNYIFIKKRMPVSTYERLYAETEDKIKRLESFKPQSTDHLNQFLSSGWRSIYDNLTREKKRTLWRNVLDSVHVSPDGIEVFFK

SEQ ID NO: 9112 - protein, 444 aa, Unknown
  Description of Unknown: Integrase B9113 sequence
  PTHR30461:SF3,IPR036162,PS51737,IPR011109,PTHR30461, PS00397,PF00239,G3DSA:1.10.10.2600,IPR006119,SSF53041, cd00338,SM00857,IPR025827,IPR038109,PS51736, IPR006118,PF13408,G3DSA:3.40.50.1390,Coil
MKKNLRIGGYARVSTDEQKKYGYSIQAQIDEIKNWCSEHNHQLQNIYIDEGYSASNMKRPQLQAMLSNLRNLDAIAFTRLDRLSRNVLEANKMLELLQQNNVAMISICEDDINTSTANGLFMFNLKVNLAEHELKKGSERIKAVFEYKIAQGQPITGNVPFGYMIATENGNKRIVIDESKAPIVKDIFASFLLHQSVHHTVEYVNNKYGLSRPYMSYMHILKNEFYAGSYRGNSNYAEPYITKETYNDVQTALQANIRTGVQRHVYLFTGLLRCPECRSKLVGVSHPKGGKRYYYYRCNNAHSVHTCTHKKHYAELATEKYLLSNLDTLLKDHIATISSVTSETKNTTEKELKELRKELDNLNYIFIKKRMPVSTYERLYAETEDKIKRLESFKPKSTDHLNQFLNSGWRSIYDNLTRENKRTLWRNVLDSVHVSPDGIEVFFK

SEQ ID NO: 9113 - protein, 444 aa, Unknown
  Description of Unknown: Integrase B9114 sequence
  PTHR30461:SF3,IPR036162,PS51737,IPR011109,PTHR30461, PS00397,PF00239,G3DSA:1.10.10.2600,IPR006119,SSF53041, cd00338,SM00857,IPR025827,IPR038109,PS51736, IPR006118,PF13408,G3DSA:3.40.50.1390,PF07508,Coil
MRKNLRVAGYARVSTDEQKKYGYSIQAQTEEITQWCNDNGHSLQHIYIDEGYSASNMKRPQLQSMLSNLRDLDAIAFTRLDRLSRNVLEANKMLELLQQNNVAMISICEDDINTSTANGLFMFNLKVNLAEHELKKGSERIKAVFEYKIAQGQPITGNVPFGYRIATENGNKRIVIDESKAPIVKDIFDSFLLHQSVHHTVEYVNQKYGLSRPYMSYMHILKNEFYAGSYRGNSNYAEPYITRETYNAVQTALQANIRTGIQRHVYLFTGLLRCPECRSKLVGVSHPKGGKRYYYYRCNNAHSVHTCTHKKHYAELATEKYLLSNLDTLLKDHIATISSVTSEAKDTTEKELKELRKELDNLNYIFIKKRMPVSTYERLYAETEDKIKRLESFKPQSTDHLNQFLSSGWRSIYDNLTRENKRTFWRNVLDSVHVSPDGIEVFFK

SEQ ID NO: 9114 - protein, 444 aa, Unknown
  Description of Unknown: Integrase B9115 sequence
  PTHR30461:SF3,IPR036162,PS51737,IPR011109,PTHR30461, PS00397,PF00239,G3DSA:1.10.10.2600,IPR006119,SSF53041, cd00338,SM00857,IPR025827,IPR038109,PS51736, IPR006118,PF13408,G3DSA:3.40.50.1390,Coil
MRKNLRVAGYARVSTDEQKKYGYSIQAQTEEITQWCNDNGHSLQHIYIDEGFSASNMKRPQLQSMLSNLRDLDAIAFTRLDRLSRNVLEANKMLELLQQNNVAMISICEDDINTSTANGLFMFNLKVNLAEHELKKGSERIKAVFEYKVAQGQPITGNVPFGYRIATENGNKRIVIDESKAPIVKDIFDSFLLHQSVHYTVEYVNNKYGLSRPYMSYMHILKNEFYAGSYRGNSNYAEPYITRETYNAVQTALQSNIRTGIQRHVYLFTGLLRCPECRSKLVGVSHPKGGKRYYYYRCNNAHSVHTCTHKKHYAELATEKYLLSNLDNLLKDHIATISSVTSETKNTTEKELKELRKELDNLNYIFIKKRMPVSTYERLYAETEDKIKRLESFKPQSTDHLNQFLNNGWHSIYDNLTRENKRTLWRNVLDSVHVSPDKIKVFFK

SEQ ID NO: 9115 - protein, 444 aa, Unknown
  Description of Unknown: Integrase B9116 sequence
  PTHR30461:SF3,IPR036162,PS51737,IPR011109,PTHR30461, PS00397,PF00239,G3DSA:1.10.10.2600,IPR006119,SSF53041, cd00338,SM00857,IPR025827,IPR038109,PS51736, IPR006118,PF13408,G3DSA:3.40.50.1390,Coil
MRKKLRVAGYARVSTDEQKKYGYSIQAQTEEITQWCNDNDHDIIHIYIDEGFSASTMKRPQLQSMLSNLRNLDAIAFTRLDRLSRNVLEANKMLELLQQNNVAMISICEDDINTSTANGLFMFNLKVNLAEHELKKGSERIKAVFEYKIAQGQPITGNVPFGYMIVTENGNKRIVIDESKAPIVKDIFKSFLLHQSVHYTVEYVNNKYGLSRPYMSYMHILKNEFYAGSYRGNSNYAEPYITKDTYNAVQTALQANIRTGIQRHVYLFTGLLRCPECRSKLVGVSHPKGGKRYYYYRCNNAHSVHTCSHKKHYAELATEKYLLSNLDALLKNHIATISSITYETKNTTEKELKELRKELDNLNYIFIKKRMPVNTYERLYAETEDKIKRLESFKPQSTDHLNQFLNSGWRSIYESLTRENKRTLWRNVLDSVHVSPDKIEVFFK

SEQ ID NO: 9116 - protein, 444 aa, Unknown
  Description of Unknown: Integrase B9117 sequence
  PTHR30461:SF3,IPR036162,PS51737,IPR011109,PTHR30461, PS00397,PF00239,G3DSA:1.10.10.2600,IPR006119,SSF53041, cd00338,SM00857,IPR025827,IPR038109,PS51736, IPR006118,PF13408,G3DSA:3.40.50.1390,Coil
MKKNLRIGGYARVSTDEQKKYGYSIQAQIDEIKNWCSEHNHQLQNIYIDEGYSASNMKRPQLQAMLSNLRNLDAIAFTRLDRLSRNVLEANKMLELLQQNNVAMISICEDDINTSTANGLFMFNLKVNLAEHELKKGSERIKAVFEYKIAQGQPITGNVPFGYRIATENGNKRIVIDESKAPIVKDIFASFLLHQSVHYTVEYVNNKYGLSRPYMSYMHILKNEFYAGSYRGNSNYAEPYITKETYNAVQTALQSNIRTGIQRHVYLFTGLLRCPECRSKLVGVSHPKGGKRYYYYRCNNAHSVHTCTHKKHYAELSTEKYLLSNLDTLLKDHIATISSITSETKNTTEKELKELRKELDNLNYIFIKKRMPVSTYERLYAETEDKIKRLESFKPQSTDHLNQFLSSGWRSIYDNLTRENKRTLWRNVLDSVHVSPDKIEVFFK

SEQ ID NO: 9117 - protein, 444 aa, Unknown
  Description of Unknown: Integrase B9118 sequence
  PTHR30461:SF3,IPR036162,PS51737,IPR011109,PTHR30461, PS00397,PF00239,G3DSA:1.10.10.2600,IPR006119,SSF53041, cd00338,SM00857,IPR025827,IPR038109,PS51736, IPR006118,PF13408,G3DSA:3.40.50.1390,Coil
MRKNLRVAGYARVSTDEQKKYGYSIQAQTEEITQWCNDNDHALQHIYIDEGFSASTMKRPQLQAMLSNLKNLDAIAFTRLDRLSRNVLEANKMLELLQQNNVAMISICEDDINTSTANGLFMFNLKVNLAEHELKKGSERIKAVFEYKIAQGQPITGNVPFGYRIATENGNKRIAIDESKAPIVKDIFDSFLLHQSVHYTVEYVNNKYGLSRPYMSYMHILKNEFYAGSYRGNSNYAEPYITKETYNAVQTALQSNIRTGIQRHVYLFTGLLRCPECRSKLVGVSHPKGGKRYYYYRCNNAHSVHTCSHKKHYAELATEKYLLSNLDTLLKDHIATISSVTSETKNTTEKELKELRKELDNLNYIFIKKRMPVSTYERLYAETEDKIKRLESFKPKSTDHLNQFLNSGWRSIYDNLTRENKRTLWRNVLDSVHVSPDGIEIFFK

SEQ ID NO: 9118 - protein, 444 aa, Unknown
  Description of Unknown: Integrase B9119 sequence
  SM00857,IPR006118,G3DSA:1.10.10.2600,IPR036162,PS51737, G3DSA:3.40.50.1390,IPR006119,IPR038109,SSF53041,IPR011109, PF00239,PTHR30461,PS00397,PS51736,Coil, cd00338
MKRAALYVRVSTQEQKNSGLSVDSQIDALEKYCEEQGYTVAGIYNDAGISARKKYTKRPALLQLLEDCKQCKIDIILFTRLDRWFRAVAGYYEVQSVLDACKVPWRAIWEDYETETSQGIFKVNIMLSVAQAEADRDSEKIRSVMEFKRNNKEYIGGKVPVGYRIEGKKIVKDEKTRGIIEDMFEHYFQTFSKAGTADYILSKYPGFVRTRTRLVKIMSSPAYRGEMYGVKNYCEPYITEEQAQKISEVSSQKTWTDCKRRIYIFSGLMKCPLCGCRLSGCAIGKKGKKYKVYHCPHSVAQKHKTYTRSEKKLETYMLDHIEEKIQLDVLRAEGRVKAAGNDVGNRKKKLSSELGRLNKMFEKGRITEEYYDERYEAISKELKELSQNVTEELENKKKIQSRFPDGWKDMYMQLDEQGKQVFWKSIIKEIKISPNEFVEDIIFF

SEQ ID NO: 9119 - protein, 444 aa, Unknown
  Description of Unknown: Integrase B9120 sequence
  SM00857,IPR006118,G3DSA:1.10.10.2600,IPR036162,PS51737, G3DSA:3.40.50.1390,Coil,IPR006119,IPR038109,IPR011109, SSF53041,PTHR30461,PS00397,PS51736,cd00338, PF00239
MKRAALYVRVSTQEQKNSGLSVDSQIDALEKYCEEQGYTVAGIYNDAGISARKKYTKRPALLQLLEDCKQCKIDIILFTRLDRWFRAVAGYYEVQSVLDACKVPWRAIWEDYETETSQGIFKVNIMLSVAQAEADRDSEKIRSVMEFKRNNKEYIGGKVPVGYRIEGKKIVKDEKTRGIIEDMFEHYFQAFSKAGTADYILSKYPGFVRTRTRLVKIMSSPAYRGEMYGVKNYCEPYITEEQAQKISEVSSQKTWTDCKRRIYIFSGLMKCPLCGCRLSGCAIGKKGKKYKVYHCPHSVAQKHKTYTRSEKKLETYMLDHIEEKIQLDVLRAEGRVKAAGNDVGNRKKKLSSELGRLNKMFEKGRITEEYYDERYEAISKELKELSQNVTEELENKKKIQSRFPDGWKDMYMQLDEQGKQVFWKSIIKEIKISPNEFVEDIIFF

SEQ ID NO: 9120 - protein, 444 aa, Unknown
  Description of Unknown: Integrase B9121 sequence
  PTHR30461:SF3,IPR036162,PS51737,IPR011109,PTHR30461, PS00397,PF00239,G3DSA:1.10.10.2600,IPR006119,SSF53041, cd00338,SM00857,IPR025827,IPR038109,PS51736, IPR006118,PF13408,G3DSA:3.40.50.1390,PF07508,Coil
MKKKLRVAGYARVSTDEQKKYGYSIQAQTEEITQWCNDNGHALQHIYIDEGYSASTMKRPQLQSMLSNLKNLDAIAFTRLDRLSRNVLEANKMLELLQQNNVAMISICEDDINTSTANGLFMFNLKVNLAEHELKKGSERIKAVFEYKVAQGQPITGNVPFGYRIATENGNKRIAIDESKAPIVKDIFESFLLHQSVHHTVEYVNKKYGLSRPYMSYMHILKNEFYAGSYRGNSNYAEPYITRETYNAVQTALQANIRTGIQRHVYLFTGLLRCPECRSKLVGVSHPKGGKRYYYYRCNNAHSVHTCTHKKHYAELSTEKYLLSNLDTLLKDHIATISSITSETKNTTEKELKELRKELDNLNYIFIKKRMPVSTYERLYAETEDKIKRLESFKPQSTDHLKQFLNSGWRSIYENLTRENKRTLWRNVLDSVNVSPDGIEVFFK

SEQ ID NO: 9121 - protein, 444 aa, Unknown
  Description of Unknown: Integrase B9122 sequence
  PTHR30461:SF3,IPR036162,PS51737,IPR011109,PTHR30461, PS00397,PF00239,G3DSA:1.10.10.2600,IPR006119,SSF53041, cd00338,SM00857,IPR025827,IPR038109,PS51736, IPR006118,PF13408,G3DSA:3.40.50.1390,Coil
MRKNLRVAGYARVSTDEQKKYGYSIQAQTEEITQWCNDNDHDLQHIYIDEGFSASTMKRPQLQSMLSNLKNLDAIAFTRLDRLSRNVLEANKMLELLQQNNVAMISICEDDINTSTANGLFMFNLKVNLAEHELKKGSERIKAVFEYKIAQGQPITGNVPFGYRIATENGNKRIVIDESKAPIVKDIFASFLLHQSVHYTVEYVNQKYGLSRPYMSYMHILKNEFYAGSYRGNANYAEPYITKETYNAVQTALQANIRTGIQRHVYLFTGLLRCPECRSKLVGVSHPKGGKRYYYYRCNNAHSVHTCSHKKHYAELATEKYLLSNLDTLLKDHIATISSITSETKDTTEKELKELRKELDNLNYIFIKKRMPVSTYERLYAETEDKIKRLESFKPQSTDHLNQFLSSGWRSIYDNLTRENKRTLWRNVLDSVHVSPDGIEVFFK

SEQ ID NO: 9122 - protein, 444 aa, Unknown
  Description of Unknown: Integrase B9123 sequence
  PTHR30461:SF3,SM00857,IPR006118,IPR036162,PF13408, PS51737,IPR025827,G3DSA:3.40.50.1390,IPR006119,IPR011109, SSF53041,PF00239,PTHR30461,PS00397,PS51736, Coil,cd00338
MEGKKRAAIYVRVSTAEQRDHGLSVDSQIDALQKYCRENSLEVAGIYNDAGISARKKYKARPALLQLIQDCKDHKIDIILFTKLDRWFRSVADYYEVQSQLDAAKVPWRAIWEDYETETSAGVFKVNIMLSIAQAESDRTSERIRAVNEYRKSQGYIIVGKMPLGYIRTSASTIDFDPKTKDAMQTFFDTYLNTCSPVQAMDAAAEKGLKMSRKTAHFLLDKEPYYGTYYGVSVPGYITPAQHELIQQARQHYPRQPKADRVYIFTGLIFCASCGARMGSKCTCYTSYGKPKEKLYYQCRMRTVRRGECKNAAFIMEHNLESYMIDHLEELIIDYNASVQKLAAKAKSTEGKIEKIKGRLERLKDIYLDGDMSRAEYLEKTKELKAQLAELESLAAPALPVSQMPDNWREIYEQLSRQGKRDFWHRVVRKIEIKRHSVDKVYFV

SEQ ID NO: 9123 - protein, 444 aa, Unknown
  Description of Unknown: Integrase B9124 sequence
  PTHR30461:SF3,IPR036162,PS51737,IPR011109,PTHR30461, PS00397,PF00239,G3DSA:1.10.10.2600,IPR006119,SSF53041, cd00338,SM00857,IPR025827,IPR038109,PS51736, IPR006118,PF13408,G3DSA:3.40.50.1390,Coil
MRKNLRVAGYARVSTDEQKKYGYSIQAQTEEITQWCNDNDHNLIHIYIDEGFSASTMKRPQLQAMLSNLKNLDAIAFTRLDRLSRNVLEANKMLELLQQNNVAMISICEDDINTSTANGLFMFNLKVNLAEHELKKGSERIKAVFEYKVAQGQPITGNVPFGYKIITESGNKRIAIDESKAPIVKDIFDSFLLHQSVHHTVEYVNNKYGLSRPYMSYMHILKNEFYAGSYRGNANYAEPYITKETYNAVQTALQANIRTGVQRHVYLFTGLLRCPECRSKLVGVSHPKGGKRYYYYRCNNAHSVHTCSHKKHYAELATEKYLLSNLDTLLKDHIATISSITSETKSTTEKELKELRKELDNLNYIFIKKRMPVSTYERLYVETEDKIKRLESFKPKSTDHLNQFLNSGWRSIYDNLTRENKRTLWRNVLDSVNVSPDGIEVFFK

SEQ ID NO: 9124 - protein, 444 aa, Unknown
  Description of Unknown: Integrase B9125 sequence
  PTHR30461:SF3,IPR036162,PS51737,IPR011109,PTHR30461, PS00397,PF00239,G3DSA:1.10.10.2600,IPR006119,SSF53041, cd00338,SM00857,IPR025827,IPR038109,PS51736, IPR006118,PF13408,G3DSA:3.40.50.1390,Coil
MRKKLRVAGYARVSTDEQKKYGYSIQAQTEEITQWCNDNDHILQHIYVDEGYSASTMKRPQLQSMLSNLRNLDAIAFTRLDRLSRNVLEANKMLELLQQNNVAMISICEDDINTSTANGLFMFNLKVNLAEHELKKGSERIKAVFEYKIAQGQPITGNVPFGYRIVTENGNKRIVIDNSKAPIVKDIFESFLLHQSVHYTVEYVNQKYGLSRPYMSYMHILKNEFYAGSYRGNSNYAEPYITKDTYNAVQTALQANIRTGIQRHTYLFTGLLRCPECRSKLVGVSHPKGGKRYYYYRCNNAHSVHTCSHKKHYAELATEKYLLSNLDNLLKDHIATISSVTSETKNTTEKELKELRKELDNLNYIFIKKRMPVSTYERLYAETEDKIKRLESFKPQSTDHLNQFLNSGWRSIYENLTRENKRTLWRNVLDSVHVSPDKIEVFFK

SEQ ID NO: 9125 - protein, 444 aa, Unknown
  Description of Unknown: Integrase B9126 sequence
  PTHR30461:SF3,IPR036162,PS51737,IPR011109,PTHR30461, PS00397,PF00239,G3DSA:1.10.10.2600,IPR006119,SSF53041, cd00338,SM00857,IPR025827,IPR038109,PS51736, IPR006118,PF13408,G3DSA:3.40.50.1390,Coil
MRKNLRVAGYARVSTDEQKKYGYSIQAQTEEITQWCNDNGHSLQHIYIDEGYSASNMKRPQLQSMLSNLRDLDAIAFTRLDRLSRNVLEANKMLELLQQNNVAMISICEDDINTSTANGLFMFNLKVNLAEHELKKGSERIKAVFEYKIAQGQPITGNVPFGYRIATESGNKRIAIDESKAPIVKDIFDSFLLHQSVHYTVEYVNNKYGLSRPYMSYMHILKNEFYAGSYRGNSNYAEPYITKETYNAVQTALQSNIRTGIQRHVYLFTGLLRCPECRSKLVGVSHTKGGKRYYYYRCNNAHSVHTCTHKKHYAELATEKYLLSNLDTLLKDHIATISSVTSETKNTTEKELKELRKELDNLNYIFIKKRMPVSTYERLYAETEDKIKRLESFKPKSTDHLNQFLNSGWRSIYDNLTRENKRTLWRNVLDSVHVSPDGIEVFFK

SEQ ID NO: 9126 - protein, 444 aa, Unknown
  Description of Unknown: Integrase B9127 sequence
  PTHR30461:SF3,IPR036162,PS51737,IPR011109,PTHR30461, PS00397,PF00239,G3DSA:1.10.10.2600,IPR006119,SSF53041, cd00338,SM00857,IPR025827,IPR038109,PS51736, IPR006118,PF13408,G3DSA:3.40.50.1390,Coil
MRKKLRVAGYARVSTDEQKKYGYSIQAQTEEITQWCNDNEHALQHIYIDEGYSASTMKRPQLQSMLSNLKNLDAIAFTRLDRLSRNVLEANKMLELLQQNNVAMISICEDDINTSTANGLFMFNLKVNLAEHELKKGSERIKAVFEYKIAQGQPITGNVPFGYRIATENGNKRIVIDESKAPIVKDIFSSFLLHQSVHYTVEYVNNKYGLSRPYMSYMHILKNEFYAGSYRGNSNYAEPYITKDTYNAVQTALQANIRTGIQRHTYLFTGLLRCPECRSKLVGVSHPKGGKRYYYYRCNNAHSVHTCSHKKHYAELATEKFLLSNLDDLLKNHIATISSITSETKDTTEKELKELRKELDNLNYIFIKKRMPVSTYERLYAETEDKIKRLESFKPQSTDHLNQFLNSGWRSIYDNLTRENKRTLWRNVLESVHVSPDKIEVFFK

SEQ ID NO: 9127 - protein, 444 aa, Unknown
  Description of Unknown: Integrase B9128 sequence
  PTHR30461:SF3,cd00338,SM00857,IPR006118,IPR036162, PF13408,PS51737,G3DSA:3.40.50.1390,IPR025827,IPR006119, SSF53041,IPR011109,PTHR30461,PS00397,PS51736, Coil,PF00239
MEGKKRAAIYVRVSTAEQRDHGLSVDSQIDALQKYCRENGLEVAGIYNDAGISARKKYKARPALLQLIQDCKDHKIDIILFTKLDRWFRSVADYYEVQSQLDAAKVPWRAIWEDYETETSAGVFKVNIMLSIAQAESDRTSERIRAVNEYRKSQGYIIVGKMPLGYIRTSASTIDFDPKTKDAMQTFFDTYLNTYSPVQAMDAAAEKGLKMSRKTAHFLLDKEPYYGTYYGVSVPGYITPAQHELIQQARQHYPRQPKADRVYIFTGLIFCASCGARMGSKCTCYTSYGKPSEKLYYQCRMRTVRRGECKNAAFVMEHNLESYMIDHLEELIVDYNASVQKLAAKAKSTEGKIEKIKGRLERLKDIYLDGDMSRAEYLEKTKELKAQLAELESLAAPALPVSQMPDNWKEIYEQLSRQGKRDFWHRVVRRIEIKRHSVDKVYFV

SEQ ID NO: 9128 - protein, 444 aa, Unknown
  Description of Unknown: Integrase B9129 sequence
  SM00857,IPR006118,G3DSA:1.10.10.2600,IPR036162,PF13408, PS51737,IPR025827,G3DSA:3.40.50.1390,IPR006119,IPR038109, IPR011109,SSF53041,PTHR30461,PS00397,PS51736, cd00338,PF00239
MLRCAIYIRVSTEEQKINGLSIEAQSAALTEYAVRNNLLITDYYIDAGLTARKKLQHRKELLRLLEDISNNKIDIIIFTKLDRWFRNIADYYKVQEILDLHKVNWKTIFEDYDTSTANGRLHINIMLSIAQDEADRTSERIKIVFENKRAKGEVPGWKAPLGYKIKDSKLLLDDDTKRIAIDIFEHYDLHHSIMGCVRMAKERYDYKIYDYSIRRMLENKTYIGEFRGYKNFCEALITSDLFYRIKNYREVKEYKNQRKAGRVYLFSSLILCKDCNHSMTCCFTKQHQKAGVKEYHYYRCKEAILGCCIHKKRLREDNLEEYLLQNICAGLGNYIIQINRSEKQEKTPILNIEKLSKKLEKLKDLYLDDLIDKESYRKEYDALQKHIKLSSIKPNKIKVEQMPLQYNLKELYYSLSIEERKIFWLGILDCITVDSQNRIQIFYR

SEQ ID NO: 9129 - protein, 444 aa, Unknown
  Description of Unknown: Integrase B9130 sequence
  PTHR30461:SF3,IPR036162,PS51737,IPR011109,PTHR30461, PS00397,PF00239,G3DSA:1.10.10.2600,IPR006119,SSF53041, cd00338,SM00857,IPR025827,IPR038109,PS51736, IPR006118,PF13408,G3DSA:3.40.50.1390,Coil
MRKKLRVAGYARVSTDEQKKYGYSIQAQIDEIKNWCSEHNHQLQHIYIDEGFSASTMKRPQLQAMLSSLRGLDAIAFTRLDRLSRNVLEANKMLELLQQNNVAMISICEDDINTSTANGLFMFNLKVNLAEHELKKGSERIKAVFEYKVAQGQPITGNVPFGYRIATENGNKRIVIDESKAPIVKDIFSSFLLHQSVHHTVEYVNNKYGLSRPYMSYMHILKNEFYAGSYRGNSNYAEPYITKDTYNAVQTALQSNIRTGIQRHVYLFTGLLRCPECRSKLVGVSHPKGGKRYYYYRCNNAHSVHTCTHKKHYAELATEKYLLSNLDALLKDHIATISSITSETKNTTEKELKELRKELDNLNYIFIKKRMPVNTYERLYAETEDKIKRLESFKPQSTDHLNQFLNSGWRSIYDNLTRENKRTLWRNVLDSVHVSPDKIEVFFK

SEQ ID NO: 9130 - protein, 444 aa, Unknown
  Description of Unknown: Integrase B9131 sequence
  SM00857,IPR006118,G3DSA:1.10.10.2600,IPR036162,PS51737, G3DSA:3.40.50.1390,IPR006119,IPR038109,IPR011109,SSF53041, PF00239,PTHR30461,PS00397,PS51736,Coil, cd00338
MKRAALYVRVSTQEQKNSGLSVDSQIDALEKYCEEQGYTVAGIYNDAGISARKKYTKRPALLQLLEDCKKQEIDIILFTRLDRWFRAVAGYYEVQSVLDACKVPWRAIWEDYETETSQGIFKVNIMLSVAQAEADRDSEKIRSVMEFKRSNKEYIGGKVPVGYRVENKKIVKDEKMRGIIEDMFEHYFQTFSKMETADYILSKYPDFVRTRTRLVKIMSSPAYRGEMYGVKNYCEPYITEEQAQKINEVSSQKTWTDCKRRIYIFSGLMKCPICGCRLSGCAIGKKEKKYKVYHCPHSVAQKHKTYTRSEKKLETYMLDHIEEKIQLDVLKAEGRVKAAGNDVGNRKKKLSSELGRLNKMFEKGRITEEYYDERYEAISKELKELSQNVTEELENKKKIQSRFPDGWKDMYMQLDEQGKQVFWKSIIKEIKISPNEFVEDIIFF

SEQ ID NO: 9131 - protein, 444 aa, Unknown
  Description of Unknown: Integrase B9132 sequence
  PTHR30461:SF3,IPR036162,PS51737,IPR011109,PTHR30461, PS00397,PF00239,G3DSA:1.10.10.2600,IPR006119,SSF53041, cd00338,SM00857,IPR025827,IPR038109,PS51736, IPR006118,PF13408,G3DSA:3.40.50.1390,Coil
MRKKLRVAGYARVSTDEQKKYGYSIQAQTEEITQWCNDNGHDLQHIYIDEGYSASTMKRPQLQSMLSNLKNLDAIAFTRLDRLSRNVLEANKMLELLQQNDVAMISICEDDINTSTANGLFMFNLKVNLAEHELKKGSERIKAVFEYKIAQGQPITGNVPFGYMIVTENGNKRIAIDESKAPIVKDIFDSFLLHQSVHHTVEYVNNKYGLSRPYMSYMHILKNEFYAGSYRGNSNYTEPYITRETYNAVQTALQANIRTGIQRHVYLFTGLLRCPECRSKLVGVSHPKGGKRYYYYRCNNAHSVHTCTHKKHYAELSTEKYLLSNLDDLLKNHIAKISSVTSETKNTTEKELKELRKELDNLNYIFIKKRMPVNTYERLYAETEDKIKRLESFKPQSTDHLKQFLNSGWRSIYDNLTRENKRTLWRNILDSVHVSPDGIEVFFK

SEQ ID NO: 9132 - protein, 444 aa, Unknown
  Description of Unknown: Integrase B9133 sequence
  PTHR30461:SF3,IPR036162,PS51737,IPR011109,PTHR30461, PS00397,PF00239,G3DSA:1.10.10.2600,IPR006119,SSF53041, cd00338,SM00857,IPR025827,IPR038109,PS51736, IPR006118,PF13408,G3DSA:3.40.50.1390,PF07508
MRVALYARVSTEEQAVHGLSIGVQQDTLRSWADGNNYTIVGMYTDAGISARKAASKRPALQQMLDDVRAGKIDMVAFTKLDRWFRNVAEYYKVQAVLDAYNVSWKALEEDYETATSAGRFKVNIMLSVAESEADRTAERIKVVNKNKREKGMCHNGHPTLGIKVKDGKIVEDPETADIVRDIFDYYVRTQSITQTSRYLLDKYKIVRAYRNMKSLLKNRRYVGYADNGQLLYAPIVDPTTFELAQEIMAQRSARHSGDFTQKHTYIFSSITVCGECGRRLTYRMNRRHNKSGTTEYVYGRCPRHASGTCGNATSVREDILEAYMLDHLIIECEKYNAIVAQQNATPKPSVDKNAIKRKMQKLKDLYLSDLIDREVYESDYTELRKALEAPEPEDQREIDIGQLRSALALYDDLEPSDKHEFWRRTLKKISIEDDGEINFTVSVP

SEQ ID NO: 9133 - protein, 444 aa, Unknown
  Description of Unknown: Integrase B9134 sequence
  PTHR30461:SF3,IPR036162,PS51737,IPR011109,PTHR30461, PS00397,PF00239,G3DSA:1.10.10.2600,IPR006119,SSF53041, cd00338,SM00857,IPR025827,IPR038109,PS51736, IPR006118,PF13408,G3DSA:3.40.50.1390,Coil
MRKKLRVAGYARVSTDEQKKYGYSIQAQIDEITQWCNDNDHDLLNIYIDEGFSASTMKRPQLQLMLSNLKNLDAIAFTRLDRLSRNVLEANKMLELLQQNNVAMISICEDDINTSTANGLFMFNLKVNLAEHELKKGSERIKAVFEYKVAQGQPITGNVPFGYRIATENGNKRIVIDESKAPIVKDIFSSFLLHQSVHHTVEYVNNKYGLSRPYMSYMHILKNEFYAGSYRGNSNYAEPYITKDTYNAVQTALQANIRTGIQRHVYLFTGLLRCPECRSKLVGVSHPKGGKRYYYYRCNNAHSVHTCTHKKHYAELATEKYLLSNLDELLKNHIATISSITSETKDTTEKELKELRKELDNLNYIFIKKRMPVSTYERLYAETEDKIKRLESFKPQSTDHLNQFLNSGWRSIYDNLTRENKRTLWRNVLDSVHVSPDKIEVFFK

SEQ ID NO: 9134 - protein, 444 aa, Unknown
  Description of Unknown: Integrase B9135 sequence
  PTHR30461:SF3,IPR036162,PS51737,IPR011109,PTHR30461, PS00397,PF00239,G3DSA:1.10.10.2600,IPR006119,SSF53041, cd00338,SM00857,IPR025827,IPR038109,PS51736, IPR006118,PF13408,G3DSA:3.40.50.1390,PF07508,Coil
MRKNLRVAGYARVSTDEQKKYGYSIQAQTEEITQWCNDNDHNLIHIYIDEGYSASNMKRPQLQSMLSNLRDLDAIAFTRLDRLSRNVLEANKMLELLQQNDVAMISICEDDINTSTANGLFMFNLKVNLAEHELKKGSERIKAVFEYKIAQGQPITGNVPFGYRIATENGNKRIVIDESKAPIVKDIFESFLLHQSVHYTVEYVNNKYGLSRPYMSYMHILKNEFYAGSYRGNHNYAEPYITKETYNAVQTALQANIRTGIQRHVYLFTGLLRCPECRSKLVGVSHPKGGKRYYYYRCNNAHSVHTCTHKKHYAELATEKYLLSNLDALLKDHIATISSITSETKNTTEKELKELRKELDNLNYIFIKKRMPVSTYERLYAETEDKIKRLESFKPKSTDHLNQFLSSGWRSIYDNLTRENKRTLWRNVLDSVHVSPDGIEIFFK

SEQ ID NO: 9135 - protein, 444 aa, Unknown
  Description of Unknown: Integrase B9136 sequence
  PTHR30461:SF3,IPR036162,PS51737,IPR011109,PTHR30461, PS00397,PF00239,G3DSA:1.10.10.2600,IPR006119,SSF53041, cd00338,SM00857,IPR025827,IPR038109,PS51736, IPR006118,PF13408,G3DSA:3.40.50.1390,PF07508,Coil
MRKNLRVAGYARVSTDEQKKYGYSIQAQTEEITQWCNDNDHNLIHIYIDEGYSASNMKRPQLQSMLSNLRDLDAIAFTRLDRLSRNVLEANKMLELLQQNDVAMISICEDDINTSTANGLFMFNLKVNLAEHELKKGSERIKAVFEYKIAQGQPITGNVPFGYRIATENGNKRIVIDESKAPIVKDIFESFLLHQSVHYTVEYVNNKYGLSRPYMSYMHILKNEFYAGSYRGNANYAEPYITKETYNAVQTALQANIRTGVQRHVYLFTGLLRCPECRSKLVGVSHPKGGKRYYYYRCNNAHSVHTCSHKKHYAELATEKYLLSNLDTLLKDHIATISSITSETKSTTEKELKELRKELDNLNYIFIKKRMPVSTYERLYVETEDKIKRLESFKPKSTDHLNQFLNSGWRSIYDNLTRENKRTLWRNVLDSVNVSPDGIEVFFK

SEQ ID NO: 9136 - protein, 444 aa, Unknown
  Description of Unknown: Integrase B9137 sequence
  PTHR30461:SF3,cd00338,SM00857,IPR006118,IPR036162, PF13408,PS51737,G3DSA:3.40.50.1390,IPR025827,IPR006119, SSF53041,IPR011109,PTHR30461,PS00397,PS51736, Coil,PF00239
MEGKKRAAIYVRVSTAEQRDHGLSVDSQIDALQKYCRENGLEVAGIYNDAGISARKKYKARPALLQLIQDCKDHKIDIILFTKLDRWFRSVADYYEVQSQLDAAKVPWRAIWEDYETETSAGVFKVNIMLSIAQAESDRTSERIRAVNEYRKSQGYIIVGKMPLGYIRTSASTIDFDPQTKEAMQTFFDTYLNTYSPVQAMDAAAEKGLKMSRKTAHFLLDKEPYYGTYYGVSVPGYITPAQHELIQQARQHYPRQPKADRVYIFTGLIFCASCGARMGSKCTCYTSYGKPSEKLYYQCRMRTVRRGECKNAAFIMEHNLESYMIDHLEELIIDYNASVQKLAAKAKSTEGKIEKIKGRLERLKDIYLDGDMSRAEYLEKTKELKAQLAELESLAAPALPVSQMPDNWKEIYEQLSRQGKRDFWHRVVRRIEIKRHSVDKVYFV

SEQ ID NO: 9137 - protein, 444 aa, Unknown
  Description of Unknown: Integrase B9138 sequence
  PTHR30461:SF3,IPR036162,PS51737,IPR011109,PTHR30461, PS00397,PF00239,G3DSA:1.10.10.2600,IPR006119,SSF53041, cd00338,SM00857,IPR025827,IPR038109,PS51736, IPR006118,PF13408,G3DSA:3.40.50.1390,PF07508,Coil
MRKNLRVAGYARVSTDEQKKYGYSIQAQTEEITQWCNDNGHVLQHIYIDEGYSASNMKRPQLQSMLSNLRDLDAIAFTRLDRLSRNVLEANKMLELLQQNNVAMISICEDDINTSTANGLFMFNLKVNLAEHELKKGSERIKAVFEYKIAQGQPITGNVPFGYRIATENGNKRIVIDESKAPIVKDIFDSFLLHQSVHHTVEYVNQKYGLSRPYMSYMHILKNEFYAGSYRGNANYAEPYITKETYNAVQTALQSNIRTGIQRHVYLFTGLLRCPECRSKLVGVSHPKGGKRYYYYRCNNAHSVHTCTHKKHYAELATEKYLLSNLDNLLKDHIATISSITSETKNTTEKELKELRKELDNLNYIFIKKRMPVSTYERLYAETEDKIKRLESFKPQSTDHLNQFLSSGWRSIYDNLTRENKRTLWRNVLDSVHVSPDGIEVFFK

SEQ ID NO: 9138 - protein, 444 aa, Unknown
  Description of Unknown: Integrase B9139 sequence
  PTHR30461:SF3,IPR036162,PS51737,IPR011109,PTHR30461, PS00397,PF00239,G3DSA:1.10.10.2600,IPR006119,SSF53041, cd00338,SM00857,IPR025827,IPR038109,PS51736, IPR006118,PF13408,G3DSA:3.40.50.1390,PF07508,Coil
MRKNLRVAGYARVSTDEQKKYGYSIQAQTEEITQWCNDNDHALQHIYIDEGYSASNMKRPQLQAMLSNLRDLDAIAFTRLDRLSRNVLEANKMLELLQQNNVAMISICEDDINTSTANGLFMFNLKVNLAEHELKKGSERIKAVFEYKIAQGQPITGNVPFGYKITTENGNKRIVIDNSKAPIVKDIFESFLLHQSVHHTVEYVNNKYGLSRPYMSYMHILKNEFYAGSYRGNSNYAEPYITRETYNAVQTALQANIRTGIQRHVYLFTGLLRCPECRSKLVGVSHPKGGKRYYYYRCNNAHSVHTCTHKKHYAELSTERYLLSNLDDLLKNHIATISSITSETKDTTEKELKELRKELDNLNYIFIKKRMPVNTYERLYAETEDKIKRLESFKPQSTDHLNQFLNSGWRSIYDNLTRENKRTLWRNVLDSVHVSPDGIEVFFK

SEQ ID NO: 9139 - protein, 444 aa, Unknown
  Description of Unknown: Integrase B9140 sequence
  SM00857,G3DSA:1.10.10.2600,IPR036162,PS51737,G3DSA:3.40.50.1390, IPR006119,IPR038109,PF07508,IPR011109,SSF53041, PTHR30461,Coil,PS51736,cd00338,PF00239
MKRAVIYIRESTKFQDPDTQEKECRAYCKENDFQIVKTYRDIASGKKNDRKGFLQMLDDLDEDRFDVLVLWELSRSTRDFITYKTLLDTLIQNNKELHSLQEGILTQDDIDVEFSNDIRALINAHERKRVGRRIKFRKNFKTREGYWTNGQAPFGYKLDNGVLIPDEEEAPVVKEIFELFIAGATIREIGEKFNIPWRRISRVLTNVVYLGKLKVNETEMINDKRVRNKEVEIIEGKHAAIINEDTFSLANSLKRKKPNKYKNGKFILPNVYCWTGERMYPFTSLKQEYYSTKFSRHYVDREFLEKIVLDNILNFNFDTLNENMEVVDYTERREFYKKEVEKLKNNEKKLLKKYLDNVIGEDVFDNFMQENKKNIIEFEKKISEIEKLILNSSKKEDNAKLLKEYLKALKNTKDRVQLQQILNILISEIRLVNNFRCVVITTIF

SEQ ID NO: 9140 - protein, 444 aa, Unknown
  Description of Unknown: Integrase B9141 sequence
  PTHR30461:SF3,IPR036162,PS51737,IPR011109,PTHR30461, PS00397,PF00239,G3DSA:1.10.10.2600,IPR006119,SSF53041, cd00338,SM00857,IPR025827,IPR038109, PS51736,IPR006118,PF13408,G3DSA:3.40.50.1390,Coil
MRKNLRVAGYARVSTDEQKKYGYSIQAQTEEITQWCNDNGHALQHIYIDEGYSASNMKRPQLQAMLSNLRDLDAIAFTRLDRLSRNVLEANKMLELLQQNNVAMISICEDDINTSTANGLFMFNLKVNLAEHELKKGSERIKAVFEYKIAQGQPITGNVPFGYRIATENGNKRIVIDESKAPIVKDIFASFLLHQSVHYTVEYVNQKYGLSRPYMSYMHILKNEFYAGSYRGNPNYAEPYITKETYNAVQTALQANIRTGIQRHVYLFTGLLRCPECRSKLVGVSHPKGGKRYYYYRCNNAHSVHTCSHKKHYAELATEKYLLSNLDTLLKDHIATISSITSETKDTTEKELKELRKELDNLNYIFIKKRMPVSTYERLYAETEDKIKRLESFKPQSTDHLNQFLSSGWRSIYENLTRENKRTLWRNVLDSVHVSPDGIEVFFK

SEQ ID NO: 9141 - protein, 444 aa, Unknown
  Description of Unknown: Integrase B9142 sequence
  PTHR30461:SF3,IPR036162,PS51737,IPR011109,PTHR30461, PS00397,PF00239,G3DSA:1.10.10.2600,IPR006119,SSF53041, cd00338,SM00857,IPR025827,IPR038109,PS51736, IPR006118,PF13408,G3DSA:3.40.50.1390,Coil
MRKNLRVAGYARVSTDEQKKYGYSIQAQTEEITQWCNDNGHSLQHIYIDEGYSASNMKRPQLQSMLSNLRDLDAIAFTRLDRLSRNVLEANKMLELLQQNNVAMISICEDDINTSTANGLFMFNLKVNLAEHELKKGSERIKAVFEYKIAQGQPITGNVPFGYKIATENGNKRIVIDESKAPIVKDIFASFLLHQSVHHTVEYVNNKYGLSRPYMSYMHILKNEFYAGSYRGNPNYAEPYITKETYNAVQTALQSNIRTGIQRHVYLFTGLLRCPECRSKLVGVSHPKGGKRYYYYRCNNAHSVHTCTHKKHYAELATEKYLLSNLDALLKDHIATISSITSETKNTTEKELKELRKELDNLNYIFIKKRMPVSTYERLYAETEDKIKRLESFKPQSTDHLNQFLNSGWRSIYDNLTRENKRTLWRNVLDSVHVSPDGIEVFFK

SEQ ID NO: 9142 - protein, 444 aa, Unknown
  Description of Unknown: Integrase B9143 sequence
  PTHR30461:SF3,cd00338,SM00857,IPR006118,IPR036162, PF13408,IPR025827,G3DSA:3.40.50.1390,PS51737,IPR006119, SSF53041,IPR011109,PTHR30461,PS00397,PS51736, Coil,PF00239
MEGKKRAAIYVRVSTAEQRDHGLSVDSQIDALQKYCRENSLEVAGIYNDAGISARKKYKARPALLQLIQDCKDHKIDIILFTKLDRWFRSVADYYEVQSQLDAAKVPWRAIWEDYETETSAGVFKVNIMLSIAQAESDRTSERIRAVNEYRKSQGYIIVGKMPLGYIRTSASTIDFDPQTKEAMQAFFDTYLNTYSPVQAMDAAAEKGLKMSRKTAHFLLDKEPYYGTYYGVSVPGYITPAQHELIQQARQHYPRQPKADRVYIFTGLIFCASCGARMGSKCTCYTSYGKPSEKLYYQCRMRTVRRGECKNAAFIMEHNLESYMIDHLEELIVDYNASVQKLAAKAKSTEGKIEKIKGRLERLKDIYLDGDMSRAEYLEKTKELKAQLAELESLAAPALPVSQMPDNWKEIYEQLSRQGKRDFWHRVVRRIEIKRHSVDKVYFV

SEQ ID NO: 9143 - protein, 444 aa, Unknown
  Description of Unknown: Integrase B9144 sequence
  PTHR30461:SF3,IPR036162,PS51737,IPR011109,PTHR30461, PS00397,PF00239,G3DSA:1.10.10.2600,IPR006119,SSF53041, cd00338,SM00857,IPR025827,IPR038109,PS51736, IPR006118,PF13408,G3DSA:3.40.50.1390,Coil
MKKNLRIGGYARVSTDEQKKYGYSIQAQIDEIKNWCSEHNHQLQNIYIDEGYSASNMKRPQLQLMLSNLKNLDAIAFTRLDRLSRNVLEANKMLELLQQNNVAMISICEDDINTSTANGLFMFNLKVNLAEHELKKGSERIKAVFEYKIAQGQPITGNVPFGYRIATENGNKRIIIDESKAPIVKDIFASFLLHQSVHYTVEYVNNKYGLSRPYMSYMHILKNEFYAGSYRGNSNYAEPYITRDTYNAVQNALQANIRTGIQRHTYLFTGLLRCPECRSKLVGVSHPKGGKRYYYYRCNNAHSVHTCSHKKHYAELATEKYLLSNLDSLLKDHIATISSITSETKDTTEKELKELRKELDNLNYIFIKKRMPVSTYERLYAETEDKIKRLESFKPQSTDHLNQFLNSGWRSIYDNLTRENKRTLWRNVLESVHVSPDGIEVFFK

SEQ ID NO: 9144 - protein, 444 aa, Unknown
  Description of Unknown: Integrase B9145 sequence
  PTHR30461:SF3,IPR036162,PS51737,IPR011109,PTHR30461, PS00397,PF00239,G3DSA:1.10.10.2600,IPR006119,SSF53041, cd00338,SM00857,IPR025827,IPR038109,PS51736, IPR006118,PF13408,G3DSA:3.40.50.1390,PF07508,Coil
MRKNLRVAGYARVSTDEQKKYGYSIQAQTEEITQWCNDNGHALQHIYIDEGYSASNMKRPQLQSMLSNLRDLDAIAFTRLDRLSRNVLEANKMLELLQQNNVAMISICEDDINTSTANGLFMFNLKVNLAEHELKKGSERIKAVFEYKIAQGQPITGNVPFGYRIATENGNKRIVIDKSKAPIVKDIFDSFLLHQSVHHTVEYVNKKYGLSRPYMSYMHILKNEFYAGSYRGNSNYAEPYITKETYNAVQTALQANIRTGVQRHVYLFTGLLRCPECRSKLVGVSHPKGGKRYYYYRCNNAHSVHTCTHKKHYAELATEKYLLSNLDDLLKDHIATISSITSETKNTTEKELKELRKELDNLNYIFIKKRMPVSTYERLYAETEDKIKRLESFKPKSTDHLQQFLNSGWRSIYDNLTRENKRTLWRNILDSVHVSPDGIEVFFK

SEQ ID NO: 9145 - protein, 444 aa, Unknown
  Description of Unknown: Integrase B9146 sequence
  PTHR30461:SF3,IPR036162,PS51737,IPR011109,PTHR30461, PS00397,PF00239,G3DSA:1.10.10.2600,IPR006119,SSF53041, cd00338,SM00857,IPR025827,IPR038109,PS51736, IPR006118,PF13408,G3DSA:3.40.50.1390,Coil
MRKKLRVAGYARVSTDEQKKYGYSIQAQTEEITQWCNDNDHDLQHIYVDEGYSASTMKRPQLQSMLSNLKNLDAIAFTRLDRLSRNVLEANKMLELLQQNNVAMISICEDDINTSTANGLFMFNLKVNLAEHELKKGSERIKAVFEYKIAQGQPITGNVPFGYRIATENGNKRIVIDESKAPIVKDIFDSFLLHQSVHYTVEYVNNKYGLSRPYMSYMHILKNEFYAGSYRGNSNYAEPYITKDTYNAVQTALQANIRTGIQRHTYLFTGLLRCPECRSKLVGVSHPKGGKRYYYYRCNNAHSVHTCTHKKHYAELSTEKYLLSNLDTLLKDHIATISSITSETKNTTEKELKELRKELDNLNYIFIKKRMPVSTYEHLYAETEDKIKRLESFKPQSTDHLKQFLNSGWRSIYDNLTRENKRTLWRNVLDSVNVSPDGIEVFFK

SEQ ID NO: 9146 - protein, 444 aa, Unknown
  Description of Unknown: Integrase B9147 sequence
  PTHR30461:SF3,SM00857,G3DSA:1.10.10.2600,IPR036162,PF13408, IPR025827,G3DSA:3.40.50.1390,PS51737,IPR006119,IPR038109, PF07508,IPR011109,SSF53041,PTHR30461,PS51736, cd00338,PF00239
MVSEGGVITKRLIQKIEPTIPIQPRLLRVAAYARVSSGKDAMLHSLSAQVSYYNELIQGNPEWLFCGIYADEALTGTKSNRAEFQKMLTACRNGEIDLIITKSISRFARNTVTLLETVRELKDIGVDVYFEEQNIHTMSADGELMLTILSSYAQEESFSASENKKWQIRKDFELGKVSNLQMLGLQRNADGVLEIIPEEAVIVRKIFSDYLGGKGKLAIANELNELHIPTKLGCEWTPRAILRILRNEKYCGDLLLQKSFREDHITKRKIRNDGQLPQYYVEEAHEPIIDKETFQLVQQRLDEMKRFNLGKISNAVYPFSGRLHCPHCGKNYRRKTTATGIVWICSTYNTKGKKYCPTAKQIPEEKLYAACCDALGISDFDEDIFQSEIQQIIVPAPNRLEFIFHNGTTKTVEWQDRSRSESWTAEKRKQAGQISKERRWHRCP

SEQ ID NO: 9147 - protein, 444 aa, Unknown
  Description of Unknown: Integrase B9148 sequence
  PTHR30461:SF3,IPR036162,PS51737,IPR011109,PTHR30461, PS00397,PF00239,G3DSA:1.10.10.2600,IPR006119,SSF53041, cd00338,SM00857,IPR025827,IPR038109,PS51736, IPR006118,PF13408,G3DSA:3.40.50.1390,Coil
MRKKLRVAGYARVSTDEQKKYGYSIQAQTEEITQWCNDNDHELIHIYIDEGFSASTMKRPQLQVMLSNLKNLDAIAFTRLDRLSRNVLEANKMLELLQQNNVAMISICEDDINTSTANGLFMFNLKVNLAEHELKKGSERIKAVFEYKVAQGQPITGNVPFGYRIVTENGNKRIVIDESKAPIVKDIFESFLLHQSVHHTVEYVNKKYGLSRPYMSYMHILKNEFYSGSYRGNSNYAEPYITKETYNAVQTALQANIRTGIQRHVYLFTGLLRCPECRSKLIGVSHPKGGKRYYYYRCNNAHSVHTCTHKKHYAELATEKYLLSNLDDLLKNHIATISSITSETKDTTEKELKELRKELDNLNYIFIKKRMPVSTYERLYAETEDKIKRLESFKPQSTDHLNQFLNSGWRSIYDNLTRENKRTLWRNVLDSVHVSPDGIEVFFK

SEQ ID NO: 9148 - protein, 444 aa, Unknown
  Description of Unknown: Integrase B9149 sequence
  PTHR30461:SF3,IPR036162,PS51737,IPR011109,PTHR30461, PS00397,PF00239,G3DSA:1.10.10.2600,IPR006119,SSF53041, cd00338,SM00857,IPR025827,IPR038109,PS51736, IPR006118,PF13408,G3DSA:3.40.50.1390,Coil
MRKKLRVAGYARVSTDEQKKYGYSIQAQIDEIKNWCSEHNHQLQSIYIDEGYSASNMKRPQLQAMLSNLKNIDAIAFTRLDRLSRNVLEANKMLELLQQNNVAMISICEDDINTSTANGLFMFNLKVNLAEHELKKGSERIKAVFEYKVAQGQPITGNVPFGYRIATENGNKRIAIDESKAPIVKDIFASFLLHQSVHYTVEYVNKKYGLSRPYMSYMHILKNEFYAGSYRGNSNYAEPYITKETYNAVQTALQANIRTGIQRHVYLFTGLLRCPECRSKLVGVSHPKGGKRYYYYRCNNAHSVHTCTHKKHYAELATEKYLLSNLDALLKDHIATISSITSETKNTTEKELKELRKELDNLNYIFIKKRMPVNTYERLYAETEDKIKRLESFKPQSTDHLNQFLNSGWRSIYDNLTRENKRTLWRNVLDSVHVSPDGIEVFFK

SEQ ID NO: 9149 - protein, 444 aa, Unknown
  Description of Unknown: Integrase B9150 sequence
  PTHR30461:SF3,IPR036162,PS51737,IPR011109,PTHR30461, PS00397,PF00239,G3DSA:1.10.10.2600,IPR006119,SSF53041, cd00338,SM00857,IPR025827,IPR038109,PS51736, IPR006118,PF13408,G3DSA:3.40.50.1390,Coil
MRKKLRVAGYARVSTDEQKKYGYSIQAQAEEITQWCNDNDHALQHIYVDEGYSASTMKRPQLQSMLSNLKNFDAIAFTRLDRLSRNVLEANKMLELLQQNNVAMISICEDDINTSTANGLFMFNLKVNLAEHELKKGSERIKAVFEYKVAQGQPITGNVPFGYMIVTENGNKRIAIDESKAPIVKDIFESFLLHQSVHYTVEYVNKKYGLSRPYMSYMHILKNEFYAGSYRGNSNYAEPYITKDTYNAVQTALQANIRTGIQRHTYLFTGLLRCPECRSKLVGVSHPKGGKRYYYYRCNNAHSVHTCSHKKHYAELSTEKYLLSNLDTLLKDHIATISSVTSETKNTTEKELKELRKELDNLNYIFIKKRMPVNTYERLYTETEDKIKRLESFKPQSTDHLNQFLNSGWRSIYDNLTRENKRTLWRNVLDSVHVSPDGIEVFFK

SEQ ID NO: 9150 - protein, 444 aa, Unknown
  Description of Unknown: Integrase B9151 sequence
  PTHR30461:SF3,IPR036162,PS51737,IPR011109,PTHR30461, PS00397,PF00239,G3DSA:1.10.10.2600,IPR006119,SSF53041, cd00338,SM00857,IPR025827,IPR038109,PS51736, IPR006118,PF13408,G3DSA:3.40.50.1390,PF07508,Coil
MRKKLRVAGYARVSTDEQKKYGYSIQAQTEEITQWCNENGHDLQHIYIDEGFSASTMKRPQLQLMLSNLKNLDAIAFTRLDRLSRNVLEANKMLELLQQNNVAMISICEDDINTSTANGLFMFNLKVNLAEHELKKGSERIKAVFEYKIAQGQPITGNVPFGYKIATENGNKRIVIDESKAPIVKDIFESFLLHQSVHHTVEYVNNKYGLSRPYMSYMHILKNEFYAGSYRGNFNYVEPYITKETYNAVQTALKANIRTGIQRHTYLFTGLLRCPECRSKLVGVSHPKGGKRYYYYRCNNAHSVHTCTHKKHYAELATEKYLLSNLDKLLKDHIATISSITSEAKDTTEKELKELRKELDNLNYIFIKKRMPVSTYERLYAETEDKIKRLESFKPQSTDHLNQFLNSGWRSIYDNLTRENKRTLWRNVLDSVHVFPDKIEVFFK

SEQ ID NO: 9151 - protein, 444 aa, Unknown
  Description of Unknown: Integrase B9152 sequence
  PTHR30461:SF3,IPR036162,PS51737,IPR011109,PTHR30461, PS00397,PF00239,G3DSA:1.10.10.2600,IPR006119,SSF53041, cd00338,SM00857,IPR025827,IPR038109,PS51736, IPR006118,PF13408,G3DSA:3.40.50.1390,PF07508,Coil
MRKKLRVAGYARVSTDEQKKYGYSIQAQIDEITQWCNDNGHALQHIYIDEGFSASTMKRPQLQSMLSNLKNLDAIAFTRLDRLSRNVLEANKMLELLQQNNVAMISICEDDINTSTANGLFMFNLKVNLAEHELKKGSERIKAVFEYKVAQGQPITGNVPFGYRIATENGNKRIAIDESKAPIVKDIFESFLLHQSVHHTVEYVNQKYGLSRPYMSYMHILKNEFYAGSYRGNSNYAEPYITRDTYNAVQNALQANIRTGIQRHTYLFTGLLRCPECRSKLVGVSHPKGGKRYYYYRCNNAHSVHTCSHKKHYAELATEKYLLSNLDTLLKDHIATISSITSETKDTTEKELKELRKELDNLNYIFIKKRMPVSTYERLYAETEDKIKRLESFKPQSTDHLNQFLNSGWRSIYENLTRENKRTLWRNVLDSVHVSPDGIEVFFK

SEQ ID NO: 9152 - protein, 444 aa, Unknown
  Description of Unknown: Integrase B9153 sequence
  PTHR30461:SF3,IPR036162,PS51737,IPR011109,PTHR30461, PS00397,PF00239,G3DSA:1.10.10.2600,IPR006119,SSF53041, cd00338,SM00857,IPR025827,IPR038109,PS51736, IPR006118,PF13408,G3DSA:3.40.50.1390,PF07508,Coil
MRKKLRVAGYARVSTDEQKKYGYSIQAQTEEITQWCNDNDHDLIHIYIDEGFSASTMKRPQLQSMLSNLKNIDAIAFTRLDRLSRNVLEANKMLELLQQNNVAMISICEDDINTSTANGLFMFNLKVNLAEHELKKGSERIKAVFEYKVAQGQPITGNVPFGYRIATENGNKRIVIDESKAPIVKDIFESFLLHQSVHYTVEYVNQKYGLSRPYMSYMHILKNEFYAGSYRGNSNYTEPYITKETYNAVQTALQANIRTGIQRHVYLFTGLLRCPECRSKLVGVSHPKGGKRYYYYRCNNAHSVHTCTHKKHYAELATEKYLLSNLDALLKDHIATISSITSETKDTTEKELKELRKELDNLNYIFIKKRMPVSTYERLYAETEDKIKRLESFKPQSTDHLQQFLNSGWRSIYDNLTRENKRTLWRNVLDSVHVSPDKIEVFFK

SEQ ID NO: 9153 - protein, 444 aa, Unknown
  Description of Unknown: Integrase B9154 sequence
  PTHR30461:SF3,IPR036162,PS51737,IPR011109,PTHR30461, PS00397,PF00239,G3DSA:1.10.10.2600,IPR006119,SSF53041, cd00338,SM00857,IPR025827,IPR038109,PS51736, IPR006118,PF13408,G3DSA:3.40.50.1390,Coil
MRKNLRVAGYARVSTDEQKKYGYSIQAQTEEITQWCNDNGHALQHIYIDEGYSASNMKRPQLQSMLSNLRDLDAIAFTRLDRLSRNVLEANKMLELLQQNNVAMISICEDDINTSTANGLFMFNLKVNLAEHELKKGSERIKAVFEYKIAQGQPITGNVPFGYKITTENGNKRIVIDESKAPIVKDIFGSFLLHQSVHHTVEYVNNKYGLSRPYMSYMHILKNEFYAGSYRGNSNYAEPYITKETYNAVQTALQSNIRTGIQRHVYLFTGLLRCPECRSKLVGVSHPKGGKRYYYYRCNNAHSVHTCTHKKHYAELATEKYLLSNLDNLLKDHIATISSITSETKNTTEKELKELRKELDNLNYIFIKKRMPVSTYERLYAETEDKIKRLESFKPKNTDHLNQFLNSGWLSIYGNLTRENKRTLWRNILDSVHVSPDGIEVFFK

SEQ ID NO: 9154 - protein, 444 aa, Unknown
  Description of Unknown: Integrase B9155 sequence
  PTHR30461:SF3,IPR036162,PS51737,IPR011109,PTHR30461, PS00397,PF00239,G3DSA:1.10.10.2600,IPR006119,SSF53041, cd00338,SM00857,IPR025827,IPR038109,PS51736, IPR006118,PF13408,G3DSA:3.40.50.1390,PF07508,Coil
MRKNLRVAGYARVSTDEQKKYGYSIQAQTEEITQWCNDNDHALQHIYIDEGYSASTMKRPQLQTMLSNLRDLDAIAFTRLDRLSRNVLEANKMLELLQQNDVAMISICEDDINTSTANGLFMFNLKVNLAEHELKKGSERIKAVFEYKVAQGQPITGNVPFGYRIATENGNKRIAIDESKAPIVKDIFESFLLHQSVHHTVEYVNKKYGLSRPYMSYMHILKNEFYAGSYRGNPNYAEPYITKETYNAVQTALQANIRTGVQRHVYLFTGLLRCPECRSKLVGVSHPKGGKRYYYYRCNNAHSVHTCTHKKHYAELATEKYLLSNLDALLKDHIATISSITSETKNTTEKELKELRKELDNLNYIFIKKRMPVNTYERLYAETEDKIKRLESFKPQSTDHLNQFLNSGWRSIYDNLTRENKRTLWRNVLDSVHVSPDGIEVFFK

SEQ ID NO: 9155 - protein, 444 aa, Unknown
  Description of Unknown: Integrase B9156 sequence
  PTHR30461:SF3,IPR036162,PS51737,IPR011109,PTHR30461, PS00397,PF00239,G3DSA:1.10.10.2600,IPR006119,SSF53041, cd00338,SM00857,IPR025827,IPR038109,PS51736, IPR006118,PF13408,G3DSA:3.40.50.1390,Coil
MRKNLRVAGYARVSTDEQKKYGYSIQAQTEEITQWCNDNGHALQHIYIDEGYSASNMKRPQLQAMLSNLRDLDAIAFTRLDRLSRNVLEANKMLELLQQNDVAMISICEDDINTSTANGLFMFNLKVNLAEHELKKGSERIKAVFEYKIAQGQPITGNVPFGYRIVTENGNKRIAIDESKAPIVKDIFESFLLHQSVHYTVEYVNKKYGLSRPYMSYMHILKNEFYSGSYRGNSNYAEPYITKETYNAVQTALQANIRTGIQRHVYLFTGLLRCPECRSKLVGVSHPKGGKRYYYYRCNNAHSVHTCTHKKHYAELATEKYLLSNLDNLLKDHIATISSVTSETKNTTEKELKELRKELDNLNYIFIKKRMPVSTYERLYAETEDKIKRLESFKPQSTDHLKQFLNSGWRSIYDNLTRENKRTLWRNVLDSVHVSPDKIEVFFK

SEQ ID NO: 9156 - protein, 444 aa, Unknown
  Description of Unknown: Integrase B9157 sequence
  PTHR30461:SF3,IPR036162,PS51737,IPR011109,PTHR30461, PS00397,PF00239,G3DSA:1.10.10.2600,IPR006119,SSF53041, cd00338,SM00857,IPR025827,IPR038109,PS51736, IPR006118,PF13408,G3DSA:3.40.50.1390,PF07508,Coil
MRKNLRVAGYARVSTDEQKKYGYSIQAQTEEITQWCNDNGHALQHIYIDEGYSASNMKRPQLQSMLSNLRDLDAIAFTRLDRLSRNVLEANKMLELLQQNNVAMISICEDDINTSTANGLFMFNLKVNLAEHELKKGSERIKAVFEYKIAQGQPITGNVPFGYRIATENGNKRIVIDESKAPIVKDIFESFLLHQSVHHTVEYVNKKYGLTRPYMSYMHILKNEFYTGSYRGNSNYAEPYITKETYNAVQTALQSNIRTGIQRHVYLFTGLLRCPECRSKLVGVSHPKGGKRYYYYRCNNAHSVHTCTHKKHYAELATEKYLLSNLDALLKDHIATISSITSETKNTTEKELKELKKELDNLNYIFIKKRMPVNTYERLYAETEDKIKRLESFKPKSTDHLNQFLNSGWRSIYENLTRENKRTLWRNILDSVHVSPDGIEVFFK

SEQ ID NO: 9157 - protein, 444 aa, Unknown
  Description of Unknown: Integrase B9158 sequence
  PTHR30461:SF3,IPR036162,PS51737,IPR011109,PTHR30461, PS00397,PF00239,G3DSA:1.10.10.2600,IPR006119,SSF53041, cd00338,SM00857,IPR025827,IPR038109,PS51736, IPR006118,PF13408,G3DSA:3.40.50.1390,Coil
MRKKLRVAGYARVSTDEQKKYGYSIQAQIDEITQWCNDNDHDLLNIYIDEGFSASTMKRPQLQLMLSNLKNLDAIAFTRLDRLSRNVLEANKMLELLQQNNVAMISICEDDINTSTANGLFMFNLKVNLAEHELKKGSERIKAVFEYKVAQGQPITGNVPFGYRIATENGNKRIVIDESKAPIVKDIFESFLLHQSVHYTVEYVNKKYGLSRPYMSYMHILKNEFYAGSYRGNSNYAEPYITKDTYNAVQTTLQANIRTGIQRHVYLFTGLLRCPECRSKLVGVSHPKGGKRYYYYRCNNAHSVHTCSHKKHYAELATEKYLLSNLDNLLKDHIATISSITSETKNTTEKELKELRKELDNLNYIFIKKRMPVNTYERLYAETEDKIKRLESVKPQSTVHLNQFLNSGWRSIYENLTRENKRTLWRNVLESVHVSPDGIEVFFK

SEQ ID NO: 9158 - protein, 444 aa, Unknown
  Description of Unknown: Integrase B9159 sequence
  PTHR30461:SF3,IPR036162,PS51737,IPR011109,PTHR30461, PS00397,PF00239,G3DSA:1.10.10.2600,IPR006119,SSF53041, cd00338,SM00857,IPR025827,IPR038109,PS51736, IPR006118,PF13408,G3DSA:3.40.50.1390,PF07508,Coil
MRKKLRVAGYARVSTDEQKKYGYSIQAQTEEITQWCNDNDHILQHIYVDEGYSASTMKRPQLQSMLSNLKNLDAIAFTRLDRLSRNVLEANKMLELLQQNNVAMISICEDDINTSTANGLFMFNLKVNLAEHELKKGSERIKAVFEYKIAQGQPITGNVPFGYRIATENGNKRIIIDESKAPIVKDIFESFLLHQSVHHTVEYVNNKYGLSRPYMSYMHILKNEFYAGSYRGNSNYAEPYITKETYNAVQTALQANIRTGIQRHVYLFTGLLRCPECRSKLVGVSHPKGGKRYYYYRCNNAHSVHTCTHKKHYAELATEKYLLSNLDELLKNHIATISSITSETKDTTEKELKELRKELDNLNYIFIKKRMPVNTYERLYAETEDKIKRLESFKPQSTDHLNQFLNSGWRSIYDNLTRENKRTLWRNVLDSVHVSPDKIEVFFK

SEQ ID NO: 9159 - protein, 444 aa, Unknown
  Description of Unknown: Integrase B9160 sequence
  PTHR30461:SF3,IPR036162,PS51737,IPR011109,PTHR30461, PS00397,PF00239,G3DSA:1.10.10.2600,IPR006119,SSF53041, cd00338,SM00857,IPR025827,IPR038109,PS51736, IPR006118,PF13408,G3DSA:3.40.50.1390,Coil
MRKNLRVAGYARVSTDEQKKYGYSIQAQTEEITQWCNDNDHDLIHIYIDEGFSASTMKRPQLQSMLSNLKNLDAIAFTRLDRLSRNVLEANKMLELLQQNNVAMISICEDDINTSTANGLFMFNLKVNLAEHELKKGSERIKAVFEYKIAQGQPITGNVPFGYRIVTENGNKCIAIDESKAPIVKDIFESFLLHQSVHYTVEYVNKKYGLSRPYMSYMHILKNEFYAGSYRGNSNYAEPYITRDTYNAVQTALQANIRTGIQRHTYLFTGLLRCPECRSKLVGVSHPKGGKRYYYYRCNNAHSVHTCSHKKHYAELATEKYLLSNLDALLKNHIATISSITSETKNTTEKELKELRKELDNLNYIFIKKRMPVNTYERLYAETEDKIKRLESFKPQSTDHLNQFLNSGWRSIYESLTRENKRTLWRNVLDSVHVSPDKIEVFFK

SEQ ID NO: 9160 - protein, 444 aa, Unknown
  Description of Unknown: Integrase B9161 sequence
  PTHR30461:SF3,SM00857,G3DSA:1.10.10.2600,IPR036162,PF13408, PS51737,G3DSA:3.40.50.1390,IPR025827,IPR006119,IPR038109, PF07508,IPR011109,SSF53041,PTHR30461,PS51736, cd00338,PF00239
MAETIKINSLPTLPTLLKVAAYARVSNGKDAMLHSLSEQVSYYNRYIQEHDGWQFAGIYADEAISGTKENRDEFQRMLMDAYEGKIDLIITKSISRFARNTMTLLETIKKLKKHNVNVFFEEQNLYSMSGECEMILTMLASFAQEEARSVSENMKWKIRKDFEEGLLWGGNNAYGYRIENRRYVIVPEEASLVKNIFNLYLEGMGITAIALKLNKMNIPAYFGGKWNFSSVQNILKNETYTGDLILQKTFRTDYISKKRKMNRGEKDKFLISNDHEAIISKSDFNKVQEMIKSKSKRYNVPDNCYSHRYPFSGMIECSECHKTYIHRKKHGIDKWGCQSAEQYGRAYCKTSDAISNSTLEEVTAKVLNLDKFDEKVFKSEIFKIISKPNHLLTFIFKDGSERDITWSNPSRSKSWTPEMKEVARQRSLKLYKKRGEDGRWLKEK

SEQ ID NO: 9161 - protein, 444 aa, Unknown
  Description of Unknown: Integrase B9162 sequence
  PTHR30461:SF3,IPR036162,PS51737,IPR011109,PTHR30461, PS00397,PF00239,G3DSA:1.10.10.2600,IPR006119,SSF53041, cd00338,SM00857,IPR025827,IPR038109,PS51736, IPR006118,PF13408,G3DSA:3.40.50.1390,PF07508,Coil
MRKKLQVAGYARVSTDEQKKYGYSIQAQTEEITQWCNDNDHDLIHIYIDEGFSASTMKRPQLQSMLSNLKNLDAIAFTRLDRLSRNVLEANKMLELLQQNDVAMISICEDDINTSTANGLFMFNLKVNLAEHELKKGSERIKAVFEYKIAQGQPITGNVPFGYRIVTENGNKRIAIDESKAPIVKDIFESFLLHQSVHHTVEYVNKKYGLSRPYMSYMHILKNEFYAGSYRGNANYAEPYITKETYNAVQTALQSNIRTGVQRHVYLFTGLLRCPECRSKLVGVSHPKGGKRYYYYRCNNAHSVHTCTHKKHYAELATEKYLLSNLDTLLKDHIATISSITSETKNTTEKELKELRKELDNLNYIFIKKRMPVSTYERLYAETEDKIKRLESFKPQSTDHLNQFLSSGWRSIYDNLTRENKRTLWRNVLDSVHVSPDGIEVFFK

SEQ ID NO: 9162 - protein, 444 aa, Unknown
  Description of Unknown: Integrase B9163 sequence
  PTHR30461:SF3,SM00857,IPR006118,IPR036162,PF13408, IPR025827,PS51737,G3DSA:3.40.50.1390,IPR006119,IPR011109, SSF53041,PF00239,PTHR30461,PS00397,PS51736, Coil,cd00338
MEGKKRAAIYVRVSTAEQRDHGLSVDSQIDALQKYCRENGLEVAGIYNDAGISARKKYKARPALLQLIEDCQNKKVDIILFTKLDRWFRSVADYYEVQSQLDAAKVPWRAIWEDYETETSAGVFKVNIMLSIAQAESDRTSERIRAVNEYRKSQGYIIVGKMPLGYIRTSASTIDFDPQTKEAMQVFFDTYLNTYSPVQAMDAAAERGLKMSRKTAHFLLDKEPYYGTYYGVSVPGYITPAQHELIQQARQHYPRQPKADRVYIFTGLIFCASCGARMGSKCTCYTSYGKPSEKLYYQCRMRTVRRGECKNAAFVMEHNLESYMIDHLEELIVDYNASVQKLAAKAKSTEGKIEKIKGRLERLKDIYLDGDMSRAEYLEKTKELKAQLAELESLTAPALPVSQMPDNWKEIYEQLSRQGKRDFWHRVVRRIEIKRHSVDKVYFV

SEQ ID NO: 9163 - protein, 444 aa, Unknown
  Description of Unknown: Integrase B9164 sequence
  cd00338,SM00857,IPR006118,IPR036162,PF13408, PS51737,G3DSA:3.40.50.1390,IPR025827,IPR006119,SSF53041, IPR011109,PTHR30461,PS00397,PS51736,Coil, PF00239
MEGKKRAAIYVRVSTAEQRDHGLSVDSQIDALQKYCRENGLEVAGIYNDAGISARKKYKARPALLQLIEDCQNKKVDIILFTKLDRWFRSVADYYEVQSQLDAAKVPWRAIWEDYETETSAGVFKVNIMLSIAQAESDRTSERIRAVNEYRKSQGYIIVGKMPLGYIRTSASTIDFDPQTKEAMQAFFDTYLNTYSPVQAMDAAAEKGLKMSRKTAHFLLDKEPYYGTYYGVSVPGYITPAQHELIQQARQHYPRQPKADRVYIFTGLIFCASCGARMGSKCTCYTSYGKPSEKLYYQCRMRTVRRGECKNAAFIMEHNLESYMIDHLEELIVDYNASVQKLAAKAKSTEGKIEKIKGRLERLKDIYLDGDMSRAEYLEKTKELKAQLAELESLATPALPVSQMPDNWKEIYEQLSRQGKRDFWHRVVRRIEIKRHSVDKVYFV

SEQ ID NO: 9164 - protein, 444 aa, Unknown
  Description of Unknown: Integrase B9165 sequence
  PTHR30461:SF3,IPR036162,PS51737,IPR011109,PTHR30461, PS00397,PF00239,G3DSA:1.10.10.2600,IPR006119,SSF53041, cd00338,SM00857,IPR025827,IPR038109,PS51736, IPR006118,PF13408,G3DSA:3.40.50.1390,Coil
MRKNLRVAGYARVSTDEQKKYGYSIQAQTEEITQWCNDNGHSLQHIYIDEGYSASNMKRPQLQAMLSNLRDLDAIAFTRLDRLSRNVLEANKMLELLQQNNVAMISICEDDINTSTANGLFMFNLKVNLAEHELKKGSERIKAIFEYKIAQGQPITGNVPFGYKITTENGNKRIVIDESKAPIVKDIFASFLLHQSVHHTVEYVNNKYGLSRPYMSYMHILKNEFYTGSYRGNSNYAEPYITRETYNAVQTALQSNIRTGIQRHVYLFTGLLRCPECRSKLVGVSHPKGGKRYYYYRCNNAHSVHTCTHKKHYAELATEKYLLSNLDNLLKDHIATISSVTSETKNTTEKELKELRKELDNLNYIFIKKRMPVNTYERLYAETEDKIKRLESFKPKSTDHLQQFLNSGWRSIYDNLTRENKRTLWRNVLDSVHVSPDGIEVFFK

SEQ ID NO: 9165 - protein, 444 aa, Unknown
  Description of Unknown: Integrase B9166 sequence
  PTHR30461:SF3,IPR036162,PS51737,IPR011109,PTHR30461, PS00397,PF00239,G3DSA:1.10.10.2600,IPR006119,SSF53041, cd00338,SM00857,IPR025827,IPR038109,PS51736, IPR006118,PF13408,G3DSA:3.40.50.1390,Coil
MRKNLRVAGYARVSTDEQKKYGYSIQAQTEEITQWCNDNGHSLQHIYIDEGFSASNMKRPQLQSMLSNLRDLDAIAFTRLDRLSRNVLEANKMLELLQQNNVAMISICEDDINTSTANGLFMFNLKVNLAEHELKKGSERIKAVFEYKIAQGQPITGNVPFGYRIATENGNKRIVIDESKAPIVKDIFASFLLHQSVHYTVEYVNNKYGLSRPYMSYMHILKNEFYAGSYRGNSNYAEPYITRETYNAVQTALQSNIRTGIQRHVYLFTGLLRCPECRSKLVGVSHPKGGKRYYYYRCNNAHSVHTCTHKKHYAELATEKYLLSNLDALLKDHIATISSITSETKNTTEKELKELRKELDNLNYIFIKKRMPVNTYERLYAETEDKIKRLESFKPKSTDHLNQFLNSGWRSIYDNLTRENKRTLWRNVLDSVHVSPDGIEVFFK

SEQ ID NO: 9166 - protein, 444 aa, Unknown
  Description of Unknown: Integrase B9167 sequence
  PTHR30461:SF3,cd00338,SM00857,IPR006118,IPR036162, PF13408,PS51737,G3DSA:3.40.50.1390,IPR025827,IPR006119, SSF53041,IPR011109,PTHR30461,PS00397,PS51736, Coil,PF00239
MEGKKRAAIYVRVSTAEQRDHGLSVDSQIDALQKYCRENGLEVAGIYNDAGISARKKYKARPALLQLIQDCKDHKIDIILFTKLDRWFRSVADYYEVQSQLDAAKVPWRAIWEDYETETSAGVFKVNIMLSIAQAESDRTSERIRAVNEYRKSQGYIIVGKMPLGYIRTSASTIDFDPKTKDAMQTFFDTYLNTYSPVQAMDAAAEKGLKMSRKTAHFLLDKEPYYGTYYGVSVPGYITPAQHELIQQARLHYPRQPKADRVYIFTGLIFCANCGARMGSKCACYTSYGKPSEKLYYQCRMRTVRRGECKNAAFIMEHNLESYMIDHLEELIVDYNASVQKLAAKAKSTEGKIEKIKGRLERLKDIYLDGDMSRAEYLENVKELKAQLAELESLAAPALPVSQMPDNWKEVYKQLSKEGKRDFWHRVVRRIEIKRHSVDKVYFV

SEQ ID NO: 9167 - protein, 444 aa, Unknown
  Description of Unknown: Integrase B9168 sequence
  PTHR30461:SF3,IPR036162,PS51737,IPR011109,PTHR30461, PS00397,PF00239,G3DSA:1.10.10.2600,IPR006119,SSF53041, cd00338,SM00857,IPR025827,IPR038109,PS51736, IPR006118,PF13408,G3DSA:3.40.50.1390,PF07508,Coil
MRKNLRVAGYARVSTDEQKKYGYSIQAQTEEITQWCNDNGHSLQHIYIDEGYSASNMKRPQLQSMLSNLRDLDAIAFTRLDRLSRNVLEANKMLELLQQNNVAMISICEDDINTSTANGLFMFNLKVNLAEHELKKGSERIKAVFEYKIAQGQPITGNVPFGYKITTENGNKRIVIDESKAPIVKDIFNSFLLHQSVHHTVEYVNNKYGLSRPYMSYMHILKNEFYAGSYRGNHNYAEPYITKETYNAVQTTLQANIRTGIQRHVYLFTGLLRCPECRSKLVGVSHPKGGKRYYYYRCNNAHSVHTCTHKKHYAELATEKYLLSNLDDLLKNHIATISSVTSETKDTTEKELKELRKELDNLNYIFIKKRMPVSTYERLYAETEDKIKRLESFKPKSTDHLNQFLNSGWRSIYDNLTRENKRTLWRNVLDSVHVSPDGIEVFFK

SEQ ID NO: 9168 - protein, 444 aa, Unknown
  Description of Unknown: Integrase B9169 sequence
  PTHR30461:SF3,cd00338,SM00857,IPR006118,IPR036162, PF13408,IPR025827,G3DSA:3.40.50.1390,PS51737,IPR006119, IPR011109,SSF53041,PTHR30461,PS00397,PS51736, Coil,PF00239
MEGKKRAAIYVRVSTAEQRDHGLSVDSQIDALQKYCRENSLDVAGIYNDAGISARKKYKARPALLQLIQDCKDHKIDIILFTKLDRWFRSVADYYEVQSQLDAAKVPWRAIWEDYETETSAGVFKVNIMLSIAQAESDRTSERIRAVNEYRKSQGYIIVGKMPLGYIRTSASTIDFDPKTKDAMQTFFDTYLNTYSPVQAMDAAAEKGLKMSRKTAHFLLDKEPYYGTYYGVSVPGYITPAQHELIQQARQHYPRQPKADRVYIFTGLIFCASCGARMGSKCTCYTSYGKPSEKLYYQCRMRTVRRGECKNAAFIMEHNLESYMIDHLEELIVDYNASVQKLAAKAKSTEGKIEKIKGRLERLKDIYLDGDMSRAEYLEKTKELKAQLAELESLAAPALPVSQMPDNWREVYEQLSRQGKRDFWHRVVRRIEIKRHSVDKVYFV

SEQ ID NO: 9169 - protein, 444 aa, Unknown
  Description of Unknown: Integrase B9170 sequence
  PTHR30461:SF3,cd00338,SM00857,IPR006118,IPR036162, PF13408,IPR025827,G3DSA:3.40.50.1390,PS51737,IPR006119, SSF53041,IPR011109,PTHR30461,PS00397,PS51736, Coil,PF00239
MEGKKRAAIYVRVSTAEQRDHGLSVDSQIDALQKYCRENGLEVAGIYNDAGISARKKYKARPALLQLIQDCKDHKIDIILFTKLDRWFRSVADYYEVQSQLDTAKVPWRAIWEDYETETSAGVFKVNIMLSIAQAESDRTSERIRAVNEYRKSQGYIIVGKMPLGYIRTSASTIDFDPQTKEAMQAFFDTYLNTYSPVQAMDAAAEKGLKMSRKTAHFLLDKEPYYGTYYGVSVPGYITPAQHELIQQARQHYPRQPKADRVYIFTGLIFCASCGARMGSKCTCYTSYGKPSEKLYYQCRMRTVRRGECKNAAFIMEHNLESYMIDHLEELIIDYNASVQKLAAKAKSTEGKIEKIKGRLERLKDIYLDGDMSRAEYLEKTKELKAQLAELESLATPALPVSQMPDNWKEIYEQLSRQGKRDFWHRVVRRIEIKRHSVDKVYFV

SEQ ID NO: 9170 - protein, 444 aa, Unknown
  Description of Unknown: Integrase B9171 sequence
  PTHR30461:SF3,IPR036162,PS51737,IPR011109,PTHR30461, PS00397,PF00239,G3DSA:1.10.10.2600,IPR006119,SSF53041, cd00338,SM00857,IPR025827,IPR038109,PS51736, IPR006118,PF13408,G3DSA:3.40.50.1390,Coil
MRKNLRVAGYARVSTDEQKKYGYSIQAQTEEITQWCNDNGHALQHIYIDEGYSASTMKRPQLQSMLSNLKNLDAIAFTRLDRLSRNVLEANKMLELLQQNNVAMISICEDDINTSTANGLFMFNLKVNLAEHELKKGSERIKAVFEYKVAQGQPITGNVPFGYRIVTENGNKRIVIDESKAPIVKDIFDSFLLHQSVHYTVEYVNNKYGLSRPYMSYMHILKNEFYAGSYRGNSNYAEPYITRETYNAVQTALQANIRTGIQRHVYLFTGLLRCPECRSKLVGVSHPKGGKRYYYYRCNNAHSVHTCTHKKHYAELATEKYLLSNLDALLKDHIATISSITSETKNTTEKELKELRKELDNLNYIFIKKRMPVSTYERLYAETEDKIKRLESFKPQSTDHLKQFLNSGWRSIYENLTRENKRTLWRNVLDSVHVSPDGIEVFFK

SEQ ID NO: 9171 - protein, 444 aa, Unknown
  Description of Unknown: Integrase B9172 sequence
  PTHR30461:SF3,IPR036162,PS51737,IPR011109,PTHR30461, PS00397,PF00239,G3DSA:1.10.10.2600,IPR006119,SSF53041, cd00338,SM00857,IPR025827,IPR038109,PS51736, IPR006118,PF13408,G3DSA:3.40.50.1390,Coil
MRKNLRVAGYARVSTDEQKKYGYSIQAQTEEITQWCNDNDHNLIHIYIDEGYSASNMKRPQLQSMLSNLRDLDAIAFTRLDRLSRNVLEANKMLELLQQNDVAMISICEDDINTSTANGLFMFNLKVNLAEHELKKGSERIKAVFEYKIAQGQPITGNVPFGYRIATENGNKRIVIDESKAPIVKDIFESFLLHQSVHYTVEYVNNKYGLSRPYMSYMHILKNEFYAGSYRGNSNYAEPYITKETYNDVQTALQANIRTGVQRHVYLFTGLLRCPECRSKLVGVSHPKGGKRYYYYRCNNAHSVHTCTHKKHYAELATEKYLLSNLDTLLKDHIATISSITSETKNTTEKELKELRKELDNLNYIFIKKRMPVSTYERLYAETEDKIKRLESFKPKSTDHLNQFLSSGWRSIYDNLTRENKRTLWRNVLDSVHVSPDGIEIFFK

SEQ ID NO: 9172 - protein, 444 aa, Unknown
  Description of Unknown: Integrase B9173 sequence
  PTHR30461:SF3,IPR036162,PS51737,IPR011109,PTHR30461, PS00397,PF00239,G3DSA:1.10.10.2600,IPR006119,SSF53041, cd00338,SM00857,IPR025827,IPR038109,PS51736, IPR006118,PF13408,G3DSA:3.40.50.1390,Coil
MRKKLRVAGYARVSTDEQKKYGYSIQAQTEEITQWCNDNDHALQHIYIDEGYSASTMKRPQLQAMLSNLKNLDAIAFTRLDRLSRNVLEANKMLELLQQNNVAMISICEDDINTSTANGLFMFNLKVNLAEHELKKGSERIKAVFEYKIAQGQPITGNVPFGYRIATENGNKRIIIDESKAPIVKDIFSSFLLHQSVHHTVEYVNNKYGLSRPYMSYMHILKNEFYAGSYRGNSNYAEPYITKDTYNAVQTALQANIRTGIQQHVYLFTGLLRCPECRSKLVGVSHPKGGKRYYYYRCNNAHSVHTCTHKKHYAELATEKYLLPNLDDLLKDHIATISSITSETKDTTEKELKELRKELDNLNYIFIKKRMPVSTYERLYAETEDKIKRLESFKPQSTDHLNQFLNSGWRSIYDNLTRENKRTLWRNVLDSVHVSPDKIEVFFK

SEQ ID NO: 9173 - protein, 444 aa, Unknown
  Description of Unknown: Integrase B9174 sequence
  PTHR30461:SF3,cd00338,SM00857,IPR006118,IPR036162, PF13408,PS51737,G3DSA:3.40.50.1390,IPR025827,IPR006119, SSF53041,IPR011109,PTHR30461,PS00397,PS51736, Coil,PF00239
MEGKKRAAIYVRVSTAEQRDHGLSVDSQIDALQKYCRENGLEVAGIYNDAGISARKKYKARPALLQLIQDCKDHKIDIILFTKLDRWFRSVADYYEVQSQLDAAKVPWRAIWEDYETETSAGVFKVNIMLSIAQAESDRTSERIRAVNEYRKSQGYIIVGKMPLGYIRTSASTIDFDPKTKDAMQTFFDTYLNTYSPVQAMDAAAEKGLKMSRKTAHFLLDKEPYYGTYYGVSVPGYITPAQHELIQQARQHYPRQPKADRVYIFTGLIFCASCGARMGSKCTCYTSYGKPSEKLYYQCRMRTVRRGECKNAAFIMEHNLESYMIDHLEELIVDYNASVQKLAAKAKSTEGKIEKIKGRLERLKDIYLDGDMSRAEYLEKTKELKAQLAELESLATPALPVSQMPDNWKEIYEQLSRQGKRDFWHRVVRRIEIKRHSVDKVYFV

SEQ ID NO: 9174 - protein, 444 aa, Unknown
  Description of Unknown: Integrase B9175 sequence
  PTHR30461:SF3,IPR036162,PS51737,IPR011109,PTHR30461, PS00397,PF00239,G3DSA:1.10.10.2600,IPR006119,SSF53041, cd00338,SM00857,IPR025827,IPR038109,PS51736, IPR006118,PF13408,G3DSA:3.40.50.1390,PF07508,Coil
MKKNLRIGGYARVSTDEQKKYGYSIQAQIDEIKNWCSEHNHQLQNIYIDEGYSASNMKRPQLQSMLSNLKNLDAIAFTRLDRLSRNVLEANKMLELLQQNNVAMISICEDDINTSTANGLFMFNLKVNLAEHELKKGSERIKAVFEYKIAQGQPITGNVPFGYRIATENGNKRIVIDESKAPIVKDIFESFLLHQSVHHTVEYVNQKYGLSRPYMAYMHILKNEFYAGSYRGNSNYAEPYITKETYNAVQTALQANIRTGIQRHTYLFTGLLRCPECRSKLVGVSHPKGGKRYYYYRCNNAHSVHTCTHKKHYAELATEKYLLSNLDDLLKNHIATISSITSETKDTTEKELKELRKELDNLNYIFIKKRMPVSTYERLYAETEDKIKRLESFKPQSTDHLNQFLNSGWRSIYDNLTRENKRTLWRNVLDSVHVSPDGIEVFFK

SEQ ID NO: 9175 - protein, 444 aa, Unknown
  Description of Unknown: Integrase B9176 sequence
  PTHR30461:SF3,IPR036162,PS51737,IPR011109,PTHR30461, PS00397,PF00239,G3DSA:1.10.10.2600,IPR006119,SSF53041, cd00338,SM00857,IPR025827,IPR038109,PS51736, IPR006118,PF13408,G3DSA:3.40.50.1390,PF07508,Coil
MRKKLRVAGYARVSTDEQKKYGYSIQAQAEEITQWCSDNDHDLIHIYIDEGFSASTMKRPQLQSMLSNLKNLDAIAFTRLDRLSRNVLEANKMLELLQQNDVAMISICEDDINTSTANGLFMFNLKVNLAEHELKKGSERIKAVFEYKIAQGQPITGNVPFGYRIATENGNKRIAIDESKAPIVKDIFESFLLHQSVHYTVEYVNKKYGLSRPYMSYMHILKNEFYAGSYRGNSNYAEPYITKETYNAVQTALQANIRTGIQRHTYLFTGLLRCPECRSKLVGVSHPKGGKRYYYYRCNNAHSVHTCTHKKHYAELATEKYLLSNLDTLLKDHIVTISNATSETHNTTEKELKELRKELDNLNYIFIKKRMPVSTYERLYAETEDKIKRLESFKPKSTDHLNQFLNSGWRSIYDNLTRENKRTLWRNVLDSVHVSPDGIEVFFK

SEQ ID NO: 9176 - protein, 444 aa, Unknown
  Description of Unknown: Integrase B9177 sequence
  PTHR30461:SF3,IPR036162,PS51737,IPR011109,PTHR30461, PS00397,PF00239,G3DSA:1.10.10.2600,IPR006119,SSF53041, cd00338,SM00857,IPR025827,IPR038109,PS51736, IPR006118,PF13408,G3DSA:3.40.50.1390,Coil
MRKNLRVAGYARVSTDEQKKYGYSIQAQTEEITQWCNDNGHDLIHIYIDEGFSASTMKRPQLQAMLSNLRDLDAIAFTRLDRLSRNVLEANKMLELLQQNNVAMISICEDDINTSTANGLFMFNLKVNLAEHELKKGSERIKAVFEYKIAQGQPITGNVPFGYRIATENGNKRIVIDESKAPIVKDIFASFLLHQSVHHTVEYVNKKYGLSRPYMSYMHILKNEFYAGSYRGNSNYAEPYITKETYNAVQTALQSNIRTGIQRHVYLFTGLLRCPECRSKLVGVSHPKGGKRYYYYHCNNAHSVHTCTHKKHYAELATEKYLLSNLDNLLKDHIATISSITSETKNTTDKELKELRKELDNLNYIFIKKRMPVSTYERLYAETEDKIKRLESFKPKSTDHLNQFLNSGWRSIYDNLTRENKRTLWRNVLDSVHVSPDGIEVFFK

SEQ ID NO: 9177 - protein, 443 aa, Unknown
  Description of Unknown: Integrase B9178 sequence
  PTHR30461:SF3,SM00857,G3DSA:1.10.10.2600,IPR036162,G3DSA:3.40.50 .1390,IPR006119,IPR038109,SSF53041,PTHR30461,PS51736, cd00338,PF00239
MIRCALYDRVSTDLQAEYGRSLETQIAALTEYARQHGYQIVGVYTDEALTARKNMKNRHALLRLLDDVRRDKIDLILVTKLDRWFRNVKDYHNTQSILEAHGCNWKTIFEDYDTSTPDGQLKINIMLAVAQNECDRTSARIKDVFRHKIANGEWLGGKPPFGYMCDETHHLIKNPQTAPMVEDMFSYYFTVYSKNQAVEYALHKYGDSVPAGSNLQKMFSREIYTGYRNGVQICEPFLSKEQFNTISRISESRINIVKDDPFLFSSMIICPHCHQKLCGRRAKKVKPSGKVYKYKTYNCCSKYVPDHRRPLIYESTVERYLMEHIVTDLEAQIEFTEHEGHDITPIQDVKKLKAELTRLNTMYQKGRVTDVYYDSEYERITQLINSQDATSSSLLEHMDYFKGNWIDLYNSLSRPNKKAFWKKYIEAIYLDEHTHKISGIKFL

SEQ ID NO: 9178 - protein, 443 aa, Unknown
  Description of Unknown: Integrase B9179 sequence
  cd00338,SM00857,G3DSA:1.10.10.2600,IPR036162, PS51737,G3DSA:3.40.50.1390,IPR006119,IPR038109, PF07508,SSF53041,IPR011109,PTHR30461, Coil,PF00239
MYAMYLRKSRADDKDIPLEKVLKNHYNMLTELADKLKIQIEEENVFREIETGDSISIRPKMQDLLEKVSEGLYEGVFCTELSRLCRGSKIDQEIVSSTFTAAECKIITPSKTYDLANNEFDEEMVDFGLFMSRREYKTITKRMQRGREQSVKQGKYIGSILPYGYNKEKLEGENGFKLTINEEEAHIVKLIFKWFLEDNIGASIIAKRLNQGGYPTRSGRVWSYNSVKNILTSNVVAGYLKHGERKYKKYIDAKGNVKKSRPVNKDVEYYKGLHEAIIPLHKFEKVQDILNSRKQHKSNFDLPLSNPLAGLIRCSECNRIMVKRRCSQGDFLYCSTTGCKNIGSYLNRVEEHILQALSNMLSDYEYYVDNYEQETIKEKRNVDNDLKRIEKEIEKLNKQFEKCCTFLEQDVYTIEVYKDRTSKIKDKIKILCLLYTSPSPRDA

SEQ ID NO: 9179 - protein, 443 aa, Unknown
  Description of Unknown: Integrase B9180 sequence
  PTHR30461:SF3,SM00857,G3DSA:1.10.10.2600,IPR036162,PF13408, PS51737,G3DSA:3.40.50.1390,IPR025827,IPR006119,IPR038109, PF07508,IPR011109,SSF53041,PF00239,PTHR30461, PS51736,Coil,cd00338
MRAFIYGRFSSHKQQELSIEAQIDICREYAEKHNITVVGEYVDRARSARTENRADFRRLIRDACTGVVDCVLVWRYDRFFRDRAESALYRKQLEAAGVHLISVTEFIPDGSAGVITQGMIETVAEYFSAKLSEDVTRGMNKAAQHCQITGGAPLGYRPGPNKRWQIDPVGAELVKRCFEWYDSGKSMGELADHFNKEGHKTAKGNSFNKSSFTTILRNKKYIGIYEYDGTVSIAGGVPRIIEDDLFFRVQRKLDANRHRPGAYKAEVPYLLSGKLFCGKCGSPMTGTAGTGKSGVRHYYYICNNRRAKKCDKKNVRLDLIEEAVLQSALDVLTDDNISYISAEVERRCSENSGNKALVASLRVQLTEVEKQLKNIGNAIAQGIITETTKQMLMDAEADRAALRQQIDRATVQASLEVKAEAVACWLDGFRHGDRKSPELDGCS

SEQ ID NO: 9180 - protein, 443 aa, Unknown
  Description of Unknown: Integrase B9181 sequence
  PTHR30461:SF3,IPR036162,PS51737,IPR011109,PTHR30461, PS00397,PF00239,G3DSA:1.10.10.2600,IPR006119,SSF53041, cd00338,SM00857,IPR025827,IPR038109,PS51736, IPR006118,PF13408,G3DSA:3.40.50.1390,Coil
MKQIAIYIRVSTDTQAKKGDSLGEQLETLKKYIDDHDNMILYDTYIDDGVSGQKLDRGEFKRLMDDVKAGYINLIIFTKLDRWFRSLRHYLNTQAVLEKHDVEWTAVAQPFYDTTTPQGRAFVAQSMTFAELEAQNDSVRIKDVFDYKYKHGEVLSGKTPLGYSIKDKHLVPNEDAGKAVEVFEYYDRTNSLNATTLFLEHEFGIIMSTDNLKKSILSNTKYIGVFRDNKSFCPAIIDRDLFDRVQVNLKRNIKSSVKRDYVFSGLIKCANCGKTMSGRTVKTKRKNRVYEYPVYICRQAYPLRRCENRKNISESIIEKYMLANIRAEAGKYIREYETKEKPVRDRQKKKASIEHKIERLKELFVNEVITLDELKKDREKLLQQLTEVPEEKPKDISKLKEFLNSDFETIYNTFNKKERRRFWRSVIKEIQVDKERNFHIIFL

SEQ ID NO: 9181 - protein, 443 aa, Unknown
  Description of Unknown: Integrase B9182 sequence
  PTHR30461:SF3,cd00338,SM00857,G3DSA:1.10.10.2600,IPR036162, PF13408,IPR025827,G3DSA:3.40.50.1390,PS51737,IPR006119, IPR038109,SSF53041,IPR011109,PTHR30461,PS51736, Coil,PF00239
MHGKSLEAQKEYLASYAKDHGMIPVGIYADEGKTARKELKKRKAIHALLEDVKAGKIDVILFWRLDRWFRNMSDFYKVQDILDEYGVYWISASEPGLNMETRDGRLQLNVVLSIGQNEVDTTSERIKFVNEASIRQGKVIFGDGNMPRGYKVGIVDGKKCMVKNPDEEEMVNAFFDYFERHQSKQGTLRYMQRNYDPAFSYSVLRTMLSSEFYKGTYRGIPYCPAYLSEERWMRLQKINGRNVKHTPSGRVYLFSGLIRCPVCSQKLSGTGCSSIINRKTKEKRTYCYYRCNHALLDRICTNTHRVSQNLIEAYLLDNLEAEYEKFHIRCEKIEEQKAKIRETRTPEKLQKELERLNLLFQKGRIEWDYYSEEYDRIENELHELQQIRPEPQRDFSYLEELLQADFRTIYAQLTPENRRSFWRSTIKEIHLNEDFSVKSVDFL

SEQ ID NO: 9182 - protein, 442 aa, Unknown
  Description of Unknown: Integrase B9183 sequence
  PTHR30461:SF3,IPR036162,PS51737,IPR011109,PTHR30461, PS00397,PF00239,G3DSA:1.10.10.2600,IPR006119,SSF53041, cd00338,SM00857,IPR025827,IPR038109,PS51736, IPR006118,PF13408,G3DSA:3.40.50.1390,Coil
MIAALMRVALIRVALYIRVSSEEQARHGLSLQEQRDALIRYAKANKMTVVGIYEDAGISARKPYNKRPALLRLLGDCKDGKIDMILFVKLDRWFRNVAGYYDVQTQLDQYGVTWQATEEDYETRTASGRLKVNIMLSVAQDEADRTSERIKFINDGKRAKGQPAGSKAPLGYAIKDRQYQIDNGTADAARDMFAAFIRLKSVLAVKRYMLDTWGIDRAYSKYVNYFRNRLYIGEVYGIENTCPALVSKQDFDLVNDIIRQRSQRCAGVDTDRVYLFSGILHCKECGKTMQSETVKKTYTYYRCRTRMLDNTSCPHTKRIREDVLEDYLLHELAGIAERNNRYYKKAEKKPTQSADSIRKKMSKLKTLYLNDLIELDDYKAEYSILKRSLETVEEKPKTDIDALRNGLGEYGTYSREEKKEFWTRFIKRIDADNDGAFFVTPR

SEQ ID NO: 9183 - protein, 442 aa, Unknown
  Description of Unknown: Integrase B9184 sequence
  PTHR30461:SF3,SM00857,G3DSA:1.10.10.2600,IPR036162,PF13408, PS51737,G3DSA:3.40.50.1390,IPR025827,IPR006119,IPR038109, IPR011109,SSF53041,PTHR30461,Coil,PS51736, cd00338,PF00239
MIAALMREALIKAALYIRVTSEEQARHGLSLQEQRDALIRYAKANKMTVVGIYEDAGISARKPYKKRPALLRLLDDCKAGKVDTILFIKLDRWFRNVAGYYDVQTQLDKYGVTWQATEEDYETRTASGRLKVNIMLSVAQDEADRASERVKFINDGKRAKGQPAGSKAPLGYIVKDRQYQIDNDTADAARDMFAAYVRLQSVLGVKRYMLETWKIDRAYTKYVNYFRNRLYIGEVYGIENACPALVSKQDFDLVNDIIRHRSQRCAGVETDRVYLFSGLLHCKECGKTMQSETAKQIYTYYRCRTRMLDNSACPHKKRIREDALEDYLLHELEGIAERNNRYYKKAEKKPTHSADSIRKKMSKLKTLYLNDLIELGDYKAEYASLKRAMETVEEKPETDLDALKDGLGEYDTYSRNEKKEFWTRFIRRIDADNDGAFFVTPR

SEQ ID NO: 9184 - protein, 442 aa, Unknown
  Description of Unknown: Integrase B9185 sequence
  PTHR30461:SF3,IPR036162,PS51737,IPR011109,PTHR30461, PS00397,PF00239,G3DSA:1.10.10.2600,IPR006119,SSF53041, cd00338,SM00857,IPR025827,IPR038109,PS51736, IPR006118,PF13408,G3DSA:3.40.50.1390,Coil
MIAALMRVALIRVALYIRVSSEEQARHGLSLQEQRDALMRYAKEHKMTVVGIYEDAGISARKPYKKRPALLRLLGDCKDGQIDMILFVKLDRWFRNVAGYYDVQTQLDQYGVTWQATEEDYETRTASGRLKVNIMLSVAQDEADRTSERIKFINDGKRAKGQPAGSKAPLGYAIKDRQYQIDNGTADAARDMFAAFIRLKSVLAVKRYMLDTWGIDRAYSKYVNYFRNRLYIGEVYGIENACPALVSKQDFDLVNDIIRQRSQRCAGVDTDRVYLFSGILHCKECGKTMQSETVKKTYTYYRCRTRMLDNTSCPHTKRIREDVLEDYLLHELAGIAERNNRYYKKAEKKPTQSADSIRKKMSKLKTLYLNDLIELDDYKAEYSILKRSLETLEEKPKTDLDALRNGLGEYGTYSREEKKEFWTRFITRIDADNDGAFFVTPR

SEQ ID NO: 9185 - protein, 442 aa, Unknown
  Description of Unknown: Integrase B9186 sequence
  PTHR30461:SF3,IPR036162,PS51737,IPR011109,PTHR30461, PS00397,PF00239,G3DSA:1.10.10.2600,IPR006119,SSF53041, cd00338,SM00857,IPR025827,IPR038109,PS51736, IPR006118,PF13408,G3DSA:3.40.50.1390,Coil
MIAALMRVALIRVALYIRVSSEEQARHGLSLQEQRDALIRYAKANKMTVVGIYEDAGISARKPYKKRPALLRLLGDCKDGKIDMILFVKLDRWFRNVAGYYDVQTQLDQYGVTWQATEEDYETRTASGRLKVNIMLSVAQDEADRTSERIKFINDGKRAKGQPAGSKAPLGYVITDRQYQIDNGTVDAARDMFAAFIRLKSVLAVKRYMLDTWGIDRAYSKYVNYFRNRLYIGEVYGIENACPALVSKQDFDIVNDIIRQRSQRCAGVDTDRVYLFSGILHCKECGKTMQSETVKKTYTYYRCRTRMLDNTSCPHTKRIREDVLEDYLLHELAGIAERNNRYYKKAEKKPTQSADSIRKKMSKLKTLYLNDLIELDDYKAEYSILKRSLETVEEKPKTDLDALRNGLGEYGTYSREEKKEFWTRFIKRIDADNDGAFFVTPR

SEQ ID NO: 9186 - protein, 442 aa, Unknown
  Description of Unknown: Integrase B9187 sequence
  PTHR30461:SF3,IPR036162,PS51737,IPR011109,PTHR30461, PS00397,PF00239,G3DSA:1.10.10.2600,IPR006119,SSF53041, cd00338,SM00857,IPR025827,IPR038109,PS51736, IPR006118,PF13408,G3DSA:3.40.50.1390,Coil
MIAALMRVALIRVALYIRVSSEEQARHGLSLQEQRDALIRYAKANKMTVVGIYEDAGISARKPYKKRPALLRLLGDCKDGKIDMILFVKLDRWFRNVAGYYDVQTQLDQYGVTWQATEEDYETRTASGRLKVNIMLSVAQDEADRTSERIKFINDGKRAKGQPAGSKAPLGYAIKDRQYQIDNGTADAARDMFAAFIRLKSVLAVKRYMLDTWGIDRAYSKYVNYFRNRLYIGEVYGIENACPALVSKQDFDLVNDIIRQRSQRCAGVDTDRVYLFSGILHCKECGKTMQSETVKKTYTYYRCRTRMLDNTSCPHTKRIREDVLEDYLLHELAGIAERNNRYYKKAKKRPTQSADSIRKKMSKLKTLYLNDLIELDDYKAEYSILKRSLETVEEKPKTDLDALRNGLGEYGTYSREEKKEFWTRFIKRIDADNDGAFFVTPR

SEQ ID NO: 9187 - protein, 442 aa, Unknown
  Description of Unknown: Integrase B9188 sequence
  SM00857,IPR006118,G3DSA:1.10.10.2600,IPR036162,PS51737, G3DSA:3.40.50.1390,IPR006119,IPR038109,IPR011109,SSF53041, PTHR30461,PS00397,PS51736,cd00338,PF00239
MKRAALYVRVSTQEQKNSGLSVDSQIDALEKYCEEQGYTVAGIYNDAGISARKKYTKRPALLQLLEDCRQHKIDIILFTRLDRWFRAVAGYYEVQSVLDACKVPWRAIWEDYETETSQGIFKVNIMLSVAQAEADRDSEKIRSVMEFKRSNKEYIGGKVPVGYRVEGKKIVKDEETRGIIEDMFEHYFQTFSKAGTADYILNKYPDFIRTRTRIVKIMSSPAYHGEMYGVKNYCESYITEEQAQKINEVSSQKTWTDCRRRIYIFSGLMKCPICGCRLSGCAIGKKGKKYKVYHCPHSVAQKHKTYTRSEKKLETYMLDHIEEKIQLDVLRAEGRVKATGNDAEKRKKKLSSELGRINKMFEKGRITEEYYDERYEAISKELSQTAATEELETKKKIQSRFPDGWKDMYMQLDEQGKQVFWKSIVKEIKISPNEFVEDIIFF

SEQ ID NO: 9188 - protein, 442 aa, Unknown
  Description of Unknown: Integrase B9189 sequence
  PTHR30461:SF3,IPR036162,PS51737,IPR011109,PTHR30461, PS00397,PF00239,G3DSA:1.10.10.2600,IPR006119,SSF53041, cd00338,SM00857,IPR025827,IPR038109, PS51736,IPR006118,PF13408,G3DSA:3.40.50.1390,Coil
MIAALMRVALIRVALYIRVSSEEQARHGLSLQEQRDALMRYAKANKMTVVGIYEDAGISARKPYKKRPELLRLLDDCEAGKIDMILFIKLDRWFRNVAGYYDVQTQLDKYGVTWQATEEDYETRTASGRLKVNIMLSVAQDEADRTSERIKFINDGKRAKGQPAGSKAPLGYVIKDRQYQIDNDTADAARDMFAAYIRLQSVLGVKRYMLETWGIDRAYNKYVNYFHNRLYIGEVYGIENACPALISKQDFDIVNDILRQRSQRCAGVETDRVYLFSGLLHCKECGKTMQSETAKQIYTYYRCRTRMLDNSACQHKKRIREDALEDYLLHELEGIAERNNRYYKKAEKKPTQSADAIRKKMDKLKTLYLNDLIELDEYKKEYTALKKSLEAVEEKPKTNLDALRNGLAEYGTYSREEKKEFWTRFIRRIDTDDDGAFFVTPR

SEQ ID NO: 9189 - protein, 442 aa, Unknown
  Description of Unknown: Integrase B9190 sequence
  PTHR30461:SF3,IPR036162,PS51737,IPR011109,PTHR30461, PS00397,PF00239,G3DSA:1.10.10.2600,IPR006119,SSF53041, cd00338,SM00857,IPR025827,IPR038109,PS51736, IPR006118,PF13408,G3DSA:3.40.50.1390,Coil
MIAALMRVALIRVALYIRVSSEEQARHGLSLQEQRDALIRYAKANKMTVVGIYEDAGISARKPYKKRPALLRLLGDCKDGKIDMILFVKLDRWFRNVAGYYDVQTQLDQYGVTWQATEEDYETRTASGRLKVNIMLSVAQDEADRTSERIKFINDGKRAKGQPAGSKAPLGYVITDRQYQIDNGTVDAARDMFAAFIRLKSVLAVKRYMLDTWGIDRAYSKYVNYFRNRLYIGEVYGIENACPALVSKQDFDIVNDIIRQRSQRCAGVDTDRVYLFSGILHCKECGKTMQSETVKKTYTYYRCRTRMLDNTSCPHTKRIREDVLEDYLLHELAGIAERNNRYYKKAEKKPTQSADSIRKKMSKLKTLYLNDLIELDDYKAEYSILKRSLETVEEKPKTDIDALRNGLGEYGTYSREEKKEFWTRFIKRIDADNDGAFFVTPR

SEQ ID NO: 9190 - protein, 442 aa, Unknown
  Description of Unknown: Integrase B9191 sequence
  PTHR30461:SF3,IPR036162,PS51737,IPR011109,PTHR30461, PS00397,PF00239,G3DSA:1.10.10.2600,IPR006119,SSF53041, cd00338,SM00857,IPR025827,IPR038109,PS51736, IPR006118,PF13408,G3DSA:3.40.50.1390,Coil
MIAALMRVALIRAALYIRVSSEEQARHGLSMQEQRDALMRYAKANKMTVVGIYEDAGISARKPYKKRPALMRLLDDCKAGKIDMILFIKLDRWFRNVAGYYDVQTQLDKCGVTWQATEEDYETRTASGRLKVNIMLSVAQDEADRTSERIKFINDGKRAKGQPAGSKAPLGYIVKDRQYQIDNDTADAARDMFAAYIRLQSVLGVKKYMLETWGIDRAYNKYVNYFHNRLYIGEVYGIENACPALVSKQDFDIVNDILRQRSQRCAGVETDRVYLFSGLLHCKECGKTMQSETIKQTYTYYRCRTQMLDNSACQHKKRIREDALEDYLLHELEGIAARNNRYYKKAEKKPTQSTDAIRKKMDKLKTLYLNDLIELDEYKKEYTALKKSLETVEEKPKTDLDALRNGLGEYDTYSREEKKEFWTRFIRRIDADNDGAFFVTPR

SEQ ID NO: 9191 - protein, 442 aa, Unknown
  Description of Unknown: Integrase B9192 sequence
  PTHR30461:SF3,SM00857,G3DSA:1.10.10.2600,IPR036162,PF13408, PS51737,G3DSA:3.40.50.1390,IPR025827,IPR006119,IPR038109, IPR011109,SSF53041,PTHR30461,Coil,PS51736, cd00338,PF00239
MIAALMREALIRAALYIRVTSEEQARHGLSLQEQRDALTRYAKANKMTVVGIYEDAGISARKPYKKRPALLRLLDDCKAGKVDTILFIKLDRWFRNVAGYYDVQTQLDKYGVTWQATEEDYETRTASGRLKVNIMLSVAQDEADRASERVKFINDGKRAKGQPAGSKAPLGYIVKDRQYQIDNDTADAARDMFAAYIKLQSVLGVKKYMLEVWGIDRAYTKYVNYFRNRLYIGEVYGIESACPALISKQDFDIVNDILRQRSQRCAGVETDRVYLFSGLLHCKECGKTMQSETAKQIYTYYRCRTRMLDNSACRHKKRIREDALEDYLLHELEGIAERNNRYYKKAEKKPTQSADAIRKKMSKLKTLYLNDLIELDEYKREYASLKKSLEAVEEKPKTNLDALRNGLAEYDTYSREEKKEFWTRFIRRIDADDDGAFFVTPR

SEQ ID NO: 9192 - protein, 442 aa, Unknown
  Description of Unknown: Integrase B9193 sequence
  PTHR30461:SF3,IPR036162,PS51737,IPR011109,PTHR30461, PS00397,PF00239,G3DSA:1.10.10.2600,IPR006119,SSF53041, cd00338,SM00857,IPR025827,IPR038109,PS51736, IPR006118,PF13408,G3DSA:3.40.50.1390,Coil
MIAALMRVALIRVALYIRVSSEEQARHGLSLQEQRDALMRYAKANKMTVVGIYEDAGISARKPYKKRPELLRLLDDCEAGKIDMILFIKLDRWFRNVAGYYDVQTQLDKYGVTWQATEEDYETRTASGRLKVNIMLSVAQDEADRTSERIKFINDGKRAKGQPAGSKAPLGYVIKDRQYQIDNDTADAARDMFAAYIRLQSVLGVKRYMLETWGIDRAYNKYVNYFHNRLYIGEVYGIENACPALISKQDFDIVNDILRQRSQRCAGVETDRVYLFSGLLHCKECGKTMQSETIKQTYIYYRCRTRMLDNSACQHKKRIREDALEDYLLHELEGIAERNNRYYKKAEKKPTQSADAIRKKMDKLKTLYLNDLIELDEYKKEYTALKKSLEAVEEKPKTNLDALRNGLAEYGTYSREEKKEFWTRFIRRIDTDDDGAFFVTPR

SEQ ID NO: 9193 - protein, 442 aa, Unknown
  Description of Unknown: Integrase B9194 sequence
  PTHR30461:SF3,SM00857,G3DSA:1.10.10.2600,IPR036162,PF13408, PS51737,IPR025827,G3DSA:3.40.50.1390,IPR006119,IPR038109, IPR011109,SSF53041,PTHR30461,Coil,PS51736, cd00338,PF00239
MIAALMREALIRAALYIRVTSEEQARHGLSLQEQRDALIRYAKANKMTVVGIYEDAGISARKPYKKRPALLRLLDDCKAGKIDTILFIKLDRWFRNVAGYYDVQTQLDQYGVTWQATEEDYETRTASGRLKVNIMLSVAQDEADRTSERVKFINDGKRAKGQPAGSKAPLGYIIKDRQYQIDNDTADAARDMFAAYVRLQSVLGVKRYMLETWGIDRAYTKYVNYFRNRLYIGEVYGIENACPALISKQDFDIVNDILRQRSQRCAGVETDRVYLFSGLLHCKECGKTMQSETAKQIYTYYRCRTRMLDNSACQHKKRIREDALEDYLLHELEGIAERNNRYYKKAEKKPTQSADAIRKKMSKLKTLYLNDLIELDEYKREYASLKKTLEAVEEKPETNLDALRNGLAEYDTYSREEKKEFWTRFIRRIDADDDGAFFVTPR

SEQ ID NO: 9194 - protein, 442 aa, Unknown
  Description of Unknown: Integrase B9195 sequence
  PTHR30461:SF3,SM00857,G3DSA:1.10.10.2600,IPR036162,PF13408, IPR025827,PS51737,G3DSA:3.40.50.1390,IPR006119,IPR038109, SSF53041,IPR011109,PTHR30461,Coil,PS51736, cd00338,PF00239
MIAALMREALIKAALYIRVTSEEQARHGLSLQEQRDALIRYAKANKMTVVGIYEDAGISARKPYKKRPALLRLLDDCKAGKVDTILFIKLDRWFRNVAGYYDVQTQLDKYGVTWQATEEDYETRTASGRLKVNIMLSVAQDEADRASERVKFITDGKRAKGQPAGSKAPLGYIIKNRQYQIDNDTVDAARDMFAAYIRLQSVLGVKKYMLERWGIDRAYTKYVNYFRNRLYIGEVYGIENACPALVSKQDFDIVNDILRQRSQRCAGVETDRVYLFSGLLHCKECGKTMQSETAKQIYTYYRCRTRMLDNSACQHKKRIREDALEDYLLHELEGIAERNNRYYKKAAKKPTQSADAIRKKMSKLKTLYLNDLIELDEYKREYASLKKSLEAVEEKPKTNLDALRNGLAEYDTYSREEKKEFWTRFIRRIDADDDGAFFVTPR

SEQ ID NO: 9195 - protein, 442 aa, Unknown
  Description of Unknown: Integrase B9196 sequence
  PTHR30461:SF3,IPR036162,PS51737,IPR011109,PTHR30461, PS00397,PF00239,G3DSA:1.10.10.2600,IPR006119,SSF53041, cd00338,SM00857,IPR025827,IPR038109,PS51736, IPR006118,PF13408,G3DSA:3.40.50.1390,Coil
MIAALMRVALIRVALYIRVSSEEQARHGLSLQEQRDALIRYAKEHKMTVVGIYEDAGISARKPYKKRPALLRLLGDCKDGQIDMILFVKLDRWFRNVAGYYDVQTQLDQYGVTWQATEEDYETRTASGRLKVNIMLSVAQDEADRTSERIKFINDGKRAKGQPAGSKAPLGYAIKDRQYQIDNGTADAARDMFAAFIRLKSVLAVKRYMLDTWGIDRTYSKYVNYFRNRLYIGEVYGIENACPALVSKQDFDIVNDIIRQRSQRCAGVDTDRVYLFSGILHCKECGKTMQSETVKKTYTYYRCRTRMLDNTSCPHTKRIREDVLEDYLLHELAGIAERNNRYYKKAEKKPTQSADSIRKKMSKLKTLYLNDLIELDDYKAEYSILKRSLETVEEKPKTDLDALRNGLGEYGTYSREEKKEFWTRFIKRIDADNDGAFFVTPR

SEQ ID NO: 9196 - protein, 442 aa, Unknown
  Description of Unknown: Integrase B9197 sequence
  PTHR30461:SF3,IPR036162,PS51737,IPR011109,PTHR30461, PS00397,PF00239,G3DSA:1.10.10.2600,IPR006119,SSF53041, cd00338,SM00857,IPR025827,IPR038109,PS51736, IPR006118,PF13408,G3DSA:3.40.50.1390,Coil
MIAALMRVALIRVALYIRVSSEEQARHGLSLQEQRDALMRYAKANKMTVVGIYEDAGISARKPYKKRPELLRLLDDCEAGKIDMILFIKLDRWFRNVAGYYDVQTQLDKYGVTWQATEEDYETRTASGRLKVNIMLSVAQDEADRTSERIKFINDGKRAKGQPAGSKAPLGYVIKDRQYQIDNDTADAARDMFAAYIRLQSVLGVKRYMLETWGIDRAYNKYVNYFHNRLYIGEVYGIENACPALISKQDFDIVNDILRQRSQRCAGVETDRVYLFSGLLHCKECGKTMQSETAKQIYTYYRCRTRMLDNSACQHKKRIREDALEDYLLHELEGIAERNNRYYKKAEKKPTQSADAIRKKMSKLKTLYLNDLIELDEYKKEYTTLKKSLEAVEENPKTNLDALRNGLAEYDTYSREEKKEFWTRFIRRIDADDDGAFFVTPR

SEQ ID NO: 9197 - protein, 442 aa, Unknown
  Description of Unknown: Integrase B9198 sequence
  PTHR30461:SF3,IPR036162,PS51737,IPR011109,PTHR30461, PS00397,PF00239,G3DSA:1.10.10.2600,IPR006119,SSF53041, cd00338,SM00857,IPR025827,IPR038109,PS51736, IPR006118,PF13408,G3DSA:3.40.50.1390,Coil
MIAALMRVALIRVALYIRVSSEEQARHGLSLQEQRDALIRYAKANKMTVVGIYEDAGISARKPYKKRPALLRLLGDCKDGKIDMILFVKLDRWFRNVAGYYDVQTQLDQYGVTWQATEEDYETRTASGRLKVNIMLSVAQDEADRTSERIKFINDGKRAKGQPAGSKAPLGYVITDRQYQIDNGTVDAARDMFAAFIRLKSVLAVKRYMLDTWGIDRAYSKYVNYFRNRLYIGEVYGIENACPALVSKQDFDIVNDIIRQRSQRCAGVDTDRVYLFSGILHCKECGKTMQSETVKKTYTYYRCRTRMLDNTSCPHTKRIREDVLEDYLLHELAGIAERNNRYYKKAEKKPTQSADSIRKKMSKLKTLYLNDLIELDDYKAEYSILKRSLETVEEKPKTDLDALRTGLGEYGTYSREEKKEFWTRFIKRIDADNDGAFFVTPR

SEQ ID NO: 9198 - protein, 442 aa, Unknown
  Description of Unknown: Integrase B9199 sequence
  PTHR30461:SF3,IPR036162,PS51737,IPR011109,PTHR30461, PS00397,PF00239,G3DSA:1.10.10.2600,IPR006119,SSF53041, cd00338,SM00857,IPR025827,IPR038109,PS51736, IPR006118,PF13408,G3DSA:3.40.50.1390,Coil
MIAALMRVALIRVALYIRVSSEEQARHGLSLQEQRDALIRYAKANKMTVVGIYEDAGISARKPYKKRPALLRLLGDCKDGKIDMILFVKLDRWFRNVAGYYDVQTQLDQYGVTWQATEEDYETRTASGRLKVNIMLSVAQDEADRTSERIKFINDGKRAKGQPAGSKAPLGYVITDRQYQIDNGTVDAARDMFAAFIRLKSVLAVKRYMLDTWGIDRAYSKYVNYFRNRLYIGEVYGIENACPALVSKQDFDIVNDIIRQRSQRCAGVDTDRVYLFSGILHCKECGKTMQSETVKKTYTYYRCRTRMLDNTSCPHTKRIREDVLEDYLLHELAGIAERNNRYYKKAEKKPTQSADSIRKKMSKLKTLYLNDLIELDDYKAEYSILKRSLETVEETPKTDLDALRNGLGEYGTYSREEKKEFWTRFIKRIDADNDGAFFVTPR

SEQ ID NO: 9199 - protein, 442 aa, Unknown
  Description of Unknown: Integrase B9200 sequence
  PTHR30461:SF3,IPR036162,PS51737,IPR011109,PTHR30461, PS00397,PF00239,G3DSA:1.10.10.2600,IPR006119,SSF53041, cd00338,SM00857,IPR025827,IPR038109,PS51736, IPR006118,PF13408,G3DSA:3.40.50.1390,Coil
MIAALMRAALIRVALYIRVSSEEQARHGLSLQEQRDALIRYAKANKMTVVGIYEDAGISARKPYKKRPALLRLLGDCKDGKIDMILFVKLDRWFRNVAGYYDVQTQLDQYGVTWQATEEDYETRTASGRLKVNIMLSVAQDEADRTSERIKFINDGKRAKGQPAGSKAPLGYAIKDRQYQIDNGTADAARDMFAAFIRLKSVLAVKRYMLDTWGIDRAYSKYVNYFRNRLYIGEVYGIENACPALVSKQDFDIVNDIIRQRSQRCAGVDTDRVYLFSGILHCKECGKTMQSETVKKTYTYYRCRTRMLDNTSCPHTKRIREDVLEDYLLHELAGIAERNNRYYKKAEKKPTQSADSIRKKMSKLKTLYLNDLIELDDYKAEYSILKRSLETVEEKPKTDLDALRNGLGEYGTYSREEKKEFWTRFIKRIDADNDGAFFVTPR

SEQ ID NO: 9200 - protein, 442 aa, Unknown
  Description of Unknown: Integrase B9201 sequence
  PTHR30461:SF3,SM00857,G3DSA:1.10.10.2600,IPR036162,PF13408, PS51737,IPR025827,G3DSA:3.40.50.1390,IPR006119,IPR038109, PF07508,IPR011109,SSF53041,PTHR30461,PS51736, cd00338,PF00239
MKNVRLYIRVSHEEQVKFGYSIDAQINALKTYCKENKLIVKGRYVDEGISAYSIKKRHALQKMINESENGDIILFTKLDRFSRNVLDANIILKNLNDKGVSIKAINEDDIDTSTADGKFIFDLKLSLAERERNKTSERINDVFKYKAQKGESISGKVPRGYKVVNKKYVPSDLAPVIKEIFSYYDTYSNISKTMRYIKETHNLNWSFEVVKQILKNKIYIGVHKYNDEFCTPLIDKGLFDRVQNKLERNNKKPRTYIYLFSKLIKCPCCGSVLVGNSNVSTKEPSYYYRCNTYYRNHGALKCSSNKTFSEKKLENYLVNNIHELLEVYIADIDKKNKPMPNNNNKISALKRKIARLKDLYVEELIDIDTYKKDYNKYKEELKRLTPTIENKASDAIMQLMNVNIPELYKKLTREDKQAFWQSIIKEIHIIDQNNENYEIFFN

SEQ ID NO: 9201 - protein, 442 aa, Unknown
  Description of Unknown: Integrase B9202 sequence
  PTHR30461:SF3,IPR036162,PS51737,IPR011109,PTHR30461, PS00397,PF00239,G3DSA:1.10.10.2600,IPR006119,SSF53041, cd00338,SM00857,IPR025827,IPR038109,PS51736, IPR006118,PF13408,G3DSA:3.40.50.1390,Coil
MRAALMRVALIRVALYIRVSSEEQARHGLSLQEQRDALMRYAKEHKMTVVGIYEDAGISARKPYKKRPALLRLLGDCKDGQIDMILFVKLDRWFRNVAGYYDVQTQLDQYGVTWQATEEDYETRTASGRLKVNIMLSVAQDEADRTSERIKFINDGKRAKGQPAGSKAPLGYAIKDRQYQIDNGTADAARDMFAAFIRLKSVLAVKRYMLDTWGIDRAYSKYVNYFRNRLYIGEVYGIENACPALVSKQDFDLVNDIIRQRSQRCAGVDTDRVYLFSGILHCKECGKTMQSETVKETYTYYRCRTRMLDNSACPHTKRIREDVLEDYLLHELAGIAERNNRYYKKAEKKPTQSADLIRKKMSKLKTLYLNDLIELDDYKAEYASLKRTLETVEEKPETDLDALRNGLSEYDTYSREEKKEFWTRFIRRIDADNDGAFFVTPR

SEQ ID NO: 9202 - protein, 442 aa, Unknown
  Description of Unknown: Integrase B9203 sequence
  PTHR30461:SF3,IPR036162,PS51737,IPR011109,PTHR30461, PS00397,PF00239,G3DSA:1.10.10.2600,IPR006119,SSF53041, cd00338,SM00857,IPR025827,IPR038109,PS51736, IPR006118,PF13408,G3DSA:3.40.50.1390,Coil
MIAALMRVALIRVALYIRVSSEEQARHGLSLQEQRDALIRYAKANKMTVVGIYEDAGISARKPYNKRPALLRLLGDCKDGKIDMILFVKLDRWFRNVAGYYDVQTQLDQYGVTWQATEEDYETRTASGRLKVNIMLSVAQDEADRTSERIKFINDGKRAKGQPAGSKAPLGYAIKDRQYQIDNGTADAARDMFAAFIRLKSVLAVKRYMLDTWGIDRAYSKYVNYFRNRLYIGEVYGIENTCPALVSKQDFDLVNDIIRQRSQRCAGVDTDRVYLFSGILHCKECGKTMQSETVKKTYTYYRCRTRMLDNTSCPHTKRIREDVLEDYLLHELAGIAERNNRYYKKAEKKPTQSADSIRKKMSKLKTLYLNDLIELDDYKAEYSILKRSLETVEEKPKTDLDALRNGLGEYGTYSREEKKEFWTRCIKRIDADNDGAFFVTPR

SEQ ID NO: 9203 - protein, 442 aa, Unknown
  Description of Unknown: Integrase B9204 sequence
  PTHR30461:SF3,IPR036162,PS51737,IPR011109,PTHR30461, PS00397,PF00239,G3DSA:1.10.10.2600,IPR006119,SSF53041, cd00338,SM00857,IPR025827,IPR038109,PS51736, IPR006118,PF13408,G3DSA:3.40.50.1390,Coil
MIAALMRVALIRVALYIRVSSEEQARHGLSLQEQRDALIRYAKANKMTVVGIYEDAGISARKPYKKRPALLRLLGDCKDGKIDMILFVKLDRWFRNVAGYYDVQTQLDQYGVTWQATEEDYETRTASGRLKVNIMLSVAQDEADRTSERIKFINDGKRAKGQPAGSKAPLGYVITDRQYQIDNGTVDAARDMFAAFIRLKSVLAVKRYMLDTWGIDRAYSKYVNYFRNRLYIGEVYGIENACPALVSKQDFDIVNDIIRQRSQRCAGVDTDRVYLFSGILHCKECGKTMQSETVKKTYTYYRCRTRMLDNTSCPHTKRIREDVLEDYLLHELAGIAEWNNRYYKKAEKKPTQSADSIRKKMSKLKTLYLNDLIELDDYKAEYSILKRSLETVEEKPKTDLDALRNGLGEYGTYSREEKKEFWTRFIKRIDADNDGAFFVTPR

SEQ ID NO: 9204 - protein, 442 aa, Unknown
  Description of Unknown: Integrase B9205 sequence
  PTHR30461:SF3,IPR036162,PS51737,IPR011109,PTHR30461, PF00239,G3DSA:1.10.10.2600,IPR006119,SSF53041,PF09851, SM00857,IPR025827,IPR038109,PS51736,cd03768, PF13408,IPR018649,G3DSA:3.40.50.1390,PF07508,Coil
MEALLYTRVSKEDQVKFGMSLDAQLESLKQYCSENNLKIRNIYSDEGISGGSITKRKAFQNMIEEAKPGDIILFTKLDRFSRNLLDANIVIKELTKKDVSIKAINEDDIDTSTADGKFIFNLKLSLAQREREKVSERINDVFEYKIKQGEVCTGKVPVGYMIKDKHLVLDPVKSVWIREMFDYFLKHQSIVGTCKWWNAKHPEQTMEYSTIKGSRLTSTFYCGKHPSGLNDHYCEPIISEEEFDKIQKLLKKNVKSNRTNHVYLFTGLLTCSHCGRRMGGFYKKWKDISITNYYRCQAYCGYRTCDMSHSISERKVEAYLLEDMVKKCDEMLSASLKHENTDEVKLQNKKANTEAKISRLKDLYVDGVLTKEEFDTKYKQLQDEIEAIKQEIKPKSNKLLELHDIDVKELYSKLNPENKRAFWRKYVDRIYFDGHDLKVVYY

SEQ ID NO: 9205 - protein, 442 aa, Unknown
  Description of Unknown: Integrase B9206 sequence
  PTHR30461:SF3,IPR036162,PS51737,IPR011109,PTHR30461, PS00397,PF00239,G3DSA:1.10.10.2600,IPR006119,SSF53041, cd00338,SM00857,IPR025827,IPR038109,PS51736, IPR006118,PF13408,G3DSA:3.40.50.1390,Coil
MIAALMRVALIRVALYIRVSSEEQARHGLSLQEQRDALMRYAKEHKMTVVGIYEDAGISARKPYKKRPALLRLLDDCKAGKIDMILFIKLDRWFRNVAGYYDVQTQLDKYGVTWQATEEDYETRTASGRLKVNIMLSVAQDEADRTSERIKFINDGKRAKGQPAGSKAPLGYIIKDRQYQIDNGTTDAARDMFAAYIKLQSVLGVKRYMLETWGIDRSYNKYINYFRNRLYIGEVYGIENACPALISKQDFDIVNDILRQRSQRCAGVETDRVYLFSGLLHCKECGKTMQSETIKQTYTYYRCRTRMLDNSACPHKKRIREDALEDYLLHELEGIAERNNRYYKKAEKKPTQSADAIRKKMDKLKTLYLNDLIELDEYKKEYTALKKSLETVEEKPRTNLDALRNGLAEYDTYSREEKKEFWTRFIRRIDADDDGAFFVTPR

SEQ ID NO: 9206 - protein, 442 aa, Unknown
  Description of Unknown: Integrase B9207 sequence
  PTHR30461:SF3,cd00338,SM00857,G3DSA:1.10.10.2600,IPR036162, PF13408,PS51737,G3DSA:3.40.50.1390,IPR025827,IPR006119, IPR038109,IPR011109,SSF53041,PTHR30461,PS51736, Coil,PF00239
MIAALMREALIKAALYIRVTSEEQARHGLSLQEQRDALIRYAKANKMTVVGIYEDAGISARKPYKKRPALLRLLDDCKAGKVDTILFIKLDRWFRNVAGYYDVQTQLDKYGVTWQATEEDYETRTASGRLKVNIMLSVAQDEADRASERVKFINDGKRAKGQPAGSKAPLGYIVKDRQYQIDNDTADAARDMFAAYVRLQSVLGVKRYMLETWKIDRAYTKYVNYFRNRLYIGEVYGIENACPALVSKQDFDLVNDIIRHRSQRCAGVETDRVYLFSGLLHCKECGKTMQSETAKQIYTYYRCRTRMLDNSACPHKKRIREDALEDYLLNELEGIAERNNRYYKKAEKKPTHSADSIRKKMSKLKTLYLNDLIELGDYKAEYASLKRAMETVEEKPETDLDALKDGLGEYDTYSRNEKKEFWTRFIRRIDADNDGAFFVTPR

SEQ ID NO: 9207 - protein, 442 aa, Unknown
  Description of Unknown: Integrase B9208 sequence
  PTHR30461:SF3,IPR036162,PS51737,IPR011109,PTHR30461, PS00397,PF00239,G3DSA:1.10.10.2600,IPR006119,SSF53041, cd00338,SM00857,IPR025827,IPR038109,PS51736, IPR006118,PF13408,G3DSA:3.40.50.1390,Coil
MRCAIYIRVSSAEQRREGYSLPEQKRVLTEYAEEQGYKIVDIYADEGISASKKPHLRHDFQRMMKDVEAGLIDIIIFIKLDRWFRNVGDYYRTQSILDAHNVKWKSVLEDYDTTTRTGRLNLNIKLTIAEDEAANTSERVKFVLDAKVRNGEPNTGTQPFGYKIEKIDGIKRIIKNPATQAECEDMFRRFFETKSGYETTRYINQKYGRNHADNTITRRLKNLAYTGEYRGIYDYRPAYITHEQHAEILRILGKSTRKAKGRKVYLFAGMVECPECERTLASCTSNKLTLAYRCRYHGVSNCDYKHIVKEKDIEEYLLNNIRNELENYKTNIKSKLRKKAPENPAVYENQLERLNNVYIMGNISNEEYNRKAAELKAKIADLKAGNNQADTIPQDTMKLLSDSSFPTLYNRLNRKERRALWASIIDKIKIEGTKPSSIKFLE

SEQ ID NO: 9208 - protein, 442 aa, Unknown
  Description of Unknown: Integrase B9209 sequence
  PTHR30461:SF3,IPR036162,PS51737,IPR011109,PTHR30461, PS00397,PF00239,G3DSA:1.10.10.2600,IPR006119,SSF53041, cd00338,SM00857,IPR025827,IPR038109,PS51736, IPR006118,PF13408,G3DSA:3.40.50.1390,Coil
MRCAIYIRVSSAEQRREGYSLPEQKRVLTEYAEEQGYKIVDIYADEGISASKKPHLRHDFQRMMKDVEGGLIDIIIFIKLDRWFRNVGDYYRTQSILDAHNVKWKSVLEDYDTTTRTGRLNLNIKLTIAEDEAANTSERVKFVLDAKVRNGEPNTGTQPFGYKIEKIDGIKRIIKNPDTQAECEDMFRRFFETKSGYETTRYINQKYGRNHADNTITRRLKNLAYTGEYRGIYDYRPAYITHEQHAEILRILGKSTRKAKGRKVYLFAGMVECPECERTLASCTSNKLTLAYRCRYHGVSNCDYKHIVKEKDIEEYLLNNIRNELENYKTNIKSKLRKKAPENPAVYENQLERLNNVYIMGNISNEEYNRKAAELKAKIADLKAGNNQADTIPQDTMKLLSDSSFPTLYNRLNRKERRALWASIIDKIKIEGTKPSSIKFLE

SEQ ID NO: 9209 - protein, 442 aa, Unknown
  Description of Unknown: Integrase B9210 sequence
  PTHR30461:SF3,IPR036162,PS51737,IPR011109,PTHR30461, PS00397,PF00239,G3DSA:1.10.10.2600,IPR006119,SSF53041, cd00338,SM00857,IPR025827,IPR038109,PS51736, IPR006118,PF13408,G3DSA:3.40.50.1390,Coil
MIAALMRVALIRVALYIRVSSEEQARHGLSLQEQRDALMRYAKEHKMTVVGIYEDAGISARKPYKKRPALLRLLGDCKDGKIDMILFVKLDRWFRNVAGYYDVQTQLDQYGVTWQATEEDYETRTASGRLKVNIMLSVAQDEADRTSERIKFINDGKRAKGQPAGSKAPLGYVITDRQYQIDNGTVDAARDMFAAFIRLKSVLAVKRYMLDTWGIDRAYSKYVNYFRNRLYIGEVYGIENACPALVSKQDFDIVNDIIRQRSQRCAGVDTDRVYLFSGILHCKECGKTMQSETVKKTYTYYRCRTRMLDNTSCPHTKRIREDVLEDYLLHELAGIAERNNRYYKKAEKKPTQSADSIRKKMSKLKTLYLNDLIELDDYKAEYSILKRSLETVEEKPKTDLDALRNGLGEYGTYSREEKKEFWTRFIKRIDADNDGAFFVTPR

SEQ ID NO: 9210 - protein, 442 aa, Unknown
  Description of Unknown: Integrase B9211 sequence
  SM00857,G3DSA:1.10.10.2600,IPR036162,PF13408,PS51737, G3DSA:3.40.50.1390,IPR025827,IPR006119,IPR038109,PF07508, IPR011109,SSF53041,PTHR30461,PS51736,cd00338, PF00239
MKNVRLYIRVSHEEQVKFGYSIDAQINALKTYCKENKLIVKGRYVDEGISAYSIKKRHALQKMINESENGDIILFTKLDRFSRNVLDANIILKNLNDKGVSIKAINEDDIDTSTADGKFIFDLKLSLAERERNKTSERINDVFKYKAQKGESISGKVPRGYKVVNKKYVPSDLAPVIKEIFSYYDTYSNISKTMRYIKETHNLNWSFEVVKQILKNKIYIGVHKYNDEFCTPLIDKGLFDRVQNKLERNNKKPRTYIYLFSKLIKCPYCGSVLVGNSNVSTKEPSYYYRCNTYYRNHGALKCSSNKTFSEKKLENYLVNNIHELLEVYIADIDKKNKPTPNNNNKISALKRKIARLKDLYVEELIDIDTYKKDYNKYKEELKRLTPTIENKASDAIMQLMNVNIPELYKKLTREDKQAFWQSIIKEIHIIDQNNENYEIFFN

SEQ ID NO: 9211 - protein, 442 aa, Unknown
  Description of Unknown: Integrase B9212 sequence
  PTHR30461:SF3,IPR036162,PS51737,IPR011109,PTHR30461, PS00397,PF00239,G3DSA:1.10.10.2600,IPR006119,SSF53041, cd00338,SM00857,IPR025827,IPR038109,PS51736, IPR006118,PF13408,G3DSA:3.40.50.1390,Coil
MIAALMRVALIRVALYIRVSSEEQARHGLSLQEQRDALIRYAKANKMTVVGIYEDAGISARKPYKKRPALLRLLGDCKDGKIDMILFVKLDRWFRNVAGYYDVQTQLDQYGVTWQATEEDYETRTASGRLKVNIMLSVAQDEADRTSERIKFINDGKRAKGQPAGSKAPLGYAIKDRQYQIDNGTADAARDMFAAFIRLKSVLAVKRYMLDTWGIDRAYSKYVNYFRNRLYIGEVYGIENACPALVSKQDFDLVNDIIRQRSQRCAGVDTDRVYLFSGILHCKECGKTMQSETVKKTYTYYRCRTRMLDNTSCPHTKRIREDVLEDYLLHELAGIAERNNRYYKKAEKKPTQSADSIRKKMSKLKTLYLNDLIELDDYKAEYSILKRSLETVEEKPKTDLDALRNGLGEYGTYSREEKKEFWTRFIKRIDADNDGAFFVTPR

SEQ ID NO: 9212 - protein, 442 aa, Unknown
  Description of Unknown: Integrase B9213 sequence
  PTHR30461:SF3,IPR036162,PS51737,IPR011109,PTHR30461, PS00397,PF00239,G3DSA:1.10.10.2600,IPR006119,SSF53041, cd00338,SM00857,IPR025827,IPR038109,PS51736, IPR006118,PF13408,G3DSA:3.40.50.1390,Coil
MIAALMRVALIRVALYIRVSSEEQARHGLSLQEQRDALMRYAKEHKMTVVGIYEDAGISARKPYKKRPALLRLLDDCKAGKIDMILFIKLDRWFRNVAGYYDVQTQLDKYGVTWQATEEDYETRTASGRLKVNIMLSVAQDEADRTSERIKFINDGKRAKGQPAGSKAPLGYIIKDRQYQIDNDTADAARDMFAAYIRLQSVLGVKRYMLETWGIDRAYNKYVNYFHNRLYIGEVYGIENACPAIISKQDFDIVNDILRQRSQRCAGVETDRVYLFSGLLHCKECGKTMQSETIKQVYTYYRCRTRMLDNSACQHKKRIREDALEDYLLHELEGIAERNNRYYKKAEKKPTQSADAIRKKMGKLKTLYLNDLIELDEYKKEYASLKKSLETVEEKPKTNLDALRNGLAEYDTYSREEKKEFWTRFIRRIDADDDGAFFVTPR

SEQ ID NO: 9213 - protein, 442 aa, Unknown
  Description of Unknown: Integrase B9214 sequence
  PTHR30461:SF3,IPR036162,PS51737,IPR011109,PTHR30461, PS00397,PF00239,G3DSA:1.10.10.2600,IPR006119,SSF53041, cd00338,SM00857,IPR025827,IPR038109,PS51736, IPR006118,PF13408,G3DSA:3.40.50.1390,Coil
MIAALMRVALIRVALYIRVSSEEQARHGLSLQEQRDALMRYAKEHKMTVVGIYEDAGISARKPYKKRPALLRLLGDCKDGQIDMILFVKLDRWFRNVAGYYDVQTQLDQYGVTWQATEEDYETRTASGRLKVNIMLSVAQDEADRTSERIKFINDGKRAKGQPAGSKAPLGYAIKDRQYQIDNGTADAARDMFAAFIRLKSVLAVKRYMLDTWGIDRAYSKYVNYFRNRLYIGEVYGIENACPALVSKQDFDLVNDIIRQRSQRCAGVDTDRVYLFSGILHCKECGKTMQSETVKKTYTYYRCRTRMLDNTSCPHTKRIREDVLEDYLLHELAGIAERNNRYYKKAEKKPTQSADSIRKKMSKLKTLYLNDLIELDDYKAEYSILKRSLETVEEKPKTDLDALRNGLGEYGTYSREEKKEFWTRFIKRIDADNDGAFFVTPR

SEQ ID NO: 9214 - protein, 442 aa, Unknown
  Description of Unknown: Integrase B9215 sequence
  PTHR30461:SF3,IPR036162,PS51737,IPR011109,PTHR30461, PS00397,PF00239,G3DSA:1.10.10.2600,IPR006119,SSF53041, cd00338,SM00857,IPR025827,IPR038109,PS51736, IPR006118,PF13408,G3DSA:3.40.50.1390,Coil
MIAALMRVALIRVALYIRVSSEEQARHGLSLQEQRDALIRYAKANKMTVVGIYEDAGISARKPYKKRPALLRLLGDCKDGKIDMILFVKLDRWFRNVAGYYDVQTQLDQYGVTWQATEEDYETRTASGRLKVNIMLSVAQDEADRTSERIKFINDGKRAKGQPAGSKAPLGYVITDRQYQIDNGTVDAARDMFAAFIRLKSVLAVKRYMLDTWGIDRAYSKYVNYFRNRLYIGEVYGIENACPALVSKQDFDIVNDIIRQRSQRCAGVDTDRVYLFSGILHCKECGKTMQSETVKKTYTYYRCRTRMLDNTSCPHTKRIREDVLEDYLLHELAGIAERNNRYYKKAEKKPTQSADSIRKKMSKLKTLYLNDLIELDDYKAEYSILKRSLETVEEKPKTDLDALRNGLGEYGTYSREEKKEFWTRFLKRIDADNDGAFFVTPR

SEQ ID NO: 9215 - protein, 441 aa, Unknown
  Description of Unknown: Integrase B9216 sequence
  SM00857,IPR006118,G3DSA:1.10.10.2600,IPR036162,PF13408, PS51737,G3DSA:3.40.50.1390,IPR025827,PS00397,IPR006119, IPR038109,IPR011109,SSF53041,PTHR30461,Coil, PS51736,cd00338,PF00239
MKRAAIYVRVSTKEQKEKGLSVDSQLLALREYCSNNGYVIAGEYNDAGISARKKYINRPALLQLINDCKEGKIDIILFTKLDRWFRSVADYYQVQTLLDSYKVPWRAIWEDYETETSTGLFKVNIMLSVSQNEADKTSERTKEAVKYRRLRGDFVGGRCPCGYRRENKKLVFDEETYDAINAMFRTYLSCFSIAKATEAVAEYGLHIATSQICRMLKSPAYAGNASGSECPAYITWDEHLLILTNSTKRNRTPKRSDRVYLFSGLCRCGYCGGRMVARVNRWVKNGQQLYYPFYSCAAHNDKRNLDCPGVNLAETKIEAYLMEHLEAELKMCQSEFELEQENKATCENKIKTLEQKLKRIGVRYEDGDIPFEEYKDKRFAIKKEIAGYKDKIDNARSVPSLPDNWKDLYNSLTPDNKRGFWLNILKEIDITKEAINIVFPV

SEQ ID NO: 9216 - protein, 441 aa, Unknown
  Description of Unknown: Integrase B9217 sequence
  SM00857,IPR036162,PF13408,PS51737,G3DSA:3.40.50.1390, IPR025827,IPR006119,SSF53041,IPR011109,PF00239, PTHR30461,PS51736,Coil,cd00338
MNVLRAALYPRVSTEEQAKFGLSIHDQQNDLEEYAKANGMKVVGIYPDAGFSARKKIEKRPAMMELLAAVQRNEIDIILVTKLDRWFRNIGEYYKMQDILEAHNVCWKTIYEDYDTSTAAGRLKINIMLAVAQDEADRTGERIKKVLDAKKSRNEVCTGHLPKGYKIDGKFAVIHREAEPDIKTFFSVFLETGSIHNAISAVPNLKLQYRTASKMLDNRGYVGEWHGLTIPPYLTAEEFARIQTLRRRLQRKVAQNRTYIFSGLLVCGDCGRRIGGRPRKLVNGESYVYSCDGAYQYKGCPNHANIMEATIEQYLLETIDAKIEIFANTKDEPKQDSKEIEEKAKSLQKKLAKLSDLYLDDLISKSEYAKRYADLTAQLESAEALLRKPPAKSAKDLSEAFFSGWQDIYKELSRENKKVFWKLKLKEIRLYQDRRIDFDFL

SEQ ID NO: 9217 - protein, 441 aa, Unknown
  Description of Unknown: Integrase B9218 sequence
  PTHR30461:SF3,SM00857,G3DSA:1.10.10.2600,IPR036162, PF13408,IPR025827,PS51737,G3DSA:3.40.50.1390, IPR006119,IPR038109,PF07508,SSF53041, IPR011109,PTHR30461,PS51736,cd00338,PF00239
MIVNEIVPQELANKRLRVCAYARVSADNEDMMHSLSAQVSHYNDMIASNPKWIFAGIYADGGLSGTKTNRPEFQRMIQDCKNGKIDLIVTKSISRFSRNTIVMLETIRMLDEMGIDVYFEEQQMNIKSGKGELMLTIIGSFAQEEARQVSENMKWRIKKDFEKGILWGGNNPYGYIIDRKEKRLVINPEQAKVVRLIFEEYLDGKGASLIAKKLNKMGFKTMMNSEWNNNVVMAILKNEVYTGDLLLQKTYRENYLTKKTLKNKGELQQYYVEDDHEPIITHEMFEETQRIRNERIKKFKNKISYSNKAYPFTGIIKCSCCGSTFNHKTTKYNKLWICKTFNMKGKEYCQESKQIDESKLYEAINKYFGWDCFKENDFKTKVEYLIAKPNNEIEMHFKDGNVAIIKWEDRSRSESWTSEMKEKARQKKIEQYKKRGGGLNG

SEQ ID NO: 9218 - protein, 441 aa, Unknown
  Description of Unknown: Integrase B9219 sequence
  SM00857,IPR006118,G3DSA:1.10.10.2600,IPR036162,PF13408, PS51737,G3DSA:3.40.50.1390,IPR025827,IPR006119,IPR038109, IPR011109,SSF53041,PF00239,PTHR30461,PS00397, PS51736,Coil,cd00338
MKKRVALYVRVSTQEQKKHGLSVDSQIAALEEYCAEKKYTVVDVYNDAGISARKKYTKRPGLLRLLNDCEQKKIDLILFTKLDRWFRSVADYYEVQSILEKSKVPWQAIWEDYETITSQGIFKVNIMLSVAQAEADRTSERIRAVMEFKRKNREYLGGPVPLGYMVKDKKLVKNPETEHIVNDMFDYYFSTFSKYKTADYILQKYPEAAEMNTRGNMQLLISNPIYAGAAYGIDGYCDAYITQEQRRKMQENSNEKVYLSGVKRTYIFSGLLRCSVCGARMSGTMNHGSKSYRCFNRKMKHYTLVRSEKKLEKYLLENLETILSNKIYVLEQAKEDTQNYKIEKKKLLAERDRVNLMFEKGRITEEYYDSRYDEISIRLKELEKKDDAQSEKSEKLKKYLSGNWKELYKQLDEQGKQAFWKNIIEIIIISRETFIEDIIFF

SEQ ID NO: 9219 - protein, 441 aa, Unknown
  Description of Unknown: Integrase B9220 sequence
  SM00857,IPR006118,G3DSA:1.10.10.2600,IPR036162,PF13408, PS51737,IPR025827,G3DSA:3.40.50.1390,IPR006119,IPR038109, IPR011109,SSF53041,PF00239,PTHR30461,PS00397, PS51736,Coil,cd00338
MKKRVALYVRVSTQEQKKHGLSVDSQIAALEEYCAEKKYTVVDVYNDAGISARKKYTKRPGLLRLLNDCEQKKIDLILFTKLDRWFRSVADYYEVQSILEKSKVPWQAIWEDYETITSQGIFKVNIMLSVAQAEADRTSERIRAVMEFKRKNREYLGGPVPLGYMVKDKKLVKNPETEHIVNDMFDYYFSTFSKYKTADYILQKYPEATEMNTRGNMQLLISNPIYAGAAYGIDGYCDAYITQEQRRKMQENSNEKVYLSGVKRTYIFSGLLRCSVCGARMGGTMNHGSKSYRCFNRKMKHYTLVRSEKKLEKYLLENLETILSNKIYVLEQAKEDTQNYKIEKKKLLAERDRVNLMFEKGRITEEYYDSRYDEISIRLKELEKKDDAQSEKSEKLKKYLSGNWKELYKQLDEQGKQAFWKNIIEIIIISRETFIEDIIFF

SEQ ID NO: 9220 - protein, 441 aa, Unknown
  Description of Unknown: Integrase B9221 sequence
  SM00857,IPR006118,G3DSA:1.10.10.2600,IPR036162,PF13408, IPR025827,G3DSA:3.40.50.1390,Coil,PS51737,IPR006119, IPR038109,SSF53041,IPR011109,PTHR30461,PS00397, PS51736,cd00338,PF00239
MKRAAIYVRVSTKEQKEKGLSVDSQLLALREYCSNNGYVIAGEYNDAGISARKKYINRPALLQLIDDCKEGKIDIILFTKLDRWFRSVADYYQVQTLLDSYKVPWRAIWEDYETETSTGLFKVNIMLSVSQNEADKTSERTKEAVKYRRLRGDFVGGKCPRGYRRENKKLVFDEKTYDAINAMFRTYLSCFSIAKATEAVAEYGLHIATSQICRMLKSPAYAGNASGSECPAYITWDEHLLILTNSTKRNRTPKRSDRVYLFSGLCRCGYCGGRMVARVNRWVKNGQQLYYPFYSCAAHNDKRNLDCPGVNLAETKIEAYLMEHLEAELKMCQSEFELEQENKATYENKIKALEQKLKRIGVRYEDGDIPFEEYKDKRFAIKKEIAGYKDKIDNARSVPSLPDNWKDLYNSLTPDNKRGFWLNILKEIDITKEAINIVFPV

SEQ ID NO: 9221 - protein, 441 aa, Unknown
  Description of Unknown: Integrase B9222 sequence
  SM00857,IPR036162,PF13408,IPR025827,G3DSA:3.40.50.1390, PS51737,IPR006119,IPR011109,SSF53041,PF00239, PTHR30461,PS51736,Coil,cd00338
MNVLRAALYPRVSTEEQAKFGLSIHDQQNDLEEYAKANGMIVVGIYPDAGFSARKKIEKRPAMMELLAAVQRDEIDIILVTKLDRWFRNIGEYYKVQEILEAHNVCWKTIYEDYDTSSAAGRLKINIMLAVAQDEADRTGERIKKVLDAKKSRNEVCTGHLPKGYKIDGKFAVIDREAEPDVKTFFSVFLETGSIHNAISAVPNLKLQYRTASKMLDNRGYVGEWHGLSIPPYLTAEEFDRVQTLRRRLQRKVAQNRTYIFSGLLVCGDCGRRIGGRPRKLVNGESYVYSCDGAYQYKGCPNHANIMEATIEQYLLETIDAKIEIFANTKDEPKQNSKEIEEKAKSLRKKLAKLSDLYLDDLIAKDEYAKRYADLTAQLESAESLLRKPPAKSAKDLSEAFFSGWQDIYKELSRENKKVFWKLKLKEIRLYQDRRIDFDFL

SEQ ID NO: 9222 - protein, 441 aa, Unknown
  Description of Unknown: Integrase B9223 sequence
  PTHR30461:SF3,IPR036162,PS51737,IPR011109, PTHR30461,PS00397,PF00239,G3DSA:1.10.10.2600, IPR006119,SSF53041,cd00338,SM00857,IPR025827,IPR038109 ,PS51736,IPR006118,PF13408,G3DSA:3.40.50.1390,PF07508,Coil
MRVALYARVSTEEQAIHGLSIGVQQENLKKWANENHHTIVGVYVDAGVSARKPASKRPDLQRLLNDVRAGKIEMIVFTKLDRWFRNVKEYYKVQDVLDEHRVCWKTIEEEYETETSAGRFKVNIMLSVAESEADRTSERIKTINKNKRENGLCHHGTQPLGLKIVKGKLTEDPETAPVVRDVFRHFIATQSVTSTGRYLLSEYGITRSYKNTKQMLKNKRYIGVADNGEQLYPPIVPPQDFALAQSIMAERSTRHSGDFTQKHIYLFTGIVFCAECGRRLSVTMSHVHGGEYVYYKCPSYAGRSCVHRRREREKDLEQYMVDHIISGCINYNVEIAQQNASNQQTVDKAAIKRKMKKLKDLYLSDLIERDVYAKDYTSLRKQLEAPEPEEKEQIDVDALKSTMDVYGSLEPSERREFWRRTVKKISVSNDGEINFELAGYI

SEQ ID NO: 9223 - protein, 441 aa, Unknown
  Description of Unknown: Integrase B9224 sequence
  PTHR30461:SF3,IPR036162,PS51737,IPR011109,PTHR30461, PS00397,PF00239,G3DSA:1.10.10.2600,IPR006119,SSF53041, cd00338,SM00857,IPR025827,IPR038109,PS51736, IPR006118,PF13408,G3DSA:3.40.50.1390,Coil
MRCAIYIRVSSDEQRRKGFSLPEQKKTLIEYAKNKDYKIIDIYADEGISASKKPHLRHDFQRMISDVKAGKIDVIVFIKLDRWFRNVGDYYRTQEILDKHNVKWECALEDYDTTTRTGRLNLNIKLTIAEDEAANTSERVKFVLNGKLNNKEPVTGNQPFGYKIEKIDGVKRIIKDPETEAETNDMFETFFTTLSGYAVTKHINTKYGRNLSDTTITRRLKNPAYTGEHKGISDYRPAYITPEQHAQILRIFSKNTRTAQNNKIYLFSGMLICPECGHIMASCTQNKTTLGYRCRYHFTQNCNYSHVVKETDVEKFLLSNIRPNLEKYNLKMKSLQQKKKKVTPQKFEEQLERLNNVYIMGNISTDEYKKTSADLKAKIANLKAANNDSQSIPQNMLNLLSDEKFPSIYKDLSRVDKRSLWKSIIDIIIIEGVTPVELKFV

SEQ ID NO: 9224 - protein, 441 aa, Unknown
  Description of Unknown: Integrase B9225 sequence
  PTHR30461:SF3,SM00857,IPR006118,G3DSA:1.10.10.2600,IPR036162, PF13408,IPR025827,G3DSA:3.40.50.1390,PS51737,IPR006119, IPR038109,SSF53041,IPR011109,PTHR30461,PS00397, PS51736,cd00338,PF00239
MRVALYVRVSTEEQAVHGLSVDDQKESLKKWAEENKHKVVDYYVDAGVSGRKSVSKRPELQRLLSDVEAGKIDLVAFTKLDRWFRNIGEFYKAQEVLDAHGVVWQATYEDYETATAAGRLKVNIMLSVAQDEADRTSERVKRIMQHKRELGLCPAGKTPIGLKAVESRLCIDEETAHIARRMFEDYIATGSVNHVKKMLISEFGIMRANHHIKGALSNERYIGLNNGIKVCDALIPPEDFALVQRMLTARSIRNNGSKHTWLFSGLVWCAECGHRLVTHSTQQRGTDYFYYRCKNYEMGICRHKKRINEATLEKYLLAKLPIEVQAHNAKLKAGKTKPPVDTAAIKRKMDKLTDLYLADLINREKYEIEYTALKEKLNVPPEPKPINEELVVSLLDAYDKLPPSGKKEVWNRFIRRIVISENGDIFFELVWLQRTLTPVNV

SEQ ID NO: 9225 - protein, 441 aa, Unknown
  Description of Unknown: Integrase B9226 sequence
  PTHR30461:SF3,SM00857,IPR006118,G3DSA:1.10.10.2600,IPR036162, PF13408,IPR025827,G3DSA:3.40.50.1390,PS51737,IPR006119, IPR038109,SSF53041,IPR011109,PTHR30461,PS00397, PS51736,cd00338,PF00239
MEMKNARLYARVSTDEQRKKEQSVPDQLEALKEYCEEHNYNIKGIYHDDGISAATIDKRKDFCRMLDDLQQNEVILFTKLDRFSRDLLDGNLLLKRFAPLNVSFKAILEPDIDVTTADGKFRFDLMVSLAERERKIDSERILFSFERKVARGEFLGGRLPIGYIKDNKRAVIDPEKAAFVKDIFETMEIEQNTFRVMKAMNHKYGLNKDKKYYYRKLIDQRYTGVYRGKTNVFPQIISPNQYDNVQSILQGRYIKRGPSRRDYIFSGLLLCSQCGRKLAGSATSGKYKIYKCSNLQKGEKMHCCFAEKKLEKKILPKIMPLLQKYLLDLEASEAKVSQNRDIIQISKQKINRLQDLYIDGKIDKDTFDRKYADLNEIISAEEQKSNIVSIQEAKQRYTQLLDMDIENIYSTLNDNEKRKLWHSFIDRIVIKSYDEIDIFLL

SEQ ID NO: 9226 - protein, 441 aa, Unknown
  Description of Unknown: Integrase B9227 sequence
  SM00857,IPR036162,PF13408,PS51737,IPR025827, G3DSA:3.40.50.1390,IPR006119,IPR011109,SSF53041,PF00239, PTHR30461,PS51736,Coil,cd00338
MNVLRAALYPRVSTEEQAKFGLSIHDQQNDLEEYAKANGMKVVGIYPDAGFSARKKIEKRPAMMELLAAVQRNEIDIVLVTKLDRWFRNIGEYYKVQEILEAHNVCWKTIYEDYDTSTAAGRLKINIMLAVAQDEADRTGERIKKVLDAKKSRNEVCTGHLPKGYKIDGKFAVIDREAEPDVKTFFSVFLETGSIHNAISAVPNLKLQYRTASKMLDNRGYVGEWHGLSIPPYLTAEEFDRIQTLRRRLQRKVAQNRTYIFSGLLVCGDCGRRIGGRPRKLVNGESYVYSCDGAYQYKGCPNHANIMEATIEQYLLETIDAKIEIFANTKDEPKQNSKEIEEKAKSLQKKLAKLSDLYLDDLIAKDEYAKRYADLTAQLESAESLLRKPPAKSAKDLSEAFFSGWQDIYKELSRENKKVFWKLKLKEIRLYQDRRIDFDFL

SEQ ID NO: 9227 - protein, 441 aa, Unknown
  Description of Unknown: Integrase B9228 sequence
  SM00857,IPR036162,PF13408,PS51737, IPR025827,G3DSA:3.40.50.1390,IPR006119,SSF53041, IPR011109,PF00239,PTHR30461,PS51736, Coil,cd00338
MNVLRAALYPRVSTEEQAKFGLSIHDQQNDLEEYAKANGMKVVGIYPDAGFSARKKIEKRPAMMELLAAVQRNEIDIILVTKLDRWFRNIGEYYKVQEILEAHNVCWKTIYEDYDTSTAAGRLKINIMLAVAQDEADRTGERIKKVLDAKKSRNEVCTGHLPKGYKIDGKFAVIDRAAEPDVKTFFSVFLETGSIHNAISAVPNLKLQYRTASKMLDNRGYVGEWHGLSIPPYLTAEEFDRVQTLRRRLQRKVAQNRTYIFSGLLVCGDCGRRIGGRPRKLVNGESYVYSCDGAYQYKGCPNHANIMEATIEQYLLETIDAKIEIFANTKDEPKQNSKEIEEKAKSLQKKLAKLSDLYLDDLIAKDEYAKRYADLTAQLESAESLLRKPPAKSAKDLSEAFFSGWQDIYKELSRENKKVFWKLKLKEIRLYQDRRIDFDFL

SEQ ID NO: 9228 - protein, 441 aa, Unknown
  Description of Unknown: Integrase B9229 sequence
  SM00857,IPR006118,G3DSA:1.10.10.2600,IPR036162,PF13408, IPR025827,G3DSA:3.40.50.1390,PS51737,Coil,IPR006119, IPR038109,IPR011109,SSF53041,PTHR30461,PS00397, PS51736,cd00338,PF00239
MKRAAIYVRVSTKEQKEKGLSVDSQLLALREYCSNNGYVIAGEYNDAGISARKKYINRPALLQLIDDCKEGKIDIILFTKLDRWFRSVADYYQVQTLLDSYKVPWRAIWEDYETETSTGLFKVNIMLSVSQNEADKTSERTKEAVKYRRLRGDFVGGKCPRGYRRENKKLVFDEKTYDAISAMFRTYLSCFSIAKATEAVAEYGLHIATSQICRMLKSPAYAGNASGSECPAYITWDEHLLILTNSTKRNRTPKRSDRVYLFSGLCRCGYCGGRMVARVNRWVKNGQQLYYPFYSCAAHNDKRNLDCPGVNLAETKIEAYLMEHLEAELKMCQSEFELEQENKATYENKIKALEQKLKRIGVRYEDGDIPFEEYKDKRFAIKKEIAGYKDKIDNARSVPSLPDNWKDLYNSLTPDNKRGFWLNILKEIDITKEAINIVFPV

SEQ ID NO: 9229 - protein, 441 aa, Unknown
  Description of Unknown: Integrase B9230 sequence
  SM00857,IPR006118,G3DSA:1.10.10.2600,IPR036162,PF13408, PS51737,G3DSA:3.40.50.1390,PS00397,IPR025827,IPR006119, IPR038109,SSF53041,IPR011109,PTHR30461,Coil, PS51736,cd00338,PF00239
MKKRVALYVRVSTQEQKKHGLSVDSQIAALEEYCAEKKYTVVDVYNDAGISARKKYTKRPGLLRLLNDCEQKKIDLIIFTKLDRWFRSVADYYEVQSILEKSKVPWQAIWEDYETITSQGIFKVNIMLSVAQAEADRTSERIRAVMEFKRKNREYLGGPVPLGYMVKDKKLVKNPETEHIVNDMFDYYFSTFSKYKTADYILQKYPKVAEMNTRGNMQLLISNPIYAGVAYGIDGYCDAYITQEQRRKMQENSNEKVYLSGVKRTYIFSGLLRCSVCGARMGGTMNHGNKSYRCFNRKMKHYTLVRSEKKLEKYLLENLETILSNKIYVLEQAKKDTQNYKIEKKKLLAERDRVNLMFEKGRITEEYYDSRYDEISERLKELEKKDDVQSEKSEKLKKYFSGNWKELYKQLDEQGKQAFWKNIIEIIIISRETFIEDIIFF

SEQ ID NO: 9230 - protein, 441 aa, Unknown
  Description of Unknown: Integrase B9231 sequence
  SM00857,IPR006118,G3DSA:1.10.10.2600,IPR036162,PF13408, IPR025827,G3DSA:3.40.50.1390,PS00397,PS51737,IPR006119, IPR038109,SSF53041,IPR011109,PTHR30461,Coil, PS51736,cd00338,PF00239
MKRAAIYVRVSTKEQKEKGLSVDSQLLALREYCSNNGYVIAGEYNDAGISARKKYINRPALLQLISDCKEGKIDIILFTKLDRWFRSVADYYQVQTLLDSYKVPWRAIWEDYETETSTGLFKVNIMLSVSQNEADKTSERTKEAVKYRRLRGDFVGGRCPRGYRRENKKLVFDEETYDAINAMFRTYLSCFSIAKATEAVAEYGLHIATSQICRMLKSPAYAGNASGSECPAYITWDEHLLILTNSTKRNRTPKRSDRVYLFSGLCRCGYCGGRMVARVNRWVKNGQQLYYPFYSCAAHNDKRNLDCPGVNLAETKIEAYLMEHLEAELKMCQSEFELEQENKAIYENKIKALEQKLKRIGVRYEDGDIPFEEYKDKRFAIKKEIAGYKDKIDNARSVPSLPDNWKDLYNSLTPDNKRGFWLNILKEIDITKEAINIVFPV

SEQ ID NO: 9231 - protein, 441 aa, Unknown
  Description of Unknown: Integrase B9232 sequence
  SM00857,IPR006118,G3DSA:1.10.10.2600,IPR036162,PF13408, IPR025827,G3DSA:3.40.50.1390,PS00397,PS51737,IPR006119, IPR038109,SSF53041,IPR011109,PTHR30461,Coil, PS51736,cd00338,PF00239
MKRAAIYVRVSTKEQKEKGLSVDSQLLALREYCSNNGYVIAGEYNDAGISARKKYINRPALLQLINDCKEGKIDIILFTKLDRWFRSVADYYQVQTLLDSYKVPWRAIWEDYETETSTGLFKVNIMLSVSQNEADKTSERTKEAVKYRRLRGDFVGGKCPRGYRRENKKLVFDEKTYDAINAMFRTYLSCFSIAKATEAVAEYGLHIATSQICRMLKSPAYAGNASGSECPAYITWDEHLLILTNSTKRNRTPKRSDRVYLFSGLCRCGYCGGRMVARVNRWVKNGQQLYYPFYSCAAHNDKRNLDCPGVNLAETKIEAYLMEHLEAELKMCQSEFELEQENKATYENKIKTLEQKLKRIGVRYEDGDIPFEEYKDKRFAIKKEIAGYKDKIDNARSVPSLPDNWKDLYNSLTPDNKRGFWLNILKEIDITKEAINIVFPV

SEQ ID NO: 9232 - protein, 441 aa, Unknown
  Description of Unknown: Integrase B9233 sequence
  PTHR30461:SF3,IPR036162,PS51737,IPR011109,PTHR30461, PF00239,G3DSA:1.10.10.2600,IPR006119,SSF53041,cd00338, PF09851,SM00857,IPR025827,IPR038109,PS51736, PF13408,IPR018649,G3DSA:3.40.50.1390,PF07508,Coil
MEALLYTRVSKEDQVKFGMSLDAQLESLKKYCSENNLKIRNIYSDEGISGGSITKRKAFQNMIEESKPGDIILFTKLDRFSRNLLDANIVVKELTKKDVSIKAINEDDIDTSTADGKFIFNLKLSLAQREREKVSERINDVFEYKIKQGEVCTGNVPVGYMIKDKHLVLDPVKSVWIREMFDYFLKHQSVVGTCKWWNLKHPEYTMEYKAIKMSRLKNTFYCGKHPSGLNDNYCEPIISEEEFDKIQEILKRNVKSNRTNNVYIFTGLLTCSHCGRRMGGFYRNWKGNKTNYYRCYQYCSFRKCDMSHTVSERKIEEFVLQNMIEKCNEIVSASLKPENTDEVKLQNKKANTESKISRLKDLYVDGVLTKEEFDTKYKQLQDEIKAIKQEMKPKSNKLLELHDVDVKELYSKLNPENKRAFWRKYIDRIYFDGHDFKVVYQ

SEQ ID NO: 9233 - protein, 441 aa, Unknown
  Description of Unknown: Integrase B9234 sequence
  PTHR30461:SF3,SM00857,G3DSA:1.10.10.2600,IPR036162,PF13408, PS51737,IPR025827,G3DSA:3.40.50.1390,mobidb-lite,IPR006119, IPR038109,PF07508,IPR011109,SSF53041,PTHR30461, PS51736,cd00338,PF00239
MEMKITKISTLPQLDRKKRVAAYARVSTGKDAMLHSLSAQVSYYNNLIQNNNEWEFAGIYADEAMSGTKDNREEFNRMVDDCKAGKIDLIITKAISRFARNTATLLSTIRELSSVGVDVFFEEQNLHSISGDGEMILTLLASCAQEEARSASENVKWRVKKDFKQGILNGGNDCYGYKLIDKKFVLVPEEAEIVKMIFAWYICGEGVVAISKKLDDMGIKPVRAKYWLPNTIMRMLKDRCYVGDLILQKTYVTDYVSKKKKRNHGEFDKYFVENDHEPIIDIETFKKANALMVERAKRFKAQDRTALRYPLSGKIVCGECGSRFGHKVYMHSSPGWICSAFDRKGKKACQSRKVPEYAMDEAVDAVIGGYDNIKVLDFIEVFNNNRLLFHLKNKEIKEFIWEERSRSQSWTDEMREEAKKRTIINNKNKKRGANGKWQKSE

SEQ ID NO: 9234 - protein, 441 aa, Unknown
  Description of Unknown: Integrase B9235 sequence
  PTHR30461:SF3,SM00857,G3DSA:1.10.10.2600,IPR036162,PF13408, PS51737,IPR025827,G3DSA:3.40.50.1390,IPR006119,IPR038109, IPR011109,SSF53041,PTHR30461,Coil,PS51736, cd00338,PF00239
MKSNVLRAALYPRVSTEEQAKFGLSIHDQQADLEKYAKDNGMKIVGVFADAGFSARKKIEKRPAMLALLEAVKRDEIDIVLVTKLDRWFRNIGEYYKVQEILEAHGVSWRTIYEDYDTSTAAGRLKINIMLAVAQDEADRTSERIKRVLDGKKERNEVCTGHVPKGYKIEGKSVVIDTEKEPYIRKFFATFMETGSMHDTIAAVPELHLFYRTASDMLKNRGYIGDWHGLSIPPYLTAQEFEHIASLRRRIVRKSPQDRIYIFSGILSCGECGRRLNGRPRKTKVGESYVYSCGGVYEYKDCDNHVNIVETKIEQFLLDTIDEKIRLMVKYKNTPQQTDYAEQERAIRKKLSKLSDLYVDDMIDKQDYAARYKTLTAQLEKILAEKAKLQPKSTKALETEFFAGWKEIYQNLSRENKKAFWKLKIKEIRVYKDRRIDFDFI

SEQ ID NO: 9235 - protein, 441 aa, Unknown
  Description of Unknown: Integrase B9236 sequence
  PTHR30461:SF3,IPR036162,PS51737,IPR011109,PTHR30461, PS00397,PF00239,G3DSA:1.10.10.2600,IPR006119,SSF53041, cd00338,SM00857,IPR025827,IPR038109,PS51736, IPR006118,PF13408,G3DSA:3.40.50.1390,PF07508
MRVALYARVSTEEQAIHGLSIGVQQESLKKWASENHHTIVDMYVDAGISARKPASKRPSLQRLLDDVRAGKIDMIVFTKLDRWFRNVKEYYKVQEVLEQHDVSWRALEENYETETSNGVFTVNIMLSVAQSEADRTSERIKVVTKNKRDKGLCHQGKKPLGLNIVKGELVEDPETAPIIRDIFRYFIATQSVTATRRYLLSQYSITRSYKNTKLILKNTRYIGVADNGQRLYHPIVPPEDFALAQSIMAERSTRHSGDFTQKHVYLFTGIVFCAECGRRLSGTMSHLHNREYVYYKCPSYVGRSCTHLRREREEALEQYMVEHILSGCIDYNAAIAQQSAVKSPTIDRAAVKRKMEKLKDLYLSDLIDREMYEADYLVLKKQLEAPEPAKREPIDIDVLKSAIGAYDDLEPLERREFWRRIVKRISVDQDGGINFELVGHI

SEQ ID NO: 9236 - protein, 440 aa, Unknown
  Description of Unknown: Integrase B9237 sequence
  SM00857,G3DSA:1.10.10.2600,IPR036162,PF13408,PS51737, IPR025827,G3DSA:3.40.50.1390,IPR006119,IPR038109,IPR011109, SSF53041,PF00239,PTHR30461,PS51736,Coil, cd00338
MSVVLRAALYPRVSTEEQKKFGLSIHDQQNDLEEYAKAHNMKVVGVFQDAGFSARKKIEKRPAMLQLLEAVKHDEIDIILVTKLDRWFRNIGEYYKVQEILEAHNVSWKTIYEDYDTSTAAGRLKINIMLSVAQDEADRASERIKKVLDAKKDRNEVCTGHLPKGYKREGKFAVIDKEAEPIMRRFFSTFFETGAITKAMDAVPELNLNYKTASAILNNTAYMGKWNGLTLPPYLTQQEFQRVQELRRRVTRKSPYNRIYLFSGLTVCGECGRRMTGHPTTLKDGTCVYKYLCQGAKQRRGCDNGLVVREQDIENYFMFSIDEQIQIKLKAKAQHAPKINTDAQIKAIQKKLAKLSELYIDDMISKPDYSKKYAELTKQVEALKQTQVQSRAPEEVADLFAPGWQDIYKDLTRENKRAFWKLKIKEIRLYKDSRIEFDFL

SEQ ID NO: 9237 - protein, 440 aa, Unknown
  Description of Unknown: Integrase B9238 sequence
  cd00338,SM00857,G3DSA:1.10.10.2600,IPR036162,PF13408, PS51737,IPR025827,G3DSA:3.40.50.1390,IPR006119,IPR038109, IPR011109,SSF53041,PTHR30461,PS51736,Coil, PF00239
MNVVLRAALYPRVSTEEQKKFGLSIHDQQNDLEEYAKAHNMKVVGVFQDAGFSARKKIEKRPAMLQLLEAVKHDEVDIILVTKLDRWFRNIGEYYKVQEILEAHNVSWKTIYEDYDTSTAAGRLKINIMLSVAQDEADRASERIKKVLDAKKDRNEVCTGHLPKGYKIEGKFAVIDKETEPVIRRYFSTFLETGSITKAMDAVPELKLKYQTASQMLDNPGYMGDWHGIKLPPYLTPQEFQRVQGLRTRVTRKSPYNRTYIFSGLIVCGECGRRMTGHPSPRPSGACSYSYYCQGSAQRKGCNNGNFTVEWKIEDYLLSTIDEQIQIKLQAKPRQEPKANQDVQLKALQKKLSKLSELYIDDMISKADYSKKYAELTSQMDELTQVKSQSRAPEEIATLFSAGWQEIYKQLNKENKQAFWKLKIKEIRLYKDRRIEFDFL

SEQ ID NO: 9238 - protein, 440 aa, Unknown
  Description of Unknown: Integrase B9239 sequence
  cd00338,SM00857,G3DSA:1.10.10.2600,IPR036162,PF13408, PS51737,IPR025827,G3DSA:3.40.50.1390,IPR006119,IPR038109, IPR011109,SSF53041,PTHR30461,PS51736,Coil, PF00239
MSVVLRAALYPRVSTEEQKKFGLSIHDQQNDLEKYAKAHNMKVVGVFQDAGFSARKKIEKRPAMLQLLEAVKRDEVDIILVTKLDRWFRNIGEYYKVQEILEAHNVSWKTIYEDYDTSTAAGRLKINIMLSVAQDEADRASERIKKVLDAKKDRNEVCTGHLPKGYKIEGKFAVIDKEAEPVIRRYFSTFLETGSITKAMDAVPELKLKYQTASQMLDNTGYMGDWHGIKLPPYLTPQEFQRVQDLRTRVTRKSPYNRTYIFSGLIVCGECGRRMTGHPSPRPSGACSYSYYCQGSAHRKGCNNGNFTVEWKIEDYLLSTIDEQIQIKLQAKPRQEPKANQDVQLKALQKKLSKLSELYIDDMISKADYSKKYAELTSQMDEITQVKSQSRAPEEIATLFSAGWQEIYKQLTRENKQAFWKLKIKEIRLYKDRRIEFDFL

SEQ ID NO: 9239 - protein, 440 aa, Unknown
  Description of Unknown: Integrase B9240 sequence
  PTHR30461:SF3,cd00338,SM00857,G3DSA:1.10.10.2600,IPR036162, PF13408,PS51737,G3DSA:3.40.50.1390,IPR025827,IPR006119, IPR038109,IPR011109,SSF53041,PTHR30461,PS51736, Coil,PF00239
MNVVLRAALYPRVSTEEQKKFGLSIHDQQNDLEEYAKAHNMKVVGVFQDAGFSARKKIEKRPAMLQLLEAVKRDEVDIILVTKLDRWFRNIGEYYKVQEILEAHNVSWKTIYEDYDTSTAAGRLKINIMLSVAQDEADRASERIKKVLDAKKDRNEVCTGHLPKGYKIEGKFAVIDKEAEPVIRRYFSTFLETGSITKAMDAVPELKLKYQTASQMLDNTGYMGDWHGIKLPPYLTPQEFQRVQDLRTRVTRKSPCNRTYIFSGLIICGECGRRMTGHPTPRASGKCSYSYYCQGSAQRKGCNNGNFTVEWKIEDYLLSTIDEQIQVKLQAKPRQEPKANQDVQLKALQKKLSKLSELYIDDMISKADYSKKYAELTSQMDELTQVKSQSRAPEEIATLFSAGWQEIYKQLNKENKQAFWKLKIKEIRLYKDRRIEFDFL

SEQ ID NO: 9240 - protein, 440 aa, Unknown
  Description of Unknown: Integrase B9241 sequence
  SM00857,G3DSA:1.10.10.2600,IPR036162,PF13408,PS51737, G3DSA:3.40.50.1390,IPR025827,IPR006119,IPR038109,SSF53041, IPR011109,PF00239,PTHR30461,PS51736,Coil, cd00338
MSVVLRAALYPRVSTEEQKKFGLSIHDQQNDLEKYAKAHNMKVVGVFQDAGFSARKKIEKRPAMLQLLEAVKHDEVDIILVTKLDRWFRNIGEYYKVQEILEAHNVSWKTIYEDYDTSTAAGRLKINIMLAVAQDEADRASERIKKVLDAKKDRNEVCTGHLPKGYKIEGKFAVIDKEAEPVIRRYFSTFLETGSITKAMDAVPELKLKYQTASQMLDNTGYMGDWHGIKLPPYLTPQEFQRVQDLRTRVTRKSPYNRTYIFSGLIVCGECGRRMTGHPSPRPSGACSYSYYCQGSAQRKGCNNGNFTVEWKIEDYLLSTIDEQIQIKLQAKPRQEPKVNQDVQLKTLQKKLSKLSELYIDDMISKSDYSKKYAELTSQMDEITQVKSQSRAPEEIATLFSAGWQEIYKQLNKENKQAFWKLKIKEIRLYKDRRIEFDFL

SEQ ID NO: 9241 - protein, 440 aa, Unknown
  Description of Unknown: Integrase B9242 sequence
  PTHR30461:SF3,IPR036162,PS51737,IPR011109,PTHR30461, PS00397,PF00239,G3DSA:1.10.10.2600,IPR006119,SSF53041, cd00338,SM00857,IPR025827,IPR038109,PS51736, IPR006118,PF13408,G3DSA:3.40.50.1390,PF07508
MNTNKRAALYIRVSTEEQARHGLSLSAQLENLQQYAKNKGYKIVGIYTDDGASARKSPFSRKAFRQLMEDVQWNRIDHILFIKLDRWFRSVRDYYKAQDILDAHGVDWETTQEQYNTTTTNGRLMLNIKLSVAQNESDMTSDRIRFVFEQKRAKHEVLSGFAPLGYKIENKHLVPDENAPIIANAFNQFIAYPNLQQLTNWFHSQGIHYNVTSIRKLLRNERYVGRNKGDLEYCPPIVSDQQFYTVQDMLDKNLTVKRTASGLVYLFTGLLRCPICGHKLTSSCAYSGTHKYKRYRCSRHWRNEDCSFNRGIAESKLEKQLLAHFDDLYEHFNSAVQEEQKNNTRIDTQVIKKKQERLKELFLNELITLDEYKKDYAKYAAMLPSEPRPSIQSSLYKGMKAADIEQLYKTLPDRQKQAFLRQIIDYIDFDADLKPIIHFK

SEQ ID NO: 9242 - protein, 440 aa, Unknown
  Description of Unknown: Integrase B9243 sequence
  PTHR30461:SF3,SM00857,G3DSA:1.10.10.2600,IPR036162,PF13408, PS51737,IPR025827,G3DSA:3.40.50.1390,PS51736,IPR006119, IPR038109,PF07508,IPR011109,SSF53041,PTHR30461, mobidb-lite,cd00338,PF00239
MIQKKITTIDAAPRLERLINVAAYARVSSGKDAMLHSLAAQITYYQNLITSHQGWKFAGVYADEAFTGTKDNRHEFQRLIQDCKDGKIDMVIVKAISRFARNTVTLLKTVRILKSINVDVYFEEQNLHTLSAEGEMVLTFLASFAQEESRSVSENMKWRIKKDFEQGLIWGSKPQLGYRIVDRRLVVVPEEAEMVRRIFSLYLDGYGFQGIANLLNAEGQTSTLGNKWSKTAIEAIINNYNYTGDLILQKTFRVDHLTKHKKLNRGEKAQYLVEDAHEPIITKEQYMMAQTLKKQRAQHFNLLDMTKQINLFTGIVWCGACGKHYRRKKQERRMWWTCSTFNTVGKEFCDSKSVPEEVLIEITKKVLGVKEITAEIIKSKVDHIDVLKGNRLVFHLKNGSTIEETWKSLSRKDNWTPEMKEKARQRAIAQYRRKEGKHNG

SEQ ID NO: 9243 - protein, 440 aa, Unknown
  Description of Unknown: Integrase B9244 sequence
  SM00857,G3DSA:1.10.10.2600,IPR036162,PF13408,IPR025827, G3DSA:3.40.50.1390,PS51737,IPR006119,IPR038109,SSF53041, IPR011109,PF00239,PTHR30461,PS51736,Coil, cd00338
MSVVLRAALYPRVSTEEQAKFGLSIHDQRNDLEEYAKANNMKVVGVFPDAGFSARKKIEKRPAMLQLLEAVKRNEVDIILVTKLDRWFRNIGEYYKVQEILEAHNVSWKTIYEDYDTSTAAGRLKINIMLAVAQDEADRASERIKKVLDAKKDRNEVCTGHLHKGYKKEGKFAVIDKEAEPIMRRFFSTFLETGAITKTMDAVPELNLNYKTASAILNNTAYMGKWNGLTLPPYLTQQEFQRVQELRRRVTRKSPYNRIYLFSGLTVCGECGRRMTGHPTTLKDGTCVYKYLCQGAKQRRGCDNGLVVREQDIENYFMSSIDEQIQIKLKAKAQHAPKINTDAQIKAIQKKLAKLSELYIDDMISKPDYSKKYAELTEQVEALKQTQVQSRAPEEVADLFAPGWQDIYKNLTRENKRAFWKLKIKEIRLYKDSRIEFDFL

SEQ ID NO: 9244 - protein, 440 aa, Unknown
  Description of Unknown: Integrase B9245 sequence
  PTHR30461:SF3,SM00857,G3DSA:1.10.10.2600,IPR036162,PF13408, IPR025827,G3DSA:3.40.50.1390,PS51737,IPR006119,IPR038109, SSF53041,IPR011109,PF00239,PTHR30461,PS51736, Coil,cd00338
MSVVLRAALYPRVSTEEQKKFGLSIHDQQNDLEKYAKAHNMKVVGVFQDAGFSARKKIEKRPAMLQLLEAVKHDEVDIILVTKLDRWFRNIGEYYKVQEILEAHNVSWKTIYEDYDTSTAAGRLKINIMLAVAQDEADRASERIKKVLDAKKDRNEVCTGHLPKGYKIEGKFAVIDKEAEPVIRRYFSTFLETGSITKAMDAVPELKLKYQTASQMLDNTGYMGDWHGIKLPPYLTPQEFQRVQDLRTRVTRKSPYNRTYIFSGVIVCGECGRRMTGHPSPRPSGACSYSYYCQGSAQRKGCNNGNFTVEWKIEDYLLSTIDEQIQIKLQAKPRQEPKVNQDVQLKTLQKKLSKLSELYIDDMISKSDYSKKYAELTSQMDEITQVKSQSRAPEEIATLFSAGWQEIYKQLNKENKQAFWKLKIKEIRLYKDRRIEFDFL

SEQ ID NO: 9245 - protein, 440 aa, Unknown
  Description of Unknown: Integrase B9246 sequence
  cd00338,SM00857,G3DSA:1.10.10.2600,IPR036162,PF13408, PS51737,G3DSA:3.40.50.1390,IPR025827,IPR006119,IPR038109, SSF53041,IPR011109,PTHR30461,PS51736,Coil, PF00239
MSVVLRAALYPRVSTEEQAKFGLSIHDQQNDLEEYAKANNMKVVGIFPDAGFSARKKIEKRPAMLQLLEAVKRNEVDIILVTKLDRWFRNIGEYYKVQEILEAHNVSWKTIYEDYDTSTAAGRLKINIMLSVAQDEADRASERIKKVLDAKKDRNEVCTGHLPKGYKREGKFAVIDKEAEPIMRRFFSTFFETGAITKAMDAVPELNLNYKTASAILNNTAYMGKWNGLTLPPYLTQQEFQRVQELRRRVTRKSPYNRIYLFSGLTVCGECGRRMTGHPTTLKDGTCVYKYLCQGAKQRRGCDNGLVVREQDIENYFMFSIDEQIQIKLKAKAQHAPKINTDAQIKAIQKKLAKLSELYIDDMISKPDYSKKYAELTKQVEALKQTQVQSRAPEEVADLFAPGWQDIYKNLTRENKRAFWKLKIKEIRLYKDSRIEFDFL

SEQ ID NO: 9246 - protein, 440 aa, Unknown
  Description of Unknown: Integrase B9247 sequence
  cd00338,SM00857,G3DSA:1.10.10.2600,IPR036162,PF13408, PS51737,IPR025827,G3DSA:3.40.50.1390,IPR006119,IPR038109, IPR011109,SSF53041,PTHR30461,PS51736,Coil, PF00239
MSVVLRAALYPRVSTEEQKKFGLSIHDQQNDLEEYAKAHNMKVVGVFQDAGFSARKKIEKRPAMLQLLEAVKRDEVDIILVTKLDRWFRNIGEYYKVQEILEAHNVSWKTIYEDYDTSTAAGRLKINIMLSVAQDEADRASERIKKVLDAKKDRNEVCTGHLPKGYKIEGKFAVIDKEAEPGIRRYFSTFLETGSITKAMDAVPELKLKYQTASQMLDNTGYMGDWHGIKLPPYLTPQEFQRVQALRTRVTRKSPYNRTYIFSGLIVCGECGRRMTGHPSPRPSGACSYSYYCQGSAHRKGCNNGNFTVEWKIEDYLLSTIDEQIQIKLQAKPRQETKVNQDVQLKALQKKLSKLSELYIDDMISKADYSKKYAELTSQMDEITQVKSQSRAPEEIATLFSAGWQEIYKQLNKENKQAFWKLKIKEIRLYKDRRIEFDFL

SEQ ID NO: 9247 - protein, 440 aa, Unknown
  Description of Unknown: Integrase B9248 sequence
  SM00857,G3DSA:1.10.10.2600,IPR036162,PF13408,IPR025827, G3DSA:3.40.50.1390,PS51737,IPR006119,IPR038109,SSF53041, IPR011109,PF00239,PTHR30461,PS51736,Coil, cd00338
MNVVLRAALYPRVSTEEQKKFGLSIHDQQNDLEEYAKAHSMKVVGVFQDAGFSARKKIEKRPAMLQLLEAVKHDEVDIILVTKLDRWFRNIGEYYKVQEILEAHNVSWKTIYEDYDTSTAAGRLKINIMLSVAQDEADRASERIKKVLDAKKDRNEVCTGHLPKGYKIEGKFAVIDKEAEPVIRRYFSTFLETGSITKAMDAVPELKLKYQTASQMLDNPGYMGDWHGIKLPPYLTPQEFQRVQDLRIRVTRKSPYNRTYIFSGLIVCGECGRRMTGHPSPRPSGACSYSYYCQGSAQRKGCNNGNFTVEWKIEDYLLSTIDEQIQIKLQAKPRQEPKVNQDVQLKALQKKLSKLSELYIDDMISKADYSKKYAELTSQMDEITRVNPQSRAPEEIATLFSAGWQEIYKQLTRENKQAFWKLKIKVIRLYKDRRIEFDFL

SEQ ID NO: 9248 - protein, 440 aa, Unknown
  Description of Unknown: Integrase B9249 sequence
  cd03768,PTHR30461:SF3,SM00857,G3DSA:1.10.10.2600,IPR036162, PF13408,IPR025827,G3DSA:3.40.50.1390,PS51737,IPR006119, IPR038109,PF07508,SSF53041,IPR011109,PTHR30461, PS51736,Coil,PF00239
MEALLYTRVSKEDQVKFGMSLDAQLESLKQYCSENNLKIRNIYSDEGISGGSITKRKAFQNMIEEAKPGDIILFTKLDRFSRNLLDANIVVKELTKKDVSIKAINEDDIDTSTADGKFIFNLKLSLAQREREKVSERINDVFAYKIKQGEIVSGQIPYGYMKKNKHLVLDPVKSVWMREMFEHYLKYQSLVGTCKWWNEQHPDETIGYTAFKNSRISNPIYCGKHPSGLNDNFCDPIISVEQFDKVQELLSRNIKSIRTNHVYLFTGLMTCSHCGRRMAGFYRKWKDNKLNYYRCYNHTQNGICDNKHCISERKIEEFVLQDMIKKCNEIASASLKPENTDEVKLQNKKANTESKISRLKDLYVDGVLTKEEFDTKYKQLQDEIEAIKQEMKPKSNKLLELHDVDVKELYSKLNPENKRAFWRKYIERIYFDGHNFKVVY

SEQ ID NO: 9249 - protein, 440 aa, Unknown
  Description of Unknown: Integrase B9250 sequence
  cd00338,SM00857,G3DSA:1.10.10.2600,IPR036162,PF13408, PS51737,IPR025827,G3DSA:3.40.50.1390,IPR006119,IPR038109, IPR011109,SSF53041,PTHR30461,PS51736,Coil, PF00239
MNVVLRAALYPRVSTEEQKKFGLSIHDQQNDLEEYAKAHNMKVVGVFQDAGFSARKKIEKRPAMLQLLEAVKHDEVDIILVTKLDRWFRNIGEYYKVQEILEAHNVSWKTIYEDYDTSTAAGRLKINIMLSVAQDEADRASERIKKVLDAKKDRNEVCTGHLPKGYKIEGKFAVIDKEAEPVIRRYFSTFLETGSITKAMDAVPELKLKYQTASQMLDNTGYMGDWHGIKLPPYLTPKEFQRVQDLRTRVTRKSPYNRTYIFSGLIVCGECGRRMTGHPSPRPSGACSYSYYCQGSAHRKGCNNGNFTVEWKIEDYLLSTIDEQIQIKLQAKPRQEPKANQDMQLKALQKKLSKLSELYIDDMISKADYSKKYAELTSQMDEITQVKSQSRAPEEIATLFSAGWQEIYKQLTRENKQAFWKLKIKEIRLYKDRRIEFDFL

SEQ ID NO: 9250 - protein, 440 aa, Unknown
  Description of Unknown: Integrase B9251 sequence
  cd00338,SM00857,G3DSA:1.10.10.2600,IPR036162,PF13408, IPR025827,G3DSA:3.40.50.1390,PS51737,IPR006119,IPR038109, SSF53041,IPR011109,PTHR30461,PS51736,Coil, PF00239
MSVVLRAALYPRVSTEEQKKFGLSIHDQQNDLEKYAKAHNMKVVGVFQDAGFSARKKIEKRPAMLQLLEAVKHDEVDIILVTKLDRWFRNIGEYYKVQEILEAHNVSWKTIYEDYDTSTAAGRLKINIMLAVAQDEADRASERIKKVLDAKKDRNEVCTGHLPKGYKIEGKFAVIDKEAEPVIRRYFSTFLETGSITKAMDAVPELKLKYQTASQMLDNTGYMGDWHGIKLPPYLTPQEFQRVQDLRTRVMRKSPYNRTYIFSGLIVCGECGRRMTGHPSPRPSGACSYSYYCQGSAQRKGCNNGNFTVEWKIEDYLLSTIDEQIQIKLQAKPRQEPKANQDVQLKALQKKLSKLSELYIDDMISKADYSKKYAELTSQMDEITQVKSQSRAPEEIATLFSAGWQEIYKQLNKENKQAFWKLKIKEIRLYKDRRIEFDFL

SEQ ID NO: 9251 - protein, 440 aa, Unknown
  Description of Unknown: Integrase B9252 sequence
  PTHR30461:SF3,IPR036162,PS51737,IPR011109,PTHR30461, PS00397,PF00239,G3DSA:1.10.10.2600,IPR006119,SSF53041, cd00338,SM00857,IPR025827,IPR038109,PS51736, IPR006118,PF13408,G3DSA:3.40.50.1390,PF07508
MNTNKRAALYIRVSTEEQARHGLSLSAQLENLQQYAKNKGYDIVGIYTDDGASARKSPFSRKAFRQLMEDVQWNRIDRILFIKLDRWFRSVRDYYKAQDILDAHGVDWETTQEQYNTTTTNGRLMLNIKLSVAQNESDMTSDRIRFVFEQKRVKHEVLSGFAPLGYKIKNKHLVPDENASIIANAFNQFIAYPNLQQLTNWFHSQGIHYNVTSIRKLLRNERYVGRNKGDLEYCPPIVSDQQFYTVQDMLDKNLTVKRTASGLVYIFTGLLRCPICGHKLTSSCAYSGTHKYKRYRCSRHWRNEDCSFNRGIAESKLEKQLLAHFDDLYEHFNSAVQEEQKNNTSIDTQVIKKKQERLKELFLNELITLDDYKKDYAKYAAMLPSEPRPSIQPSLYKGMKAADIEQLYKTLPDRQKQAFLRQIIDYIDFDADLKPIIHFK

SEQ ID NO: 9252 - protein, 440 aa, Unknown
  Description of Unknown: Integrase B9253 sequence
  SM00857,G3DSA:1.10.10.2600,IPR036162,PF13408,PS51737, G3DSA:3.40.50.1390,IPR025827,IPR006119,IPR038109,SSF53041, IPR011109,PF00239,PTHR30461,PS51736,Coil, cd00338
MSVVLRAALYPRVSTEEQKKFGLSIHDQQNDLEKYAKAHNMKVVGVFQDAGFSARKKIEKRPAMLQLLEAVKHDEVDIILVTKLDRWFRNIGEYYKVQEILEAHNVSWKTIYEDYDTSTAAGRLKINIMLAVAQDEADRASERIKKVLDAKKDRNEVCTGHLPKGYKIEGKFAVIDKEAEPVIRRYFSTFLETGSITKAMDAVPELKLKYQTASQMLDNTGYMGDWHGIKLPPYLTPQEFQRVQDLRTRVTRKSPYNRTYIFSGLIVCGECGRRMTGHPSPRPSGACSYSYYCQGSAQRKGCNNGNFTVEWKIEDYLLSTIDEQIQIKLQAKPRQEPKVNQDVQLKTLQKKLSKLSELYIDDKISKSDYSKKYAELTSQMDEITQVKSQSRAPEEIATLFSAGWQEIYKQLNKENKQAFWKLKIKEIRLYKDRRIEFDFL

SEQ ID NO: 9253 - protein, 440 aa, Unknown
  Description of Unknown: Integrase B9254 sequence
  PTHR30461:SF3,cd00338,SM00857,G3DSA:1.10.10.2600,IPR036162, PF13408,PS51737,IPR025827,G3DSA:3.40.50.1390,IPR006119, IPR038109,SSF53041,IPR011109,PTHR30461,PS51736, Coil,PF00239
MIAVLRAALYPRVSTEEQKKFGLSIHDQQNDLEKYAKAHNMKVVGIFPDAGFSARKKIEKRPAMLQLLEAVKRDEVDIILVTKLDRWFRNIGEYYKVQEILEAHNVSWKTIYEDYDTSTAAGRLKINIMLAVAQDEADRASERIKRVLDAKKERNEVCTGHLPKGYKIEGKFAVIDKETEPIIRRFFSAFLETGSTTKAMDAAPELNLKYQTASQMLDNPGYMGDWHGIKLPPYLKPQEFQRVQDLRTRITRKSPYNRTYIFSGLIVCGECGRRMTGHPSSRASGACSYSYYCQGSAQRKGCSNGSFTVEWKIEDYLLSTIDEQIQVKLQAKPRQEPKANQDAQLRALQKKLSKLSELYIDDMISKADYSKKYAELTSQMDEITKVKSQSRAPEEIATLFSAGWQEIYKQLNRENKQAFWKLKIKEIRLYKDRRIEFDFL

SEQ ID NO: 9254 - protein, 440 aa, Unknown
  Description of Unknown: Integrase B9255 sequence
  SM00857,G3DSA:1.10.10.2600,IPR036162,PF13408,IPR025827, G3DSA:3.40.50.1390,PS51737,IPR006119,IPR038109,IPR011109, SSF53041,PF00239,PTHR30461,PS51736,Coil, cd00338
MIAVLRAALYPRVSTEEQAKFGLSIHDQQNDLEEYAKANNMKVVGVFPDAGFSARKKIEKRPAMLQLLEAVKRDEIDIILVTKLDRWFRNIGEYYKVQEILEAHNVSWKTIYEDYDTSTAAGRLKINIMLAVAQDEADRASERIKRVLDAKKERNEVCTGHLPKGYKREGKFAVIDKEAEPIMRRFFSTFLETGAITKTMDAVPELNLNYKTASAILNNTAYMGKWNGLTLPPYLTQQEFQRVQELRRRVTRKSPYNRIYLFSGLTVCGECGRRMTGHPTTLKDGTCVYKYLCQGAKQRRRCDNGLVVREQDIENYFMSSIDEQIQIKLKAKAQHAPKINTDAQIKAIQKKLAKLSELYIDDMISKPDYSKKYAELTEQVEALKQTQVQSRAPEEVADLFAPGWQDIYKNLTRENKRAFWKLKIKEIRLYKDSRIEFDFL

SEQ ID NO: 9255 - protein, 440 aa, Unknown
  Description of Unknown: Integrase B9256 sequence
  PTHR30461:SF3,SM00857,G3DSA:1.10.10.2600,IPR036162,PF13408, IPR025827,G3DSA:3.40.50.1390,PS51737,IPR006119,IPR038109, PF07508,SSF53041,IPR011109,PF00239,PTHR30461, PS51736,Coil,cd00338
MEALLYTRVSKEDQVKFGMSLDAQLESLKQYCSENNLKIRNIYSDEGISGGSITKRKAFQSMIEEAKPGDIILFTKLDRFSRNLLDANIVVKELTKKDVSIKAINEDDIDTSTADGKFIFNLKLSLAQREREKVSERINDVFAYKIKQGEIVSGQIPYGYMKKNKHLVLDPVKSVWMREMFEHYLKYQSLVGTCKWWNERHPDETIGYTAFKNSRISNPIYCGKHPSGLNDNFCDPIISVEQFDKVQELLSRNIKSIRTNHVYLFTGLMTCSHCGRRMAGFYRKWKDNKLNYYRCYNHTQNGICDNKHCISERKIEEFVLQDMIKKCNEIASASLKPENTDEVKLQNKKANTESKISRLKDLYVDGVLTKEEFDTKYKQLQDEIETIKQEMKPKSNKLLELHDVDVKELYSKLNPENKRAFWRKYIDRIYFDGHNFKVVY

SEQ ID NO: 9256 - protein, 440 aa, Unknown
  Description of Unknown: Integrase B9257 sequence
  cd00338,SM00857,G3DSA:1.10.10.2600,IPR036162,PF13408, PS51737,G3DSA:3.40.50.1390,IPR025827,IPR006119,IPR038109, IPR011109,SSF53041,PTHR30461,PS51736,Coil, PF00239
MNVVLRAALYPRVSTEEQKKFGLSIHDQQNDLEEYAKAHNMKVVGVFQDAGFSARKKIEKRPAMLQLLEAVKHDEVDIILVTKLDRWFRNIGEYYKVQEILEAHNVSWKTIYEDYDTSTAAGRLKINIMLSVAQDEADRASERIKKVLDAKKDRNEVCTGHLPKGYKIEGKFAVIDKEAEPIIRRYFSTFLETGSITKAMDAVPELKLKYQTASQMLDNTGYTGDWHGIKLPPYLTPQEFQRVQDLRTRVTRKSPYNRTYIFSGLIVCGECGRRMTGHPSPRPSGACSYSYYCQGYAQRKGCNNGNFTVEWKIEDYLLSTIDEQIQIKLQAKPRQEPKANKDVQLKALQKKLSKLSELYIDDMISKADYSKKYAELTSQMDEITQVKSQSRAPEEIATLFSAGWQEIYKQLNKENKQAFWKLKIKEIRLYKDRRIEFDFL

SEQ ID NO: 9257 - protein, 440 aa, Unknown
  Description of Unknown: Integrase B9258 sequence
  cd00338,SM00857,G3DSA:1.10.10.2600,IPR036162,PF13408, PS51737,G3DSA:3.40.50.1390,IPR025827,IPR006119,IPR038109, IPR011109,SSF53041,PTHR30461,PS51736,Coil, PF00239
MNVVLRAALYPRVSTEEQKKFGLSIHDQQNDLEEYAKAHNMKVVGVFQDAGFSARKKIEKRPAMLQLLEAVKHDEIDIILVTKLDRWFRNIGEYYKVQEILEAHNVSWKTIYEDYDTSTAAGRLKINIMLSVAQDEADRASERIKKVLDAKKDRNEVCTGHLPKGYKREDKFAVIDKEAEPIMRRFFSTFLETGAITKAMDAVPELNLNYKTASAILNSTAYMGKWNGLTLPPYLTQQEFQRVQELRRRVTRKSPYNRIYLFSGLTVCGECGRRMTGHPTTLKDGTCVYKYLCQGAKQRRGCDNGLVVREQDIENYFMFSIDEQIQIKLKAKAQHAPKINTDAQIKAIQKKLAKLSELYIDDMISKPDYSKKYAELTEQVEALKQTQVQSRAPEEVADLFAPGWQDIYKNLTRENKRAFWKLKIKEIRLYKDSRIEFDFL

SEQ ID NO: 9258 - protein, 440 aa, Unknown
  Description of Unknown: Integrase B9259 sequence
  PTHR30461:SF3,SM00857,G3DSA:1.10.10.2600,IPR036162,PF13408, IPR025827,PS51737,G3DSA:3.40.50.1390,IPR006119,IPR038109, IPR011109,SSF53041,PF00239,PTHR30461,PS51736, Coil,cd00338
MSVVLRAALYPRVSTEEQAKFGLSIHDQQNDLEEYAKANNMKVVGVFPDAGFSARKKIEKRPAMLQLLEAVKRDEIDIILVTKLDRWFRNIGEYYKVQEILEAHNVSWKTIYEDYDTSTAAGRLKINIMLAVAQDEADRASERIKRVLDAKKERNEVCTGHLPKGYKIEGKFAVIDKETEPIIRRYFSTFLENGSITKAMDAVPELKLKYLTASQMLDNPGYMGDWHGIKLPPYLTPQEFQRVQGLRTRVTRKSPYNRTYIFSGLIVCGECGRRMTGHPSPRASGKCSYSYYCQGSAQRKGCNNGNFTVEWKIEDYLLSTIDEQIQIKLQAKPRQEPKANQDAQLKALQKKLSKLSELYIDDMISKADYSKKYAELTSQMDEITQVKSQSRAPEEIATLFSAGWQEIYKQLNRENKQAFWKLKIKEIRLYKDRRIEFDFL

SEQ ID NO: 9259 - protein, 440 aa, Unknown
  Description of Unknown: Integrase B9260 sequence
  SM00857,G3DSA:1.10.10.2600,IPR036162,PF13408,IPR025827, PS51737,G3DSA:3.40.50.1390,IPR006119,IPR038109,SSF53041, IPR011109,PTHR30461,Coil,PS51736,cd00338, PF00239
MNVVLRAALYPRVSTEEQKKFGLSIHDQQNDLEEYAKAHNMKVVGVFQDAGFSARKKIEKRPAMLQLLEAVKHDEVDIILVTKLDRWFRNIGEYYKVQEILEAHNVSWKTIYEDYDTSTAAGRLKINIMLSVAQDEADRASERIKKVLDAKKDRNEVCTGHLPKGYKIEGKFAVIDKEAEPVIRRYFSTFLETGSITKAMDAVPELKLKYQTASQMLDNTGYMGDWHGIKLPPYLTPQEFQRVQDLRTRVTRKSHYNRTYIFSGLIVCGECGRRMTGHPSPRPNGACSYSYYCQGSSQRKGCSNGNFTVEWKIENYLMSTIDEQIQIKLQAKPRKEPKIKADVQLKTIQKKLAKLSELYIEDMISKADYSKKYADLTGQIEAITSAELPTRAPEEIATLFAPGWQDIYKNLTRENKQAFWKLKIKEIRLYKDRRIEFDFL

SEQ ID NO: 9260 - protein, 440 aa, Unknown
  Description of Unknown: Integrase B9261 sequence
  cd00338,SM00857,G3DSA:1.10.10.2600,IPR036162,PF13408, IPR025827,G3DSA:3.40.50.1390,PS51737,IPR006119,IPR038109, SSF53041,IPR011109,PTHR30461,PS51736,Coil, PF00239
MSVVLRAALYPRVSTEEQKKFGLSIHDQQNDLEEYAKAHNMKVVGVFQDAGFSARKKIEKRPAMLQLLEAVKHDEIDIILVTKLDRWFRNIGEYYKVQEILEAHNVSWKTIYEDYDTSTAAGRLKINIMLSVAQDEADRASERIKKVLDAKKDRNEVCTGHLPKGYKREGKFAVIDKEAEPIMRRFFSTFLETGAITKAMDAVPELNLNYKTASAILNNTAYMGKWNGLTLPPYLTQQEFQRVQELRRRVTRKSPYNRIYLFSGLTVCGECGRRMTGHPTTLKDGTCVYKYLCQGAKQRRGCDNGLVVREQDIENYFMSSIDEQIQIKLKAKAQHALKINTDAQIKAIQKKLAKLSELYIDDMISKPDYSKKYAELTEQVEALKQTQVQSRAPEEVADLFAPGWQDIYKDLTRENKRAFWKLKIKEIRLYKDSRIEFDFL

SEQ ID NO: 9261 - protein, 440 aa, Unknown
  Description of Unknown: Integrase B9262 sequence
  PTHR30461:SF3,cd00338,SM00857,G3DSA:1.10.10.2600,IPR036162, PF13408,IPR025827,PS51737,G3DSA:3.40.50.1390,IPR006119, IPR038109,IPR011109,SSF53041,PTHR30461,PS51736, Coil,PF00239
MSVVLRAALYPRVSTEEQAKFGLSIHDQQNDLEEYAKANNMKVVGVFPDAGFSARKKIEKRPAMLQLLEAVKRDEVDIILVTKLDRWFRNIGEYYKVQEILEAHNVSWKTIYEDYDTSTAAGRLKINIMLAVAQDEADRASERIKKVLDAKKDRNEVCTGHLPKGYKIEGKFAVIDKEAEPVIRRYFSTFLETGSITKAMDAVPELKLKYQTASQMLDNTGYMGDWHGIKLPPYLTPQEFQRVQGLRTRVTRKSPYNRTYIFSGLIVCGECGRRMTGHPSPRPSGACSYSYYCQGSAQRKGCNNGNFTVEWKIEDYLLSTIDEQIQIKLQAKPRQEPKANQDVQLKALQKKLSKLSELYIDDMISKADYSKKYAELTSQMDELTQVKSQSRAPEEIATLFSAGWQEIYKQLNKENKQAFWKLKIKEIRLYKDRRIEFDFL

SEQ ID NO: 9262 - protein, 440 aa, Unknown
  Description of Unknown: Integrase B9263 sequence
  cd00338,SM00857,G3DSA:1.10.10.2600,IPR036162,PF13408, IPR025827,PS51737,G3DSA:3.40.50.1390,IPR006119,IPR038109, SSF53041,IPR011109,PTHR30461,PS51736,Coil, PF00239
MIAVLRAALYPRVSTEEQKKFGLSIHDQQNDLEEYAKAHNMKVVGVFQDAGFSARKKIEKRPAMLQLLEAVKHDEVDIILVTKLDRWFRNIGEYYKVQEILEAHNVSWKTIYEDYDTSTAAGRLKINIMLSVAQDEADRASERIKKVLDAKKDRNEVCTGHLPKGYKIEGKFAVIDKEAEPVIRRYFSTFLETGSITKAMDAVPELKLKYQTASQMLDNPGYMGDWHGIKLPPYLTPQEFQRVQDLRIRITRKSPCNRTYIFSGLIVCGECGRRMTGHPSPRPSGACSYSYYCQGSAQRKGCNNGNFTVEWKIEDYLLSTIDEQIQVKLQAKPRQEPKVNQDVQLKALQKKLSKLSELYIDDMISKADYSKKYAELTSQMDELTQVKSQSRAPEEIATLFSAGWQEIYKQLNKENKQAFWKLKIKEIRLYKDRRIEFDFL

SEQ ID NO: 9263 - protein, 440 aa, Unknown
  Description of Unknown: Integrase B9264 sequence
  cd00338,SM00857,G3DSA:1.10.10.2600,IPR036162,PF13408, PS51737,G3DSA:3.40.50.1390,IPR025827,IPR006119,IPR038109, IPR011109,SSF53041,PTHR30461,PS51736,Coil, PF00239
MSVVLRAALYPRVSTEEQAKFGLSIHDQQNDLEEYAKANNMKVVGVFPDAGFSARKKIEKRPAMLQLLEAVKRDEVDIILVTKLDRWFRNIGEYYKVQEILEAHNVSWKTIYEDYDTSTAAGRLKINIMLAVAQDEADRASERIKKVLDAKKDRNEVCTGHLPKGYKIEGKFAVIDKEAEPVIRRYFSTFLETGSITKAMDAVPELKLKYQTASQMLDNPGYMGDWHGIKLPPYLTPQEFQRVQDLRTRVTRKSPYNRTYIFSGLIVCGECGRRMTGHPSPRPSGACSYSYYCQGSAQRKGCNNGNFTVEWKIEDYLLSTIDEQIQIKLQAKPRQEPKANQDVQLKVLQKKLSKLSELYIDDMISKADYSKKYVELTSQMDEITQVKSQSRAPEEIATLFSAGWQEIYKQLNKENKQTFWKLKIKEIRLYKDRRIEFDFL

SEQ ID NO: 9264 - protein, 440 aa, Unknown
  Description of Unknown: Integrase B9265 sequence
  cd00338,SM00857,G3DSA:1.10.10.2600,IPR036162,PF13408, IPR025827,PS51737,G3DSA:3.40.50.1390,IPR006119,IPR038109, SSF53041,IPR011109,PTHR30461,PS51736,Coil, PF00239
MNVVLRAALYPRVSTEEQKKFGLSIHDQQNDLEEYAKAHNMKVVGVFQDAGFSARKKIEKRPAMLQLLEAVKHDEVDIILVTKLDRWFRNIGEYYKVQEILEAHNVSWKTIYEDYDTSTAAGRLKINIMLAVAQDEADRASERIKKVLDAKKDRNEVCTGHLPKGYKIEGKFAVIDKEAEPVIRRYFSTFLETGSITKAMDAVPELKLKYQTASQMLDNPGYMGDWHGIKLPPYLTPQEFQRVQDLRTRITRKSPYNRTYIFSGLIVCGECGRRMTGHPTPRASGKCSYSYYCQGSAQRKGCSNGNFTVEWKIEDYLLSKIDEQIQIKLQAKPRREPKANQDVQLKALQKKLSKLSELYIDDMISKADYSKKYAELTSQMDEITQAKSQSRPPEEIATLFSAGWQEIYKQLNKENKQAFWKLKIKEIRLYKDRRIEFDFL

SEQ ID NO: 9265 - protein, 440 aa, Unknown
  Description of Unknown: Integrase B9266 sequence
  PTHR30461:SF3,cd00338,SM00857,G3DSA:1.10.10.2600,IPR036162, PF13408,PS51737,G3DSA:3.40.50.1390,IPR025827,IPR006119, IPR038109,SSF53041,IPR011109,PTHR30461,PS51736, Coil,PF00239
MSVVLRAALYPRVSTEEQKKFGLSIHDQQNDLEKYAKAHNMKVVGVFQDAGFSARKKIEKRPAMLQLLEAVKHDEVDIILVTKLDRWFRNIGEYYKVQEILEAHNVSWKTIYEDYDTSTAAGRLKINIMLSVAQDEADRASERIKKVLDAKKDRNEVCTGHLPKGYKIEGKFAVIDKEAEPVIRRYFSTFLETGSITKAMDAVPELKLKYQTASQMLDNTGYMGDWHGIKLPPYLTPQEFQRVQDLRTRVTRKSPYNRTYIFSGLIVCGECGRRMTGHPSPRPSGACSYSYYCQGSAHRKGCNNGNFTVEWKIEDYLLSTIDEQIQIKLQAKPRQEPKANQDVQLKALQKKLSKLSELYIDDMISKADYSKKYAELTSQMDEITQVKSQSRAPEEIATLFSAGWQEIYKQLNKENKQAFWKLKIKEIRLYKDRRIEFDFL

SEQ ID NO: 9266 - protein, 440 aa, Unknown
  Description of Unknown: Integrase B9267 sequence
  cd00338,SM00857,G3DSA:1.10.10.2600,IPR036162,PF13408, PS51737,IPR025827,G3DSA:3.40.50.1390,IPR006119,IPR038109, SSF53041,IPR011109,PTHR30461,PS51736,Coil, PF00239
MNVVLRAALYPRVSTEEQKKFGLSIHDQQNDLEEYAKAHNMKVVGVFQDAGFSARKKIEKRPAMLQLLEAVKHDEVDIILVTKLDRWFRNIGEYYKVQEILEAHNVSWKTIYEDYDTSTAAGRLKINIMLSVAQDEADRASERIKKVLDAKKDRNEVCTGHLPKGYKIEGKFAVIDKEAEPVIRRYFSTFLETGSITKAMDAVPELKLKYQTASQMLDNTGYMGDWHGIKLPPYLTPQEFQRVQDLRTRVTRKSPYNRTYIFSGLIVCGECGRRMTGHPSPRPSGACSYSYYCQGSAQRKGCNNGNFTVEWKIEDYLLSTIDEQIQIKLQAKPRQEPKVNQDVQLKALQKKLSKLSELYIDDMISKTDYSKKYAELTSQMDEITQVKSQSRAPEEIATLFSAGWQEIYKQLNKENKQAFWKLKIKEIRLYKDRRIEFDFL

SEQ ID NO: 9267 - protein, 440 aa, Unknown
  Description of Unknown: Integrase B9268 sequence
  PTHR30461:SF3,cd00338,SM00857,G3DSA:1.10.10.2600,IPR036162, PF13408,PS51737,G3DSA:3.40.50.1390,IPR025827,IPR006119, IPR038109,IPR011109,SSF53041,PTHR30461,PS51736, Coil,PF00239
MSVVLRAALYPRVSTEEQKKFGLSIHDQQNDLEEYAKAHNMKVVGVFQDAGFSARKKIEKRPAMLQLLEAVKHDEIDIILVTKLDRWFRNIGEYYKVQEILEAHNVSWKTIYEDYDTSTAAGRLKINIMLSVAQDEADRASERIKKVLDAKKDRNEVCTGHLPKGYKIEGKFAVIDKEAEPVIRRYFSTFLETGSITKAMDAVPELKLKYQTASQMLDNTGYMGDWHGIKLPPYLTPQEFQRVQDLRTRVTRKSPYNRTYIFSGLIVCGECGRRMTGHPSPRPSGACSYSYYCQGSAQRKGCNNGNFTVEWKIEDYLLSTIDEQIQIKLQAKPRQEPKVNQDVQLKALQKKLSKLSELYIDDMISKADYSKKYAELTSQMDELTQVKSQSRAPEEIATLFSAGWQEIYKQLNKENKQAFWKLKIKEIRLYKDRRIEFDFL

SEQ ID NO: 9268 - protein, 440 aa, Unknown
  Description of Unknown: Integrase B9269 sequence
  PTHR30461:SF3,cd00338,SM00857,G3DSA:1.10.10.2600,IPR036162, PF13408,PS51737,IPR025827,G3DSA:3.40.50.1390,IPR006119, IPR038109,PF07508,IPR011109,SSF53041,PTHR30461, PS51736,Coil,PF00239
MIADALAGKVDLIITKSVSRFARNTVDSLSTIRKLKEHNIECYFEKENIWTFDSKGELLLTIMSSLAQEESRSISENATWGHRKRFADGKVSFAYSRFLGYEKGPDGTIVVVPEQAKTVRLIYKLFLDGMTIHTIAGELTKRGIKTPGGKDKWNQSTVRSILTNEKYKGDALLQKSYTVDFLTKKTKTNEGEVPQYYVENNHEAIIDSQIFELVQAEIAKRNKGKEHYSGVSIFSTKVQCAECGGWYGSKVWHSNDKYRRIIYQCNNKFRNKTGCSTPHLTEYEIKEYFIKALNRLITEKDEIIANTEMIQKMLCDNSELEAKRDVLQEEIAVTVELTQNAVAENARVAQDQDNYNKRYNALVERYDRLKAQYDEVSTAISDNEARYEQMGRFITVLKDQEGVITEFDDALWSSLVEKIVVKSKEDVTVVFKDGTEMKAE

SEQ ID NO: 9269 - protein, 440 aa, Unknown
  Description of Unknown: Integrase B9270 sequence
  cd00338,SM00857,G3DSA:1.10.10.2600,IPR036162,PF13408, PS51737,G3DSA:3.40.50.1390,IPR025827,IPR006119,IPR038109, IPR011109,SSF53041,PTHR30461,PS51736,Coil, PF00239
MSVVLRAALYPRVSTEEQKKFGLSIHDQQNDLEEYAKAHNMKVVGVFQDAGFSARKKIEKRPAMLQLLEAVKHDEVDIILVTKLDRWFRNIGEYYKVQEILEAHNVSWKTIYEDYDTSTAAGRLKINIMLSVAQDEADRASERIKKVLDAKKDRNEVCTGHLPKGYKIEGKFAVIDKEAEPVIRRYFSTFLETGSITKAMDAVPELKLKYQTASQMLDNPGYMGDWHGIKLPPYLTPQEFQRVQGLRTRVTRKSPYNRTYIFSGLIVCGECGRRMTGHPSPRPSGACSYSYYCQGSAQRKGCNNGNFTVEWKIEDYLLSTIDEQIQIKLQAKPRQEPKANQDVQLKALQKKLSKLSELYIDDMISKADYSKKYAELTSQMDELTQVKSQSRAPEEIATLFSAGWQEIYKQLNKENKQAFWKLKIKEIRLYKDRRIEFDFL

SEQ ID NO: 9270 - protein, 440 aa, Unknown
  Description of Unknown: Integrase B9271 sequence
  PTHR30461:SF3,cd00338,SM00857,G3DSA:1.10.10.2600,IPR036162, PF13408,PS51737,IPR025827,G3DSA:3.40.50.1390,IPR006119, IPR038109,PF07508,IPR011109,SSF53041,PTHR30461, PS51736,Coil,PF00239
MIADALAGKVDLIITKSVSRFARNTVDSLSTIRKLKEHNIECYFEKENIWTFDSKGELLLTIMSSLAQEESRSISENATWGHRKRFADGKVSFAYSRFLGYEKGPDGTIVVVPEQAKTVRLIYKLFLDGMTIHTIAGELTKRGIKTPGGKDKWNQSTVRSILTNEKYKGDALLQKSYTVDFLTKKTKTNEGEVPQYYVENNHEAIIDSQIFELVQAEIAKRNKGKEHYSGVSIFSTKVQCAECGGWYGSKVWHSNDKYRRIIYQCNNKFRNKTGCSTPHLTEYEIKEYFIKALNRLITEKDEIIANTEMIQKMLCDNSELEAKRDVLQEEIAVTVELTQNAVAENARVAQDQDNYNKRYNALVERYDRLKAQYDEVSTAISDNDARYEQMGRFITVLKDQEGVITEFDDALWSSLVEKIVVKSKEDVTVVFKDGTEMKAE

SEQ ID NO: 9271 - protein, 440 aa, Unknown
  Description of Unknown: Integrase B9272 sequence
  SM00857,G3DSA:1.10.10.2600,IPR036162,PF13408,IPR025827, G3DSA:3.40.50.1390,PS51737,IPR006119,IPR038109,SSF53041, IPR011109,PF00239,PTHR30461,PS51736,Coil, cd00338
MSVVLRAALYPRVSTEEQKKFGLSIHDQQNELEEYAKAHNMKVVGVFQDAGFSARKKIEKRPAMLQLLEAVKHDEIDIILVTKLDRWFRNIGEYYKVQEILEAHNVSWKTIYEDYDTSTATGRLKINIMLAVAQDEADRASERIKKVLDAKKDRNEVCTGNLPKGYKREGKFAVIDKEAEPIMRRFFSTFLETGAITKAMDAVPELNLNYKTASAILNNAAYMGKWNGLTLPPYLTQQEFQRVQELRRRVTRKSPYNRIYLFSGLTVCGECGRRMTGHPTTLKDGTCVYKYLCQGAKQRRGCDNGLVVREQDIENYFMSSIDEQIQIKLKAKAQHAPKINTDAQIKAIQKKLTKLSELYIDDMISKPDYSKKYAELTEQVEALKQTQVQSRAPEEVADLFAPGWQDIYKNLTRENKRAFWKLKIKEIRLYKDSRIEFDFL

SEQ ID NO: 9272 - protein, 440 aa, Unknown
  Description of Unknown: Integrase B9273 sequence
  cd00338,SM00857,G3DSA:1.10.10.2600,IPR036162,PF13408, PS51737,G3DSA:3.40.50.1390,IPR025827,IPR006119,IPR038109, IPR011109,SSF53041,PTHR30461,PS51736,Coil, PF00239
MNVVLRAALYPRVSTEEQKKFGLSIHDQQNDLEEYAKAHNMKVVGVFQDAGFSARKKIEKRPAMLQLLEAVKHDEVDIILVTKLDRWFRNIGEYYKVQEILEAHNVSWKTIYEDYDTSTAAGRLKINIMLSVAQDEADRASERIKKVLDAKKDRNEVCTGHLPKGYKIEGKFAVIDKEAEPVIRRYFSTFLETGSITKAMDAVPELKLKYQTASQMLDNTGYMGDWHGIKLPPYLTPQEFQRVQDLRTRVTRKSPYNRTYIFSGLIVCGECGRRMTGHPSPRPSGACSYSYYCQGSAQRKGCNNGNFTVEWKIEDYLLSTIDEQIQIKLQAKPRQEPKANQDVQLKALQKKLSKLSELYIDDMISKADYSKKYAELTSQMDEITRVNPQSRAPEEIATLFSAGWQEIYKQLTRENKQAFWKLKIKVIRLYKDRRIEFDFL

SEQ ID NO: 9273 - protein, 440 aa, Unknown
  Description of Unknown: Integrase B9274 sequence
  PTHR30461:SF3,cd00338,SM00857,G3DSA:1.10.10.2600,IPR036162, PF13408,PS51737,G3DSA:3.40.50.1390,IPR025827,IPR006119, IPR038109,IPR011109,SSF53041,PTHR30461,PS51736, Coil,PF00239
MSVVLRAALYPRVSTEEQKKFGLSIHDQQNDLEEYAKANNMKVVGVFSDAGFSARKKIEKRPAMLQLLEAVKRDEVDIILVTKLDRWFRNIGEYYKVQEILEAHNVSWKTIYEDYDTSTAAGRLKINIMLSVAQDEADRTSERIKKVLDAKKERNEVCAGHLPKGYKREGKFAVIDEKKEPIMRRFFSTFLETGAITKAMDAAPELKLQYKTASAILYNPAYMGKWNGLTLPPYLTQQEFQRIQELRRRVTRKSPYNRVYLFSGLTVCGECGRRMTGHPTTLKSGACVYKYLCQGATQRRGCDNSLFVREQDIEDYLMASIDEQIQIKLKAKANHAPKINTEAQIKAIQKKLAKLSELYIDDMISKPDYSKKYAELTEQVEALKQTKVQSRDPEEVADLFAPGWQDIYKNLTRENKQAFWKLKIKEIRLYKDSRIEFDFL

SEQ ID NO: 9274 - protein, 440 aa, Unknown
  Description of Unknown: Integrase B9275 sequence
  PTHR30461:SF3,cd00338,SM00857,G3DSA:1.10.10.2600,IPR036162, PF13408,IPR025827,G3DSA:3.40.50.1390,PS51737,IPR006119, IPR038109,SSF53041,IPR011109,PTHR30461,PS51736, Coil,PF00239
MNVVLRAALYPRVSTEEQKKFGLSIHDQQNDLEEYAKAHNMKVVGVFQDAGFSARKKIEKRPAMLQLLEAVKRDEVDIILVTKLDRWFRNIGEYYKVQEILEAHNVSWKTIYEDYDTSTAAGRLKINIMLSVAQDEADRASERIKKVLDAKKDRNEVCTGHLPKGYKIEGKFAVIDKEAEPVIRRYFSTFLETGSITKAMDTVPELKLKYQTASQMLDNTGYMGDWHGIKLPPYLTPQEFQRVQDLRTRVTRKSPYNRTYIFSGLIVCGECGRRMTGHPSPRPSGACSYSYYCQGSAHRKGCNNGNFTVEWKIEDYLLSTIDEQIQIKLQAKPRQEPKANQDVQLKALQKKLSKLSELYIDDMISKADYSKKYAELTSQMDELTQVKSQSRAPEEIATLFSAGWQEIYKQLNKVNKQAFWKLKIKEIRLYKDRRIEFDFL

SEQ ID NO: 9275 - protein, 440 aa, Unknown
  Description of Unknown: Integrase B9276 sequence
  IPR036162,PS51737,IPR011109,PTHR30461,PS00397, PF00239,G3DSA:1.10.10.2600,IPR006119,SSF53041,cd00338, SM00857,IPR025827,IPR038109,PS51736,IPR006118, PF13408,G3DSA:3.40.50.1390,PF07508,Coil
MKKARLYARVSTAEQKRKNISIPVQIAALNDFCSNNQYTVVGTYIDNGVSASSLTKRKQFLKMIEESEQGDYILFTRLDRFSRNVLDANKIVKELNKKKIYIISIFEDDINTSTADGMFMFNLRVSLSQREIEKDSERILDVFESKLKKGEVLTGQMPLGYVVRSKKPCINEFDAEIVRFIFDTYIQCGNLNETVREVIAKYSKPMCPSTVQQIIANEKYIGKYRGINNYFPPIIDVDTFYEANKVYKERYVKNNKKNVTYLFSGLLRCEVCGHRMSSYYRIRKNINYYYTCQKKVMGGTIQHFCKSEKKIEKELLKNIKTVIKNNIVSVSEKDLAENHEEEIKKLKQKLERVKELYIDGYISREEFDDKSYDINSRLVQIDADGSAAVIRRNEKLNVLLESDISSIYEKFDRKQKAIFWRNLIDHIVVHKDNSLDIYLL

SEQ ID NO: 9276 - protein, 440 aa, Unknown
  Description of Unknown: Integrase B9277 sequence
  cd00338,SM00857,G3DSA:1.10.10.2600,IPR036162,PF13408, PS51737,IPR025827,G3DSA:3.40.50.1390,IPR006119,IPR038109, IPR011109,SSF53041,PTHR30461,PS51736,Coil, PF00239
MSVVLRAALYPRVSTEEQKKFGLSIHDQQNDLEEYAKAHNMKVVGVFQDAGFSARKKIEKRPAMLQLLEAVKHDEIDIILVTKLDRWFRNIGEYYKVQEILEAHNVSWKTIYEDYDTSTAAGRLKINIMLSVAQDEADRASERIKKVLDAKKERNEVCTGHLPKGYKIEGKFAVIDKETEPIIRRYFSTFLETGSITKAMDAVPELNLNYKTASAILNNTAYMGKWNGLTLPPYLTQQEFQRVQELRRRVTRKSPYNRIYLFSGLTVCGECGRRMTGHPTTLKDGTCVYKYLCQGAKQRRGCDNGLVVREQDIENYFMSSIDEQIQIKLKAKAQHALKINTDAQIKAIQKKLAKLSELYIDDMISKPDYSKKYAELTEQVEALKQTQVQSRAPEEVADLFAPGWQDIYKDLTRENKRAFWKLKIKEIRLYKDSRIEFDFL

SEQ ID NO: 9277 - protein, 440 aa, Unknown
  Description of Unknown: Integrase B9278 sequence
  cd03768,PTHR30461:SF3,SM00857,G3DSA:1.10.10.2600,IPR036162, PF13408,IPR025827,G3DSA:3.40.50.1390,PS51737,IPR006119, IPR038109,PF07508,SSF53041,IPR011109,PTHR30461, PS51736,Coil,PF00239
MEALLYTRVSKEDQVKFGMSLDAQLESLKQYCSENNLKIRNIYSDEGISGGSITKRKAFQSMIEEAKPGDIILFTKLDRFSRNLLDANIVVKELTKKDVSIKAINEDDIDTSTADGKFIFNLKLSLAQREREKVSERINDVFAYKIKQGEIVSGQIPYGYMKKNKHLVLDPVKSVWMREMFEHYLKYQSLVGTCKWWNEQHPDETIGYTAFKNSRISNPIYCGKHPSGLNDNFCDPIISVEQFDKVQELLSRNIKSIRTNHVYLFTGLMTCSHCGRRMAGFYRKWKDNKLNYYRCYNHTQNGICDNKHCISERKIEEFVLQDMIKKCNEIASASLKPENTDEVKLQNKKANTESKISRLKDLYVDGVLTKEEFDTKYKQLQDEIEAIKQEMKPKSNKLLELHDVDVKELYSKLNPENKRAFWRKYIERIYFDGHNFKVVY

SEQ ID NO: 9278 - protein, 440 aa, Unknown
  Description of Unknown: Integrase B9279 sequence
  PTHR30461:SF3,IPR036162,PS51737,IPR011109,PTHR30461, PS00397,PF00239,G3DSA:1.10.10.2600,IPR006119,SSF53041, cd00338,SM00857,IPR025827,IPR038109,PS51736, IPR006118,PF13408,G3DSA:3.40.50.1390,PF07508
MNTNKRAALYIRVSTEEQARHGLSLSAQLENLQQYAKNKGYDIVGIYTDDGASARKSPFSRKAFKQLMEDVQWNRIDRILFIKLDRWFRSVRDYYKAQDILDAHGVDWETTQEQYNTTTTNGRLMLNIKLSVAQNESDMTSDRIRFVFEQKRVKHEVLSGFAPLGYKIKNKHLVPDENASIIANAFNQFIAYPNLQQLTNWFHSQGIHYNVTSIRKLLRNERYVGRNKGDLEYCPPIVSDQQFYTVQDMLDKNLTVKRTASGLVYIFTGLLRCPICGHKLTSSCAYSGTHKYKRYRCSRHWRNEDCSFNRGIAESKLEKQLLAHFDDLYEHFNSAVQEEQKNNARIDTQVIKKKQERLKELFLNELITLDEYKKDYAKYAAMLPSEPRPSIQPSLYKGMKAADIEQLYKALPDRQKQAFLRQIIDYIDFDADLKPIIHFK

SEQ ID NO: 9279 - protein, 440 aa, Unknown
  Description of Unknown: Integrase B9280 sequence
  PTHR30461:SF3,cd00338,SM00857,G3DSA:1.10.10.2600,IPR036162, PF13408,IPR025827,PS51737,G3DSA:3.40.50.1390,IPR006119, IPR038109,SSF53041,IPR011109,PTHR30461,PS51736, Coil,PF00239
MIAVLRAALYPRVSTEEQKKFGLSIHDQQNDLEEYAKAHNMKVVGVFQDAGFSARKKIEKRPAMLQLLEAVKHDEIDIILVTKLDRWFRNIGEYYKVQEILEAHNVSWKTIYEDYDTSTAAGRLKINIMLSVAQDEADRASERIKKVLDAKKDRNEVCTGHLPKGYKIEGKFAVIDKEAEPVIRRYFSTFLETGSITKAMDAAPELNLKYQTASQMLDNTGYMGDWHGIKLPPYLTPQEFQRVQDLRTRVTRKSPYNRTYIFSGLIVCGECGRRMTGHPSPRPSGACSYSYYCQGSAHRKGCNNGNFTVEWKIEDYLLSTIDEQIQIKLQAKPRQEPKANQDVQLKALQKKLSKLSELYIDDMISKADYSKKYAELTSQMDEITQVKSQSRAPEEIATLFSAGWQEIYKQLNKENKQAFWKLKIKEIRLYKDRRIEFDFL

SEQ ID NO: 9280 - protein, 440 aa, Unknown
  Description of Unknown: Integrase B9281 sequence
  cd00338,SM00857,G3DSA:1.10.10.2600,IPR036162,PF13408, PS51737,IPR025827,G3DSA:3.40.50.1390,IPR006119,IPR038109, IPR011109,SSF53041,PTHR30461,PS51736,Coil, PF00239
MNVVLRAALYPRVSTEEQKKFGLSIHDQQNDLEEYAKAHNMKVVGVFQDAGFSARKKIEKRPAMLQLLEAVKRDEVDIILVTKLDRWFRNIGEYYKVQEILEAHNVSWKTIYEDYDTSTAAGRLKINIMLSVAQDEADRASERIKKVLDAKKDRNEVCTGHLPKGYKIEKKFAVIDKETEPVIRRYFSTFLETGSITKAMDAVPELKLKYQTASQMLDNPGYMGDWHGIKLPPYLTPQEFQRVQGLRTRVTRKSPYNRTYIFSGLIVCGECGRRMTGHPSPRPSGACSYSYYCQGSAQRKGCNNGNFTVEWKIEDYLLSTIDEQIQIKLQAKPRQEPKANQDVQLKALQKKLSKLSELYIDDMISKADYSKKYAELTSQMDELTQVKSQSRAPEEIATLFSAGWQEIYKQLNKENKQAFWKLKIKEIRLYKDRRIEFDFL

SEQ ID NO: 9281 - protein, 440 aa, Unknown
  Description of Unknown: Integrase B9282 sequence
  cd00338,SM00857,G3DSA:1.10.10.2600,IPR036162,PF13408, IPR025827,PS51737,G3DSA:3.40.50.1390,IPR006119,IPR038109, IPR011109,SSF53041,PTHR30461,PS51736,Coil, PF00239
MSVVLRAALYPRVSTEEQKKFGLSIHDQQNDLEEYAKAHNMKVVGVFQDAGFSARKKIEKRPAMLQLLEAVKHDEIDIILVTKLDRWFRNIGEYYKVQEILEAHNVSWKTIYEDYDTSTAAGRLKINIMLSVAQDEADRASERIKKVLDAKKERNEVCTGHLPKGYKIEGKFAVIDKETEPIIRRYFSTFLETGSITKAMDAVPELKLKYLTASQMLDNPGYMGDWHGIKLPPYLTPQEFQRVQGLRTRVTRKSPYNRTYIFSGLIVCGECGRRMTGHPSPRASGKCSYSYYCQGSTQRKGCDNGNFTIEWKIEDYLLSTIDEQIQVKLQAKPRQEPKANQDAQLKALQKKLSKLSELYIDDMISKTDYSKKYAELTSRMDEITQVKSQSRAPEEIATLFSAGWQEIYKQLNRENKQAFWKLKIKEIRLYKDRRIEFDFL

SEQ ID NO: 9282 - protein, 440 aa, Unknown
  Description of Unknown: Integrase B9283 sequence
  cd03768,PTHR30461:SF3,SM00857,G3DSA:1.10.10.2600,IPR036162, PF13408,IPR025827,G3DSA:3.40.50.1390,PS51737,IPR006119, IPR038109,PF07508,SSF53041,IPR011109,PTHR30461, PS51736,Coil,PF00239
MEALLYTRVSKEDQVKFGMSLDAQLESLKQYCSENNLKIRNIYSDEGISGGSITKRKAFQNMIEEAKPGDIILFTKLDRFSRNLLDANIVVKELTKKDVSIKAINEDDIDTSTADGKFIFNLKLSLAQREREKVSERINDVFAYKIKQGEIVSGQIPYGYMKKNKHLVLDPVKSVWMREMFEHYLKYQSLVGTCKWWNEQHPDETIGYTAFKKSRISNPIYCGKHPSGLNDNFCDPIISVEQFDKVQELLSRNIKSIRTNHVYLFTGLMTCSHCGRRMAGFYRKWKDNKLNYYRCYNHTQNGICDNKHCISERKIEEFVLQDMIKKCNEIASASLKPENTDEVKLQNKKANTEAKISRLKDLYVDGLIDREKFDTKYKQLQDEIEAIKQEMKPKSNKLLELHDVDVKELYSKLTPENKRAFWRKYIERIYFDGHNFKVVY

SEQ ID NO: 9283 - protein, 440 aa, Unknown
  Description of Unknown: Integrase B9284 sequence
  cd00338,SM00857,G3DSA:1.10.10.2600,IPR036162,PF13408, PS51737,IPR025827,G3DSA:3.40.50.1390,IPR006119,IPR038109, SSF53041,IPR011109,PTHR30461,PS51736,Coil, PF00239
MSVVLRAALYPRVSTEEQKKFGLSIHDQQNDLEEYAKAHNMKVVGVFQDAGFSARKKIEKRPAMLQLLEAVKRDEVDIILVTKLDRWFRNIGEYYKVQEILEAHNVSWKTIYEDYDTSTAAGRLKINIMLSVAQDEADRASERIKKVLDAKKDRNEVCTGHLPKGYKIEGKFAVIDKETEPVIRRYFSTFLETGSITKAMDAVPELKLKYQTASQMLDNTGYMGDWHGIKLPPYLTPQEFQRVQGLRTRVTRKSPYNRTYIFSGLIVCGECGRRMTGHPSPRPSGACSYSYYCQGSAHRKGCNNGNFTVEWKIEDYLLSTIDEQIQIKLQAKPRQEPKANQDVQLKALQKKLSKLSELYIDDMISKADYSKKYAELTSQMDEITQVKSQSRAPEEIATLFSAGWQEIYKQLNKENKQAFWKLKIKEIRLYKDRRIEFDFL

SEQ ID NO: 9284 - protein, 440 aa, Unknown
  Description of Unknown: Integrase B9285 sequence
  cd00338,SM00857,G3DSA:1.10.10.2600,IPR036162,PF13408, PS51737,G3DSA:3.40.50.1390,IPR025827,IPR006119,IPR038109, IPR011109,SSF53041,PTHR30461,PS51736,Coil, PF00239
MNVVLRAALYPRVSTEEQKKFGLSIHDQQNDLEEYAKAHNMKVVGVFQDAGFSARKKIEKRPAMLQLLEAVKHDEVDIILVTKLDRWFRNIGEYYKVQEILEAHNVSWKTIYEDYDTSTAAGRLKINIMLSVAQDEADRASERIKKVLDAKKDRNEVCTGHLPKGYKIEGKFAVIDKETEPVIRRYFSTFLETGSITKAMDAVPELKLKYQTASQMLDNTGYMGDWHGIKLPPYLTPQEFQRVQDLRTRVTRKSPYNRTYIFSGLIVCGECGRRMTGHPSPRPSGACSYSYYCQGSAQRKGCNNGNFTVEWKIEDYLLSTIDEQIQVKLQAKPRQEPKANQDVQLKALQKKLSKLSELYIDDMISKADYSKKYAELTSQMDEITQVKSQSRAPEEIATLFSAGWQEIYKQLNKENKQAFWKLKIKEIRLYKDRRIEFDFL

SEQ ID NO: 9285 - protein, 440 aa, Unknown
  Description of Unknown: Integrase B9286 sequence
  PTHR30461:SF3,SM00857,G3DSA:1.10.10.2600,IPR036162,PF13408, PS51737,IPR025827,G3DSA:3.40.50.1390,IPR006119,IPR038109, SSF53041,IPR011109,PF00239,PTHR30461,PS51736, Coil,cd00338
MNVVLRAALYPRVSTEEQAKFGLSIHDQQNDLEEYAKANNMKVVGVFPDAGFSARKKIEKRPAMLQLLEAVKRDEVDIILVTKLDRWFRNIGEYYKVQEILEAHNVSWKTIYEDYDTSTAAGRLKINIMLSVAQDEADRTSERIKKVLDAKKDRNEVCTGHLPKGYKIEGKFAVIDKEAEPVIRRYFSTFLETGSITKAMDAVPELKLKYQTASQMLDNTGYMGDWHGIKLPPYLTPQEFQRVQDLRTRVTRKSPYNRTYIFSGLIVCGECGRRMTGHPSPRPSGACSYSYYCQGSAQRKGCNNGNFTVEWKIEDYLLSTIDEQIQIKLQAKPRQEPKVNQDVQLKALQKKLSKLSELYIDDMISKADYSKKYAELTSQMDELTQVKSQSRAPEEIATLFSAGWQEIYKQLNKENKQAFWKLKIKEIRLYKDRRIEFDFL

SEQ ID NO: 9286 - protein, 439 aa, Unknown
  Description of Unknown: Integrase B9287 sequence
  cd00338,SM00857,IPR036162,PF13408,PS51737, G3DSA:3.40.50.1390,IPR025827,IPR006119,SSF53041,IPR011109, PTHR30461,PS51736,Coil,PF00239
MNVVLRAALYPRVSTEEQKKFGLSIHDQQNDLEEYAKAHNMKVVGVFQDAGFSARKKIEKRPAMLQLLEAVKHDEVDIILVTKLDRWFRNIGEYYKVQEILEAHNVSWKTIYEDYDTSTAAGRLKINIMLSVAQDEADRTSERIKRILDAKRERNEVCSGNLPRGYKIENKHAVIDETTEPFMKKFFSVFIETGSVKKARTSVPELRLSYGAASRILACTAYVGNWRGISVPPYLSHQEFDRIESLRKRTTRKPKTTTYLFSGLIMCGTCGNRMAGRPRELANGNFSHHYLCVKYERTPNCTNSVHISEAIIENYLLSHIDEEISVKLKAKPKEIDHQNTQAQIQSAKAKLSKLSDLYIDDMISKSDYAKRYKELTATLDELQKEIAPAKTAKDLSEMFAQGWQDIYFKLSRENKAAFWKLKIKEIRLYEDRRIEFDFL

SEQ ID NO: 9287 - protein, 439 aa, Unknown
  Description of Unknown: Integrase B9288 sequence
  PTHR30461:SF3,cd00338,SM00857,G3DSA:1.10.10.2600, IPR036162,PF13408,IPR025827,G3DSA:3.40.50.1390, PS51737,IPR006119,IPR038109,PF07508, IPR011109,SSF53041,PTHR30461,PS51736,Coil,PF00239
MVADALAGKIDLIVTKSISRFARNTVDSLVTVRKLKEHGTEVYFEKENIFTFDSKGELLITIMSSLAQEESRSISENVTWGQRKRFADGKVSLPYKQFLGYRRGEDDLPEIVPEEAEIVRKIYGLFIQGKTTHGIAKQLTEENIPTSAGKEKWQASTVESILTNEKYKGDALLQKGFTVDFLTKKTKKNEGEVPQYYVENSHPAIIRPHEWQLVQREFSRRKTLRRKYSGNSIFSTRLVCGDCGNYYGPKTWHPKKPYQKIVWQCTHKYKGENSCETVTLEETEIQQKFIQAINGLFSIKGPVLENCRIMQEALTDCTGIETELATLTQELELLGQMIKDTIKTNALEAQNQEEYTARYNALAERYETTHRQIVALQEKRQARENEAEAIGGFMFALREMGTEAQEFDPKLWLSTIDRGTVNRDGSITLRFVSGAEITV

SEQ ID NO: 9288 - protein, 439 aa, Unknown
  Description of Unknown: Integrase B9289 sequence
  PTHR30461:SF3,IPR036162,PS51737,IPR011109,PTHR30461, PS00397,PF00239,G3DSA:1.10.10.2600,IPR006119,SSF53041, cd00338,SM00857,IPR025827,IPR038109,PS51736, IPR006118,PF13408,G3DSA:3.40.50.1390,PF07508,Coil
MTRVALYIRVSTEDQKIHGLSVEDQISSLSAWAEKEAVIVAGVYNDAGISARKPASKRPELQRLLDDVRARKIDLIVFTKLDRWFRNIGEYYKVQEVLETYGVGWKTIYEDYDTTTASGRLKINIMLSVAQDEADRTGERIKAIHESKLLRNEPISGKVPFGYKIEKKQLVIVPEDAEKVRDIFEHYIALRSVRALRPYVLETHGLVYTQTGLAQLLRNERYIGHAHGKPDFCPAILSEEVFFKAQNILKVRAERLNFSRTNRVYLFTGIVFCAECGNRLSAHVVGQKYVYYRCTRYEKTHLCSHKKRTSERTLENWLLHNLPAKIEEYNVTLQAQEKANKAGKDIAKINHKLNKLKELYLNDLISIDDYKSDYSALKEDLIKAYSSQTEHKKPIDVRKITELLSKYPDLSSAGKKEFWSRILKKIVITQNDDFLIEPY

SEQ ID NO: 9289 - protein, 439 aa, Unknown
  Description of Unknown: Integrase B9290 sequence
  SM00857,IPR036162,PF13408,IPR025827,G3DSA:3.40.50.1390, PS51737,IPR006119,SSF53041,IPR011109,PF00239, PTHR30461,PS51736,Coil,cd00338
MSVVLRAALYPRVSTEEQAKFGLSIHDQQNDLEEYAKANNMKVVGVFPDAGFSARKKIEKRPAMLQLLEAVKRDEVDIILVTKLDRWFRNIGEYYKVQEILEAHNVSWKTIYEDYDTSTAAGRLKINIMLAVAQDEADRTSERIKRILDAKRERNEVCSGNLPRGYKIENKHAVIDETTEPFMKKFFSVFIETGSVKKARTSVPELRLSYGAASRILACTAYVGNWRGISVPPYLSHQEFDRIESLRKRTTRKPKTTTYLFSGLIMCGTCGNRMAGRPRELANGNFSHHYLCVKYERTPNCTNSVHISEAIIENYLLSHIDEEISVKLKAKPKEIDHQNTQAQIQSAKAKLSKLSDLYIDDMISKSDYAKRYKELTATLDELQKEIAPAKTAKDLSEMFAQGWQDIYFKLSRENKAAFWKLKIKEIRLYEDRRIEFDFL

SEQ ID NO: 9290 - protein, 439 aa, Unknown
  Description of Unknown: Integrase B9291 sequence
  PTHR30461:SF3,IPR036162,PS51737,IPR011109, PTHR30461,PS00397,PF00239,G3DSA:1.10.10.2600, IPR006119,SSF53041,cd00338,SM00857,IPR025827,IPR038109 ,PS51736,IPR006118,PF13408,G3DSA:3.40.50.1390,PF07508
MDKIKRAALYIRVSTEEQARHGYSLAAQLEDLKAYATKKKYKIVDAYIDEGVSARKKPFNRKEFKRLLEDVKENKIDTILFIKLDRWFRSVSDYYKAQEILDAHKVEWETTQESYNTTTTNGRLMLNIKLSVAQNESDMTSDRIKFVFAQKRALKQVTCGSVLLGFKIENKHLVHSDKAPIAKAIFEYYLLHQSFSSTIKWLKQEYQITMYPASLKRLLRSELYIGKKGDDDEFTDRIIDNETFYAVQDIIKRNVKRAPSGRIYLFTGLIRCPSCGSSMSVSVTEQKNHTYIYYLCPRRYNTFDCNDKIRISESKLEASLLNTLAKQLEGYFLSITAKQEKPIKHNNAAIKKKLERLKDLYLNELIDLDTYKKDYKALQKELIPVIIKPDPIRITKKKEQIYDAIQAYSSLSKELKRSFWRSLIDHIDVSGDMPVIFFK

SEQ ID NO: 9291 - protein, 438 aa, Unknown
  Description of Unknown: Integrase B9292 sequence
  PTHR30461:SF3,SM00857,IPR006118,G3DSA:1.10.10.2600,IPR036162, PF13408,IPR025827,G3DSA:3.40.50.1390,Coil,IPR006119, IPR038109,SSF53041,PTHR30461,PS00397,PS51736, cd00338,PF00239
MPKQIRAALYVRVSSEEQARHGYSLAEQKARLLAYAKAHGLEVVGIYEDAGISARKPYKKRPALLRLLEDCEAGKIDTIYFIKLDRWFRNVADYYAVQPVLEKAGVTWCATEENYETQTAAGRLKVNIMLSVAQDEADRTSERIRFVNDGRRAKGVPISSKAPIGLMVKDGDYVQTKDAPAVQAMFTHYIQTRSVNATRRYMMDQWGIDAVYNTFNRALRNRLYIGEVHGIPNRIHALVSKEDFDLAQEIIAKQAQRCSGVETPHIYLFSGLIYCRECGRSMQSETVKKVYTYYRCRSHMLDITACPHTKRVRESELEIYLLEELEHIVKTAYSATKKGRERKSRIAPAKILRKLDRLKELYLAEMIDMPTYRADYDKLQEQLHAAQVETPDPPDIASLHEAIAQYPVLSRIEKKEFWTRTIKRIDADNNGAFFVTTR

SEQ ID NO: 9292 - protein, 438 aa, Unknown
  Description of Unknown: Integrase B9293 sequence
  PTHR30461:SF3,SM00857,IPR006118,G3DSA:1.10.10.2600,IPR036162, PF13408,IPR025827,G3DSA:3.40.50.1390,PS00397,IPR006119, IPR038109,SSF53041,PTHR30461,Coil,PS51736, cd00338,PF00239
MPKQIRAALYVRVSSEEQARHGYSLAEQKARLLAYAKAHGLEVVGIYEDAGISARKPYKKRPALLRLLEDCEAGKIDTIYFIKLDRWFRNVADYYAVQPVLEKAGVTWCATEENYETQTAAGRLKVNIMLSVAQDEADRTSERIRFVNDGRRAKGVPISSKAPIGLMVKDGDYVQTKDAPAVQAMFTHYIQTRSVNATRRYMMDQWGIDAVYNTFNRALRNRLYIGEVHGIPNRIPALVSKEDFDLAQEIIAKQAQRCSGVETPHIYLFSGLIYCRECGRSMQSETVKKVYTYYRCRSHMLDTTACPHTKRVRESELEIYLLEELEHIVKTAYSSAKKGRERKSRIAPAKIVRKLDRLKELYLAEMIDMPTYRADYDKLQEQLHAAQAETPGPPDIASLHEAIAQYPKLSRIEKKEFWTRTIKRIDADNNGAFFVTTR

SEQ ID NO: 9293 - protein, 438 aa, Unknown
  Description of Unknown: Integrase B9294 sequence
  PTHR30461:SF3,IPR036162,PS51737,IPR011109,PTHR30461, PS00397,PF00239,G3DSA:1.10.10.2600,IPR006119,SSF53041, cd00338,SM00857,IPR025827,IPR038109,PS51736, IPR006118,PF13408,G3DSA:3.40.50.1390,PF07508,Coil
MQRAALYIRVSSEEQAIHGLSIAAQTETLDAWAQENKIYVFDHYIDAGISARKKASKRPELQRLLEDVKSGQINLIVFTKLDRWFRNIAEYYKVQEVLETYHVDWKTVQEDYDTSTASGRLKINIMLSVAQDEADRTGERIKAVFESKTLRNEPISGKVPLGYKIENKHIVINEETAPIAIDLFNKYIAIRSISSLRKYLMDTYGIAHSHTAIRVMLKNERYIGRAHDQENYCPALISQKTFDHVQEILNIRAQRSSLERTGRVYLFTGIVYCAECGNRLSGHVVAQKYIYYRCTRYEKLHLCQHKKRTSELVLEKWLLENLLTEFMKYNERLEAEVQRAKPLVDTARIRRKMEKLKDLYLNDLIERDIYEKDYTALSAELNVATKKPVIGKPVNIDKLSDSLATYSTLSREGQKEFWSRTVRRIDITNEDVFSVTPI

SEQ ID NO: 9294 - protein, 438 aa, Unknown
  Description of Unknown: Integrase B9295 sequence
  PTHR30461:SF3,IPR036162,PS51737,IPR011109,PTHR30461, PS00397,PF00239,G3DSA:1.10.10.2600,IPR006119,SSF53041, cd00338,SM00857,IPR025827,IPR038109,PS51736, IPR006118,PF13408,G3DSA:3.40.50.1390,PF07508,Coil
MQRAALYIRVSSEEQAIHGLSIAAQTETLDAWAQENKIYVFDHYIDAGISARKKASKRPELQRLLEDVKSGQINLIVFTKLDRWFRNIAEYYKVQEILETYHVDWKTVQEDYDTSTASGRLKINIMLSVAQDEADRTGERIKAVFESKTLRNEPISGKVPLGYKIENKHIVINEETAPIAIDLFNKYIAIRSISSLRKYLMDTYGIAHSHTAIRVMLKNERYIGRAHDQENYCPALISQKTFDHVQEILNIRAQRSSLERTGRVYLFTGIVYCAECGNRLSGHVVAQKYIYYRCTRYEKLHLCQHKKRTSELVLEKWLLENLLTEFMKYNERLEAEAQRAKPLVDTARIRRKMEKLKDLYLNDLIERDIYEKDYTALSAELNAATKKPVIGKPVNIDKLSDSLATYSTLSREGQKEFWSRTVRRIDITNEDVFSVTPI

SEQ ID NO: 9295 - protein, 438 aa, Unknown
  Description of Unknown: Integrase B9296 sequence
  SM00857,IPR006118,G3DSA:1.10.10.2600,IPR036162,PF13408, IPR025827,PS51737,G3DSA:3.40.50.1390,IPR006119,IPR038109, IPR011109,SSF53041,PTHR30461,PS00397,PS51736, cd00338,PF00239
MKRAALYVRVSTQEQKNSGLSVDSQIDALEKYCEEQGYTVAGIYNDAGISARKKYTKRPALLQLLEDCKKHEIDIILFTRLDRWFRAVAGYYEVQSVLDACKVPWRAIWEDYETETSQGIFKVNIMLSVAQAEADRDSEKIRSVMEFKRQNKEYIGGKVPVGYRVEGKKIVKDEKMRGIIEDMFEHYFQTFSKMETADYILSKYPDFIRTRTRIVKIMSSPAYHGEMYGVKNYCEPYITEEQAQRIKEVSSQKSWVDCKRRIYIFSGLIRCPICGYRFSGRTMAKKEKRYKVYQCPRSAAKKHKTYTRSEPKLETYMLNHIEEKIQLDVLISTHTSRVGCDMPLIASGFYFRISTHTSRVGCDVGCCYGARFWIKFLLTHPVWDVTMCIIPGDHGYTISTHTSRVGCDLFSLKLPRQHQISTHTSRVGCDSYHLKQIR

SEQ ID NO: 9296 - protein, 438 aa, Unknown
  Description of Unknown: Integrase B9297 sequence
  SM00857,IPR006118,G3DSA:1.10.10.2600,IPR036162,PF13408, IPR025827,PS51737,Coil,G3DSA:3.40.50.1390,IPR006119, IPR038109,IPR011109,SSF53041,PTHR30461,PS00397, PS51736,cd00338,PF00239
MKRAALYVRVSSAEQRDHGLSVDSQISALTKYCADNRLQIAGIYNDAGISARKKYKARPALLQLMQDCKDKKVDIILFTKLDRWFRSVSDYYEVQRVLDAAKVPWRAIWEDYETETSAGIFKVNIMLSVAQAESDRTSERIKAVNEYKRQRGDLVVHKMPIGYVRTGPGEIAFDPDTRDAVSAIFSTYLQTYSCQEARTAAAEKGVTMSRANVTRILRKEPYYGTYLGKRVPAYITQEQHDTILRNQQVYIRTPKSPSRVYIFSGLVFCALCGARMTAKCSWNSNGGEVKYYRCSGADKKDAENCTFSKSEKKVEAALVSSLNDCIARYNADAKKQNRGLRNVQLDIEKLKARLQRLKDVYIDGDIERDKYVMQADQIKAKITELEVKTSKIRIIAPMPPEWQTMYWQLSESGKRQFWRGIIKKIIVSKNGVENVVFI

SEQ ID NO: 9297 - protein, 438 aa, Unknown
  Description of Unknown: Integrase B9298 sequence
  PTHR30461:SF3,SM00857,IPR006118,G3DSA:1.10.10.2600,IPR036162, PF13408,IPR025827,G3DSA:3.40.50.1390,Coil,IPR006119, IPR038109,SSF53041,PTHR30461,PS00397,PS51736, cd00338,PF00239
MPKQIRAALYVRVSSEEQARHGYSLAEQRARLLAYAKAHGLKVVGVYEDAGISARKSYRKRPALLRLLEDCKAGKIDTIYFIKLDRWFRNVADYYAVQPTLEKAGVTWCATEESYETQTAAGRLKVNIMLSVAQDEADRTSERIRFINDGRRANGIPIGTKAPLGLMIKNGAYIQTKDAPAVQAMFKYYIQTRSVNATKKYMLKQWGIDGVYNTFNRALRNRLYIGEVYGVPDRIPALIQKADFDLVQGMLAKQSQRCSGVEDSRIYLYSGLIYCRECGKTMQAETVKGTYTYYRCRTHNLDTTACPHTKRVRESELEIYLLEELEHIVKTAYSSAKKGRERKSRIAPAKILRKLDRLKELYLAEMIDMPTYRADYDKLQEQLNAAQAETPDPPDIASLHEAIAQYPKLSRIEKKEFWTRTIKRIDADNNGAFFVTTR

SEQ ID NO: 9298 - protein, 438 aa, Unknown
  Description of Unknown: Integrase B9299 sequence
  PTHR30461:SF3,SM00857,IPR006118,G3DSA:1.10.10.2600,IPR036162, PF13408,IPR025827,G3DSA:3.40.50.1390,Coil,IPR006119, IPR038109,SSF53041,PTHR30461,PS00397,PS51736, cd00338,PF00239
MPNQIRAALYVRVSSEEQARHGYSLAEQRARLLAYAKAHGLKVVGVYEDAGISARKSYRKRPALLRLLEDCKTGKIDTIYFIKLDRWFRNVADYYAVQPTLEKAGVTWCATEESYETQTAAGRLKVNIMLSVAQDEADRTSERIRFINDGRRANGIPIGTKAPLGLMIKNGAYIQTKDAPAVQAMFKYYIQTRSVNATKKYMLKQWGIDGVYNTFNRALRNRLYIGEVYGVPNRIPALIQKADFDLVQGMLAKQSQRCSGVEDSRIYLYSGLIYCRECGKTMQAETVKGTYTYYRCRTHNLDTTACPHTKRVRESELEIYLLEELEHIVKTAYSATKKGRERKSRIAPAKILRKLDRLKELYLAEMIDMPTYRADYDKLQEQLNAAQAETPDPPDIASLHEAIAQYPKLSRIEKKEFWTRTIKRIDADNNGAFFVTTR

SEQ ID NO: 9299 - protein, 438 aa, Unknown
  Description of Unknown: Integrase B9300 sequence
  PTHR30461:SF3,SM00857,IPR006118,G3DSA:1.10.10.2600,IPR036162, PF13408,IPR025827,G3DSA:3.40.50.1390,Coil,IPR006119, IPR038109,SSF53041,PTHR30461,PS00397,PS51736, cd00338,PF00239
MPNQIRAALYVRVSSEEQARHGYSLAEQRARLLAYAKAHGLKVVGVYEDAGISARKSYRKRPALLRLLEDCKTGKIDTIYFIKLDRWFRNVADYYAVQPTLEKAGVTWCATEESYETQTAAGRLKVNIMLSVAQDEADRTSERIRFINDGRRANGIPIGTKAPLGLMIKNGAYTQTKDAPAVQAMFKYYIQTRSVNATKKYMLKQWGIDGVYNTFNRALRNRLYIGEVYGVPNRIPALIQKADFDLVQGMLAKQSQRCSGVENSRIYLYSGLIYCRECGKTMQAETVKGTYTYYRCRTHNLDTTACPHTKRVRESELEIYLLEELEHIVKTAYSSAKKGRERKSRIAPAKILRKLDRLKELYLAEMIDMPTYRADYDKLQEQLHAAQVETPNPPDIASLHEAIAQYPVLSRIEKKEFWTRTIKRIDADNNGAFFVTTR

SEQ ID NO: 9300 - protein, 438 aa, Unknown
  Description of Unknown: Integrase B9301 sequence
  PTHR30461:SF3,SM00857,IPR006118,G3DSA:1.10.10.2600,IPR036162, PF13408,IPR025827,G3DSA:3.40.50.1390,Coil,IPR006119, IPR038109,SSF53041,PTHR30461,PS00397,PS51736, cd00338,PF00239
MPNQIRAALYVRVSSEEQARHGYSLAEQRARLLAYAKAHGLKVVGVYEDAGISARKSYRKRPALLRLLEDCKTGKIDTIYFIKLDRWFRNVADYYAVQPTLEKAGVTWCATEESYETQTAAGRLKVNIMLSVAQDEADRTSERIRFINDGRRANGIPIGTKAPLGLMIKNGAYTQTKDAPAVQAMFKYYIQTRSVNATKKYMLKQWGIDGVYNTFNRALRNRLYIGEVYGVPNRIPALIQKADFDLVQGMLAKQSQRCSGVENSRIYLYSGLIYCRECGKTMQAETVKGTYTYYRCRTHNLDTTACPHTKRVRESELEIYLLEELEHIVKTAYSSTKKGRERKSRIAPAKILRKLDRLKELYLAEMIDMPTYRADYDKLQEQLHAAQVETPNPPDIASLHEAIAQYPVLSRIEKKEFWTRTIKRIDADNNGAFFVTTR

SEQ ID NO: 9301 - protein, 438 aa, Unknown
  Description of Unknown: Integrase B9302 sequence
  PTHR30461:SF3,IPR036162,PS51737,IPR011109,PTHR30461, PS00397,PF00239,G3DSA:1.10.10.2600,IPR006119,SSF53041, cd00338,SM00857,IPR025827,IPR038109,PS51736, IPR006118,PF13408,G3DSA:3.40.50.1390,PF07508,Coil
MAGYARVSTDEQKKYGYSIQAQTEEITQWCNDNDHDLIHIYIDEGFSASTMKRPQLQSMLSSLKNLDAIAFTRLDRLSRNVLEANKMLELLQQNNVAMISICEDDINTSTVNGLFMFNLKVNLAEHELKKGSERIKAVFEYKIAQGQPITGNVPFGYRIATENGNKRIIIDESKAPIVKDIFESFLLHQSVHYIVEYVNNKYGLSRPYMSYMHILKNEFYAGSYRGNSNYAEPYITKDTYNAVQNALQANIRTGIQRHVYLFTGLLRCPECRSKLVGVSHPKGGKRYYYYRCNNAHSVHTCTHKKHYAELATEKYLLSNLDDLLKNHIATISSITSEIKNTTEKELKELRKELDNLNYIFIKKRMPVSTYERLYAETEDKIKRLESFKPQSTDHLNQFLNSGWRSIYDNLTRENKHTLWRNALDSVHVSPDEIEVFFK

SEQ ID NO: 9302 - protein, 438 aa, Unknown
  Description of Unknown: Integrase B9303 sequence
  PTHR30461:SF3,SM00857,IPR006118,G3DSA:1.10.10.2600,IPR036162, PF13408,IPR025827,G3DSA:3.40.50.1390,PS51737,IPR006119, IPR038109,SSF53041,IPR011109,PTHR30461,PS00397, PS51736,cd00338,PF00239
MLRVALYIRVSTEEQALHGDSIEAQKQALIEYAQKNQYKIIDYYIDDGFTATSLKRPSLQRLLKDVREDKIDLIIFTKIDRWSRGVRNYYKIQDVLDNHKVNWKTIFENYDTSTAAGQLHINIMLSVAENEAAVTSERIKVVFKNKIKNKEVITGKVPKGYKIENKKLVIDKETVNIVESIFSHFEIHQSKRSTMNFIRDELGVNLSYKTISNILSNSLYKGEYRGIVNYCPAIIDKKRFDKIQTVLKRNISTNTSNRIYLFSSLLVCSHCNHNLGGFNTKHNDKFFFNYRCNYNFYRKLCDNNRCISEKKIEKKIIEQFKIQLHEYIVDYEVKKKNKPKKSNKTEIENKIKKLNDLYINDFISLEEYKEKHEFYKSKIIEDECPQDEFNIESYKEMLNIDFKETYMNLDREDKRAFWRSFIKEIKIDHECNVKLKFH

SEQ ID NO: 9303 - protein, 437 aa, Unknown
  Description of Unknown: Integrase B9304 sequence
  PTHR30461:SF3,SM00857,G3DSA:1.10.10.2600,IPR036162,PF13408, PS51737,G3DSA:3.40.50.1390,mobidb-lite,IPR025827,IPR006119, IPR038109,PF07508,IPR011109,SSF53041,PTHR30461, PS51736,cd00338,PF00239
MAENITKIAARPSLISKKRVCAYARVSSGKDAMLHSLSAQISYYSKYIQSHTDWIYSGVYADEALSGTKDERPNFQRMLADAKDGKIDIIIVKSVSRFARNTVTLLEATRELKEYGVDVYFEEQKIHTLSSEGELMLSLLAGFAQEEARSVSENMKWRIKKDLSEGIMWGGKSHLGYELIDKKLVLIPEEAKIVKRVFQLFIEGCGIQKIANSFNKEGIQPKYSDHWNKSSVRHILSNVNYTGDLLLQKTYRESYLTKKKRINKGEQDQFLVENDHEAIIDKDTFNLAQQLLAERGVLPKSNYIKGNKSIFTSRIKCGLCGASYRHKTTRYKKIWICHTYDSEGKENCSAKQIPEDNLIKAINQYLGIDSFSEDAFNKKIDYITVFPGNVLRIKRVDGNEDDITWNDPKRSEGWTPEMREKARQRAKAHYKKEGADE

SEQ ID NO: 9304 - protein, 437 aa, Unknown
  Description of Unknown: Integrase B9305 sequence
  PTHR30461:SF3,IPR036162,PS51737,IPR011109,PTHR30461, PS00397,PF00239,G3DSA:1.10.10.2600,IPR006119,SSF53041, cd00338,SM00857,IPR025827,IPR038109,PS51736, IPR006118,PF13408,G3DSA:3.40.50.1390,Coil
MKRCALYVRVSTDEQKKHGLSVDSQIVALRDYCKQNDLQEVGLYNDAGISARKSYKKRPALLQLIEDCERGLIDVILFTKLDRWFRSVADYYEVQTRLDACHVPWRAIWEDYETETSSGVFKVNIMLSVAQSEADRTSERIKSVFDYKRAQGDYVGTPPYGYKRVDKKLVKDETVAPLVELMFKTYLMTYSSTRTMEALQAVGYNVNMNAMRKRLKNPIYAGDMNGFACPAYITAEDHQKIIDNMSQYIRTPKGGINYIFSGLMICGYCGNRMGAKSSTNQIKTGKVRCKYYVCDGKTYATKHEKRLTISERKVEKYLLDQIATIISKYNINLSNEEKKSDAKDKRKALEQKLERVGIRFEVGDLSVEEYKEKRELILRDISDLDRMMSDREPIILDDNWKETYIKLDDIHKRAFWRSFISSIEVLPDKTLNIKIGH

SEQ ID NO: 9305 - protein, 437 aa, Unknown
  Description of Unknown: Integrase B9306 sequence
  SM00857,G3DSA:1.10.10.2600,IPR036162,PS51737,G3DSA:3.40.50.1390, mobidb-lite,IPR006119,IPR038109,PF07508,IPR011109, SSF53041,PTHR30461,PS51736,cd00338,PF00239
MKKTIRVIEPTIPLLKKKKRVAAYARVSSGKDAMLMSLSAQVSYYSELIQRNSEWEYAGVYADEAMTGTKEDRTNFQKLLKACRNGEIDIILTKSISRFARNTVTLLEAVRELKKYGVDVYFERENIHSLSGDGELMLTILASFAQEESLSASENQKWRIKKNFEEGKPWTYGMLGYRYNGEFYEVIPEEAEVVRKIFAYYLEGLGYNAICKRLDAEGIVTRNNNKWSQNSVSKILKNYTYTGNLLLQKTFRENHITKKTRVNRGELPKYHAEDTHEAIIDIDTFMAVQNEMALRLKGFEHKSQVQRTYPFTHKMVCDCCDAYYRRKITKTRVVWICATFNQKGKALCQHSKQLPEETLIALCNDVLGLVEFNEQIFINKVSQIRILDNNRVQFLLSNGKTEERTWKDRSRSESWTDEMKETARQRTLQRYASKEVE

SEQ ID NO: 9306 - protein, 437 aa, Unknown
  Description of Unknown: Integrase B9307 sequence
  PTHR30461:SF3,IPR036162,PS51737,IPR011109,PTHR30461, PS00397,PF00239,G3DSA:1.10.10.2600,IPR006119,SSF53041, cd00338,SM00857,IPR025827,IPR038109, PS51736,IPR006118,PF13408,G3DSA:3.40.50.1390,Coil
MIAALMRVALYIRVSSEEQARHGLSLQEQRDALMRYAKEHKMTVVGIYEDAGISARKPYKKRPALLRLLGDCKDGQIDMILFVKLDRWFRNVAGYYDVQTQLDQYGVTWQATEEDYETRTASGRLKVNIMLSVAQDEADRTSERIKFINDGKRAKGQPAGSKAPLGYVITDRQYQIDNGTVDAARDMFAAFIRLKSVLAVKRYMLDTWGIDRAYSKYVNYFRNRLYIGEVYGIENACPALVSKQDFDIVNDIIRQRSQRCAGVDTDRVYLFSGILHCKECGKTMQSETVKKTYTYYRCRTRMLDNTSCPHTKRIREDVLEDYLLHELAGIAERNNRYYKKAEKKPTQSADSIRKKMSKLKTLYLNDLIELDDYKAEYSILKRSLETVEEKPKTDLDALRNGLGEYGTYSREEKKEFWTRFIKRIDADNDGAFFVTPR

SEQ ID NO: 9307 - protein, 437 aa, Unknown
  Description of Unknown: Integrase B9308 sequence
  PTHR30461:SF3,SM00857,IPR036162,PF13408,IPR025827, G3DSA:3.40.50.1390,PS51737,IPR006119,SSF53041,IPR011109, PTHR30461,Coil,cd00338,PF00239
MLHGDTLEAQDLILEDFIKVNRMILVDTFIDEALTARKRFNKRKEFVRLLNGVKAHDFDLIIFTKLDRWFRNIGDYHKIQEILEANGVQWKAVTENYDTTTTNGRLHINIRLSVAQDECDRDSDRIKDVFAYKLKNKTYVSGSLPRGLKLDAEKHVIIDPEWNCFALDMFDRFEATCSKRDTQLFLQEKYNIRVCYDTVARYLKNPLFKGQYRDDPDFCPATISPERFERIQKLAIRNVRIRHTQQFYIFSGLLICSSCNHYMCGTVTYRRMADGSEKMYKNYRCNFKAQSKLCDRGKTYREADLEEYMLAHIRPALSDYIAKYEVTAASTVQKNPVTEIAKIERKMKKLYDLFMDDLIDKEAYRSEYDKFKAQIEELQKCSTAAPMRSLDSVKKLLSEDWEAVYHTFSDREKNTFWKSFVESVLVYEDGSMDIRFL

SEQ ID NO: 9308 - protein, 437 aa, Unknown
  Description of Unknown: Integrase B9309 sequence
  PTHR30461:SF3,IPR036162,PS51737,IPR011109, PTHR30461,PS00397,PF00239,G3DSA:1.10.10.2600, IPR006119,SSF53041,cd00338,SM00857,IPR025827 ,IPR038109,PS51736,IPR006118,PF13408,G3DSA:3.40.50.1390,Coil
MRAALIRVALYIRVSSEEQARHGLSLQEQRDALIRYAKANKMTVVGIYEDAGISARKPYKKRPALLRLLGDCKDGKIDMILFVKLDRWFRNVAGYYDVQTQLDQYGVTWQATEEDYETRTASGRLKVNIMLSVAQDEADRTSERIKFINDGKRAKGQPAGSKAPLGYAIKDRQYQIDNGTADAARDMFAAFIRLKSVLAVKRYMLDTWGIDRAYSKYVNYFRNRLYIGEVYGIENACPALVSKQDFDIVNDIIRQRSQRCAGVDTDRVYLFSGILHCKECGKTMQSETVKKTYTYYRCRTRMLDNTSCPHTKRIREDVLENYLLHELAGIAERNNRYYKKAEKKPTQSADSIRKKMSKLKTLYLNDLIELDDYKAEYSILKRSLETVEEKPKTDLDALRNGLGEYGTYSREEKKEFWTRFIKRIDADNDGAFFVMPR

SEQ ID NO: 9309 - protein, 437 aa, Unknown
  Description of Unknown: Integrase B9310 sequence
  SM00857,G3DSA:1.10.10.2600,IPR036162,PS51736,PS51737, G3DSA:3.40.50.1390,IPR006119,IPR038109,PF07508,IPR011109, SSF53041,PTHR30461,mobidb-lite,cd00338,PF00239
MERLIQKIEPSVDISHKLQNVAAYARVSSGKDAMLHSLSAQVGYYSELIQSNPEWRFCGVFADEAITGTKESRPEFQKMLAECRKGKIDLIITKSISRFARNTITVLETVRELKMLGIDVYFQEQNIHSISADGELMLSILSSYAQEESFSASENQKWRIRKDFEQGKICNIRMLGYRRTTNGSLEIVESEAEIVRFIFLNYLSGNGKLLISNKLNEMGIATINGCEWTTADIHRILQNEKYAGNMLLQKRFRENHLTKRMIRNDGQLPKYFVEESHPAIIEKSIFDAVQKKLEEQHQRFSSSKSVASYPFTGKIQCTCCGKNYRHKITATGNVWICATYNTRGKKYCPTAKQIPESTLISVCCEILSIAEFDANIFENQVEKILVPAPNKLIIQLKNGKCINTTWKDRSRSESWTEEKRAAAAKSSKTRRWRKCQK

SEQ ID NO: 9310 - protein, 437 aa, Unknown
  Description of Unknown: Integrase B9311 sequence
  SM00857,G3DSA:1.10.10.2600,IPR036162,PF13408, PS51737,G3DSA:3.40.50.1390,IPR025827,IPR006119, IPR038109,PF07508,IPR011109,SSF53041, PTHR30461,PS51736,cd00338,PF00239
MERIIQRVQFPNAQKVKLLRTVAYARVSSGKDAMLHSLSAQVSYYNSFIQSNPAWLFCGVYADEALTGTKDNRENFQKLLSECRAGRIDLIITKSISRFARNTVTLLETVRELKELGVDVYFEEQNIHSISPDGEFMLTLLGSYAQEESYSASENQKWRIRKDFEFGKVSTVIMLGYKRNSEGVLEIIPEEAETVRMIFADFLNGIGRQSIANKLNELNILTKNGCQWTSEAIRRILNNEKYCGDLMLQKFYSENHITKRKMVNNGVLRMIQVEDAHPAIIDKETFLRVQELLKAKQDYFTPDKPTNVTYPFTGMIHCGCCGKYYRRKVQKYRTLWICWTYNARGKKFCPESKQIPEDILYDKCCEVLNLDEFDNEVFQDEIEYISVPKPNVLTFIFKTGEKRTVHWLDHSRTEAWTPEMRKKAAEHSKKRGKKCQE

SEQ ID NO: 9311 - protein, 437 aa, Unknown
  Description of Unknown: Integrase B9312 sequence
  PTHR30461:SF3,IPR036162,PS51737,IPR011109,PTHR30461, PS00397,PF00239,G3DSA:1.10.10.2600,IPR006119,SSF53041, cd00338,SM00857,IPR025827,IPR038109,PS51736, IPR006118,PF13408,G3DSA:3.40.50.1390,Coil
MKRCALYVRVSTDEQKKHGLSVDSQIVALRDYCKQNGLQEVGLYNDAGISARKSYKKRPALLQLIEDCERGLIDVILFTKLDRWFRSVADYYEVQTRLDACHVPWRAIWEDYETETSSGVFKVNIMLSVAQSEADRTSERIKSVFDYKRAQGDYVGTPPYGYKRVDKKLVKDETVAPLVELMFKTYLMTYSSTRTMEALQAVGYNVNMNAMRKRLKNPIYAGDMNGFACPAYITAEDHQKIIDNMSQYIRTPKGGINYIFSGLMICGYCGNRMGAKSSTNQIKTGKVRCKYYVCDGKTYATKHEKRLTISERKVEKYLLDQIATIISKYNINLSNEEKKSDAKDKRKALEQKLERVGIRFEVGDLSVEEYKEKRELILRDISDLDRMMSDNEPIILDDNWKETYIKLDDIHKRAFWRSFISSIEVLPDKTLNIKIGH

SEQ ID NO: 9312 - protein, 437 aa, Unknown
  Description of Unknown: Integrase B9313 sequence
  SM00857,G3DSA:1.10.10.2600,IPR036162,PS51736,PS51737, G3DSA:3.40.50.1390,IPR006119,IPR038109,PF07508,IPR011109, SSF53041,PTHR30461,mobidb-lite,cd00338,PF00239
MERLIQKIEPSVDISHKLQNVAAYARVSSGKDAMLHSLSAQVGYYSELIQSNPEWRFCGVFADEAITGTKESRPEFQKMLAECRKGKIDLIITKSISRFARNTITVLETVRELKMLGIDVYFQEQNIHSISADGELMLSILSSYAQEESFSASENQKWRIRKDFEQGKICNIRMLGYRRTTNGSLEIVESEAEIVRFIFLNYLSGNGKLLISNKLNEMGIATINGCEWTTADIHRILQNEKYAGNMLLQKRFRENHLTKRMIRNDGQLPKYFVEESHPAIIEKSIFDAVQKKLEEQRQRFSSSKSVVSYPFTGKIQCTCCGKNYRHKITATGNVWICATYNTRGKKYCPTAKQIPESTLISVCCEILSITEFDANIFENQVEKILVPVPNKLIFQLTNGKCINTTWKDRSRSESWTEEKRAAAAESSKTRRWRKCQK

SEQ ID NO: 9313 - protein, 437 aa, Unknown
  Description of Unknown: Integrase B9314 sequence
  PTHR30461:SF3,SM00857,IPR036162,PF13408,PS51737, G3DSA:3.40.50.1390,IPR025827,IPR006119,SSF53041,IPR011109, PTHR30461,Coil,cd00338,PF00239
MLHGDTLEAQDLILEDFIKVNRMILVDTFIDEALTARKKFNKRKEFVRLLDGVKAHAFDLIIFTKLDRWFRNIGDYHKIQEILEANGVQWKAVTENYDTTTTNGRLHINIRLSVAQDECDRDSDRIKDVFAYKLKNKTYVSGSLPRGLKLDAEKHVIIDPEWNCFALDMFDRFEATCSKRDTQLFLQEKYNIRVCYDTVARYLKNPLFKGQYRDDPDFCPATISPERFERIQKLAIRNVRIRHTQQFYIFSGLLICSSCNHYMCGTVTYRRMADGSEKMYKNYRCNFKAQSKLCDRGKTYREADLEEYMLAHIRPALSDYIAKYEVTAASTVQKNPVTEIAKIERKMKKLYDLFMDDLIDKEAYRSEYDKFKAQIEELQKCSTAAPMRSLDSVKKLLSEDWEAVYHTFSDQEKNTFWKSFVESVLVYEDGSMDIRFL

SEQ ID NO: 9314 - protein, 436 aa, Unknown
  Description of Unknown: Integrase B9315 sequence
  PTHR30461:SF3,SM00857,G3DSA:1.10.10.2600,IPR036162,PF13408, PS51737,G3DSA:3.40.50.1390,IPR025827,mobidb-lite,IPR006119, IPR038109,PF07508,IPR011109,SSF53041,PTHR30461, PS51736,cd00338,PF00239
MQITKISAAKKLEKKKLVCAYARVSSDKDAMLHSLSAQVQYYKDYIMSNNDWLFVKVYYDEGISGTKQNRPAFQQMLQDAKDGKIDLIITKSISRFARNTVTLLEAVRKLKKYDVDVYFEEQRIHSISNDGELMLTILASYAQEEARSVSENMKWRVKRNFEEGKPWGRAPYGYTIEHSKFVIVPKEAEAVKLIFKLYLDGIGSYRIKDIMNKSEYPTKNNCLWTETTIRGMLKNYIYTGNAVFQTTYVKNYITKKKAKNNGEKPMYHVEECHDAIISIEDYNKVQKIIKERTEKIHKGITPKDNLFKGKLICAHCGCTFRMKKNYKKYVWRCGTYIRLGSKKCLSKQIPNDALKNIAKEILGVDELTSEIIDERIEKVIVGDDKLLTFYLKDGNKIDAHWMQKSRSESWTEEMKENARRKAVEIHGKSNSNPIND

SEQ ID NO: 9315 - protein, 435 aa, Unknown
  Description of Unknown: Integrase B9316 sequence
  PTHR30461:SF3,SM00857,G3DSA:1.10.10.2600,IPR036162,PF13408, PS51737,IPR025827,G3DSA:3.40.50.1390,IPR006119,IPR038109, PF07508,IPR011109,SSF53041,PTHR30461,PS51736, cd00338,PF00239
MSTDQEEQLSSYENQVRYYTEIITRNPDYELADIYADEGISGTNTKKRDDFNRMIEDCRGGKIDLIITKLISRFARNTLDCLNYVRELKDLGIGITFEKENINTMDAKGEVLLTILSSLAQDESRSISENCTWGIRRRFEQGEHKMSTKRFLGYDYDEDGKLIVNRAQAKVVVRLYEEFLSGKTVDYIARIFRKEKIKSWDGKCNWLASTLDSMLRNEKYMGDTILQKSYTADFLSKKRVMNDGTIQMYHIEEDHEPIIDVEIWEAVQHELERRQRFCEEHRTNTYAVNPETNPFSGKVVCGNCNNLYSRVKYTTRRGTKIVKWRCGSTNKAAGHRVCACPYIYEEALMKFFVMSWNQIVENQKSYKEAWDENLRSDDPLLKYKTRLLMRTAAAGPIREFDSELMRMVMDIITVHEDGRLQIRFYDGTEFELTAE

SEQ ID NO: 9316 - protein, 435 aa, Unknown
  Description of Unknown: Integrase B9317 sequence
  PTHR30461:SF3,cd00338,SM00857,G3DSA:1.10.10.2600,IPR036162, PF13408,PS51737,G3DSA:3.40.50.1390,IPR025827,IPR006119, IPR038109,PF07508,SSF53041,IPR011109,PTHR30461, PS51736,Coil,PF00239
MISDCRKGKIDRIYTKSISRFARNTKDCLKNIRELKSLGITVFFEKENIDTAKLTDEMMITIMGGLAQEESTSISQNLRWSCRKRMANGTYELSCPPYGYKKVNGKLVICPEQAKVVKEIYDSYLSGIGMISIMKNLNERNIPCCKNSERWHMIGVSYILTNEKYTGNTLLQKTYSTNTLPVRRFKNNGNADQYYVRNTHPAIIQQETFDKVQRLISEKNQKQPRGTPHNSVLHKHIFCGSCGSILIRKSCRKKYYWSCRKHDLAAVDCPTKQISEDKIHSAFIRLYNKLVYNFKPVLTPLQQALQDLKYKNTKSGTTIIEKYKEIAKLKEQTHVLARLKTKGFLDEAKYLEQTTELNSKIAKLQTKIKKLNVSDEEDETLEQLDMLIGYFEKRQKLMVEFEELAFESIVDKIVVKNQNELEFHLIGGLELAEEI

SEQ ID NO: 9317 - protein, 435 aa, Unknown
  Description of Unknown: Integrase B9318 sequence
  PTHR30461:SF3,SM00857,G3DSA:1.10.10.2600,IPR036162,PF13408, PS51737,G3DSA:3.40.50.1390,IPR025827,IPR006119,IPR038109, PF07508,IPR011109,SSF53041,PTHR30461,PS51736, cd00338,PF00239
MSTDQEEQLSSYENQVRYYTEIITRNPDYELADIYADEGISGTNTKKRDDFNRMIADCRAGKIDLIITKSISRFARNTLDCLNYVRELKDLAIGIVFEKENINTLDAKGEVLLTILSSLAQDESRSISENCTWGIRRRFEQGKHKMSTKRFLGYDTDEEGHLVVNRQQAKIVVRLYEEFMSGKTVDYIARIFKAEKIKNWDGKYNWQASTLDSMLRNEKYMGDAILQKSYTADFLSKRRVMNDGSVQMYHIEEDHEPIINIETWEAVQAELERRAQYCTDHFTNAYGQMSEKNPFYAKIICGNCGNIYSRVKYTTRGGTKIVKWRCGSCNKADGHKVCSNRYVTDETFTKLFVMSWNEIIEHLEDYQEKWEANIKSDDVLLRYKTRLLMKHAAAGPIKEFDPELMMAVMDHITVFEDGRLQIKFYNGTEFEVETE

SEQ ID NO: 9318 - protein, 434 aa, Unknown
  Description of Unknown: Integrase B9319 sequence
  SM00857,IPR006118,G3DSA:1.10.10.2600,IPR036162,PF13408, IPR025827,PS51737,G3DSA:3.40.50.1390,IPR006119,IPR038109, IPR011109,SSF53041,PTHR30461,PS00397,PS51736, cd00338,PF00239
MIRAAIYIRVSTEEQARHGLSMDEQESNLRDYAKAHGMKVVDCYLDAGKSARKRYTKRPEFMRLLADIESDKIDMVLFIKLDRWFRNISDYYEVQRVLDAHNVTWRATQEDYETVTASGRFKVNIMLSVAQDEADRTSERIKFVFEGKKERNEPITGKVPRGYKLDGKSVVIDPVTGPMVRAAFDMYLETGSISKVIKAYPQLELTYFSARYMFSNPAYMGQFAGISIPAIISQDEYKKADSLRGRIVRKTTQNRVYLFSGLLICPECGNRLGGFSASRVYKETHYYGCSSHRKMTGCPNNKSYNEEKIEEYMLDRIEAKVQTSIISRNEQRAVSHKSQRDAIQRKLSKLSELYISDLISLQDYKKQFRALNDELAAIPEDIPDIDIEALKSRFWGDWRQLYDDLPRDGKQSFWRKTVKKIYLSSDSVADFDLI

SEQ ID NO: 9319 - protein, 434 aa, Unknown
  Description of Unknown: Integrase B9320 sequence
  PTHR30461:SF3,SM00857,IPR006118,G3DSA:1.10.10.2600,IPR036162, PF13408,PS51737,G3DSA:3.40.50.1390,IPR025827,IPR006119, IPR038109,IPR011109,SSF53041,PTHR30461,PS00397, PS51736,cd00338,PF00239
MTRAALYIRVSTEEQAKHGLSMDEQESNLRDYAKAHGMKVVDCYLDAGKSARKRYTKRPEFMRLLADIESDKIDMVLFIKLDRWFRNISDYYEVQRVLDAHNVTWRATQEDYETVTASGRFKVNIMLSVAQDEADRTSERIKFVFEGKKERNEPITGNVPKGYKLDGKSVVIDPVTGPIVRAAFDMYLENGSISKVIRAYPELGLSYTSARYMFSNPAYMGEFAGITIPAIISPDEYQKADSIRGCIVRKTTHNRVYLFSGLLICPKCGNRLGGFSASRVYKETHYYGCSSSRKMTGCSNNKSYNEEKIEEYMLDRIEAKVQTSIISRNEQRAVSHKSQRDAIQRKLSKLSELYISDLISLQDYKKQFRALNDELAAIPEDIPDIDIEALKSRFWGDWRQLYDDLPRDGKQSFWRKTVKKIYLSSDSVADFDLI

SEQ ID NO: 9320 - protein, 434 aa, Unknown
  Description of Unknown: Integrase B9321 sequence
  PTHR30461:SF3,IPR036162,PS51737,IPR011109,PTHR30461, PS00397,PF00239,G3DSA:1.10.10.2600,IPR006119,SSF53041, cd00338,SM00857,IPR025827,IPR038109,PS51736, IPR006118,PF13408,G3DSA:3.40.50.1390,Coil
MRAALYIRVSTEEQAKHGLSLPEQRDALSKYADANNMEVIGVYEDAGISARKPYKKRPALLRLLEDCNAGKIDVILFIKLDRWFRNVSGYYAVQDQLDKCGVKWQATQEDYETRTASGRLKVNIMLSVAQDEADRTSERIKFINDGKRAKGQPTNAKAPLGLVVKDRQYQIDPDTAEAAKDMFSAFIRLRGILPLRKYMAATWGINRSYSKYVGLIQNRLYIGEVYGIADACPALINKDEFTLANELLQHRSQRGASASPDRTYLFSGLLHCRECGTSMQSETAKKIYTYYRCRKRMLDNSACPHNRRIREDVLEEYLLREIEHIATAYHGKYEKAEKKPAIAADKIKRKMQKLKELYLADLIDIEEYRKDYEDMKRSLEIMEASQPPAFDVGALKSGLAEYPHMTKEQKKGFWTRTIQRIDADNDGAFFVTPR

SEQ ID NO: 9321 - protein, 434 aa, Unknown
  Description of Unknown: Integrase B9322 sequence
  PTHR30461:SF3,IPR036162,PS51737,IPR011109,PTHR30461, PS00397,PF00239,G3DSA:1.10.10.2600,IPR006119,SSF53041, cd00338,SM00857,IPR025827,IPR038109,PS51736, IPR006118,PF13408,G3DSA:3.40.50.1390,Coil
MRAALYIRVSTEEQAKHGLSLPEQRDALSKYADANNMEVIGVYEDAGISARKPYKKRPALLRLLEDCNAGKIDVILFIKLDRWFRNVSGYYAVQDQLDKCGVKWQATQEDYETRTASGRLKVNIMLSVAQDEADRTSERIKFINDGKRAKGQPTNAKAPLGLVVKDRQYQIDPDTEEAAKDMFSAFIRLRGILPLRKYMAATWGINRSYSKYVGLIQNRLYIGEVYGIADACPALINKDEFTLANELLQHRSQRGASASPDRTYLFSGLLHCRECGTSMQSETAKKIYTYYRCRKRMLDNSACPHNRRIREDVLEEYLLREIEHIATAYHGKYEKAEKKPAITADKIKRKMQKLKELYLADLIDIEEYRKDYEDMKRSLEIMEASQPPAFDVGALKSGLAEYPHMTKEQKKGFWTRTIQRIDADNDGAFFVTPR

SEQ ID NO: 9322 - protein, 434 aa, Unknown
  Description of Unknown: Integrase B9323 sequence
  SM00857,IPR006118,G3DSA:1.10.10.2600,IPR036162,PF13408, IPR025827,G3DSA:3.40.50.1390,PS51737,IPR006119,IPR038109, IPR011109,SSF53041,PTHR30461,PS00397,PS51736, cd00338,PF00239
MTRAAIYIRVSTEEQARHGLSMDEQEAHLRDYAKGHGMKVVDCYLDAGKSARKRYTKRPEFMRLLADIESDKIDMVLFIKLDRWFRNISDYYEVQRVLDAHNVTWRATQEDYETVTASGRFKVNIMLSVAQDEADRTSERIKFVFEGKKERNEPITGNVPKGYKLDGKSVVIDPVTGPMVRAAFDMYLEAGSISKVIREYPELGLSYTSARYMFSNPAYMGKFAGITIPAIISPDEYRKANSLRGCIVRKTTQSRVYLFSGLLICPKCGNRLGGYSVSRVHKETHYYGCSSSRKKTGCSNNKNYNEEKIEAYMLDRIEAKVQTSIISRNEQRAISHKPQRDAIQRKLSKLSELYISDLISMQDYKRQFRALNDELAAIPEDVPDIDIEALKSRFWGDWRQLYDDLPRDGKQSFWRKTVKKIYLSNDSVADFDLI

SEQ ID NO: 9323 - protein, 434 aa, Unknown
  Description of Unknown: Integrase B9324 sequence
  PTHR30461:SF3,IPR036162,PS51737,IPR011109,PTHR30461, PS00397,PF00239,G3DSA:1.10.10.2600,IPR006119,SSF53041, cd00338,SM00857,IPR025827,IPR038109,PS51736, IPR006118,PF13408,G3DSA:3.40.50.1390,Coil
MRAALYIRVSTEEQAKQGLSLPEQRDALSKYADANNMEVIGVYEDAGISARKPYKKRPALLRLLEDCNAGKIDVILFIKLDRWFRNVSGYYAVQDQLDKCGVKWQATQEDYETRTASGRLKVNIMLSVAQDEADRTSERIKFINDGKRAKGQPTNAKAPLGLVVKDRQYQIDPDTAEAAKDMFSAFIRLRGILPLRKYMAATWGINRSYSKYVGLIQNRLYIGEVYGIADACPALINKDEFTLANELLQHRSQRGASASPDRTYLFSGLLHCRECGTSMQSETAKKIYTYYRCRKRMLDNSACPHNRRIREDVLEEYLLREIEHIATAYHGKYEKAEKKPAIAADKIKRKMQKLKELYLADLIDIEEYRKDYEDMKRSLEIMEASQPPAFDVGALKSGLAEYPHMTKEQKKGFWTRTIQRIDADNDGAFFVTPR

SEQ ID NO: 9324 - protein, 434 aa, Unknown
  Description of Unknown: Integrase B9325 sequence
  PTHR30461:SF3,SM00857,G3DSA:1.10.10.2600,PS51736,PF13408, PS51737,IPR025827,IPR036162,G3DSA:3.40.50.1390,IPR006119, IPR038109,PF07508,IPR011109,SSF53041,PTHR30461, mobidb-lite,cd00338,PF00239
MERVIERVDFQIPMQPKALRVCAYARVSSGKDAMLHSLSAQVSYYNSLIQTHAGWLYCGVYSDEAITGTKSQRDGFQRMLANCRAGEIDLIITKSISRFARNTVTLLETVRELKSLGVDVFFEEQNIHTMSADGELMLTILASYAQEESLSASENQKWRIRKAFENGELVNLRFLFGYNITASGIQVNEREAAIVREIFTRFNGGESLSAISRDLNDRGCERPLGGTWCAERIRNLLSNEKYTGNALLQKKYRNNHIDKKLVPNRGRLPMYYVAGSHEPIIDQTAFDKAQVRLNEMARQAEKREKPTRSTFSGLIRCGLCGSTYKRVTCRGKHFWNCTTFQTKGKAECPAKKIPAETLEALAREVLGTDALDPDMVRSKITMIRAEKNNVAVFCMDDGSEIVKRWKDRSRAESWSPEMKEQARQRALQTRRVQK

SEQ ID NO: 9325 - protein, 434 aa, Unknown
  Description of Unknown: Integrase B9326 sequence
  PTHR30461:SF3,SM00857,G3DSA:1.10.10.2600,IPR036162,PF13408, IPR025827,G3DSA:3.40.50.1390,PS51736,PS51737,IPR006119, IPR038109,PF07508,SSF53041,IPR011109,PTHR30461, mobidb-lite,cd00338,PF00239
MERVIERVDFQIPMQPKALRVCAYARVSSGKDAMLHSLSAQVSYYNSLIQSHADWLYCGVFSDEAITGTKSQRDGFQRMLASCRAGEIDLVITKSISRFARNTVTLLQTVRELKSLGVDVFFEEQNIHTMSADGELMLTILASYAQEESLSASENQKWRIRKAFENGELANLRFLFGYNITANGIQVNEKEAAIVREIFTRFNGGESLSSISRDLNDRGCERPLGGTWCADRIRNLLSNEKYTGNALLQKQYRKNHIDKKLVPNRGELPMYYVAGSHESIIDQAAFDKAQVRLNELARQAEKREKPTRSTFSGLIRCGLCGSTYKRVTCRGKHFWNCTTFQTKGKAECPAKKIPAEMLKFLTCEVLGADALDSDMVRSKITMIRAEKNNVVVFCMDDGSEIVKRWKDRSRAESWSPEMKEQARQRALQTRRVQK

SEQ ID NO: 9326 - protein, 434 aa, Unknown
  Description of Unknown: Integrase B9327 sequence
  PTHR30461:SF3,cd00338,SM00857,G3DSA:1.10.10.2600,IPR036162, PS51737,G3DSA:3.40.50.1390,IPR006119,IPR038109,PF07508, SSF53041,IPR011109,PTHR30461,PS51736,Coil, PF00239
MMIKIGGYLRCSTKKQSSHNGHVSIAMQKKTVYKYLLLIGLVEKMSDIAWYIDEGISGESLDRPDMKRLVNDIKCGRINIVATYDFARISRDVIESNLFTNLVNQYGVRVVCVYDTYNGKTADGRMTANVKFAVNQYEREKDVERTNDGLLSLVEVHHRYPSAIVPYGFKLEDKNIYLKEETAAYVKDAFNMIEDGFSLDDVREYLNTVQTEEHFTNDRISRTLRNIKYSGFLLYKDTLYCDIVPKVVEPSVQAHVIEILDKKRRSVHHESYLLTSLVYCKKCEKRMINVFGTSRNGNRYFYYKCTKCGKYFPQIKLEKLLFEMNLKDLQEKRSKINVSKNIQNLDKRMKTLNDELLGGFIDMDLYKELRDQYTKKKEILEKLLPKKQITTLTAEMSDFERLQFYHMNFDRIIVDCEEKEVVELIYLHKEKKEG

SEQ ID NO: 9327 - protein, 434 aa, Unknown
  Description of Unknown: Integrase B9328 sequence
  SM00857,IPR036162,PF13408,IPR025827,PS51737, G3DSA:3.40.50.1390,IPR006119,SSF53041,IPR011109,PTHR30461, PS51736,cd00338,PF00239
MRVALYERVSSEEQALHGYSLEAQDSALRKFAEDNGHIIVDVYKDEGISAHKPYTARPELLRLLNDTDKIDLILFVKLDRWFRNVQEYYKVQEILDKNHTYWQAITEDYETITANGRFTVTVMLAIAQQEAEKTGERIKFVFNSKLQKNQPITGNYGFGFKTIEQYGLKTVSHDENEAAVYDMFDYFSKVQNVSLLNDYMKEKYGIIAANQTWSRRLRSEKYAGIAHGIANFLPPYITMEKHYEVLEILDSRRSRRSKNRIYLFSGILKCPECGGTMAGCTCIQSGKEYPYYRCSKCWNKGGCSNKKSTYESVVEKFLLENLEAQARVQIEEEPKKAKSTKSLEDRLSRLNDIYLMGNMEKSIYEEKTKEIKEKIIKIQMENKKHGECSGANRILSMDFKNVYETLTRDAKKVFWRNTLGKILVGDTISFTFRG

SEQ ID NO: 9328 - protein, 434 aa, Unknown
  Description of Unknown: Integrase B9329 sequence
  PTHR30461:SF3,SM00857,IPR006118,G3DSA:1.10.10.2600, IPR036162,PF13408,IPR025827,PS51737, G3DSA:3.40.50.1390,IPR006119,IPR038109,IPR011109, SSF53041,PTHR30461,PS00397,PS51736,cd00338,PF00239
MIRAAIYIRVSTEEQARHGLSMDEQEAHLRDYAKEHGMKVVDCYLDAGKSARKRYTKRPEFMRLLADIESDKIDMVLFIKLDRWFRNISDYYEVQRVLDAHNVTWRATQEDYETVTASGRFKVNIMLSVAQDEADRTSERIKFVFEGKKERNEPITGNVPKGYKLDGKSVAIDPVTGPMVRAAFDMYLENGSISKVIRAYPELGLSYTSARYMFSNPAYMGDFAGITIPAIISPAEYQKADSLRGRIVRKTTQNRVYLFSGLLICPECGNRLGGFSASRVYKETHYYGCSSHRKMTGCPNNKSYNEEKIEEYMLDRIEAKVQTSIISRNEQRAVSHKSQRDAIQRKLSKLSELYISDLISLQDYKKQFRALNDELAAIPEDIPDIDIEALKSRFWGDWRQLYDDLPRDGKQSFWRKTVKKIYLSSDSVADFDLI

SEQ ID NO: 9329 - protein, 433 aa, Unknown
  Description of Unknown: Integrase B9330 sequence
  PTHR30461:SF3,SM00857,G3DSA:1.10.10.2600,IPR036162,PF13408, PS51737,G3DSA:3.40.50.1390,mobidb-lite,IPR025827,IPR006119, IPR038109,PF07508,SSF53041,IPR011109,PTHR30461, PS51736,cd00338,PF00239
MSRKITIVSKPPKLERKKRVAAYARVSSGKDAMLHSLSAQVSYYSDLIQSHGEWLYAGVYADEAKTGTKDSRAGFQSLVADCRAGEIDMVITKSISRFARNTVTLLQTVREFKALGVDIYFEEQNIHTMSGDGELMMTILASYAQEESRSASENQKWRVKRNFEAGIPWDRTLLGYRMENNHYVIVPKEAEIVRRIYNEYLSGSGYQLIAKRLNEEGVPSRFGGKWNQSAVSRILSNHTYTGNLLLQKTFRENHITKRKIFNNGELPKYLAEESHEAIVDEETFQAVQEEKSRRSARFNKKSVSKKTYPFSSFMVCDNCGKNYRRKVTKSGPVWVCNTFNSLGKSACASKQIPEPILQQVTAEVLGKADFTGEQLRSRIQKIVVCNENVLIFRFRDGSEVTRKWKDRSRSESWTEEMKAAANQKALERNKHNA

SEQ ID NO: 9330 - protein, 433 aa, Unknown
  Description of Unknown: Integrase B9331 sequence
  PTHR30461:SF3,SM00857,G3DSA:1.10.10.2600,IPR036162,PF13408, PS51737,G3DSA:3.40.50.1390,IPR025827,PS51736,IPR006119, IPR038109,PF07508,IPR011109,SSF53041,PTHR30461, mobidb-lite,cd00338,PF00239
MERTIQIVQPMKLAERKVLRVAAYARVSCDKDAMRRSLKAQVDYYKDLIHSRSEWSFAGVYADAFYTGTKDNRPQFSEMLKACRDGKIDRIITKSISRFARNTVTLLSTVRDLRCAGIGIYFEEQNIDTLTEAGELMITILASQAQEESRATSENCKWRIRKMFEEGYTTPFNLLGYKAVDGLVETIPEETEAVQRIFQLYLEGFGKQAIANILKEERVPTCLGGEWAPTTIGSILKNEKYAGDLLLQKSFVEDHISKISRKNRGEMPKYFIQNDHEAIIPREVFNAAEEESVRRRAKYFHSSGEKSELSSKICCGICGKNYRRKTTAARILWCCSTYNTRGRKYCASKAIPEMTLKESCCQALGLAEYDPQEIADRIIQIDALPDNRLVFHLADGTDSEIQWTFPSRSESWTEEKRQKAAEQARRHHAKTGR

SEQ ID NO: 9331 - protein, 433 aa, Unknown
  Description of Unknown: Integrase B9332 sequence
  PTHR30461:SF3,SM00857,IPR006118,G3DSA:1.10.10.2600,IPR036162, PF13408,IPR025827,G3DSA:3.40.50.1390,PS00397,IPR006119, IPR038109,SSF53041,PTHR30461,Coil,PS51736, cd00338,PF00239
MRAALYIRVSTEEQARHGLSLAEQKESLERYAEAHEMEVVGIYEDAGISARKPYKKRPALLRLLEDCKSGKIDTILFIKLDRWFRNVAGYYDVQTQLDKYGVTWQATKEDYETRTASGRLKVNIMLSVAQDEADRTSERIKFINEGKKAKGIPAGSKTPLGITIKDGRYEIDQDTAEIAVDMFSAYIKLKSTLALKQYMFDTWGIYRAYNNYKNAITNRLYIGEVYGIENAFPALISIHDFELAGEIMKQRSQRCCGMRKGNVYLFSGILRCRECGKIMQSNVVKGYKYYRCRTQFRMDAQCDHRQYVREDVLESYMLNSIEQMAAKYHGQYDEAEKKPAVSADKIRKKMSKLKDLYLADLIELDEYRKDYEDLKQQLSQMEPQKPKYFDRDALHREIEEYPNLSPQMKKEFWTRTVKRIEADNNGAFFVLPR

SEQ ID NO: 9332 - protein, 433 aa, Unknown
  Description of Unknown: Integrase B9333 sequence
  PTHR30461:SF3,SM00857,G3DSA:1.10.10.2600,IPR036162,PF13408, PS51737,G3DSA:3.40.50.1390,IPR025827,IPR006119,IPR038109, SSF53041,IPR011109,PTHR30461,PS51736,cd00338, PF00239
MRVAGYTRVSTQEQKLHGVSVAAQEQALADWAAEHGHEYVGCYNDAGISARSRYTKRPELLRLLQDVQAHRVELIIFTKLDRWFRNVGDYYEIQRVLDDCGVAWKAIWEDYETETASGRLKVNIMLSVAQDEADRTSERLKQTNAYRWAAGEVVQKLPAGYRREGKTVVVDEKMQPAVAAFFHTYLNTGSVAAAMDAANLLGLHMTRVGASKMLRNPFFTGTVRGISVPAYLTVEEFEQIQRRKATFVRTAKHNKTYLFSGLLVCGNCGAILHAQSNRSTVYYVCGRYLNRNGCSKEARAYANERKLEQWLLDHLEYLLAQEIQVAKVEGKADEKNDISRQNALTQRLERIKLLFINGDIDLPEYQTRKEEVEQQLQALRPRPRTRAERLDGLLPEGWKDVYTGLSREGRRAFWLRTVQRVVIHPDRHPEIVF

SEQ ID NO: 9333 - protein, 433 aa, Unknown
  Description of Unknown: Integrase B9334 sequence
  PTHR30461:SF3,SM00857,G3DSA:1.10.10.2600,IPR036162,PF13408, IPR025827,PS51736,PS51737,G3DSA:3.40.50.1390,IPR006119, IPR038109,PF07508,SSF53041,IPR011109,PTHR30461, mobidb-lite,cd00338,PF00239
MSGKITIVSKPPKLERKKRVAAYARVSSGKDAMLHSLSAQVSYYSDLIQNHGDWLYTGVYSDEAKTGTKDSRAGFQNLVADCRAGKIDMVITKSISRFARNTVTLLQTVREFKALGVDIYFEEQNIHTISGDGELMMTILASYAQEESRSASENQKWRIKRSFESGIPWDRTLMGYRMENEHYVIVPREAEIVRRIYNEYLSGSGYQLIAKRLNEEGVPSRFGGKWNQSAVSRILSNHTYTGNLLLQKTFRENHITKRKIFNNGELPKYLAEESHEAIVDEKTFQAVQEEKSRRAARFNKKSVPKKTYPFSSLMVCDNCGKNYRRKITKTGAVWVCGTYNSLGKAACASKQIPESTLQQVTADVLGQNDFTHEWLCHRIQHIRVCNDNTLIFYFKDGSEITRIWKDRSRSQSWTDEMKEAARQKTLERSKHNA

SEQ ID NO: 9334 - protein, 433 aa, Unknown
  Description of Unknown: Integrase B9335 sequence
  PTHR30461:SF3,SM00857,IPR006118,G3DSA:1.10.10.2600,IPR036162, PF13408,IPR025827,G3DSA:3.40.50.1390,PS00397,IPR006119, IPR038109,SSF53041,PTHR30461,Coil,PS51736, cd00338,PF00239
MRAALYIRVSTEEQARHGLSLAEQKESLERYAKAHEMEVVGIYEDAGISARKPYKKRPALLRLLEDCKSGKIDTILFIKLDRWFRNVAGYYDVQTQLDKYNVTWQATKEDYETRTASGRLKVNIMLSVAQDEADRTSERIKFINEGKKAKGIPSGSKTPLGITIKDGRYEIDQDTAEIAVDMFSAYIKLKSTLALRQYMFDTWGVYRAYNNYKNAITNRLYIGEVYGIENAFPALISTHDFDLAGEIMKQRSQRCCGTRKGNVYLFSGILRCRECGQIMQSNVVKGYKYYRCRTQFRMNAQCDHRQCVREDVLESYMLNSIEQMAAKYHGQYDEAEKKPALSADKIRKKMSKLKDLYLADLIELDEYRKDYEDLKQQLSQMEPQKPKHFDRDALHREIEEYPNLSPQMKKEFWTRTVKRIEADNNGAFFVLPR

SEQ ID NO: 9335 - protein, 433 aa, Unknown
  Description of Unknown: Integrase B9336 sequence
  PTHR30461:SF3,IPR036162,PS51737,IPR011109,PTHR30461, PS00397,PF00239,G3DSA:1.10.10.2600,IPR006119,SSF53041, cd00338,SM00857,IPR025827,IPR038109,PS51736, IPR006118,PF13408,G3DSA:3.40.50.1390,Coil
MMRVALYIRVSSEEQARHGLSLQEQRDALTRYAQEHKMTVVGIYEDAGISARKPYKKRPALLRLLSDCKAGKVDTILFIKLDRWFRSVAGYYDVQTQLDRYGVTWQATEEDYETRTASGRLKVNIMLSVAQDEADRTSERIKFINDGKRAKGQPAGSKAPLGYAIKDRQYQIDNDTVDAARDMFAAFIRLKSVLAVKRYMLDTWGIDRAYSKYVNYFRNRLYIGEVYGIENACPALVSKQDFDLVTDIIQHRSQRCAGVDTDRVYLFSGILHCKECGKTMQSETVKKTYTYYRCRTRMLDNSACPHTKRIREDALENYLLHELEGIAERNNRYYKKSEKKPTQSADSIRKKMGKLKTLYLNDLIDLDDYKTEYASLKRALETVEEKPETDLNALKDGLGEYDTYSREEKKEFWTRFIRRIDADDNGAFFVTPR

SEQ ID NO: 9336 - protein, 433 aa, Unknown
  Description of Unknown: Integrase B9337 sequence
  PTHR30461:SF3,IPR036162,PS51737,IPR011109,PTHR30461, PS00397,PF00239,G3DSA:1.10.10.2600,IPR006119,SSF53041, cd00338,SM00857,IPR025827,IPR038109,PS51736, IPR006118,PF13408,G3DSA:3.40.50.1390,Coil
MMRVALYIRVSSEEQARHGLSLQEQRDTLTRYAKANKMTVVGIYEDAGISARKPYKKRPALLRLLDDCKAGTVDTILFIKLDRWFRNVAGYYDVQTQLDKYGVTWQATEEDYETRTASGRLKVNIMLSVAQDEADRTSERIKFINDGKRAKGQPAGSKAPLGYIVKDRQYQIDNGTVDAARDMFAAYIRLQSVLGVKKYMLETWKIDRAYTKYVNYFRNRLYIGEVYGIENACPALISKQDFDIVNDILRQRSQRCAGVETDRVYLFSGLLHCKECGKTMQSETAKQIYTYYRCRTRMLDNSACQHKKRIREDALEDYLLHELEGIAERNNRYYKKAEKKATQSADAIRKKMSKLKTLYLNDLIELDEYKREYASLKKSLEAVEEKPKTNLDALRNGLAEYDTYSREEKKEFWTRFIRRIDADDDGAFFVTPR

SEQ ID NO: 9337 - protein, 433 aa, Unknown
  Description of Unknown: Integrase B9338 sequence
  PTHR30461:SF3,SM00857,IPR006118,G3DSA:1.10.10.2600,IPR036162, PF13408,PS51737,IPR025827,G3DSA:3.40.50.1390,IPR006119, IPR038109,IPR011109,SSF53041,PTHR30461,PS00397, PS51736,cd00338,PF00239
MRVAGYARVSTQEQKLHGVSVAAQEQALADWAAEHGHEYVGCYNDAGISARSRYTKRPELLRLLQDVQAHRVELIIFTKLDRWFRNVGDYYEIQRVLDDCGVAWKAIWEDYETETASGRLKVNIMLSVAQDEADRTSERLKQTNAYRWAAGEVVQKLPAGYRREGKTVVVDEKMQPAVAAFFHTYLNTGSVAAAMDAANLLGLHMTRVGASKMLRNPFFTGTVRGISVPAYLTEEEFEQIQRRKATFVRTAKHNKTYLFSGLLVCGNCGAILHAQSNRSTVYYVCGRYLNRNGCSKEARAYANERKLEQWLLDHLEYLLAQEIQVAKVEGKADEKNDISRQNALTQRLERIKLLFINGDIDLPEYQTRKEEVEQQLQALRPRPRTRAERLDGLLPEGWKDVYTGLSREGRRAFWLRTVQRVVIHPDRHPEIVF

SEQ ID NO: 9338 - protein, 433 aa, Unknown
  Description of Unknown: Integrase B9339 sequence
  PTHR30461:SF3,SM00857,G3DSA:1.10.10.2600,PS51736,PF13408, PS51737,IPR025827,G3DSA:3.40.50.1390,IPR036162,IPR006119, IPR038109,PF07508,IPR011109,SSF53041,PTHR30461, mobidb-lite,cd00338,PF00239
MERTIKRVDRKLPKQEKLIRAAAYCRVSSDKDAMLHSLSAQVSYFSTTIQNHPGWVYVGAYVDEGITGTKEDRPKFVKLMEDCRAGRIDLIITKSVTRFARNTVVLLDSIRELKSMGIDVFFEKENIHTLSADGELMISILASYAQEESRSASENQKWRVKRNFEEGKPWRYFMLGYRNVDGEMTIVPEEAEIVKGIFRDYLAGVGITTIVNNLNTSGFVTQSGYKFHNSAVERILRNYAYTGNLMLQTKYRENHLTKRTLVNNGELPKYHAFETHEPIISLEVFNAVQEEMKRRAEKYAPKAKRQQYPFSGLMVCANCGKNYRRKVTTTGPVWICPTYNSSGKASCASKAIPEGILMDTTASALGVDKFNEAFFHERVSKMVISVGNCITYHMKDGTEIQRVWKDRSRRESWTPEMKEKARQATTERWRSNG

SEQ ID NO: 9339 - protein, 433 aa, Unknown
  Description of Unknown: Integrase B9340 sequence
  SM00857,G3DSA:1.10.10.2600,IPR036162,PS51737,G3DSA:3.40.50.1390, IPR006119,IPR038109,PF07508,IPR011109,SSF53041, PF00239,PTHR30461,PS51736,Coil,cd00338
MREVKKAIAYFRVSTDMQKEDLSLETQEKGGEIFARDNNIEIVKKFTDVMSGGNRNRKGFIEAQKYLEENQGEIDYFIAYDVSRIARDAFAFLSLFNKLNLLNVKLKLINNPTLDSDSPMGKLILTILAAIFEFFRFDNADRVRDNMIVKVKEGKRMNNAPYGYRIIDKKMVIVPEEAELIKYIYQEYLKGHGIVALERMTGKDRSTIKQWLNNKVYAGYNIFGKRKMNKTTFKPMKNPDETKIVEAKGDWEPIIDIDTWEKVANRMSLNQELRMRNIEKTSYLLSGLLFHTCGSKFRGNAGRKGTYYYRCTGCSRSIKSDTLDKKVLDELFNSEFLDELNKIPLENNNKDNELKKLKAQKSKLKTREENLIELYADGDITKKQFKSKKVDIQNSLIDIEAKIIELENERNEVKQNLDFTRGNSGIRGFCGIY

SEQ ID NO: 9340 - protein, 433 aa, Unknown
  Description of Unknown: Integrase B9341 sequence
  PTHR30461:SF3,SM00857,G3DSA:1.10.10.2600,IPR036162,PF13408, PS51737,G3DSA:3.40.50.1390,IPR025827,IPR006119,IPR038109, IPR011109,SSF53041,PTHR30461,PS51736, cd00338,PF00239
MRVAGYTRVSTQEQKLHGVSVAAQEQALADWAAEHGHEYVGCYNDAGISARSRYTKRPELLRLLQDVQAHRVELIIFTKLDRWFRNVGDYYEIQRVLDDCGVAWKAIWEDYETETASGRLKVNIMLSVAQDEADRTSERLKQTNAYRWAAGEVVQKLPAGYRREGKTVVVDEKMQPAVAAFFHTYLNTGSVAAAMDAANLLGLHMTRVGASKMLRNPFFTGTVRGISVPAYLTEEEFEQIQRRKATFVRTAKHNKTYLFSGLLVCGNCGAILHAQSNRSTVYYVCGRYLNRNGCSKEARAYANERKLEQWLLDHLEYLLAQEIQVAKVEGKADEKNDISRQNALTQRLERIKLLFINGDIDLPEYQTRKEEVEQQLQALRPRPRTRAERLDGLLPEGWKDVYTGLSREGRRAFWLRTVQRVVIHPDRHPEIVF

SEQ ID NO: 9341 - protein, 433 aa, Unknown
  Description of Unknown: Integrase B9342 sequence
  PTHR30461:SF3,SM00857,G3DSA:1.10.10.2600,IPR036162,PF13408, PS51737,G3DSA:3.40.50.1390,IPR025827,PS51736,IPR006119, IPR038109,PF07508,IPR011109,SSF53041,PTHR30461, mobidb-lite,cd00338,PF00239
MSGKITIVSKPPKLERKKRVAAYARVSSGKDAMLHSLSAQVSYYNDLIQNHGDWLYAGVYSDEAKTGTKDSRAGFQNLVAECRAGKIDMVITKSISRFARNTVTLLQTVREFKTLGVDIYFEEQNIHTMSGDGELMMTILASYAQEESRSASENQKWRVKRNFEAGIPWDRTLLGYRMENEHYVIVPKEAEIVRRIYNEYLSGSGYNSIAKMLNDEGILSRFGGKWNQSAVSRVLSNYTYTGNLLLQKTFSENHITKRKMFNTGELPKYHAEDAHEAIIDMETFQAVQKEKERRAAQFIKKPAPKKIYPFTGLLVCGNCGKNYRRKVTKAGAVWVCGTYNSLGKAACASKQIPESTLQQVTADVLGQNDFTHEWLCHRIQHIRVCNDNTLIFYFKDGSEITRIWKDRSRSQSWTDEMKEAARQKTLERSKHNA

SEQ ID NO: 9342 - protein, 433 aa, Unknown
  Description of Unknown: Integrase B9343 sequence
  PTHR30461:SF3,SM00857,IPR006118,G3DSA:1.10.10.2600,IPR036162, PF13408,IPR025827,G3DSA:3.40.50.1390,PS00397,IPR006119, IPR038109,SSF53041,PTHR30461,Coil,PS51736, cd00338,PF00239
MRAALYIRVSTEEQARHGLSLAEQKESLERYAEAHEMEVVGIYEDAGISARKPYKKRPALLRLLEDCKSGKIDTILFIKLDRWFRNVAGYYDVQTQLDKYGVTWQATKEDYETRTASGRLKVNIMLSVAQDEADRTSERIKFINEGKKAKGIPAGSKTPLGITIKDGRYEIDQDTAEIAVDMFSAYIKLKSTLALRQYMFDTWGVYRAYNNYKNAITNRLYIGEVYGIENAFPALISTHDFDLAGEIMKQRSQRCCGTRKGNVYLFSGILRCRECGQIMQSNVVKGYKYYRCRTQFRINAQCDHRQCVREDVLESYMLNSIEQMAAKYHGQYDEAEKKPALSADKIRKKMSKLKDLYLADLIELDEYRKDYEDLKQQLSQMEPQKPKYFDRDALHREIEEYPNLSPQMKKEFWTRTVKRIEADNNGAFFVLPR

SEQ ID NO: 9343 - protein, 433 aa, Unknown
  Description of Unknown: Integrase B9344 sequence
  PTHR30461:SF3,SM00857,IPR006118,G3DSA:1.10.10.2600,IPR036162, PF13408,PS51737,IPR025827,G3DSA:3.40.50.1390,IPR006119, IPR038109,IPR011109,SSF53041,PTHR30461,PS00397, PS51736,cd00338,PF00239
MRVAGYARVSTQEQKLHGVSVAAQEQALADWAAEHGHEYVGCYNDAGISARSRYTKRPELLRLLQDVQAHRVELIIFTKLDRWFRNVGDYYEIQRVLDDCGVAWKAIWEDYETETASGRLKVNIMLSVAQDEADRTSERLKQTNAYRWAAGEVVQKLPAGYRREGKTVVVDEKMQPAVAAFFHTYLNTGSVAAAMDAANLLGLHMTRVGASKMLRNPFFTGTVRGISVPAYLTVEEFEQIQRRKATFVRTAKHNKTYLFSGLLVCGNCGAILHAQSNRSTVYYVCGRYLNRNGCSKEARAYANERKLEQWLLDHLEYLLAQEIQVAKVEGKADEKNDISRQNALTQRLERIKLLFINGDIDLPEYQTRKEEVEQQLQALRPRPRTRAERLDGLLPEGWKDVYTGLSREGRRAFWLRTVQRVVIHPDRHPEIVF

SEQ ID NO: 9344 - protein, 433 aa, Unknown
  Description of Unknown: Integrase B9345 sequence
  PTHR30461:SF3,SM00857,IPR006118,G3DSA:1.10.10.2600,IPR036162, PF13408,PS51737,IPR025827,G3DSA:3.40.50.1390,IPR006119, IPR038109,IPR011109,SSF53041,PTHR30461,PS00397, PS51736,cd00338,PF00239
MRVAGYARVSTQEQKLHGVSIAAQEQALADWAAEHGHEYVGCYNDAGISARSRYTKRPELLRLLQDVQAHRVELIIFTKLDRWFRNVGDYYEIQRVLDDCGVAWKAIWEDYETETASGRLKVNIMLSVAQDEADRTSERLKQTNAYRWAAGEVVQKLPAGYRREGKTVVVDEKMQPAVAAFFHTYLNTGSVAAAMDAANLLGLHMTRVGASKMLRNPFFTGTVRGISVPAYLTEEEFEQIQRRKATFVRTAKHNKTYLFSGLLVCGNCGAILHAQSNRSTVYYVCGRYLNRNGCSKEARAYANERKLEQWLLDHLEYLLAQEIQVAKVEGKADEKNDISRQNALTQRLERIKLLFINGDIDLPEYQTRKEEVEQQLQALRPRPRTRAERLDGLLPEGWKDVYTGLSREGRRAFWLRTVQRVVIHPDRHPEIVF

SEQ ID NO: 9345 - protein, 433 aa, Unknown
  Description of Unknown: Integrase B9346 sequence
  PTHR30461:SF3,IPR036162,PS51737,IPR011109,PTHR30461, PS00397,PF00239,G3DSA:1.10.10.2600,IPR006119,SSF53041, cd00338,SM00857,IPR025827,IPR038109,PS51736, IPR006118,PF13408,G3DSA:3.40.50.1390,Coil
MRAALYIRVSTEEQARHGLSLAEQKESLERYAEAHEMEVVGIYEDAGISARKPYKKRPALLRLLEDCKSGKIDTILFIKLDRWFRNVAGYYDVQTQLDKYGVTWQATKEDYETRTASGRLKVNIMLSVAQDEADRTSERIKFINEGKKAKGIPSGSKTPLGITIKDGRYEIDQNTAEIAVDMFSAYIKLKSTLALRRYMFDTWGIYRAYNNYKKAITNRLYIGEVYGIENAFPALINTHDFELAGEIIKQRSQRCCDMRKGNIYLFSGILRCRECGKIMQSNVVKGYKYYRCRTQFRMNAQCDHRQCVREDVLESYMLNSIEQMAAKYHGQYDEAGKKPALSADKIRKKMSKLKDLYLADLIELDEYRKDYEDLKQQLSQMEPQKPKYFDRDALHREIEEYPNLSPQMKKEFWTRTVKRIEADNNGAFFVLPR

SEQ ID NO: 9346 - protein, 433 aa, Unknown
  Description of Unknown: Integrase B9347 sequence
  PTHR30461:SF3,SM00857,G3DSA:1.10.10.2600,IPR036162,PF13408, IPR025827,PS51737,mobidb-lite,G3DSA:3.40.50.1390,IPR006119, IPR038109,PF07508,IPR011109,SSF53041,PTHR30461, PS51736,cd00338,PF00239
MERTIKRVDRKLPKQEKLIRTAAYCRVSSNKDAMLHSLSAQVSYFSSTIQNHPGWVYVGAYVDEGITGTKEDRPKFVKLMEDCRAGKIDLIITKSVTRFARNTVVLLDSIRELKSMGIDVFFEKENIHTLSADGELMISILASYAQEESRSASENQKWRVKRNFEEGKPWRYFMLGYRNVDGKMTIVPEEAEIVKGIFRDYLAGVGITTIVNNLNTSGFVTQSGYKFHNSAVERVLRNYAYTGNLMLQTKYRENHLTKRTLVNNGELPKYHAFETHEPIISLEIFNAVQEEMKRRAEKYAPKTQRQQYPFSGLMVCANCGKNYRRKVTATGPVWICPTYNSSGKASCASKAIPEGILRETTASALEVDKFNEAFFHERVSKMVISAGNCITYYFKDGTEIQRVWKDRSRRESWTPEMKEKARRATAERWKANG

SEQ ID NO: 9347 - protein, 432 aa, Unknown
  Description of Unknown: Integrase B9348 sequence
  PTHR30461:SF3,SM00857,IPR006118,G3DSA:1.10.10.2600,IPR036162, PF13408,PS51737,G3DSA:3.40.50.1390,IPR025827,IPR006119, IPR038109,IPR011109,SSF53041,PTHR30461,PS00397, PS51736,cd00338,PF00239
MRVALYIRVSTEEQAVHGLSVDDQKESLKKWAEENKHKVIDYYVDAGVSGRKSVSKRPELQRLLYDVGAGKIDLVAFTKLDRWFRNIGEFYKAQEVLDAHGVVWQATYEDYETATAAGRLKVNIMLSVAQDEADRTSERVKRIMQHKRELGLCPAGKTPIGLKAVESRLCIDEETAHIARRMFEDYIATGSVNHVKKMLVSEFGIMRANHHIKGALSNERYVGLNNGIKVCDALIPPEDFALVQRMLTARSVRNNGSQHTWLFSGLVWCAECGHRLVTHSTRQRGTDYFYYRCKNYELGICRHKKRINEAALEKYLLAKLPIEVQAHNAKLKAGKTKPPVDTAAIKRKMDKLTDLYLADLINREKYEMEYTALKEKLNVPPDPKPINEELVMSLLDAYDKLPPSGKKEVWNRFIRRIVVSENGDIFFELVWL

SEQ ID NO: 9348 - protein, 432 aa, Unknown
  Description of Unknown: Integrase B9349 sequence
  PTHR30461:SF3,SM00857,IPR006118,G3DSA:1.10.10.2600,IPR036162, PF13408,PS51737,G3DSA:3.40.50.1390,IPR025827,IPR006119, IPR038109,IPR011109,SSF53041,PTHR30461,PS00397, PS51736,cd00338,PF00239
MRAALYIRVSTEEQARNGLSLGDQRESLLAYAADNGMEVVGVYEDAGISARKPYKRRPALLRLLADCKDGKIDTILFVKLDRWFRSVAGYYAVQEELDRCHVTWQATREDYETRTASGRLKVNIMLSVAQDEADRTSERIKAINEGKRLKGQPTTWRTPIGICVKDRHYAIDEETADAARDMFPAFIRLQSILALRRYMATEWGIKRSYNKYKDALSNRLYLGEAFGVENVLPSLVDQETFNLAGRILEQRSQRNASADRIYLFTGILRCRECGRNMQPETVKKVYKYYRCRTHTLDPADCPHILRIREDVLEDYLLREFEGIAKKYYSKSKTAEKKPPKTAEQIKRKMQKLKDLYLSDLIEIEEYKKDYTELKQQLAAINPEPIKEFDLETLRRELKEYPDLDRQAKKEFWVRTIQRIDADNDGAFFVTPS

SEQ ID NO: 9349 - protein, 432 aa, Unknown
  Description of Unknown: Integrase B9350 sequence
  PTHR30461:SF3,SM00857,IPR006118,G3DSA:1.10.10.2600,IPR036162, PF13408,PS51737,G3DSA:3.40.50.1390,IPR025827,IPR006119, IPR038109,IPR011109,SSF53041,PTHR30461,PS00397, PS51736,cd00338,PF00239
MRVALYVRVSTEEQAVHGLSVDDQKDSLKRWAEENKHKVVDYYIDAGVSGRKSVSKRPELQRLLSDVEAGKIDLVAFTKLDRWFRNIGEFYKAQEVLDAHGVVWQATYEDYETATAAGRLKVNIMLSVAQDEADRTSERVKRIMQHKRELGLCPAGKTPIGLKAVESRLCIDEETAHIARRMFEDYIATGSVNHVKKMLVSEFGIMRANHHIKGALSNERYIGLNNGIKVCDALIPPEDFALVQRMLTARSIRNNGSRHTWLFSGLVWCAECGHRLVTHSTRQRGTDYFYYRCKNYEMGICRHKKRINEATLEKYLLAKLPIEVQAHNAKLKAGKTKPPVDTAAIKRKMDKLTDLYLADLISREKYEMEYTSLKEKLNVPPEPKPINEELVMSLLDAYDKLPPSGKKEVWNRFIRRIVISENGDIFFELVWL

SEQ ID NO: 9350 - protein, 432 aa, Unknown
  Description of Unknown: Integrase B9351 sequence
  PTHR30461:SF3,IPR036162,PS51737,IPR011109,PTHR30461, PS00397,PF00239,G3DSA:1.10.10.2600,IPR006119,SSF53041, cd00338,SM00857,IPR025827,IPR038109,PS51736, IPR006118,PF13408,G3DSA:3.40.50.1390,Coil
MRAALYIRVSSEEQARHGLSLQEQRDALMRYAKANKMLVVGIYEDAGISARKPYKQRPALLRLLDDCKAGKVDTILFIKLDRWFRNVAGYYDVQTQLDKYGVTWQATEEDYETRTASGRLKVNIMLSVAQDEADRTSERIKFINDGKRAKGQPAGSKAPLGYIVKDRQYQIDNDTVAAARDMFAAYVRLQSVLGVKKYMLERWGIDRAYTKYVNYFRNRLYIGEVYGIENACPALVSKQDFDIVNDILRKRSQRCAGVETDRVYLFSGLLHCKECGKTMQSETAKQIYTYYRCRTRMLDNSACQHKKRIREDALEDYLLHELEGIAERNNRYYKKAAKKPTQSADAIRKKMSKLKTLYLNDLIELDEYKREYASLKKSLEAVEEKPKTNLDALRNGLAEYDTYSREEKKEFWTRFIRRIDADDDGAFFVTPR

SEQ ID NO: 9351 - protein, 432 aa, Unknown
  Description of Unknown: Integrase B9352 sequence
  PTHR30461:SF3,SM00857,IPR006118,G3DSA:1.10.10.2600,IPR036162, PF13408,PS51737,G3DSA:3.40.50.1390,IPR025827,IPR006119, IPR038109,SSF53041,IPR011109,PTHR30461,PS00397, PS51736,cd00338,PF00239
MRVALYVRVSTEEQAVHGLSVDDQKESLKKWAEENKHKVVDYYVDAGVSGRKSVSKRPELQRLLSDVETGQIDLVAFTKLDRWFRNIGEFYKAQEVLDAHGVVWQATYEDYETATAAGRLKVNIMLSVAQDEADRTSERVKRIMQHKRELGLCPAGKTPIGLKAVESRLCIDEETAHIARRMFEDYIATGSVNHVKKMLVSEFGIMRANHHIKGALSNERYIGLNSGIKVCDALIPPEDFALVQRMLTARSIRNNGSRHTWLFSGLVWCAECGHRLVTHSTRQRGTDYFYYRCKNYELGICRHKKRINKAALEKYLLAKLPIEVQAHNAKLKAGKTKPPVDTAAIKRKMDKLTDLYLADLISREKYEIEYTSLKEKLNVPPEPKPINEELVMSVLDAYGKLPPSGKKEVWNRFIRRIVVSENGDIFFELVWL

SEQ ID NO: 9352 - protein, 432 aa, Unknown
  Description of Unknown: Integrase B9353 sequence
  PTHR30461:SF3,IPR036162,PS51737,IPR011109,PTHR30461, PS00397,PF00239,G3DSA:1.10.10.2600,IPR006119,SSF53041, cd00338,SM00857,IPR025827,IPR038109,PS51736, IPR006118,PF13408,G3DSA:3.40.50.1390,Coil
MRAALYIRVSSDEQARHGLSLQEQRDALTRYAQEHKMTVAGIYEDAGISARKPYKKRPALLRLLGDCKVGKVDTILFIKLDRWFRNVAGYYDVQTQLDQYGVTWQATEEDYETRTASGRLKVNIMLSVAQDEADRTSERIKFINDGKRAKGQPAGSKAPLGYAIKDRQYQIDNGTVDAARDMFAAFIRLKSVLAVKRYMLDTWGIDRAYSKYVNYFRNRLYIGEVYGIENACPALVSKQDFDLVTDIIQHRSQRCAGVDTDRVYLFPGILHCKECGKTMQSETVKKTYTYYRCRTRMLDNSACPHTKRIREDALEDYLLHELEGIAERNNRYYKKADKKPTQSADSIRKKMGKLKTLYLNDLIELDEYKREYASLKKALEATEERPEINLDALKKELQEYETYSRDEKKEFWTRFIRRIDADNDGAFFVTPR

SEQ ID NO: 9353 - protein, 432 aa, Unknown
  Description of Unknown: Integrase B9354 sequence
  PTHR30461:SF3,IPR036162,PS51737,IPR011109,PTHR30461, PS00397,PF00239,G3DSA:1.10.10.2600,IPR006119,SSF53041, cd00338,SM00857,IPR025827,IPR038109,PS51736, IPR006118,PF13408,G3DSA:3.40.50.1390,Coil
MRAALYIRVSSEEQARHGLSLQEQRDALTRYAKANEMTVVGIYEDAGISARKPYKKRPALLRLLDDCKAGKIDTILFIKLDRWFRNVAGYYDVQTQLDKYGVTWQATEEDYETRTASGRLKVNIMLSVAQDEADRTSERIKFINDGKRAKGQPAGSKAPLGYIVKDRQYQIDNDMADAARDMFAAYIRLQSVLGVKKYMLETWGIDRAYTKYVNYFRNRLYIGEVYGIENACPALISKQDFDIVNDILRQRSQRCAGVETDRVYLFSGLLHCKECGKTMQSETAKQIYTYYRCRTRMLDNSACQHKKRIREDALEDYLLHELEGIAERNNRYYKKAEKKPTQSADAIRKKMSKLKTLYLNDLIELDEYKQEYASLKKSLEAVEEKPKTNLDALRNGLAEYDTYSREEKKEFWTRFIRRIDADDDGAFFVTPR

SEQ ID NO: 9354 - protein, 432 aa, Unknown
  Description of Unknown: Integrase B9355 sequence
  PTHR30461:SF3,IPR036162,PS51737,IPR011109,PTHR30461, PS00397,PF00239,G3DSA:1.10.10.2600,IPR006119,SSF53041, cd00338,SM00857,IPR025827,IPR038109,PS51736, IPR006118,PF13408,G3DSA:3.40.50.1390,Coil
MRVALYIRVSSEEQARHGLSLQEQRDALIRYAKANKMTVAGIYEDAGISARKPYKKRPALLRLLDDCKAGKVDTILFIKLDRWFRNVAGYYDVQTRLDQYGVTWQATEEDYETRTASGRLKVNIMLSVAQDEADRTSERIKFINDGKRAKGQPAGSKAPLGYIIKGRQYQIDNGTADAARDMFAAYIRLQSVLGVKRYMLETWGIDRAYTKYVNYFRNRLYIGEVYGIENACPALVSKQDFDIVNDILRQRSQRCAGIETDRVYLFSGLLHCKECGKTMQSETAKQIYTYYRCRTRMLDTSACQHKKRIREDALEAYLLHELEGIAERNNRYYKKAEKKPTQSADAIRKKMDKLKTLYLNDLIELDEYKKEYTTLKKSLEAVEEKPKTNLDALRNGLAEYDTYLREEKKEFWTRFIRRIDADDDGAFFVTPR

SEQ ID NO: 9355 - protein, 432 aa, Unknown
  Description of Unknown: Integrase B9356 sequence
  PTHR30461:SF3,SM00857,G3DSA:1.10.10.2600,IPR036162,PF13408, IPR025827,G3DSA:3.40.50.1390,mobidb-lite,PS51737,IPR006119, IPR038109,PF07508,SSF53041,IPR011109,PTHR30461, PS51736,cd00338,PF00239
MERSIKQTIFYKPPSEQLKRVAGYARVSSGKDAMLHSLSAQVSYYSEFIQKHRGWTYVGVYADEAKTGTKDERESFQRLLADCHAGKIDMVITKSISRFARNTVTLLETVRELKSLGIDVYFEEQNIHTMSADGELMLSILASYAQEESRSASENQKWRIRKNFHEGMPWNGTMLGYRYENGKYIIVPEEAEIVRKIYSYYTTGLGITAIMKTLNEKHISTRNGNLWCKSSVMKVLRNYAYTGNLLLQKTFRENYLTKRTLVNNGELPQYHAVNTHEAIIPLETFEAVQAEIACRAEKHTRTGSGQKVYPFTGLLTCAICGKHYRRKVTATGPVWICSTYNTLGKAACASKQIPEDTLMTVAAEALGTDTFDADAFYNKITAVRVEVGNTLVFCFKDGIETVKRWSDRSRAESWTPEMREAARKKTQRRGEH

SEQ ID NO: 9356 - protein, 432 aa, Unknown
  Description of Unknown: Integrase B9357 sequence
  PTHR30461:SF3,IPR036162,PS51737,IPR011109,PTHR30461, PS00397,PF00239,G3DSA:1.10.10.2600,IPR006119,SSF53041, cd00338,SM00857,IPR025827,IPR038109,PS51736, IPR006118,PF13408,G3DSA:3.40.50.1390,Coil
MRAALYIRVSSDEQARHGLSLQEQRDALTRYAQEHKMTVAGIYEDAGISARKPYKKRPALLRLLGDCKVGKVDTILFIKLDRWFRNVAGYYDVQTQLDQYGVTWQATEEDYETRTASGRLKVNIMLSVAQDEADRTSERIKFINDGKRAKGQPAGSKAPLGYAIKDRQYQIDNGTVDAARDMFAAFIRLKSVLAVKRYMLDTWGIDRAYSKYVNYFRNRLYIGEVYGIENACPALVSKQDFDLVTDIIQHRSQRCAGVDTDRVYLFSGILRCKECGKTMQSETVKKTYTYYRCRTRMLDNSACPHTKRIREDALEDYLLHEMEGIAERNNRYYKKADKKPTQSADSIRKKMGKLKTLYLNDLIELDEYKREYASLKKALEATEERPEINLDALKKELQEYETYSRDEKKEFWTRFIRRIDADNDGAFFVTPR

SEQ ID NO: 9357 - protein, 432 aa, Unknown
  Description of Unknown: Integrase B9358 sequence
  PTHR30461:SF3,IPR036162,PS51737,IPR011109,PTHR30461, PS00397,PF00239,G3DSA:1.10.10.2600,IPR006119,SSF53041, SM00857,IPR025827,IPR038109,PS51736,cd03768, IPR006118,PF13408,G3DSA:3.40.50.1390,PF07508
MARKRTNLIGNTPSVRETKVAIYIRVSTIHQVDKDSIPMQKKDLIAYCQLILGTDNYEIFEDAGYSGKNTDRPAFQNMMGRIRKGEFTHVLVWKIDRVSRNLLDFAEMYEELRSLRVTFVSKNEQFDTSTAIGEAMLKIILVFAELERNMTSERVTATMISRANSGQWNGGRIPFGYSYDPKEKIFSIREDEASICRELKDLYLLNRSLAYVSRALNEKGYKTRAGVSWSPHSVWIIASSPFYAGIYRYNRYKGVESRTINPEEEWVMIQNHHPAIFTLEEHQAMRSIMKSNQRNMDNLPGRVHLSTKTHIFQGIMYCDKCGSKMVSTPGRLHVDGYRTSNYGCPLRRNTKKCNNPTVNDIVIGEFVINYILNMLNAKKTFSTINTPDELNAALLSGSVFSEVSSVEENGLNSFFNLLSRYCLLYTSPSPRD

SEQ ID NO: 9358 - protein, 432 aa, Unknown
  Description of Unknown: Integrase B9359 sequence
  PTHR30461:SF3,SM00857,IPR006118,G3DSA:1.10.10.2600,IPR036162, PF13408,PS51737,G3DSA:3.40.50.1390,IPR025827,IPR006119, IPR038109,IPR011109,SSF53041,PTHR30461,PS00397, PS51736,cd00338,PF00239
MRAALYIRVSTEEQARHGLSLGDQRESLLAYAADNGMEVVGVYEDAGISARKPYKRRPALLRLLEDCKDGKIDTILFVKLDRWFRNVAGYYAVQEELDRCHVTWQATREDYETRTASGRLKVNIMLSVAQDEADRTSERIKAINEGKRLKGQPTTWRTPIGICVKDRHYAIDEETADAARDMFPAFIRLQSILALRRYMATEWGIKRSYNKYKDALSNRLYLGEAFGVENVLPALVDQETFNLAGRILEQRSQRNASADRIYLFTGILRCRECGRNMQPETVKQVYKYYRCRTHTLDPADCPHILRIREDVLEDYLLREFEGIAKKYYSKSKTAEKKPPKTAEQIKRKMQKLKDLYLSDLIEIEEYKKDYTELKQQLAAINPEPIKEFDLETLRRELKEYPDLDRQAKKEFWVRTIQRIDADNDGAFFVTPS

SEQ ID NO: 9359 - protein, 432 aa, Unknown
  Description of Unknown: Integrase B9360 sequence
  PTHR30461:SF3,SM00857,IPR006118,G3DSA:1.10.10.2600,IPR036162, PF13408,PS51737,IPR025827,G3DSA:3.40.50.1390,IPR006119, IPR038109,SSF53041,IPR011109,PTHR30461,PS00397, PS51736,cd00338,PF00239
MRVALYVRVSTEEQAVHGLSVDDQKESLKKWAEENKHKVVDYYVDAGVSGRKSVSKRPELQRLLSDVETGQIDLVAFTKLDRWFRNIGEFYKAQEVLDAHGVVWQATYEDYETATAAGRLKVNIMLSVAQDEADRTSERVKRIMQHKRELGLCPAGKTPIGLKAVESRLCIDEETAHIARRMFEDYIATGSVNHVKKMLVSEFGIMRSNHHIKGALSNERYIGLNSGIKVCDALIPPEDFALVQRMLTARSIRNNGSRHTWLFSGLVWCAECGHRLVTHSTRQRGTDYFYYRCKNYELGICRHKKRINEAALEKYLLAKLPIEVQAHNAKLKAGKTKPPVDTAAIKRKMDKLTDLYLADLISREKYEIEYTSLKEKLNVPPEPKPINEELVMSVLDAYGKLPPSGKKEVWNRFIRRIVVSENGDIFFELVWL

SEQ ID NO: 9360 - protein, 432 aa, Unknown
  Description of Unknown: Integrase B9361 sequence
  PTHR30461:SF3,SM00857,IPR006118,G3DSA:1.10.10.2600,IPR036162, PF13408,PS51737,G3DSA:3.40.50.1390,IPR025827,IPR006119, IPR038109,SSF53041,IPR011109,PTHR30461,PS00397, PS51736,cd00338,PF00239
MRVALYIRVSTEEQARHGLSLGDQRESLLAYAANNGMEVVGVYEDAGISARKPYRQRPALLRLLADCKDGKIDTILFVKLDRWFRSVAGYYAVQEELDRCHVTWQATREDYETRTASGRLKVNIMLSVAQDEADRTSERIKAINEGKRLKGQPTTWRTPIGICVKNRHYAIDEETADAARDMFPAFIRLQSILALRRYMATEWGIKRSYNKYKDALSNRLYLGEAFGVENALPALVDQETFNLARRILEQRSQRNASADRIYLFTGILRCRECGRNMQPETVKQVYKYYRCRTHTLDPADCPHILRIREDVLEDYLLREFEGIAKKYYSKSKTAEKKPPKTAEQIKRKMQKLKDLYLSDLIEIEEYKKDYTELKQQLAAINPEPIKEFDLETLRRELKEYPDLDRQAKKEFWIRTIQRIDADNDGAFFVTPS

SEQ ID NO: 9361 - protein, 432 aa, Unknown
  Description of Unknown: Integrase B9362 sequence
  PTHR30461:SF3,IPR036162,PS51737,IPR011109,PTHR30461, PS00397,PF00239,G3DSA:1.10.10.2600,IPR006119,SSF53041, cd00338,SM00857,IPR025827,IPR038109,PS51736, IPR006118,PF13408,G3DSA:3.40.50.1390,Coil
MRAALYIRVSSEEQARHGLSLQEQRGTLTKYAKANKMTVVGIYEDAGISARKPYKKRPALLRLLDDCKAGKVDTILFIKLDRWFRNVAGYYDVQTQLDKYGVTWQATEEDYETRTASGRLKVNIMLSVAQDEADRTSERIKFINDGKRAKGQPAGSKAPLGYIVKDRQYQIDNDTVAAARDMFAAYIRLQSVLGVKRYMLETWGIDRAYTKYVNYFRNRLYIGEVYGIENACPALVSKQDFDIVNDILRQRSQRCAGVETDRVYLFSGLLHCKECGKTMQSETAKQIYTYYRCRTRMLDNSACRHKKRIREDALEDYLLHELEGIAERNNRYYKKAEKKPTQSADAIRKKMSKLKTLYLNDLIELDEYKREYASLKKALETVEEKPKTNLDALRNGLAEYDTYSREEKKEFWTRFIRRIDADDDGAFFVTPR

SEQ ID NO: 9362 - protein, 432 aa, Unknown
  Description of Unknown: Integrase B9363 sequence
  PTHR30461:SF3,SM00857,IPR006118,G3DSA:1.10.10.2600,IPR036162, PF13408,PS51737,G3DSA:3.40.50.1390,IPR025827,IPR006119, IPR038109,IPR011109,SSF53041,PTHR30461,PS00397, PS51736,cd00338,PF00239
MRVALYIRVSTEEQARHGLSLGDQRESLLAYAANNGMEVVGVYEDAGISARKPYRQRPALLRLLADCKDGKIDTILFVKLDRWFRSVAGYYAVQEELDRCHVTWQATREDYETRTASGRLKVNIMLSVAQDEADRTSERIKAINEGKRLKGQPTTWRTPIGICVKNRHYAIDEETADAARDMFPAFIRLQSILALRRYMATEWGIKRSYNKYKDALSNRLYLGEAFGVENVLPSLVDQETFDLAGKILERRSQRNASADRIYLFTGILRCRECGRNMQPETVKQVYKYYRCRTHTLDPADCPHILRIREDVLEDYLLREFEGIAKKYYSKSKTAEKKPPKTAEQIKRKMQKLKELYLSDLIEIEEYKKDYTKLKQQLTAINPEPIKEFDLETLRRELKEYPDLDRQAKKEFWVRTIQRIDADNDGAFFVTPS

SEQ ID NO: 9363 - protein, 432 aa, Unknown
  Description of Unknown: Integrase B9364 sequence
  PTHR30461:SF3,IPR036162,PS51737,IPR011109,PTHR30461, PS00397,PF00239,G3DSA:1.10.10.2600,IPR006119,SSF53041, cd00338,SM00857,IPR025827,IPR038109,PS51736, IPR006118,PF13408,G3DSA:3.40.50.1390,Coil
MRAALYIRVSSDEQARHGLSLQEQRDALTRYAQEHKMTVAGIYEDAGISARKPYKKRPALLRLLGDCKAGKVDTILFIKLDRWFRNVAGYYDVQTQLDRYGVTWQATEEDYETRTASGRLKVNIMLSVAQDEADRTSERIKFINDGKRAKGQPAGSKAPLGYAIKDRQYQIDNGTADAARDMFAAFIRLKSVLAVKRYMLDTWGIDRAYNKYVNYFRNRLYIGEVYGIENACPALVSKQDFDLVNDIIRQRSQRCAGVGTDRVYLFSGILRCKECGKTMQSETVKKTYTYYRCRTRMFDNSACPHTKRIREDALEDYLLHEMEGIAERNNRYYKKAEKKPTHSADSIRKKMSKLKTLYLNDLIELGDYKAEYASLKRALETVEEKPETDLDALKDGLGEYDTYSRNEKKEFWTRFIRRIDADNDGAFFVTPR

SEQ ID NO: 9364 - protein, 432 aa, Unknown
  Description of Unknown: Integrase B9365 sequence
  PTHR30461:SF3,IPR036162,PS51737,IPR011109,PTHR30461, PS00397,PF00239,G3DSA:1.10.10.2600,IPR006119,SSF53041, cd00338,SM00857,IPR025827,IPR038109,PS51736, IPR006118,PF13408,G3DSA:3.40.50.1390,Coil
MRAALYIRVSSEEQARHGLSLQEQRDALARYAKANKMTVVGIYEDAGISARKPYKKRPALLRLLDDCKAGKVDTILFIKLDRWFRNVAGYYDVQTQLDRYGVTWQATEEDYETRTASGRLKVNIMLSVAQDEADRTSERIKFINDGKRAKGQPAGSKAPLGYIIKDRQYQIDNDTADAARDMFAAYIRLKSVLAVKRYMLDTWGIDRAYNKYVNYFHNRLYIGEVYGIENACPSLVSKQDFDLVTDVSRQRSQRCAGVDVDRVYLFSGLLHCKECGRTMQSETAKQIYTYYRCRTRMLDNSACLHMKRIREDLLEEYLLHELVGIAERNNRYYKKAKKKPTQSADAIRKKIGKLKTLYLNDLIELDDYKAEYASLKKSLETVEEKPKTDLDALRNGLGEYDTYSREEKKEFWTRFIRRIDADNDGAFFVTPR

SEQ ID NO: 9365 - protein, 432 aa, Unknown
  Description of Unknown: Integrase B9366 sequence
  PTHR30461:SF3,IPR036162,PS51737,IPR011109,PTHR30461, PS00397,PF00239,G3DSA:1.10.10.2600,IPR006119,SSF53041, cd00338,SM00857,IPR025827,IPR038109,PS51736, IPR006118,PF13408,G3DSA:3.40.50.1390,Coil
MRAALYIRVSSEEQARHGLSLQEQRDTLTRYAKANKMTVVGIYEDAGISARKPYKKRPALLRLLDDCKAGKVDTILFIKLDRWFRNVAGYYDVQTRLDKYGVTWQATEEDYETRTASGRLKVNIMLSVAQDEADRTSERIKFINDGKRAKGQPAGSKAPLGYIVKDRQYQIDNDTADAARDMFAAYIRLQSVLGVKRYMLETWKIDRAYTKYVNYFRNRLYIGEVYGIENACPALISKQDFDIVNDILRQRSQRCAGVETDRVYLFSGLLHCKECGKTMQSETAKQIYTYYRCRTRMLDNSACQHKKRIREDALEDYLLHELEGIAERNNRYYKKAEKKPTQSADAIRKKMSKLKTLYLNDLIELDEYKREYASLKKSLEDVEEKPKTNLDALRNGLAEYDTYSREEKKEFWTRFIRRIDADDDGAFFVTPR

SEQ ID NO: 9366 - protein, 432 aa, Unknown
  Description of Unknown: Integrase B9367 sequence
  PTHR30461:SF3,IPR036162,PS51737,IPR011109,PTHR30461, PS00397,PF00239,G3DSA:1.10.10.2600,IPR006119,SSF53041, cd00338,SM00857,IPR025827,IPR038109,PS51736, IPR006118,PF13408,G3DSA:3.40.50.1390,Coil
MRAALYIRVSSEEQARHGLSLQEQRDTLTRYAKANKMTVVGIYEDAGISARKPYKKRPALLRLLDDCKARKVDTILFIKLDRWFRNVAGYYDVQTQLDKYGVTWQATEEDYETRTASGRLKVNIMLSVAQDEADRTSERIKFINDGKRAKGQPAGSKAPLGYIVKDRQYQIDNDMADAARDMFAAYIRLQSVLGVKKYMLETWGIDRAYTKYVNYFRNRLYIGEVYGIENACPALISKQDFDIVNDILRQRSQRCAGVETDRVYLFSGLLHCKECGKTMQSETAKQIYTYYRCRTRMLDNSACQHKKRIREDALEDYLLHELEGIAERNNRYYKKAEKKPTQSADAIRKKMSKLKTLYLNDLIELDEYKQEYASLKKSLEAVEEKPKTNLDALRNGLAEYDTYSREEKKEFWTRFIRRIDADDDGAFFVTPR

SEQ ID NO: 9367 - protein, 432 aa, Unknown
  Description of Unknown: Integrase B9368 sequence
  PTHR30461:SF3,SM00857,IPR006118,G3DSA:1.10.10.2600,IPR036162, PF13408,IPR025827,PS51737,G3DSA:3.40.50.1390,IPR006119, IPR038109,IPR011109,SSF53041,PTHR30461,PS00397, PS51736,cd00338,PF00239
MRVALYIRVSTEEQARHGLSLGDQRESLLAYAADNGMEVVGVYEDAGISARKPYKQRPALLRLLADCKDGKIDTILFVKLDRWFRSVAGYYAVQEELDRCHVTWQATREDYETRTASGRLKVNIMLSVAQDEADRTSERIKAINEGKRLKGQPTTWRTPVGICVKDRHYAIDEETADAARDMFPAFIRLQSILALRRYMATEWGIKRSYNKYKDALSNRLYLGEAFGVENVLPSLVDQETFDLAGKILERRSQRNASADRIYLFTGILRCRECGRNMQPETVKKVYKYYRCRTHTLDPDDCPHILRIREDVLEDYLLREFEGIAKKYYSKSKTAEKKPPKTAEQIKRKMQKLKELYLSDLIEIEEYKKDYTDLKQQLAAINPEPIKEFDLETLRRELKEYPDLDRQAKKEFWVRTIQRIDADNDGAFFVTPS

SEQ ID NO: 9368 - protein, 432 aa, Unknown
  Description of Unknown: Integrase B9369 sequence
  PTHR30461:SF3,IPR036162,PS51737,IPR011109,PTHR30461, PS00397,PF00239,G3DSA:1.10.10.2600,IPR006119,SSF53041, cd00338,SM00857,IPR025827,IPR038109,PS51736, IPR006118,PF13408,G3DSA:3.40.50.1390,Coil
MRAALYIRVSSEEQARHGLSLQEQRETLVKYARENKMTVAGIYEDAGISARKPYKKRPALLRLLDDCKAGKIDTILFIKLDRWFRNVAGYYDVQTQLDKYGVTWQATKEDYETRTASGRLKVNIMLSVAQDEADRTSERIKFINDGKRAKGQPAGSKAPLGYIIKDRQYQIDNDTADAARDMFAAYVRLQSVLGVKRYMLETWGIDRAYTKYVNYFRNRLYIGEVYGIENACPALVSKQDFDIVNDILRQRSQRCAGVETDRVYLFSGLLHCKECGKTMQSETAKHIYTYYRCRTRMLDNSACQHKKRIREDALEDYLLHELEGIAERNNRYYKKAEKKPTQSADAIRKKMGKLKTLYLNDLIELDEYKKEYTTLKKSIEAVEEKPKTNLDALRNGLAEYDTYSREEKKEFWTRFIRRIDADDDGAFFVTPR

SEQ ID NO: 9369 - protein, 432 aa, Unknown
  Description of Unknown: Integrase B9370 sequence
  PTHR30461:SF3,IPR036162,PS51737,IPR011109,PTHR30461, PS00397,PF00239,G3DSA:1.10.10.2600,IPR006119,SSF53041, cd00338,SM00857,IPR025827,IPR038109,PS51736, IPR006118,PF13408,G3DSA:3.40.50.1390,Coil
MRAALYIRVSSDEQARHGLSLQEQRDALTRYAQEHKMTVAGIYEDAGISARKPYKKRPALLRLLGDCKVGKVDTILFIKLDRWFRNVAGYYDVQTQLDQYGVTWQATEEDYETRTASGRLKVNIMLSVAQDEADRTSERIKFINDGKRAKGQPAGSKAPLGYAIKDRQYQIDNGTVDAARDMFAAFIRLKSVLAVKRYMLDTWGIDRAYNKYVNYFRNRLYIGEVYGIENACPALVSKQDFDLVNDIIRQRSQRCAGVGTDRVYLFSGILRCKECGKTMQSETVKKTYTYYRCRTRMLDNSACPHTKRIREDALEDYLLHEMEGIAERNNRYYKKADKKPTQSADSIRKKMGKLKTLYLNDLIELDEYKREYASLKKALEATEERPEINLDALKKELQEYETYSRDEKKEFWTRFIRRIDADNDGAFFVTPR

SEQ ID NO: 9370 - protein, 432 aa, Unknown
  Description of Unknown: Integrase B9371 sequence
  PTHR30461:SF3,SM00857,G3DSA:1.10.10.2600,IPR036162,PF13408, PS51737,IPR025827,G3DSA:3.40.50.1390,IPR006119,IPR038109, IPR011109,SSF53041,PTHR30461,Coil,PS51736, cd00338,PF00239
MRVALYIRVTSEEQARHGLSLQEQRDALIRYAKANKMTVVGIYEDAGISARKPYKKRPALLQLLDDCKAGKVDTILFIKLDRWFRNVAGYYDVQTQLDKYGVTWQATEEDYETRTASGRLKVNIMLSVAQDEADRASERVKFINDGKRAKGQPAGSKAPLGYIIKDRKYQIDNDTADAARDMFAAYVRLQSVLGVKKYMLETWGVDRAYTKYVNYFRNRLYIGEVYGIENACPALVSKQDFDIVNDILRQRSQRCAGVDTDRVYLFSGLLHCKECGKTMQSETAKQIYTYYRCRTRMLDNSACQHKKRIREDTLEDYLLHELEGIAERNNRYYKKAEKKPTQSADAIRKKMGKLKTLYLNDLIELDEYKREYASLKKTLEAVEEKPKTNLDALRNGLAEYDTYSKEEKKEFWTRFIRRIDADDDGAFFVTPR

SEQ ID NO: 9371 - protein, 432 aa, Unknown
  Description of Unknown: Integrase B9372 sequence
  PTHR30461:SF3,IPR036162,PS51737,IPR011109,PTHR30461, PS00397,PF00239,G3DSA:1.10.10.2600,IPR006119,SSF53041, cd00338,SM00857,IPR025827,IPR038109,PS51736, IPR006118,PF13408,G3DSA:3.40.50.1390,Coil
MRAALYIRVSSEEQARHGLSLQEQRNTLTSYAKANKMTVVGIYEDAGISARKPYKKRPALLRLLDDCKAGKVDTILFIKLDRWFRNVAGYYDVQTQLDKYGVTWQATEEDYETRTASGRLKVNIMLSVAQDEADRTSERIKFINDGKRAKGQPAGSKAPLGYIVKDRQYQIDNGTADAARDMFAAYIRLQSVLGVKKYMLETWGINRAYTKYVNYFRNRLYIGEVYGIENACPALISKQDFDIVNDILRQRSQRCAGVETDRVYLFSGLLHCKECGKTMQSETAKQIYTYYRCRTRMLDNSACQHKKRIREDALEDYLLHELEGIAERNNRYYKKAEKKPTQSADAIRKKMSKLKTLYLNDLIELDEYKREYASLKKTLETVEEKPRTNLDALRNGLAEYDTYSREEKKEFWMRFIRRIDADDDGAFFVTPR

SEQ ID NO: 9372 - protein, 432 aa, Unknown
  Description of Unknown: Integrase B9373 sequence
  PTHR30461:SF3,SM00857,IPR006118,G3DSA:1.10.10.2600,IPR036162, PF13408,PS51737,G3DSA:3.40.50.1390,IPR025827,IPR006119, IPR038109,IPR011109,SSF53041,PTHR30461,PS00397, PS51736,cd00338,PF00239
MRAALYIRVSTEEQARHGLSLGDQRESLLTYAADNGMEVVGVYEDAGISARKPYKRRPALLRLLADCKDGKIDTILFVKLDRWFRSVAGYYAVQEELDRCHVTWQATREDYETRTASGRLKVNIMLSVAQDEADRTSERIKAINEGKRLKGQPTTWRTPIGICVKNRHYAIDEETADAARDMFPAFIRLQSILALRRYMATEWGIKRSYNKYKDALGNRLYLGEAFGVENALPALIDQETFDLAGKILERRSQRNASADRIYLFTGILRCRECGRNMQPETVKQVYKYYRCRTHTLDPADCPHILRIREDVLEDYLLREFEGIAKKYYSKSKTAEKKPPKTAEQIKRKMQKLKDLYLSDLIEIEEYKKDYTDLKQQLAAINPEPIKEFDLETLRRELKEYPDLDRQAKKEFWVRTIQRIDADNDGAFFVTPS

SEQ ID NO: 9373 - protein, 432 aa, Unknown
  Description of Unknown: Integrase B9374 sequence
  PTHR30461:SF3,IPR036162,PS51737,IPR011109,PTHR30461, PS00397,PF00239,G3DSA:1.10.10.2600,IPR006119,SSF53041, cd00338,SM00857,IPR025827,IPR038109,PS51736, IPR006118,PF13408,G3DSA:3.40.50.1390,Coil
MRAALYIRVSSDEQARHGLSLQEQRDALTRYAQEHKMTVAGIYEDAGISARKPYKKRPALLRLLGDCKAGKVDTILFIKLDRWFRNVAGYYDVQTQLDRYGVTWQATEEDYETRTASGRLKVNIMLSVAQDEADRTSERIKFINDGKRAKGQPAGSKAPLGYAIKDRQYQIDNGTADAARDMFAAFIRLKSVLAVKRYMLDTWGIDRAYNKYVNYFRNRLYIGEVYGIENACPALVSKQDFDLVNDIIRQRSQRCAGVGTDRVYLFSGILRCKECGKTMQSETVKKTYTYYRCRTRMLDNSACPHTKRIREDALEDYLLHEMEGIAERNNRYYKKADKKPTQSADSIRKKMGKLKTLYLNDLIELDEYKREYASLKKALEATEERPEINLDALKKELQEYETYSRDEKKEFWTRFIRRIDADNDGAFFVTPR

SEQ ID NO: 9374 - protein, 432 aa, Unknown
  Description of Unknown: Integrase B9375 sequence
  PTHR30461:SF3,SM00857,IPR006118,G3DSA:1.10.10.2600,IPR036162, PF13408,PS51737,G3DSA:3.40.50.1390,IPR025827,IPR006119, IPR038109,IPR011109,SSF53041,PTHR30461,PS00397, PS51736,cd00338,PF00239
MRAALYIRVSTEEQARHGLSLGDQRESLLAYAADNGMEVVGVYEDAGISARKPYKRRPALLRLLEDCKDGKIDTILFVKLDRWFRSVAGYYAVQEELDRCHVTWQATREDYETRTASGRLKVNIMLSVAQDEADRTSERIKAINEGKRLKGQPTTWRTPIGICVKDRHYAIDEETADAARDMFPAFIRLQSILALRRYMATEWGIKRSYNKYKDALSNRLYLGEAFGVENVLPALVDQETFNLAGRILEQRSQRNASADRIYLFTGILRCRECGRNMQPETVKQVYKYYRCRTHTLDPADCPHILRIREDVLEDYLLREFEGIAKKYYSKSKTAEKKPPKTAEQIKRKMQKLKDLYLSDLIEIEEYKKDYTDLKQQLAAINPEPIKEFDLETLRRELKEYPDLDRQAKKEFWVRTIQRIDADNDGAFFVTPS

SEQ ID NO: 9375 - protein, 432 aa, Unknown
  Description of Unknown: Integrase B9376 sequence
  PTHR30461:SF3,IPR036162,PS51737,IPR011109,PTHR30461, PS00397,PF00239,G3DSA:1.10.10.2600,IPR006119,SSF53041, cd00338,SM00857,IPR025827,IPR038109,PS51736, IPR006118,PF13408,G3DSA:3.40.50.1390,Coil
MRAALYIRVSSEEQARHGLSLQEQRDALTRYAKENKMTVVGIYEDAGISARKPYKKRPALLRLLDDCKAGKVDTILFIKLDRWFRNVAGYYDVQTQLDKYGVTWQATEEDYETRTASGRLKVNIMLSVAQDEADRTSERIKFINDGKRAKGQPAGSKAPLGYIIKDRQYQIDNDTVAAARDMFAAYIKLQSVLGVKRYMFETWGIDRAYTKYVNYFRNRLYIGEVYGIENACPALISKQDFDIVNDILRQRSQRCAGVETDRVYLFSGLLHCKECGKTMQSETAKQIYTYYRCRTRMLDNSACQHKKRIREDALEDYLLHELEGIAERNNRYYKKAEKKPTQSADAIRKKMGKLKTLYLNDLIELDEYKREYASLKKTLETVEEKPQTNLDALRNGLAEYDTYSREEKKEFWTRFIWRIDADDDGAFFVTPR

SEQ ID NO: 9376 - protein, 432 aa, Unknown
  Description of Unknown: Integrase B9377 sequence
  PTHR30461:SF3,SM00857,IPR006118,G3DSA:1.10.10.2600,IPR036162, PF13408,IPR025827,G3DSA:3.40.50.1390,PS51737,IPR006119, IPR038109,SSF53041,IPR011109,PTHR30461,PS00397, PS51736,cd00338,PF00239
MRVALYVRVSTEEQAVHGLSVDDQKDSLKRWAEENKHKVVDYYVDAGVSGRKSVSKRPELQRLLSDVEAGKIDLVAFTKLDRWFRNIGEFYKAQEVLDAHGVVWQATYEDYETATAAGRLKVNIMLSVAQDEADRTSERVKRIMQHKRELGLCPAGKTPIGLKAVESRLCIDEETAHIARRMFEDYIATGSVNHVKKMLVSEFGIMRANHHIKGALSNERYIGLNSGIKVCDALIPPEDFALVQRMLTARSIRNNGSRHTWLFSGLVWCAECGHRLVTHSTRQRGTDYFYYRCKNYELGICRHKKRINEAALEKYLLAKLPIEVQAHNAKLKAGKTKPPVDTAAIKRKMDKLTDLYLADLISREKYEIEYTSLKEKLNVPPEPKPINEELVMSVLDAYGKLPPSGKKEVWNRFIRRIVVSENGDIFFELVWL

SEQ ID NO: 9377 - protein, 432 aa, Unknown
  Description of Unknown: Integrase B9378 sequence
  PTHR30461:SF3,IPR036162,PS51737,IPR011109,PTHR30461, PS00397,PF00239,G3DSA:1.10.10.2600,IPR006119,SSF53041, cd00338,SM00857,IPR025827,IPR038109,PS51736, IPR006118,PF13408,G3DSA:3.40.50.1390,Coil
MRVALYIRVSSEEQARHGLSLQEQRDALTRYAEANKMSVVGIYEDAGISARKPYKKRPALLRLLDDCKAGKVDMILFIKLDRWFRNVAGYYDVKTQLDKYGVTWQATEEDYETRTASGRLKVNIMLSVAQDEADRTSERIKFINDGKRAKGQPAGSKAPLGYIIKDRQYQIDNGTADAARDMFAAYIRLQSVLGVKRYMLETWGIDRSYNKYINYFRNRLYIGEVYGIENACPALVSKQDFDIVNDILRQRSQRCAGFETDRVYLFSGLLHCKECGKTMQSETAKQIYTYYRCRTRMLDSSTCQHKKRIREDALEDYLLHELEGIAERNIRYYKKAEKKPTQSADAIRKKMDKLKTLYLNDLIELDEYKKEYTALKKSLETVEEKPRTNLDALRNGLAEYDTYSREEKKEFWTRFIRRIDADDDGAFFVTPR

SEQ ID NO: 9378 - protein, 432 aa, Unknown
  Description of Unknown: Integrase B9379 sequence
  PTHR30461:SF3,SM00857,IPR006118,G3DSA:1.10.10.2600,IPR036162, PF13408,IPR025827,G3DSA:3.40.50.1390,PS51737,IPR006119, IPR038109,SSF53041,IPR011109,PTHR30461,PS00397, PS51736,cd00338,PF00239
MRVALYVRVSTEEQAVHGLSVDDQKDSLKRWAEENKHKVVDYYVDAGVSGRKSVSKRPELQRLLSDVEAGKIDLVAFTKLDRWFRNIGEFYKAQEVLDAHGVVWQATYEDYETATAAGRLKVNIMLSVAQDEADRTSERVKRIMQHKRELGLCPAGKTPIGLKAVESRLCIDEETAHIARRMFEDYIATGSVNHVKKMLVSEFGIMRANHHVKGALSNERYVGLNNGIKVCDALIPPEDFALVQRMLTARSIRNNGSKHTWLFSGLVWCAECSHRLVTHSTRQRGTDYFYYRCKNYEMGICRHKKRINEATLEKYLLAKLPIEVQAHNAKLKAGKTKPPVDTAAIKRKMDKLTDLYLADLISREKYEMEYTALKEKLNVPPEPKPINEELVMSLLDAYDKLPPSGKKEVWNRFIRRIVVSENGDIFFELVWL

SEQ ID NO: 9379 - protein, 432 aa, Unknown
  Description of Unknown: Integrase B9380 sequence
  PTHR30461:SF3,IPR036162,PS51737,IPR011109,PTHR30461, PS00397,PF00239,G3DSA:1.10.10.2600,IPR006119,SSF53041, cd00338,SM00857,IPR025827,IPR038109,PS51736, IPR006118,PF13408,G3DSA:3.40.50.1390,Coil
MRVALYIRVSSEEQARHGLSLQEQRDALIRYAKANKMTVVGIYEDAGISARKPYKKRPALLRLLGDCKDGQIDMILFVKLDRWFRNVAGYYDVQTQLDQYGVTWQATEEDYETRTASGRLKVNIMLSVAQDEADRTSERIKFINDGKRAKGQPAGSKAPLGYAIKDRQYQIDNGTADAARDMFAAFIRLKSVLAVKRYMLDTWGIDRAYSKYVNYFRNRLYIGEVYGIENACPALVSKQDFDLVNDIIRQRSQRCAGVDTDRVYLFSGILHCKECGKTMQSETVKKTYTYYRCRTRMLDNTSCPHTKRIREDVLEDYLLHELAGIAERNNRYYKKAEKKPMQSADSIRKKMSKLKTLYLNDLIELDDYKAEYSILKRSLETVEEKPKTDLDALRNGLGEYGTYSREEKKEFWTRVIKRIDADNDGAFFVMPR

SEQ ID NO: 9380 - protein, 432 aa, Unknown
  Description of Unknown: Integrase B9381 sequence
  PTHR30461:SF3,IPR036162,PS51737,IPR011109,PTHR30461, PS00397,PF00239,G3DSA:1.10.10.2600,IPR006119,SSF53041, cd00338,SM00857,IPR025827,IPR038109,PS51736, IPR006118,PF13408,G3DSA:3.40.50.1390,Coil
MRAALYIRVSSEEQARHGLSLQEQRDTLTRYAKANKMTVVGIYEDAGISARKPYKKRPALLRLLDDCKAGKIDTILFIKLDRWFRNVAGYYDVQTRLDQYGVTWQATEEDYETRTASGRLKVNIMLSVAQDEADRTSERIKFINDGKRAKGQPAGSKAPLGYIVKDRQYQIDNGTVDAARDMFAAYIRLQSVLGVKKYMLETWGIDRAYTKYVNYFRNRLYIGEVYGIENACPALVSKQDFDIVNDILRQRSQRCAGVETDRVYLFSGLLHCKECGKTMQSETAKQIYTYYRCRTRMLDNSACQHKKRIREDSLEDYLLHELEGIAERNNRYYKKAEKKPTQNADAIRKKMSKLKTLYLNDLIELDEYKREYASLKKSLEAVEEKPQTNLDALRNGLAEYDTYSREEKKEFWTRFIRRIDADDDGAFFVTPR

SEQ ID NO: 9381 - protein, 432 aa, Unknown
  Description of Unknown: Integrase B9382 sequence
  SM00857,IPR006118,G3DSA:1.10.10.2600,IPR036162,PS51737, G3DSA:3.40.50.1390,IPR006119,IPR038109,SSF53041,IPR011109, PTHR30461,PS00397,PS51736,cd00338,PF00239
MKRIIAMYLRVSTLDQARNGYGLGDQEVQCKKYIDLYYPNDEVEIYKDDGYSAKNLERPEMARMLDDMKKGKIHTIIAFKLDRLTRNVVDTYKLIKQVMDYNCSLVAVVDRLDITSANGRMFVGLLSLISQWEREVISERTIAGLEQMVRSGKYPCGGKAPYGWNKTEDGKLVINEDEAEIINYMTDCYIEGYSLKDISKMVFAKYGYRKSWRHLKELLIRKLNIGVFEFHGASYDDFVPPIMNLNKYNELLKMAAHREVHSLEKQTYTFHHLVYCSCGEMMQHVCTIKHNSGVSTIYRYYYCSKCNKRVNQSFLEKEIFETLFLEEFRIKTIEKHKKQELILSSLDVKKEEVFNAYKENIIDFDTYKFTMAKLEKERSLALKELTSLDIVSNSKYFEMTQDEKYAYVHDMISKIIFDFDEQIVLSIQFKKK

SEQ ID NO: 9382 - protein, 432 aa, Unknown
  Description of Unknown: Integrase B9383 sequence
  PTHR30461:SF3,IPR036162,PS51737,IPR011109,PTHR30461, PS00397,PF00239,G3DSA:1.10.10.2600,IPR006119,SSF53041, cd00338,SM00857,IPR025827,IPR038109, PS51736,IPR006118,PF13408,G3DSA:3.40.50.1390,Coil
MRAALYIRVSSEEQARHGLSLQEQRDALTRYAKANKMTVVGIYEDAGISARKPYKKRPALLRLLDDCKAGKVDTILFIKLDRWFRNVAGYYDVQTRLDKYGVTWQATEEDYETRTASGRLKVNIMLSVAQDEADRTSERIKFINDGKRAKGQPAGSKAPLGYIIKDRQYQIDNDTADAARDMFAAYIRLQSVLGVKKYMLETWKIDRAYTKYVNYFRNRLYIGEVYGIENACPALISKQDFDIVNDIFRQRSQRCAGVETDRVYLFSGLLHCKECGKTMQSETAKQIYTYYRCRTRMLDNSACQHKKRIREDALEDYLLHELEGIAERNNRYYKKAEKKPTQSADAIRKKMSKLKTLYLNDLIELDEYKREYASLKKSLEAVEEKPKTNLDALRNGLAEYDTYSREEKKEFWTRFIRRIDADDDGAFFVTPR

SEQ ID NO: 9383 - protein, 432 aa, Unknown
  Description of Unknown: Integrase B9384 sequence
  PTHR30461:SF3,IPR036162,PS51737,IPR011109,PTHR30461, PS00397,PF00239,G3DSA:1.10.10.2600,IPR006119,SSF53041, cd00338,SM00857,IPR025827,IPR038109,PS51736, IPR006118,PF13408,G3DSA:3.40.50.1390,Coil
MRAALYIRVSSEEQARHGLSLQEQRDALTRYAKANKMTVVGIYEDAGISARKPYKKRPALLRLLDDCKVGKVDTILFIKLDRWFRNVAGYYDVQTQLDKYGVTWQATEEDYETRTASGRLKVNIMLSVAQDEADRTSERIKFINDGKRAKGQPAGSKAPLGYIVKDRQYQIDNDTADAARDMFAAYIRLQSVLGVKKYMLETWGIDRAYTKYVNYFRNRLYIGEVYGIENACPALVSKQDFDIVNDILRQRSQRCAGVETDRVYLFSGLLHCKECGKTMQSETAKQIYTYYRCRTRMLDNSACQHKKRIREDALEDYLLHELEGIAERNNRYYKKAEKKPTQSADAIRKKMSKLKTLYLNDLIELDEYKREYASLRKSLEAVEEKPKTNLAALRNGLAEYDTYSREEKKEFWTRFIRQIDADDDGAFFVTPR

SEQ ID NO: 9384 - protein, 432 aa, Unknown
  Description of Unknown: Integrase B9385 sequence
  PTHR30461:SF3,SM00857,IPR006118,G3DSA:1.10.10.2600,IPR036162, PF13408,IPR025827,G3DSA:3.40.50.1390,PS51737,IPR006119, IPR038109,SSF53041,IPR011109,PTHR30461,PS00397, PS51736,cd00338,PF00239
MRVALYVRVSTEEQAVHGLSVDDQKESLKKWAEENKHKVVDYYVDAGVSGRKSVSKRPELQRLLSDVEAGKIDLVAFTKLDRWFRNIGEFYKAQEVLDAHGVVWQATYEDYETATAAGRLKVNIMLSVAQDEADRTSERVKRIMQHKRELGLCPAGKTPIGLKAVESRLCIDEETAHIARRMFEDYIATGSVNHVKKMLVSEFGIMRANHHIKGALSNERYIGLNSGIKVCDALIPPEDFALVQRMLTARSIRNNGSRHTWLFSGLVWCAECGHRLVTHSTRQRGTDYFYYRCKNYELGICRHKKRINEAALEKYLLAKLPIEVQAHNAKLKAGKTKPPVDTAAIKRKMDKLTDLYLADLISREKYEIEYTSLKEKLNVPPEPKPINEELVVSLLDAYGKLPPSGKKEVWNRFIRRIVVSENGDIFFELVWL

SEQ ID NO: 9385 - protein, 432 aa, Unknown
  Description of Unknown: Integrase B9386 sequence
  PTHR30461:SF3,IPR036162,PS51737,IPR011109,PTHR30461, PS00397,PF00239,G3DSA:1.10.10.2600,IPR006119,SSF53041, cd00338,SM00857,IPR025827,IPR038109,PS51736, IPR006118,PF13408,G3DSA:3.40.50.1390,Coil
MRAALYIRVSSEEQARHGLSLQEQRDALTRYAKANKMTVAGIYEDAGISARKPYKKRPALLRLLDDCKAGKVDTILFIKLDRWFRNVAGYYDVQTRLDQYGVTWQATEEDYETRTASGRLKVNIMLSVAQDEADRASERVKFINDGKRAKGQPAGSKAPLGYIIKDRQYQIDNDTADAARDMFAAYIRLQSVLGVKKYMLETWGIDRAYTKYVNYFRNRLYIGEVYGIENACPALVSKQDFDIVNDILRQRSQRCAGVETDRVYLFSGLLHCKECGKTMQSETTKQIYTYYRCRTRMLDNSACQHKKRIREDALEDYLLHELEGIAERNNRYYKKAEKKPTQSADAIRKKMSKLKTLYLNDLIELDEYKQEYASLKKALEAVEEKPKTNLDALRNGLAEYGTYSREEKKEFWTRFIRRIDADDDGAFFVTPR

SEQ ID NO: 9386 - protein, 432 aa, Unknown
  Description of Unknown: Integrase B9387 sequence
  PTHR30461:SF3,SM00857,IPR006118,G3DSA:1.10.10.2600,IPR036162, PF13408,PS51737,G3DSA:3.40.50.1390,IPR025827,IPR006119, IPR038109,IPR011109,SSF53041,PTHR30461,PS00397, PS51736,cd00338,PF00239
MRAALYIRVSTEEQARNGLSLGDQRESLLAYAADNGMEVVGVYEDAGISARKPYKRRPALLRLLADCKDGKIDTILFVKLDRWFRSVAGYYAVQEELDRCHVTWQATREDYETRTASGRLKVNIMLSVAQDEADRTSERIKAINEGKRLKGQPTTWRTPIGICVKDRHYAIDEETADAARDMFPAFIRLQSILALRRYMATEWGIKRSYNKYKDALSNRLYLGEAFGVENVLPSLVDQETFNLAERILEQRSQRNASADRIYLFTGILRCRECGRNMQPETVKKVYKYYRCRTHTLDPADCPHILRIREDVLEDYLLREFEGIAKKYYSKSKTAEKKPPKTAEQIKRKMQKLKDLYLSDLIEIEEYKKDYTELKQQLAAINPEPIKEFDLETLRRELKEYPDLDRQAKKEFWVRTIQRIDADNDGAFFVTPS

SEQ ID NO: 9387 - protein, 432 aa, Unknown
  Description of Unknown: Integrase B9388 sequence
  PTHR30461:SF3,IPR036162,PS51737,IPR011109,PTHR30461, PS00397,PF00239,G3DSA:1.10.10.2600,IPR006119,SSF53041, cd00338,SM00857,IPR025827,IPR038109,PS51736, IPR006118,PF13408,G3DSA:3.40.50.1390,Coil
MIAALYIRVSSEEQARHGLSLQEQRDALIRYAKANKMTVAGIYEDAGISARKPYKKRPALLRLLDDCKAGKVDTILFIKLDRWFRNVAGYYDVQTRLDQYGVTWQATEEDYETRTASGRLKVNIMLSVAQDEADRTSERIKFINDGKRAKGQPAGSKAPLGYIIKDRQYQIDNDTADAARDMFAAYIRLQSVLGVKRYMLETWGIDRAYTKYVNYFRNRLYIGEVYGIENACPALVSKQDFDIVNDILRQRSQRCAGVETDRVYLFSGLLHCKECGKTMQSETAKQIYTYYRCRTRMLDNSACQHKKRIREDALEDYLLHELEGIAERNNRYYKKAEKKPTQSADAIRKKMSKLKTLYLNDLIELDEYKKEYTALKKSLEAVEEKPKTNLDALRNGLAEYDTYSREEKKEFWTRFIRRIDADDDGAFFVTPR

SEQ ID NO: 9388 - protein, 432 aa, Unknown
  Description of Unknown: Integrase B9389 sequence
  PTHR30461:SF3,SM00857,IPR006118,G3DSA:1.10.10.2600,IPR036162, PF13408,IPR025827,PS51737,G3DSA:3.40.50.1390,IPR006119, IPR038109,IPR011109,SSF53041,PTHR30461,PS00397, PS51736,cd00338,PF00239
MRVALYIRVSTEEQAVHGLSVDDQKESLKKWAEENKHKVVDYYVDAGVSGRKSVSKRPELQRLLSDVEAGKIDLVAFTKLDRWFRNIGEFYKAQEVLDTHGVVWQATYEDYETATAAGRLKVNIMLSVAQDEADRTSERVKRIMQHKRELGLCPAGKTPIGLKAVESRLCIDEETAHIARRMFEDYIATGSVNHVKKMLVSEFGIMRANHHIKGALSNERYIGLNNGIKVCDALIPPEDFALVQRMLTARSVRNNGSRHTWLFSGLVWCAECGHRLVTHSTRQRGTDYFYYRCKNYEMGICRHKKRINEATLEKYLLAKLPIEVQAHNAKLKAGKTKPPVDTAAIKRKMDKLTDLYLADLISREKYEMEYTSLKEKLNVPPEPKPINEELVMSVLDAYDKLPSSGKKEVWNRFIRRIVVSENGDIFFELVWL

SEQ ID NO: 9389 - protein, 432 aa, Unknown
  Description of Unknown: Integrase B9390 sequence
  PTHR30461:SF3,IPR036162,PS51737,IPR011109,PTHR30461, PS00397,PF00239,G3DSA:1.10.10.2600,IPR006119,SSF53041, cd00338,SM00857,IPR025827,IPR038109,PS51736, IPR006118,PF13408,G3DSA:3.40.50.1390,Coil
MRAALYIRVSSEEQARHGLSLQEQRDALARYAKANKMTVVGIYEDAGISARKPYKKRPALLRLLDDCKAGKVDTILFIKLDRWFRNVAGYYDVQTQLDQYGVTWQATEEDYETRTASGRLKVNIMLSVAQDEADRTSERIKFINDGKRAKGQPAGSKAPLGYIIKERQYQIDNDTADAARDMFAAYIRLKSVLAVKRYMLETWGIDRAYSKYVNYFRNRLYIGEVYGIENACPALVSKQDFDLVTDISRQRSQRCAGVDADRVYLFSGLLHCKECGRTMQSETAKQIYTYYRCRTRMLDNSACPHMKRIREDALEDYLLHELMGIAERNNRYYKKAEKKPTQSADAIRKKMSKLKTLYLNDLIELDDYKAEYASLKKSLETVEEKPKTDLDDLRNGLCEYDTYLREEKKEFWTRFIRRIDADNDGAFFVTPR

SEQ ID NO: 9390 - protein, 432 aa, Unknown
  Description of Unknown: Integrase B9391 sequence
  PTHR30461:SF3,IPR036162,PS51737,IPR011109,PTHR30461, PS00397,PF00239,G3DSA:1.10.10.2600,IPR006119,SSF53041, cd00338,SM00857,IPR025827,IPR038109,PS51736, IPR006118,PF13408,G3DSA:3.40.50.1390,Coil
MRAALYIRVSSDEQARHGLSLQEQRDALTRYAQEHKMTVAGIYEDAGISARKPYKKRPALLRLLGDCKVGKVDTILFIKLDRWFRNVAGYYDVQTQLDQYGVTWQATEEDYETRTASGRLKVNIMLSVAQDEADRTSERIKFINDGKRAKGQPAGSKAPLGYVIKDRQYQIDSGTVDAARDMFASFIRLKSVLAVKRYMLDKWGIDRAYSKYVNYFRNRLYIGEVYGIENACPALVSKQDFDLVNDIIRQRSQRCAGVGTDRVYLFSGILRCKECGKTMQSETVKKTYTYYRCRTRMLDNSACPHTKRIREDALEDYLLHELEGIAERNNRYYKKADKKPTQSADSIRKKMGKLKTLYLNDLIELDEYKREYASLKKALEATEERPEINLDALKKELQEYETYSRDEKKEFWTRFIRRIDADNDGAFFVTPR

SEQ ID NO: 9391 - protein, 432 aa, Unknown
  Description of Unknown: Integrase B9392 sequence
  PTHR30461:SF3,IPR036162,PS51737,IPR011109,PTHR30461, PS00397,PF00239,G3DSA:1.10.10.2600,IPR006119,SSF53041, cd00338,SM00857,IPR025827,IPR038109,PS51736, IPR006118,PF13408,G3DSA:3.40.50.1390,Coil
MRAALYIRVSSDEQARHGLSLQEQRDALTRYAQEHKMTVAGIYEDAGISARKPYKKRPALLRLLGDCKVGKVDTILFIKLDRWFRNVAGYYDVQTQLDQYGVTWQATEEDYETRTASGRLKVNIMLSVAQDEADRTSERIKFINDGKRAKGQPAGSKAPLGYAIKDRQYQIDNGTVDAARDMFAAFIRLKSVLAVKRYMLDTWGIDRAYNKYVNYFRNRLYIGEVYGIENACPALVSKQDFDLVNDIIRQRSQRCAGVGTDRVYLFSGILRCKECGKTMQSETVKKTYTYYRCRTRMFDNSACPHTKRIREDALEDYLLHEMEGIAERNNRYYKKAEKKPTHSADSIRKKMSKLKTLYLNDLIELGDYKAEYASLKRALETVEEKPETDLDALKDGLGEYDTYSRNEKKEFWTRFIRRIDADNDGAFFVTPR

SEQ ID NO: 9392 - protein, 432 aa, Unknown
  Description of Unknown: Integrase B9393 sequence
  cd00338,SM00857,G3DSA:1.10.10.2600,IPR036162,PF13408, IPR025827,G3DSA:3.40.50.1390,PS51737,IPR006119,IPR038109, PF07508,IPR011109,SSF53041,PTHR30461,PS51736, Coil,PF00239
MKAVIYARYSCDNQREESIEGQLRECKAFAERKGFKLVGTYIDRAMSAKTDNRPEFQRMIKESANELFDVVIVWKLDRFARNRYDSAHCKATLRKNGVKVISATEVISEGAEGIILESVLEGYAEYYSAELSEKVIRGMTDNALKCQYNGGSLTIGYTIDENKHYQLDTLVAPFIKEAFEMYSSGKMVKDIVKYLNDNGVRSGKGKPITKTSATSMLSNVKYKGQYKYRDIIIDGGVPRIVSDALFNKVQERLKKNKYSRSRFKAKIEYFLSTKLICGYCGEFMIGESGTSRQKIKYNYYKCTGVKRHKGCHKKTVRKADIEEIVLNDVMDKMFKEDLINDIADSVMRLQEKENTTIPLMQKQLAEIHQSINNLVKAMEMGIVSRETKQRFEELEAQRTELETDIIKQEIQEEIITREQVVEWLKEMKRLDL

SEQ ID NO: 9393 - protein, 432 aa, Unknown
  Description of Unknown: Integrase B9394 sequence
  PTHR30461:SF3,IPR036162,PS51737,IPR011109,PTHR30461, PS00397,PF00239,G3DSA:1.10.10.2600,IPR006119,SSF53041, cd00338,SM00857,IPR025827,IPR038109,PS51736, IPR006118,PF13408,G3DSA:3.40.50.1390,Coil
MRAALYIRVSSDEQARHGLSLQEQRDALTRYAQEHKMTVAGIYEDAGISARKPYKKRPALLRLLGDCKVGKVDTILFIKLDRWFRNVAGYYDVQTQLDQYGVTWQATEEDYETRTASGRLKVNIMLSVAQDEADRTSERIKFINDGKRAKGQPAGSKAPLGYAIKDRQYQIDNGTVDAARDMFAAFIRLKSVLAVKRYMLDTWGIDRAYSKYVNYFRNRLYIGEVYGIENACPALVSKQDFDLVTDIIQHRSQRCAGVDTDRVYLFPGILHCKECGKTMQSETVKKTYTYYRCRTRMLDNSACPHTKRIREDALEDYLLHEMEGIAERNNRYYKKADKKPTQSADSIRKKMGKLKTLYLNDLIELDEYKREYASLKKALEATEERPEINLDALKKELQEYETYSRDEKKEFWTRFIRRIDADNDGAFFVTPR

SEQ ID NO: 9394 - protein, 432 aa, Unknown
  Description of Unknown: Integrase B9395 sequence
  PTHR30461:SF3,SM00857,IPR006118,G3DSA:1.10.10.2600,IPR036162, PF13408,PS51737,G3DSA:3.40.50.1390,IPR025827,IPR006119, IPR038109,IPR011109,SSF53041,PTHR30461,PS00397, PS51736,cd00338,PF00239
MRAALYIRVSTEEQARHGLSLGDQRESLLAYAANNGMEVVGVYEDAGISARKPYKRRPALLRLLADCKDGKIDTILFVKLDRWFRSVAGYYAVQEELDRCHVTWQATREDYETRTASGRLKVNIMLSVAQDEADRTSERIKAINEGKRLKGQPTTWRTPIGICVKDRHYAIDEETADAARDMFPAFIRLQSILALRRYMATEWGIKRSYNKYKDALGNRLYLGEAFGVENALPALVDQETFDLAGKILERRSQRNASADRIYLFTGILRCRECGRNMQPETVKKVYKYYRCRTHTLDPADCPHILRIREDVLEDYLLREFEGIAKKYYSKSKTAEKKPPKTAEQIKRKMQKLKDLYLSDLIEIEEYKKDYTELKQQLAAINPEPIKEFDLETLRRELKEYPDLDRQAKKEFWVRTIQRIDADNDGAFFVTPS

SEQ ID NO: 9395 - protein, 432 aa, Unknown
  Description of Unknown: Integrase B9396 sequence
  PTHR30461:SF3,IPR036162,PS51737,IPR011109,PTHR30461, PS00397,PF00239,G3DSA:1.10.10.2600,IPR006119,SSF53041, cd00338,SM00857,IPR025827,IPR038109,PS51736, IPR006118,PF13408,G3DSA:3.40.50.1390,Coil
MRAALYIRVSSEEQARHGLSLQEQRDALTRYAEANKMTVVGIYEDAGISARKPYKKRPALLRLLDDCKAGKVDTILFIKLDRWFRNVAGYYDVQTRLDQYGVTWQATEEDYETRTASGRLKVNIMLSVAQDEADRTSERIKFINDGKRAKGQPAGSKAPLGYIIKDRQYQIDNDTADAARDMFAAYIRLQSVLGVKRYMLDRWGIDRAYNKYINYFHNRLYIGEVYGIENACPALVSKQDFDLVNDIIRQRSQRCAGVETDRIYLFSGLLHCKECGKTMQSETAKQVYTYYRCRTRMLDNSACQHKKRIREDALEGYLLHELEGIAERNNRYYKKAEKKPTQSADTIRKKMGKLKTLYLNDLIELDEYKREYASLKKALEAVEEKPKADLDALRNGLAEYDTYSREEKKEFWTRFIRRIDADDDGAFFVTPR

SEQ ID NO: 9396 - protein, 432 aa, Unknown
  Description of Unknown: Integrase B9397 sequence
  PTHR30461:SF3,IPR036162,PS51737,IPR011109,PTHR30461, PS00397,PF00239,G3DSA:1.10.10.2600,IPR006119,SSF53041, cd00338,SM00857,IPR025827,IPR038109,PS51736, IPR006118,PF13408,G3DSA:3.40.50.1390,Coil
MRAALYIRVSSEEQARHGLSLQEQRDTLTRYAKANKMTVVGIYEDAGISARKPYKKRPALLRLLDDCKVGKVDTILFIKLDRWFRNVAGYYDVQTRLDKYGVTWQATEEDYETRTASGRLKVNIMLSVAQDEADRASERVKFINDGKRAKGQPAGSKAPLGYIIKDRQYQIDNDTANAARDMFTAYIRLQSVLGVKKYMLETWKIDRAYTKYVNYFRNRLYIGEVYGIENACPALISKQDFDIVNDILRQRSQRCAGVETDRVYLFSGLLHCKECGKTMQSETAKQIYTYYRCRTRMLDNSACQHKKRIREDALEDYLLHELEGIAERNNRYYKKAEKKPTQSADAIRKKMSKLKTLYLNDLIELDEYKREYASLKKTLEAVEEKPETNLDALRNGLAEYDTYSREEKKEFWTRFIRRIDADDDGAFFVTPR

SEQ ID NO: 9397 - protein, 432 aa, Unknown
  Description of Unknown: Integrase B9398 sequence
  PTHR30461:SF3,IPR036162,PS51737,IPR011109,PTHR30461, PS00397,PF00239,G3DSA:1.10.10.2600,IPR006119,SSF53041, cd00338,SM00857,IPR025827,IPR038109,PS51736, IPR006118,PF13408,G3DSA:3.40.50.1390,Coil
MRAALYIRVSSEEQARHGLSLQEQRDTLARYAKANKMTAVGIYEDAGISARKPYKKRPALLRLLDDCKAGKVDTILFIKLDRWFRNVAGYYDVQTRLDQYGVTWQATEEDYETRTASGRLKVNIMLSVAQDEADRTSERIKFINDGKRAKGQPAGSKAPLGYIVKDRQYQIDNDTVDAARDMFAAYIRLQSVLGVKRYMLETWGIDRAYTKYVNYFRNRLYIGEVYGIENACPALVSKQDFDIVNDILRQRSQRCAGVETDRVYLFSGLLHCKECGKTMQSETAKQIYTYYRCRTRMLDNSACRHKKRIREDALEDYLLHELEGIAERNNRYYKKAEKKPTQSADAIRKKMSKLKTLYLNDLIELDEYKKEYTTLKKSLETVEEKPKTNLDALRNGLAEYDTYSREEKKEFWTRFIRRIDADDDGAFFVTPR

SEQ ID NO: 9398 - protein, 432 aa, Unknown
  Description of Unknown: Integrase B9399 sequence
  PTHR30461:SF3,IPR036162,PS51737,IPR011109,PTHR30461, PS00397,PF00239,G3DSA:1.10.10.2600,IPR006119,SSF53041, cd00338,SM00857,IPR025827,IPR038109,PS51736, IPR006118,PF13408,G3DSA:3.40.50.1390,Coil
MRAALYIRVSSEEQARHGLSLQEQRDALARYAKANKMTVVGIYEDAGISARKPYKKRPALLRLLDDCKAGKVDTILFIKLDRWFRNVAGYYDVQTQLDRYGVTWQATEEDYETRTASGRLKVNIMLSVAQDEADRTSERIKFINDGKRAKGQPAGSKAPLGYIIKERQYQIDNDTADAARDMFAAYIRLKSVLAVKRYMLDTWGIDRAYNKYVNYFHNRLYIGEVYGIENACPSLVSKQDFDLVNDISRQRSQRCAGVDVDRVYLFSGLLHCKECGRTMQSETAKQIYTYYRCRTRMLDNSACPHMKRIREDALEDYLLHELAEITERNNRYYKKAEKKPTQSADSIRKKMSKLKTLYLNDLIELDDYKTEYASLKKSLETVEEKPKTDLDALRNGLGEYDTYSREEKKEFWTRFIRRIDADNDGAFFVTPR

SEQ ID NO: 9399 - protein, 432 aa, Unknown
  Description of Unknown: Integrase B9400 sequence
  PTHR30461:SF3,IPR036162,PS51737,IPR011109,PTHR30461, PS00397,PF00239,G3DSA:1.10.10.2600,IPR006119,SSF53041, cd00338,SM00857,IPR025827,IPR038109,PS51736, IPR006118,PF13408,G3DSA:3.40.50.1390,Coil
MRVALYIRVSTEEQARHGLSLGDQRESLLAYAADNGMEVVGVYEDAGISARKPYKQRPALLRLLADCKNGKIDTILFVKLDRWFRNVAGYYAVQEELDRCHVTWQATREDYETRTASGRLKVNIMLSVAQDEADRTSERIKAINESKRLKGQPTTWRTPIGICVKDRHYAIDEETADAARDMFRAYIKLQSILALRRHMATEWGIKRSYNKYKDALGNRLYLGEAFGVENALPALVDQETFALAGRILERRSQRNASADRIYLFSGILRCRECGRNMQPETVKQVYKYYRCRTHMLDSADCPHILRIREDVLEDYLLREFEGIAEKYYSKSKTAEKKPPKTAEQIKRKMQKLKELYLSDLIEIEEYKKDYTELKQQLAAINPEPIKEFDLETLRRELKEYPDLDRQAKKEFWVRTIQRIDADNDGAFFVTPS

SEQ ID NO: 9400 - protein, 432 aa, Unknown
  Description of Unknown: Integrase B9401 sequence
  PTHR30461:SF3,IPR036162,PS51737,IPR011109,PTHR30461, PS00397,PF00239,G3DSA:1.10.10.2600,IPR006119,SSF53041, cd00338,SM00857,IPR025827,IPR038109,PS51736, IPR006118,PF13408,G3DSA:3.40.50.1390,Coil
MRAALYIRVSSEEQARHGLSLQEQRDTLTRYAKANKMTVVGIYEDAGISARKPYKKRPALLRLLDDCKAGKVDTILFIKLDRWFRNVAGYYDVQTRLDKYGVTWQATEEDYETRTASGRLKVNIMLSVAQDEADRTSERIKFINDGKRAKGQPAGSKAPLGYIIKDRQYQIDNDTADAARDMFAAYIRLQSVLGVKKYMLETWGIDRAYTKYVNYFRNRLYIGEVYGIENACPALISKQDFDIVNDILRQRSQRCAGVETDRVYLFSGLLHCKECGKTMQSETAKQIYTYYRCRTRMLDNSACQHKKRIREDALEDYLLHELEGIAERNNRYYKKAEKKPTQSADAIRKKMSKLKTLYLNDLIELDEYKREYTSLKKTLETVEEKPQTNLDALRNGLAEYDTYSREEKKEFWTRFIRRIDANDDGAFFVTPR

SEQ ID NO: 9401 - protein, 432 aa, Unknown
  Description of Unknown: Integrase B9402 sequence
  PTHR30461:SF3,SM00857,G3DSA:1.10.10.2600,IPR036162,PF13408, IPR025827,PS51737,G3DSA:3.40.50.1390,IPR006119,IPR038109, SSF53041,IPR011109,PTHR30461,Coil,PS51736, cd00338,PF00239
MRVALYIRVTSEEQARHGLSLQEQRDALIRYAKANKMTVVGIYEDAGISARKPYKKRPALLQLLDDCKAGKVDTILFIKLDRWFRNVAGYYDVQTQLDKYGVTWQATEEDYETRTASGRLKVNIMLSVAQDEADRASERVKFINDGKRAKGQPAGSKAPLGYIIKDRKYQIDNDTADAARDMFAAYVRLQSVLGVKKYMLETWGVDRAYTKYVNYFRNRLYIGEVYGIENACPALISKQDFDIVNDILRQRSQRCAGVETDRVYLFSGLLHCKECGKTMQSETAKQIYTYYRCRTRMLDNSACQHKKRVREDALEDYLLHELEGIAERNNRYYKKAEKKPTQSADAIRKKMGKLKTLYLNDLIELDEYKREYASLKKTLETVEEKPQTNLDALRNGLAEYDTYSREEKKEFWTRFIRRIDADDDGAFFVTPR

SEQ ID NO: 9402 - protein, 432 aa, Unknown
  Description of Unknown: Integrase B9403 sequence
  PTHR30461:SF3,IPR036162,PS51737,IPR011109,PTHR30461, PS00397,PF00239,G3DSA:1.10.10.2600,IPR006119,SSF53041, cd00338,SM00857,IPR025827,IPR038109,PS51736, IPR006118,PF13408,G3DSA:3.40.50.1390,Coil
MRAALYIRVSSEEQARHGLSLQEQRDALTRYAKANKMTVVGIYEDAGISARKPYKKRPALLRLLDDCKAGKVDTILFIKLDRWFRNVAGYYDVQTRLDKYGVTWQATEEDYETRTASGRLKVNIMLSVAQDEADRASERVKFINDGKRAKGQPAGSKAPLGYIIKDRQYQIDNGTVDAARDMFAAYIRLQSVLGVKKYMLETWKIDRAYTKYVNYFRNRLYIGEVYGIENACPALVSKQDFDIVNDILRQRSQRCAGVETDRVYLFSGLLHCKECGKTMQSETAKKIYTYYRCRTRMLDNSACQHKKRIREDALEDYLLHELEGIAERNNRYYKEAEKKPTQSADAIRKKMSKLKTLYLNDLIELDEYKQEYAILKKGLEAVEEKPKTNLDALRNGLAEYDTYSREEKKEFWTRFIRRIDADDDGAFFVTPR

SEQ ID NO: 9403 - protein, 432 aa, Unknown
  Description of Unknown: Integrase B9404 sequence
  PTHR30461:SF3,SM00857,IPR006118,G3DSA:1.10.10.2600,IPR036162, PF13408,PS51737,G3DSA:3.40.50.1390,IPR025827,IPR006119, IPR038109,SSF53041,IPR011109,PTHR30461,PS00397, PS51736,cd00338,PF00239
MRVALYIRVSTEEQARHGLSLGDQRESLLAYAADNSMEVVGVYEDAGISARKPYRQRPALLRLLADCKDGKIDTILFVKLDRWFRNVAGYYAVQEELDRCHVTWQATREDYETRTASGRLKVNIMLSVAQDEADRTSERIKAINEGKRLKGQPTTWRTPIGICVKNRHYAIDEETADAARDMFPAFIRLQSILALRRYMATEWGIKRSYNKYKDALSNRLYLGEAFGVENALPALVDQETFNLARRILEQRSQRNASADRIYLFTGILRCRECGRNMQPETVKQVYKYYRCRTHTLDPADCPHILRIREDVLEDYLLREFEGIAKKYYSKSKTAEKKPPKTAEQIKRKMQKLKELYLSDLIEIEEYKKDYTELKQQLAAINPEPIKEFDLETLRRELKEYPDLDRQAKKEFWVRTIQRIDADNDGAFFVTPS

SEQ ID NO: 9404 - protein, 432 aa, Unknown
  Description of Unknown: Integrase B9405 sequence
  PTHR30461:SF3,IPR036162,PS51737,IPR011109,PTHR30461, PS00397,PF00239,G3DSA:1.10.10.2600,IPR006119,SSF53041, cd00338,SM00857,IPR025827,IPR038109,PS51736, IPR006118,PF13408,G3DSA:3.40.50.1390,Coil
MRAALYIRVSSEEQARHGLSLQEQRDTLTRYAKSNKMTVVGIYEDAGISARKPYKKRPALLRLLDDCKAGKVDTILFIKLDRWFRSVAGYYDVQTRLDQYGVTWQATEEDYETRTASGRLKVNIMLSVAQDEADRTSERIKFINDGKRAKGQPAGSKAPLGYIVKDRQYQIDNDTADAARDMFAAYIKLQSVLGVKKYMLETWGIDRAYTKYVNYFRNRLYIGEVYGIENACPALVGKQDFDIVNDILRQRSQRCAGVETDRVYLFSGLLHCKECGKTMQSETAKQIYTYYRCRTRMLDNSACQHKKRIREDALEDYLLHELEGIAERNNRYYKKAEKKPTQSADAIRKKMGKLKTLYLNDLIELDEYKKEYAALKKSLEAVEEKPKTNLDALRNGLAEYDTYSREEKKEFWTRFIRRIDADDDGAFFVTTR

SEQ ID NO: 9405 - protein, 432 aa, Unknown
  Description of Unknown: Integrase B9406 sequence
  SM00857,G3DSA:1.10.10.2600,IPR036162,PF13408,PS51737, IPR025827,G3DSA:3.40.50.1390,IPR006119,IPR038109,PF07508, IPR011109,SSF53041,PTHR30461,PS51736,cd00338, PF00239
METKVTKIDALPKLEKKLRVAAYARVSSEKDAMLQSLSNQVSYYNNLIRSTEGWSFVGVYADEALSGTKDTRDEFQRLIKDAVEGKIDLILVKSISRFARNTVTMLETVRKLKTIGVDVYFEEQNLHSLSGEGEMVLTFLASFAQEEARSVSENQKWKVRKTFESGVQWSATKSYGYRVINKKYVVVPEEAKIVKYIFDLYINGLGFQAISNKLQSENIKPFYAKAWNKTSVKNIISNINYTGDLLLQKGYSENFLTKKYVANKGAKDQFLVEDDHEAIISKEIFNKAMDLKRGRAKYFKTSRETQIRYELSGKIKCGICGKSFNHRTTKYSQKWICITYNEKGKSVCPSKCVPDAELKRITDKVGLDNIDWVEVFPNNELKIYLRDGTNVIEKWNDYSRKNSWTDEMKAKAREQAIKKSLVNYLRGGNING

SEQ ID NO: 9406 - protein, 432 aa, Unknown
  Description of Unknown: Integrase B9407 sequence
  PTHR30461:SF3,IPR036162,PS51737,IPR011109,PTHR30461, PS00397,PF00239,G3DSA:1.10.10.2600,IPR006119,SSF53041, cd00338,SM00857,IPR025827,IPR038109,PS51736, IPR006118,PF13408,G3DSA:3.40.50.1390,Coil
MRAALYIRVSSEEQARHGLSLQEQRDTLTMYAKANKMTVVGIYEDAGISARKPYKKRPALLRLLDDCKAGEVDTILFIKLDRWFRNVAGYYDVQTQLDKYGVTWQATEEDYETRTASGRLKVNIMLSVAQDEADRTSERIKFINDGKRAKGQPAGSKAPLGYIIKDRQYQIDNGTADAARDMFAAYIRLQSVLGVKRYMLETWGIDRAYTKYVNYFRNRLYIGEVYGVENACPALVSKQDFDIVNDILRQRSQRCAGVETDRVYLFSGLLHCKECGKTMQSETAKQIYTYYRCRTRMLDSSACPHKKRIREDALEDYLLHELEGIAERNNRYYKKAEKKPTQSADAIRKKMSKLKTLYLNDLIELDEYKREYASLKKALETVEEKPKTNLDALRNGLAEYDTYSREEKKEFWTRFIRRIDADDDGAFFVTPR

SEQ ID NO: 9407 - protein, 432 aa, Unknown
  Description of Unknown: Integrase B9408 sequence
  PTHR30461:SF3,IPR036162,PS51737,IPR011109,PTHR30461, PS00397,PF00239,G3DSA:1.10.10.2600,IPR006119,SSF53041, cd00338,SM00857,IPR025827,IPR038109,PS51736, IPR006118,PF13408,G3DSA:3.40.50.1390,Coil
MRVALYIRVSSEEQARHGLSLQEQRDALIRYAKANKMTVVGIYEDAGISARKQYKKRPALLRLLGDCKDGQIDMILFVKLDRWFRNVAGYYDVQTQLDQYGVTWQATEEDYETRTASGRLKVNIMLSVAQDEADRTSERIKFINDGKRAKGQPAGSKAPLGYVITDRQYQIDNGTADAARDMFAAFIRLKSVLAVKRYMLDTWGIDRAYSKYVNYFRNRLYIGEVYGIENACPALVSKQDFDLVNDIIRQRSQRCAGVDTDRVYLFSGILHCKECGKTMQSETVKKTYTYYRCRTRMLDNTSCPHTKRIREDVLEDYLLHELAGIAERNNRYYKKAEKKPTQSADSIRKKMSKLKTLYLNDLIELDDYKAEYASLKKMLETVEEKPKTDLDALKNGLGEYGTYSREEKKEFWTRFIKRIDADNDGAFFVTPR

SEQ ID NO: 9408 - protein, 432 aa, Unknown
  Description of Unknown: Integrase B9409 sequence
  PTHR30461:SF3,SM00857,G3DSA:1.10.10.2600,IPR036162,PF13408, PS51737,IPR025827,G3DSA:3.40.50.1390,IPR006119,IPR038109, IPR011109,SSF53041,PTHR30461,Coil,PS51736, cd00338,PF00239
MRAALYMRVTSEEQARHGLSLQEQRDALIRYAKANKMTVVGIYEDAGISARKPYKKRPALLRLLDDCKAGKVDTILFIKLDRWFRNVAGYYDVQTQLDKYGVTWQATEEDYETRTASGRLKVNIMLSVAQDEADRASERVKFITDGKRAKGQPAGSKAPLGYIIKDRQYQIDNDTVDAARDMFAAYIRLQSVLGVKKYMLETWGIDRAYTKYVNYFRNRLYIGEVYGIENSCPALISKRDFDIVNDILRQRSQRCAGVETDRVYLFSGLLHCKECGKTMQSETAKQIYTYYRCRTRMLDNSACPHTKRIREDALEDYLLREVVEIAERTNRSYKQEKKKPPQSADAIRKKMSKLKTLYLNDLIELDEYKREYASLKKALEAVKEKPKTNLDALRNGLAEYDTYSREEKKEFWTRFIRRIDADDDGAFFVTPR

SEQ ID NO: 9409 - protein, 432 aa, Unknown
  Description of Unknown: Integrase B9410 sequence
  PTHR30461:SF3,SM00857,IPR006118,G3DSA:1.10.10.2600,IPR036162, PF13408,IPR025827,G3DSA:3.40.50.1390,PS51737,IPR006119, IPR038109,IPR011109,SSF53041,PTHR30461,PS00397, PS51736,cd00338,PF00239
MRAALYIRVSTEEQARHGLSLGDQRESLLAYAADNGMEVVGVYEDAGISARKPYKRRPALLRLLEDCKDGKIDTILFVKLDRWFRSVAGYYAVQEELDRCHVTWQATREDYETRTASGRLKVNIMLSVAQDEADRTSERIKAINEGKRLKGQPTTWRTPIGICVKDRHYAIDEETADAARDMFPAFIRLQSILALRRYMATEWGIKRSYNKYKDALSNRLYLGEAFGVENALPALVDQETFNLAGRILEQRSQRNASADRIYLFTGILRCRECGRNMQPETVKQVYKYYRCRTHTLDPADCPHILRIREDVLEDYLLREFEGIAKKYYSKSKTAEKKPPKTAEQIKRKMQKLKDLYLSDLIEIEEYKKDYTELKQQLAAINPEPIKEFDLETLRRELKEYPDLDRQAKKEFWVRTIQRIDADNDGAFFVTPS

SEQ ID NO: 9410 - protein, 432 aa, Unknown
  Description of Unknown: Integrase B9411 sequence
  PTHR30461:SF3,SM00857,IPR006118,G3DSA:1.10.10.2600,IPR036162, PF13408,PS51737,G3DSA:3.40.50.1390,IPR025827,IPR006119, IPR038109,SSF53041,IPR011109,PTHR30461,PS00397, PS51736,cd00338,PF00239
MRAALYIRVSTEEQARHGLSLGDQRESLLAYAADNGMEVVGIYEDAGISARKPYKQRPALLRLLADCKDGKVDTILFVKLDRWFRSVAGYYAVQEELDRCHVTWQATREDYETRTASGRLKVNIMLSVAQDEADRTSERIKAINEGKRLKGQPTTWRTPIGICVKNRHYAIDEETADAARDMFPAFIRLQSILALRRYMATEWGIKRSYNKYKDALSNRLYLGEAFGVENVLPSLVDQETFDLAGKILERRSQRNASADRIYLFTGILRCRECGRNMQPETVKQVYKYYRCRTHTLDPADCPHILRIREDVLEDYLLREFEGIAKKYYSKSKTAEKKPPKTAEQIKRKMQKLKDLYLSDLIEIEEYKKDYTDLKQQLAAINPEPVKEFDLETLRRELKEYPDLDRQAKKEFWVRTIQRIDADNDGAFFVTPS

SEQ ID NO: 9411 - protein, 432 aa, Unknown
  Description of Unknown: Integrase B9412 sequence
  PTHR30461:SF3,IPR036162,PS51737,IPR011109,PTHR30461, PS00397,PF00239,G3DSA:1.10.10.2600,IPR006119,SSF53041, cd00338,SM00857,IPR025827,IPR038109,PS51736, IPR006118,PF13408,G3DSA:3.40.50.1390,Coil
MRAALYIRVSSEEQARHGLSLQEQRDALTRYAKANKMTVVGIYEDAGISARKPYKKRPALLRLLDDCKAGKVDTILFIKLDRWFRNIAGYYDVQTQLDKYGVTWQATEEDYETRTASGRLKVNIMLSVAQDEADRTSERIKFINDGKRAKGQPAGSKAPLGYIVKDRQYQIDNGTVDAARDMFTAYIRLQSVLGVKKYMLETWGIDRAYTKYVNYFRNRLYIGEVYGIENACPALISKQDFDIVNDILRQRSQRCAGVETDRVYLFSGLLHCKECGKTMQSETAKQIYTYYRCRTRMLDNSACQHKKRIREDTLEDYLLHELEGIAERNNRYYKKAEKKPTKNADAIRKKMGKLKTLYLNDLIELDEYKREYVSLKKALEAVEEKPKTNLDALRNGLAEYGTYSREEKKEFWTRFIRRIDADADGAFFVTPR

SEQ ID NO: 9412 - protein, 432 aa, Unknown
  Description of Unknown: Integrase B9413 sequence
  PTHR30461:SF3,IPR036162,PS51737,IPR011109,PTHR30461, PS00397,PF00239,G3DSA:1.10.10.2600,IPR006119,SSF53041, cd00338,SM00857,IPR025827,IPR038109,PS51736, IPR006118,PF13408,G3DSA:3.40.50.1390,Coil
MRAALYIRVSSEEQARHGLSLQEQRDTLTRYAKANKMTVAGIYEDAGISARKPYKKRHALLRLLDDCKAGKVDTILFIKLDRWFRNVAGYYDVQTRLDQYGVTWQATEEDYETRTASGRLKVNIMLSVAQDEADRTSERIKFINDGKRAKGQPAGSKAPLGYIIKDRQYQIDNDTADAARDMFAAYIKLQSVLGVKKYMLETWAIDRAYTKYVNYFRNRLYIGEVYGIENACPALISKQDFDIVNDILRQRSQRCAGVETDRVYLFSGLLHCKECGKTMQSETAKQIYTYYRCRTRMLDNSACRHKKRIREDALEDYLLHELEGIAERNNRYYKKAAKKPTQNADAIRKKMSKLKTLYLNDLIELDEYKREYASLKKSLEAVEEKPKTNLDALRNGLAEYGTYSREEKKEFWTRFIRRIDADDDGAFFVTPR

SEQ ID NO: 9413 - protein, 432 aa, Unknown
  Description of Unknown: Integrase B9414 sequence
  PTHR30461:SF3,IPR036162,PS51737,IPR011109,PTHR30461, PS00397,PF00239,G3DSA:1.10.10.2600,IPR006119,SSF53041, cd00338,SM00857,IPR025827,IPR038109,PS51736, IPR006118,PF13408,G3DSA:3.40.50.1390,Coil
MRVALYIRVSSEEQARHGLSLQEQRDTLTRYTQEHKMTVVGIYEDAGISARKPYKKRPALLRLLGDCKAGKIDTILFIKLDRWFRNVAGYYDVQTQLDQYGVTWQATEEDYETRTASGRLKVNIMLSVAQDEADRTSERIKFINDGKRAKGQPAGSKAPLGYAIKDRQYQIDNGTVDAARDMFAAFIRLKSVLAVKRYMLDTWGIDRAYNKYVNYFRNRLYIGEVYGIENACPALVSKQDFDLVNDIIRQRSQRCAGVGTDRVYLFSGILRCKECGKTMQSETVKKTYTYYRCRTRMLDNSACPHTKRIREDALEDYLLHEMEGIAERNNRYYKKADKKPTQSADSIRKKMGKLKTLYLNDLIELDEYKREYASLKKALEATEERPEINLDALKKELQEYETYSRDEKKEFWTRFIRRIDADNDGAFFVTPR

SEQ ID NO: 9414 - protein, 432 aa, Unknown
  Description of Unknown: Integrase B9415 sequence
  PTHR30461:SF3,IPR036162,PS51737,IPR011109,PTHR30461, PS00397,PF00239,G3DSA:1.10.10.2600,IPR006119,SSF53041, cd00338,SM00857,IPR025827,IPR038109,PS51736, IPR006118,PF13408,G3DSA:3.40.50.1390,Coil
MRVALYIRVSSEEQARHGLSLQEQRDALIRYAKANKMTVVGIYEDAGISARKPYKKRPALLRLLDDCKAGKVDTILFIKLDRWFRNVAGYYDVQTQLDKYGVTWQATEEDYETRTASGRLKVNIMLSVAQDEADRTSERIKFINDGKRAKGQPAGSKAPLGYVIKDRQYQIDNDTADAARDMFAAYIRLQSVLGVKRYMLETWGIDRAYNKYVNYFHNRLYIGEVYGIENACPALISKQDFDIVNDILRQRSQRCAGVETDRVYLFSGLLHCKECGKTMQSETAKQIYTYYRCRTRMLDNSACQHKKRIREDALEDYLLHELEGIAERNNRYYKKAEKKPTQSADAIRKKMSKLKTLYLNDLIELDEYKKEYTTLKKSLEAVEENPKTNLDALRNGLAEYDTYSREEKKEFWTRFIRRIDADDDGAFFVTPR

SEQ ID NO: 9415 - protein, 432 aa, Unknown
  Description of Unknown: Integrase B9416 sequence
  PTHR30461:SF3,IPR036162,PS51737,IPR011109,PTHR30461, PS00397,PF00239,G3DSA:1.10.10.2600,IPR006119,SSF53041, cd00338,SM00857,IPR025827,IPR038109,PS51736, IPR006118,PF13408,G3DSA:3.40.50.1390,Coil
MRAALYIRVSSEEQARHGLSLQEQRDALTRYAEANKMTVVGIYEDAGISARKPYKKRPALLRLLDDCKAGKVDTILFIKLDRWFRNVAGYYDVQTRLDQYGVTWQATEEDYETRTASGRLKVNIMLSVAQDEADRTSERIKFINDGKRAKGQPAGSKAPLGYIIKDRQYQIDNDTADAARDMFAAYIRLQSVLGVKRYMLDRWGIDRAYNKYINYFHNRLYIGEVYGIENACPALVSKQDFDLVNDIIRQRSQRCAGVETDRIYLFSGLLHCKECGKTMQSETAKQVYTYYRCRTRMLDNSACQHKKRIREDALEDYLLHELEGIAERNNRYYKKAEKKPTQSADAIRKKMSKLKTLYLNDLIELDEYKKEYTTLKKSLEAVEENPKTNLDALRNGLAEYDTYSREEKKEFWTRFIRRIDADDDGAFFVTPR

SEQ ID NO: 9416 - protein, 432 aa, Unknown
  Description of Unknown: Integrase B9417 sequence
  SM00857,G3DSA:1.10.10.2600,IPR036162,PF13408,PS51737, G3DSA:3.40.50.1390,IPR025827,IPR006119,IPR038109,PF07508, IPR011109,SSF53041,PTHR30461,PS51736,cd00338, PF00239
METKITKIDALPKLEKKLRVAAYARVSSEKDAMLQSLSNQVSYYNNLIRSTEGWSFVGVYADEALSGTKDTRDEFQRLIKDAVEGEIDLILVKSISRFARNTVTMLETVRKLKAIGVDVYFEEQNLHSLSGEGEMVLTFLASFAQEEARSVSENQKWKVRKTFESGVQWSATKSYGYRVINKKYVVVPEEAKIVKYIFDLYINGLGFQAISNKLQSENIKPFYAKAWNKTSVKNIISNINYTGDLLLQKGYSENFLTKKYVANKGAKDQFLVEDDHEAIISKEIFNKAMDLKRGRAKYFKASRETQIRYELSGKIKCGICGKSFNHRTTKYSQKWICITYNEKGKSVCPSKCVPDAELKRITDKVGLDNIDWVEVFPNNELKIYLRDGTNVIEKWNDYSRKNSWTDEMKAKAREQAIKKSLVNYLKGGNING

SEQ ID NO: 9417 - protein, 432 aa, Unknown
  Description of Unknown: Integrase B9418 sequence
  PTHR30461:SF3,IPR036162,PS51737,IPR011109,PTHR30461, PS00397,PF00239,G3DSA:1.10.10.2600,IPR006119,SSF53041, cd00338,SM00857,IPR025827,IPR038109,PS51736, IPR006118,PF13408,G3DSA:3.40.50.1390,Coil
MRVALYIRVSSEEQARHGLSLQEQRDTLTRYAQEHKMAVVGIYEDAGISARKPYKKRPALLRLLCDCKAGKVDTILFIKLDRWFRNVAGYYDVQTQLDQYGVTWQATEEDYETRTASGRLKVNIMLSVAQDEADRTSERIKFINDGKRAKGQPAGSKAPLGYVIKDRRYQIDNDTADAARDMFAAFIRLKSVLAVKRYMLDTWGIDRAYSKYVNYFRNRLYIGEVYGIENACPALVSKQDFDLVNDIIRHRSQRCAGVDTDRVYLFSGLLHCKECGKTMQSETVKKTYTYYRCRTRMLDNSACPHTKRIREDALEDYLLNELEGIAERNNRYYKKAEKKPTHSADSIRKKMSKLKTLYLNDLIELDDYKAEYASLKRTLETVKEKPKTDLDALRNGLSEYDTYSREEKKEFWTRFIRRIDADNDGAFFVTPR

SEQ ID NO: 9418 - protein, 432 aa, Unknown
  Description of Unknown: Integrase B9419 sequence
  PTHR30461:SF3,SM00857,G3DSA:1.10.10.2600,IPR036162,PF13408, PS51737,IPR025827,G3DSA:3.40.50.1390,IPR006119,IPR038109, IPR011109,SSF53041,PTHR30461,Coil,PS51736, cd00338,PF00239
MRVALYIRVTSEEQARHGLSLQEQRDALIRYAKANKMTVVGIYEDAGISARKPYKKRPALLQLLDDCKAGKVDTILFIKLDRWFRNVAGYYDVQTQLDKYGVTWQATEEDYETRTASGRLKVNIMLSVAQDEADRASERVKFINDGKRAKGQPAGSKAPLGYIIKDRKYQIDNDTADAARDMFAAYVRLQSVLGVKKYMLETWGVDRAYTKYVNYFRNRLYIGEVYGIENACPALVSKQDFDIVNDILRQRSQRCAGVETDRVYLFSGLLHCKECGKTMQSETAKQIYTYYRCRTRMLDNSACQHKKRVREDALEDYLLHELEGIAERNNRYYKKAEKKPTQSADAIRKKMGKLKTLYLNDLIELDEYKKEYTTLKKSIEAVEQKPKTNLDALRNGIAEYDTYSREEKKEFWTRFIRRIDADDDGAFFVTPR

SEQ ID NO: 9419 - protein, 432 aa, Unknown
  Description of Unknown: Integrase B9420 sequence
  PTHR30461:SF3,IPR036162,PS51737,IPR011109,PTHR30461, PS00397,PF00239,G3DSA:1.10.10.2600,IPR006119,SSF53041, cd00338,SM00857,IPR025827,IPR038109,PS51736, IPR006118,PF13408,G3DSA:3.40.50.1390,Coil
MRAALYIRVSSDEQARHGLSLQEQRDALTRYAQEHKMTVAGIYEDAGISARKPYKKRPALLRLLGDCKVGKVDTILFIKLDRWFRNVAGYYDVQTQLDQYGVTWQATEEDYETRTASGRLKVNIMLSVAQDEADRTSERIKFINDGKRAKGQPAGSKAPLGYAIKDRQYQIDNGTVDAARDMFAAFIRLKSVLAVKRYMLDKWCIDRAYSKYVNYFRNRLYIGEVYGIENACPALVSKQDFDLVNDIIRQRSQRCAGVGTDRVYLFSGILRCKECGKTMQSETVKKTYTYYRCRTRMLDNSACPHTKRIREDALEDYLLHEMEGIAERNNRYYKKAEKKPTHSADSIRKKMSKLKTLYLNDLIELGDYKAEYASLKRALETVEEKPETDLDALKDGLGEYDTYSRNEKKEFWTRFIRRIDADNDGAFFVTPR

SEQ ID NO: 9420 - protein, 432 aa, Unknown
  Description of Unknown: Integrase B9421 sequence
  PTHR30461:SF3,IPR036162,PS51737,IPR011109,PTHR30461, PS00397,PF00239,G3DSA:1.10.10.2600,IPR006119,SSF53041, cd00338,SM00857,IPR025827,IPR038109,PS51736, IPR006118,PF13408,G3DSA:3.40.50.1390,Coil
MRAALYIRVSSEEQARHGLSLQEQRDALTRYAKANKMTVVGIYEDAGISARKPYKKRPALLRLLDDCKAGKVDTILFIKLDRWFRNVAGYYDVQTQLDRYGVTWQATEEDYETRTASGRLKVNIMLSVAQDEADRTSERIKFINDGKRAKGQPAGSKAPLGYIIKDRQYQIDNDTADAARDMFAAYIRLKSVLAVKRYMLETWSIDRAYNKYVNYFRNRLYIGEVYGIENACPSLVSKQDFDLVNDISRQRSQRCAGVDVDRVYLFSGLLHCKECGKTMQSETAKQIYTYYRCRTRMLDNSACPHMKRIREDALEDYLLHELAGITERNNRYYKKAEKKPTQSADAIRKKMSKLKTLYLNDLIELDDYKAEYASLKKSLETVEEKPKTDLDALRNGLGEYDTYSREEKKEFWTRFIRRIDADNDGAFFVTPR

SEQ ID NO: 9421 - protein, 432 aa, Unknown
  Description of Unknown: Integrase B9422 sequence
  PTHR30461:SF3,IPR036162,PS51737,IPR011109,PTHR30461, PS00397,PF00239,G3DSA:1.10.10.2600,IPR006119,SSF53041, cd00338,SM00857,IPR025827,IPR038109,PS51736, IPR006118,PF13408,G3DSA:3.40.50.1390,Coil
MRVALYIRVSSEEQARHGLSLQEQRDTLTRYTQEHKMTVVGIYEDAGISARKPYKKRPALLRLLGDCKAGKVDTILFIKLDRWFRNVAGYYDVQTQLDQYGVTWQATEEDYETRTASGRLKVNIMLSVAQDEADRTSERIKFINDGKRAKGQPAGSKAPLGYVIKDRQYQIDSGTVDAARDMFASFIRLKSVLAVKRYMLDTWGIDRAYNKYVNYFRNRLYIGEVYGIENACPALVSKQDFDLVNDIIRQRSQRCAGVGTDRVYLFSGILRCKECGKTMQSETVKKTYTYYRCRTRMLDNSACPHTKRIREDALEDYLLHEMEGIAERNNRYYKKADKKPTQSADSIRKKMGKLKTLYLNDLIELDEYKREYASLKKALEATEERPEINLDALKKELQEYETYSRDEKKEFWTRFIRRIDADNDGAFFVTPR

SEQ ID NO: 9422 - protein, 432 aa, Unknown
  Description of Unknown: Integrase B9423 sequence
  PTHR30461:SF3,IPR036162,PS51737,IPR011109,PTHR30461, PS00397,PF00239,G3DSA:1.10.10.2600,IPR006119,SSF53041, cd00338,SM00857,IPR025827,IPR038109,PS51736, IPR006118,PF13408,G3DSA:3.40.50.1390,Coil
MRAALYIRVSSEEQARHGLSLQEQRDALTRYAKANKMTVVGIYEDAGISARKPYKKRPALLRLLDDCKAGKVDTILFIKLDRWFRNVAGYYDVQTQLDRYGVTWQATEEDYETRTASGRLKVNIMLSVAQDEADRTSERIKFINDGKRAQGQPAGSKAPLGYIIKERQYQIDNDTADAARDMFAAYIRLKSVLAVKRYMLDTWGIDRAYNKYVNYFHNRLYIGEVYGIENACPSLVSKQDFDLVNDISRQRSQRCAGVDVDRVYLFSGLLHCKECGKTMQSETAKQIYTYYRCRTRMLDNSACPHMKRIREDALEDYLLHELAEITERNNRYYKKAEKKPTQSADAIRKKMSKLKTLYLNDLIELDDYKAEYASLKKSLETVEEKPKTDLDALRNGLGEYDTYSREEKKEFWTRFIRRIDADNDGAFFVTPR

SEQ ID NO: 9423 - protein, 432 aa, Unknown
  Description of Unknown: Integrase B9424 sequence
  PTHR30461:SF3,IPR036162,PS51737,IPR011109,PTHR30461, PS00397,PF00239,G3DSA:1.10.10.2600,IPR006119,SSF53041, cd00338,SM00857,IPR025827,IPR038109,PS51736, IPR006118,PF13408,G3DSA:3.40.50.1390,Coil
MRVALYIRVSSEEQARHGLSLQEQRDALIRYAKANKMTVAGIYEDAGISARKPYKKRPALLRLLDDCKAGKVDTILFIKLDRWFRNVAGYYDVQTRLDQYGVTWQATEEDYETRTASGRLKVNIMLSVAQDEADRTSERIKFINDGKRAKGQPAGSKAPLGYIIKDRKYQIDNDTADAARDMFAAYIKLQSVLGVKRYMLETWGIDRAYNKYVNYFHNRLYIGEVYGIENVCPALISKQDFDIVNDILRQRSQRCAGIKTDRVYLFSGLLHCKECGKTMQSETAKQIYTYYRCRTRMLDNSACQHKKRIREDALEDYLLHELEGIAERNNRYYKKAEKKPTQSADAIRKKMDKLKTLYLNDLIELDEYKKEYTTLKKSLEAVEEKPKTNLDALRNGLAEYDTYSREEKKEFWTRFIRRIDADNDGAFFVTPR

SEQ ID NO: 9424 - protein, 432 aa, Unknown
  Description of Unknown: Integrase B9425 sequence
  PTHR30461:SF3,IPR036162,PS51737,IPR011109,PTHR30461, PS00397,PF00239,G3DSA:1.10.10.2600,IPR006119,SSF53041, cd00338,SM00857,IPR025827,IPR038109,PS51736, IPR006118,PF13408,G3DSA:3.40.50.1390,Coil
MRAALYIRVSSEEQARHGLSLQEQRGALTKYAKANKMTVVGIYEDAGISARKPYKKRPALLRLLDDCKAGKIDTILFIKLDRWFRNVAGYYDVQTQLDKYGVTWQATEEDYETRTASGRLKVNIMLSVAQDEADRTSERIKFINDGKRAKGQPAGSKAPLGYIIKDRQYQIDNDTADAARDMFAAYIRLQSVLGVKKYMLETWKIDRAYTKYVNYFRNRLYIGEVYGIENACPALISKQDFDIVNDILRQRSQRCAGVETDRVYLFSGLLHCKECGKTMQSETAKQIYTYYRCRTRMLDNSACPHTKRIREDALEDYLLREVVEIAERTNRSYKQEKKKPTQSADAIRKKMGKLKTLYLNDLIELDEYKREYASLKKALEAVEEKPKTNLDALRNGLAEYDTYSREEKKEFWTRFIRRIDADDDGAFFVTPR

SEQ ID NO: 9425 - protein, 432 aa, Unknown
  Description of Unknown: Integrase B9426 sequence
  PTHR30461:SF3,IPR036162,PS51737,IPR011109,PTHR30461, PS00397,PF00239,G3DSA:1.10.10.2600,IPR006119,SSF53041, cd00338,SM00857,IPR025827,IPR038109,PS51736, IPR006118,PF13408,G3DSA:3.40.50.1390,Coil
MRAALYIRVSSDEQARHGLSLQEQRDALTRYAQEHKMTVAGIYEDAGISARKPYKKRPALLRLLGDCKVGKVDTILFIKLDRWFRNVAGYYDVQTQLDQYGVTWQATEEDYETRTASGRLKVNIMLSVAQDEADRTSERIKFINDGKRAKGQPAGSKAPLGYAIKDRQYQIDNGTVDAARDMFAAFIRLKSVLAVKRYMLDTWGIDRAYSKYVNYFRNRLYIGEVYGIENACPALVSKQDFDLVTDIIQHRSQRCAGVDTDRVYLFSGILRCKECGKTMQSETVKKTYTYYRCRTRMLDNSACPHTKRIREDALEDYLLHEMEGIAERNNRYYKKADKKPTQSADSIRKKMGKLKTLYLNDLIELDEYKREYASLKKALEATEESPEINLDALKKELQEYETYSRDEKKEFWTRFIRRIDADNDGAFFVTPR

SEQ ID NO: 9426 - protein, 432 aa, Unknown
  Description of Unknown: Integrase B9427 sequence
  PTHR30461:SF3,SM00857,IPR006118,G3DSA:1.10.10.2600,IPR036162, PF13408,PS51737,IPR025827,G3DSA:3.40.50.1390,IPR006119, IPR038109,IPR011109,SSF53041,PTHR30461,PS00397, PS51736,cd00338,PF00239
MRVALYVRVSTEEQAVHGLSVDDQKDSLKRWAEENKHKVVDYYVDAGVSGRKSVSKRPELQRLLSDVEAGKIDLVAFTKLDRWFRNIGEFYKAQEVLDAHGVVWQATYEDYETATAAGRLKVNIMLSVAQDEADRTSERVKRIMQHKRELGLCPAGKTPIGLKAVESRLCIDEETAHIARRMFEDYIATGSVNHVKKMLVSEFGIMRANHHIKGALSNERYIGLNNGIKVCDALIPPEDFALVQRMLTARSIRNNGSKHTWLFSGLVWCAECGHRLVTHSTRQRGTDYFYYRCKNYEIGICRHKKRINEATLEKYLLAKLPIEVQAHNAKLKAGKTKPPVDTAAIKRKMDKLTDLYLADLISREKYEIEYTALKEKLNVPPEPKPINEELVMSLLDAYDKLPPRGKKEVWNRFIRRIVVSENGDIFFELVWL

SEQ ID NO: 9427 - protein, 432 aa, Unknown
  Description of Unknown: Integrase B9428 sequence
  PTHR30461:SF3,IPR036162,PS51737,IPR011109,PTHR30461, PS00397,PF00239,G3DSA:1.10.10.2600,IPR006119,SSF53041, cd00338,SM00857,IPR025827,IPR038109,PS51736, IPR006118,PF13408,G3DSA:3.40.50.1390,Coil
MRAALYIRVSSDEQARHGLSLQEQRDALTRYAQEHKMTVAGIYEDAGISARKPYKKRPALLRLLGDCKVGKVDTILFIKLDRWFRNVAGYYDVQTQLDQYGVTWQATEEDYETRTASGRLKVNIMLSVAQDEADRTSERIKFINDGKRAKGQPAGSKAPLGYAIKDRQYQIDNGTVDAARDMFAAFIRLKSVLAVKRYMLDTWGIDRAYSKYVNYFRNRLYIGEVYGIENACPALVSKQDFDLVTDIIRHRSQRCAGVDTDRVYLFPGILHCKECGKTMQSETVKKTYTYYRCRTRMLDNSACPHTKRIREDALEDYLLHELEGIAERNNRYYKKADKKPTQSADSIRKKMGKLKTLYLNDLIELDEYKREYASLKKALEATEERPEINLDALKKELQEYETYSRDEKKEFWTRFIRRIDADNDGAFFVTPR

SEQ ID NO: 9428 - protein, 432 aa, Unknown
  Description of Unknown: Integrase B9429 sequence
  PTHR30461:SF3,SM00857,IPR006118,G3DSA:1.10.10.2600,IPR036162, PF13408,IPR025827,G3DSA:3.40.50.1390,PS51737,IPR006119, IPR038109,SSF53041,IPR011109,PTHR30461,PS00397, PS51736,cd00338,PF00239
MRVALYVRVSTEEQAVHGLSVDDQKESLKKWAEENKHKVVDYYVDAGVSGRKSVSKRPELQRLLSDVEAGKIDLVAFTKLDRWFRNIGEFYKAQEVLDAHGVVWQATYEDYETATAAGRLKVNIMLSVAQDEADRTSERVKRIMQHKRELGLCPAGKTPIGLKAVESRLCIDEETAHIARRMFEDYIATGSVNHVKKMLVSEFGIMRANHHIKGALSNERYIGLNSGIKVCDALIPPEDFALVQRMLTARSIRNNGSRHTWLFSGLVWCAECGHRLVTHSTRQRGTDYFYYRCKNYELGICRHKKRINEATLEKYLLAKLPIEVQAHNAKLKAGKTKPPVDTAAIKRKMDKLTDLYLADLISREKYEMEYTSLKEKLKVPPEPKPINEELVMSVLDAYDKLPPSGKKEVWNRFIRRIVISENGDIFFELVWL

SEQ ID NO: 9429 - protein, 432 aa, Unknown
  Description of Unknown: Integrase B9430 sequence
  PTHR30461:SF3,IPR036162,PS51737,IPR011109,PTHR30461, PS00397,PF00239,G3DSA:1.10.10.2600,IPR006119,SSF53041, cd00338,SM00857,IPR025827,IPR038109,PS51736, IPR006118,PF13408,G3DSA:3.40.50.1390,Coil
MRAALYIRVSSEEQARHGLSLQEQRDALTRYAKANKMTVVSIYEDAGISARKPYKKRPALLRLLDDCKAGKVDTILFIKLDRWFRNVAGYYDVQTRLDKYGVTWQATEEDYETRTASGRLKVNIMLSVAQDEADRTSERIKFINDGKRAKGQPAGSKAPLGYVIKDRQYQIDNNTVAAARDMFAAYIRLQSVLGVKRYMLETWGIDRSYNKYINYFRNRLYIGEVYGIENACPALVSKQDFDIVNDILRQRSQRCAGVETDRVYLFSGLLHCKECGKTMQSETIKQTYTYYRCRTRMLDNSACQHKKRIREDALEDYLLHELEGIAARNNRYYKKAEKKPTQSADAIRKKMDKLKTLYLNDLIELDEYKKEYTALKKSLETVEEKPQTNLDALRNGLAEYDTYSREEKKEFWTRFIRRIDADDDGAFFVTPR

SEQ ID NO: 9430 - protein, 432 aa, Unknown
  Description of Unknown: Integrase B9431 sequence
  PTHR30461:SF3,SM00857,IPR006118,G3DSA:1.10.10.2600,IPR036162, PF13408,PS51737,G3DSA:3.40.50.1390,IPR025827,IPR006119, IPR038109,SSF53041,IPR011109,PTHR30461,PS00397, PS51736,cd00338,PF00239
MRAALYIRVSTEEQARHGLSLGDQRESLLAYAADNGMEVVGVYEDAGISARKPYKRRPALLRLLADCKDGKIDTILFVKLDRWFRSVAGYYAVQEELDRCHVTWQATREDYETRTASGRLKVNIMLSVAQDEADRTSERIKAINEGKRLKGQPTTWRTPIGICVKNRHYAIDEETADAARDMFPAFIRLQSILALRRYMATEWGIKRSYNKYKDALGNRLYLGEAFGVENALPALIDQETFDLAGKILERRSQRNASADRIYLFTGILRCRECGRNMQPETVKQVYKYYRCRTHTLDPADCPHILRIREDVLEDYLLREFEGIAKKYYSKSKTAEKKPPKTAEQIKRKMQKLKELYLSDLIEIEEYKKDYTELKQQLAAINPEPIKEFDLETLRRELKEYPDLDRQAKKEFWVRTIQRIDADNDGAFFVTPS

SEQ ID NO: 9431 - protein, 432 aa, Unknown
  Description of Unknown: Integrase B9432 sequence
  PTHR30461:SF3,IPR036162,PS51737,IPR011109,PTHR30461, PS00397,PF00239,G3DSA:1.10.10.2600,IPR006119,SSF53041, cd00338,SM00857,IPR025827,IPR038109,PS51736, IPR006118,PF13408,G3DSA:3.40.50.1390,Coil
MRAALYIRVSSEEQARHGLSLQEQRDTLTRYANANKMTVVGIYEDAGISARKPYKKRPALLRLLDNCKTGKVDTILFIKLDRWFRNVAGYYDVQTQLDKYGVTWQATEEDYETRTASGRLKVNIMLSVAQDEADRTSERIKFINDGKRAKGQPAGSKAPLGYIIKDRQYQIDNDTADAARDMFAAYVRLQSVLGVKRYMLETWGIDRAYTKYVNYFRNRLYIGEVYGIENACPALVSKQDFDIVNDILRQRSQRCAGVETDRVYLFSGLLHCKECGKTMQSETAKHIYTYYRCRTRMLDNSACQHKKRIREDALEDYLLHELEGIAERNNRYYKKAEKKPTQSADAIRKKMSKLKTLYLNDLIELDEYKREYASLKKVLEAVEEKPKTNLDALRNGLAEYDTYSREEKKEFWTRFIRRIDADDDGAFFVTPR

SEQ ID NO: 9432 - protein, 432 aa, Unknown
  Description of Unknown: Integrase B9433 sequence
  PTHR30461:SF3,IPR036162,PS51737,IPR011109,PTHR30461, PS00397,PF00239,G3DSA:1.10.10.2600,IPR006119,SSF53041, cd00338,SM00857,IPR025827,IPR038109,PS51736, IPR006118,PF13408,G3DSA:3.40.50.1390,Coil
MRAALYIRVSSEEQARHGLSLQEQRDALTKYAKANKMTVVGIYEDAGISARKPYKKRPALLRLLDDCKAGKVDTILFIKLDRWFRNVAGYYDVQTQLDKYGVTWQATEEDYETRTASGRLKVNIMLSVAQDEADRTSERIKFINDGKRAKGQPAGSKAPLGYIIKDRQYQIDNDTVAAARDMFAAYIRLQSVLGVKRYMLETWGIDRAYTKYVNYFRNRLYIGEVYGVENACPALISKQNFDIVNDILRQRSQRCAGVETDRVYLFSGLLHCKECGKTMQSETAKQIYTYYRCRTRMLDNSACQHKKRIREDALEDYLLHELEGIAERNNRYYKKTEKKPTQNADAIRKKMSKLKTLYLNDLIELDEYKREYASLKKTLETVEEKPQTNLDALRNGLAEYDTYSREEKKEFWTRFIRRIDADDDGAFFVTPR

SEQ ID NO: 9433 - protein, 432 aa, Unknown
  Description of Unknown: Integrase B9434 sequence
  PTHR30461:SF3,IPR036162,PS51737,IPR011109,PTHR30461, PS00397,PF00239,G3DSA:1.10.10.2600,IPR006119,SSF53041, cd00338,SM00857,IPR025827,IPR038109,PS51736, IPR006118,PF13408,G3DSA:3.40.50.1390,Coil
MRAALYIRVSSEEQARHGLSLQEQRDTLTRYAKANKMTVVGIYEDAGISARKPYKKRPALLRLLDDCKAGKVDTILFIKLDRWFRNVAGYYDVQTKLDKYGVTWQATEEDYETRTASGRLKVNIMLSVAQDEADRTSERIKFINDGKRAKGQPAGSKAPLGYIVKDRQYQIDNGTVAAARDMFAAYIRLQSVLGVKKYMLETWGIDRAYTKYVNYFRNRLYIGEVYGIENACPALISKQDFDIVNDILRQRSQRCAGVETDRVYLFSGLLHCKECGKTMQSETAKQIYTYYRCRTRMLDNSACQHKKRIREDALEDYLLHELEGIAERNNRYYKKAEKKPTQSADAIRKKMSKLKTLYLNDLIELDEYKQEYASLKKSLEAVEEKPKTNLDALRNGLAEYDTYSREEKKEFWTRFIRRIDADDDGAFFVTPR

SEQ ID NO: 9434 - protein, 432 aa, Unknown
  Description of Unknown: Integrase B9435 sequence
  PTHR30461:SF3,IPR036162,PS51737,IPR011109,PTHR30461, PS00397,PF00239,G3DSA:1.10.10.2600,IPR006119,SSF53041, cd00338,SM00857,IPR025827,IPR038109,PS51736, IPR006118,PF13408,G3DSA:3.40.50.1390,Coil
MRAALYIRVSSEEQARHGLSLQEQRDTLTRYAKANKMTVVGIYEDAGISARKPYKKRPALLRLLDDCKAGKVDTILFIKLDRWFRNVAGYYDVQTQLDKYGVTWQATEEDYETRTASGRLKVNIMLSVAQDEADRTSERIKFINDGKRAKGQPAGSKAPLGYIIKDRQYQIDNDTVAAARDMFAAYIRLQSVLGVKKYMLETWGIDRAYTKYVNYFRNRLYIGEVYGIENACPALISKQDFDIVNDILRQRSQRCAGVETDRVYLFSGLLHCKECGKTMQSETAKQIYTYYRCRTRMLDNSACQHKKRIREDALEDYLLHELEGIAERNNRYYKKAEKKPTQSADAIRKKMGKLKTLYLNDLIELDEYKREYASLKKALEAVEEKPKTNLDSLRNGLAEYDTYSREEKKEFWTRFIRRIDADDEGAFFVTPR

SEQ ID NO: 9435 - protein, 432 aa, Unknown
  Description of Unknown: Integrase B9436 sequence
  PTHR30461:SF3,SM00857,IPR006118,G3DSA:1.10.10.2600,IPR036162, PF13408,PS51737,G3DSA:3.40.50.1390,IPR025827,IPR006119, IPR038109,IPR011109,SSF53041,PTHR30461,PS00397, PS51736,cd00338,PF00239
MRAALYIRVSTEEQARHGLSLGDQRESLLAYAADNGMEVVGVYEDAGISARKPYKRRPALLRLLEDCKDGKIDTILFVKLDRWFRSVAGYYAVQEELDRCHVTWQATREDYETRTASGRLKVNIMLSVAQDEADRTSERIKAINEGKRLKGQPTTWRTPIGICVKNRHYAIDEETADAARDMFPAFIRLQSILALRRYMATEWGIKRSYNKYKDALSNRLYLGEAFGVENALPALVDQETFNLARRILEQRSQRNASADRIYLFTGILRCRECGRNMQPETVKQVYKYYRCRTHTLDPADCPHILRIREDVLEDYLLREFEGIAKKYYSKSKTAEKKQPKTAEQIKRKMQKLKDLYLSDLIEIEEYKKDYTELKQQLAAINPEPIKEFDLETLRRELKEYPDLDRQAKKEFWVRTIQRIDADNDGAFFVTPS

SEQ ID NO: 9436 - protein, 432 aa, Unknown
  Description of Unknown: Integrase B9437 sequence
  PTHR30461:SF3,IPR036162,PS51737,IPR011109,PTHR30461, PS00397,PF00239,G3DSA:1.10.10.2600,IPR006119,SSF53041, cd00338,SM00857,IPR025827,IPR038109,PS51736, IPR006118,PF13408,G3DSA:3.40.50.1390,Coil
MRAALYIRVSSEEQARHGLSLQEQRDTLTRYAKANKMTVAGIYEDAGISARKPYKKRHALLRLLDDCKAGKVDTILFIKLDRWFRNVAGYYDVQTRLDQYGVTWQATEEDYETRTASGRLKVNIMLSVAQDEADRTSERIKFINDGKRAKGQPAGSKAPLGYIIKDRQYQIDNDTADAARDMFAAYIKLQSVLGVKKYMLETWAIDRAYTKYVNYFRNRLYIGEVYGIENACPALISKQDFGIVNDILRQRSQRCAGVETDRVYLFSGLLHCKECGKTMQSETAKQIYTYYRCRTRMLDNSACQHKKRIREDALEDYLLHELEGIAERNNRYYKKAGKKPTQSADAIRKKMSKLKTLYLNDLIELDEYKREYASLKKSFEAVEEKPKTNLDALRNGLAEYDTYSREEKKEFWTRFIRRIDADDDGAFFVTPR

SEQ ID NO: 9437 - protein, 432 aa, Unknown
  Description of Unknown: Integrase B9438 sequence
  PTHR30461:SF3,IPR036162,PS51737,IPR011109,PTHR30461, PS00397,PF00239,G3DSA:1.10.10.2600,IPR006119,SSF53041, cd00338,SM00857,IPR025827,IPR038109,PS51736, IPR006118,PF13408,G3DSA:3.40.50.1390,Coil
MRAALYIRVSSEEQARHGLSLQEQRDALTRYAQEHKLIVVGIYEDAGISARKPYKKRPALLRLLDDCKAGKVDTILFIKLDRWFRNVAGYYGVQTQLDRYGVTWQATEEDYETRTASGRLKVNIMLSVAQDEADRTSERIKFINDGKRAKGQPAGSKAPLGYAIKDRQYQIDNGTVDAARDMFAAFIRLKSVLAVKRYMLDTWGIDRAYNKYVNYFRNRLYIGEVYGIENACPALVSKQDFDLVNDIIRERSQRCAGVGTDRVYLFSGILRCKECGKTMQSETVKKTYTYYRCRTRMLDNSACPHTKRIREDALEDYLLHEMEGIAERNNRYYKKADKKPTQSADSIRKKMGKLKTLYLNDLIELDEYKREYASLKKALEATEERPEINLDALKKELQEYETYSRDEKKEFWTRFIRRIDADNDGAFFVTPR

SEQ ID NO: 9438 - protein, 432 aa, Unknown
  Description of Unknown: Integrase B9439 sequence
  PTHR30461:SF3,SM00857,IPR006118,G3DSA:1.10.10.2600,IPR036162, PF13408,PS51737,G3DSA:3.40.50.1390,IPR025827,IPR006119, IPR038109,IPR011109,SSF53041,PTHR30461,PS00397, PS51736,cd00338,PF00239
MRAALYIRVSTEEQARHGLSLGDQRESLLAYAADNGMEVVGVYEDAGISARKPYKRRPALLRLLADCKDGKIDTILFVKLDRWFRSVAGYYAVQEELDRCHVTWQATREDYETRTASGRLKVNIMLSVAQDEADRTSERIKAINEGKRLKGQPTTWRTPIGICVKDRHYAIDEETADAARDMFPAFIRLQSILALRRYMATEWGIKRSYNKYKDALGNRLYLGEAFGVENALPALVDQETFDLAGKILERRSQRNASADRIYLFTGILRCRECGRNMQPETVKKVYKYYRCRTHTLDPADCPHILRIREDVLEDYLLREFEGIAKKYYSKSKTAEKKPPKTAEQIKRKMQKLKDLYLSDLIEIEEYKKDYTELKQQLAAINPEPIKEFDLETLRRELKEYPDLDRQAKKEFWVRTIQRIDADNDGAFFVTPS

SEQ ID NO: 9439 - protein, 432 aa, Unknown
  Description of Unknown: Integrase B9440 sequence
  PTHR30461:SF3,SM00857,G3DSA:1.10.10.2600,IPR036162,PF13408, PS51737,IPR025827,G3DSA:3.40.50.1390,IPR006119,IPR038109, SSF53041,IPR011109,PTHR30461,Coil,PS51736, cd00338,PF00239
MRVALYIRVTSEEQARHGLSLQEQRDALIRYAKANKMTVVGIYEDAGISARKPYKKRPALLRLLDDCKAGKVDTILFIKLDRWFRNVAGYYDVQTQLDKYGVTWQATEEDYETRTASGRLKVNIMLSVAQDEADRASERVKFINDGKRAKGQPAGSKAPLGYIIKDRQYQIDNDTADAARDMFAAYIRLQSVLGVKKYMLETWKIDRAYTKYVNYFRNRLYIGEAYGIENACPALISKQDFDIVNDILRQRSQRCAGVETDRVYLFSGLLHCKECGKTMQSETAKQIYTYYRCRTRMLDNSACQHKKRIREDALEDYLLHELEGIAERNNRYYKKAEKKPTQSADAIRKKMSKLKTLYLNDLIELDEYKLEYASLKKSLEAVEEKPKTNLDALRNGLAEYDTYSREEKKEFWTRFIRRIDADDDGAFFVTPR

SEQ ID NO: 9440 - protein, 432 aa, Unknown
  Description of Unknown: Integrase B9441 sequence
  PTHR30461:SF3,IPR036162,PS51737,IPR011109,PTHR30461, PS00397,PF00239,G3DSA:1.10.10.2600,IPR006119,SSF53041, cd00338,SM00857,IPR025827,IPR038109,PS51736, IPR006118,PF13408,G3DSA:3.40.50.1390,Coil
MRAALYIRVSSEEQARHGLSLQEQRDALTRYAKANKMTVVGIYEDAGISARKPYKKRPALLRLLGDCKAGKVDTILFIKLDRWFRNVAGYYDVQTRLDQYGVTWQATEEDYETRTASGRLKVNIMLSVAQDEADRTSERIKFINDGKRAKGQPAGSKAPLGYIVKDRQYQIDTGAVDAARDMFTAYIRLQSVLGVKKYMLETWGIDRAYTKYVNYFRNRLYIGEVYGIENACPALVSRQDFDIVNDILRQRSQRCAGVETDRVYLFSGLLHCKECGKTMQSETAKQIYTYYRCRTRMLDNSACQHKKRIREDALEDYLLHELEGIAERNNRYYKKAEKKPTQSADAIRKKMGKLKTLYLNDLIELDEYKREYASLKKTLETVEEKPQTNLDALRNGLAEYDTYSREEKKEFWTRFIRRIDADDDGAFFVTPR

SEQ ID NO: 9441 - protein, 432 aa, Unknown
  Description of Unknown: Integrase B9442 sequence
  PTHR30461:SF3,SM00857,IPR006118,G3DSA:1.10.10.2600,IPR036162, PF13408,PS51737,G3DSA:3.40.50.1390,IPR025827,IPR006119, IPR038109,SSF53041,IPR011109,PTHR30461,PS00397, PS51736,cd00338,PF00239
MRAALYIRVSTEEQARNGLSLGDQRESLLAYAADNSMEVVGVYEDAGISARKPYRQRPALLRLLADCKDGKIDTILFVKLDRWFRNVAGYYAVQEELDRCHVTWQATREDYETRTASGRLKVNIMLSVAQDEADRTSERIKAINEGKRLKGQPTTWRTPIGICVKNRHYAIDEETADAARDMFPAFIRLQSILALRRYMATEWGIKRSYNKYKDALSNRLYLGEAFGVENALPALVDQETFNLARRILEQRSQRNASADRIYLFTGILRCRECGRNMQPETVKQVYKYYRCRTHTLDPADCPHILRIREDVLEDYLLREFEGIAKKYYSKSKTAEKKPPKTAEQIKRKMQKLKDLYLSDLIEIEEYKKDYTDLKQQLAAINPEPVKEFDLETLRRELKEYPDLDRQAKKEFWVRTIQRIDADNDGAFFVTPS

SEQ ID NO: 9442 - protein, 432 aa, Unknown
  Description of Unknown: Integrase B9443 sequence
  PTHR30461:SF3,SM00857,G3DSA:1.10.10.2600,IPR036162,PF13408, PS51737,IPR025827,G3DSA:3.40.50.1390,IPR006119,IPR038109, IPR011109,SSF53041,PTHR30461,Coil,PS51736, cd00338,PF00239
MRVALYIRVTSEEQARHGLSLQEQRDALIRYAKANKMTVVGIYEDAGISARKPYKKRPALLQLLDDCKAGKVDTILFIKLDRWFRNVAGYYDVQTQLDKYGVTWQATEEDYETRTASGRLKVNIMLSVAQDEADRASERVKFINDGKRAKGQPAGSKAPLGYIIKDRKYQIDNDTADAARDMFAAYVRLQSVLGVKKYMLETWGVDRAYTKYVNYFRNRLYIGEVYGIENACPALVSKQDFDIVNDILRQRSQRCAGVETDRVYLFSGLLHCKECGKTMQSETAKQIYTYYRCRTRMLDNSACQHKKRVREDALEDYLLHELEGIAERNNRYYKKAEKKPTQSADAIRKKMGKLKTLYLNDLIELDEYKKEYTTLKKSIEAVEEKPKTNLDALRNGLAEYDTYSREEKKEFWTRFIRRIDADDDGAFFVTPR

SEQ ID NO: 9443 - protein, 432 aa, Unknown
  Description of Unknown: Integrase B9444 sequence
  PTHR30461:SF3,IPR036162,PS51737,IPR011109,PTHR30461, PS00397,PF00239,G3DSA:1.10.10.2600,IPR006119,SSF53041, cd00338,SM00857,IPR025827,IPR038109,PS51736, IPR006118,PF13408,G3DSA:3.40.50.1390,Coil
MRAALYIRVSSEEQARHGLSLQEQRDALARYAKANKMTVVGIYEDAGISARKPYKKRPALLRLLDDCKAGKVDTILFIKLDRWFRNVAGYYDVQTQLDRYGVTWQATEEDYETRTASGRLKVNIMLSVAQDEADRTSERIKFINDGKRAKGQPAGSKAPLGYIIKDRQYQIDNDTADAARDMFAAYIRLKSVLAVKRYMLDTWGIDRAYNKYVNYFHNRLYIGEVYGIENACPSLVSKQDFDLVNDISRQRSQRCAGVDVDRVYLFSGLLHCKECGRTMQSETAKQIYTYYRCRTRMLDNSACPHMKRIREDALEDYLLHELAGITERNNRYYKKAEKKPTQSADAIRKKMSKLKTLYLNDLIELDDYKAEYASLKKSLETVEEKPKTDLDALRNGLGEYDTYSREEKKEFWTRFIRRIDADNDGAFFVTPR

SEQ ID NO: 9444 - protein, 432 aa, Unknown
  Description of Unknown: Integrase B9445 sequence
  PTHR30461:SF3,IPR036162,PS51737,IPR011109,PTHR30461, PS00397,PF00239,G3DSA:1.10.10.2600,IPR006119,SSF53041, cd00338,SM00857,IPR025827,IPR038109,PS51736, IPR006118,PF13408,G3DSA:3.40.50.1390,Coil
MRAALYIRVSSEEQARHGLSLQEQRDALTRYAKEHKMTVAGIYEDAGISARKPYKNRPALLRLLGDCKAGKVDTILFIKLDRWFRNVAGYYDVQTQLDQYGVTWQATEEDYETRTASGRLKVNIMLSVAQDEADRTSERIKFINDGKRAKGQPAGSKAPLGYVIKDRQYQIDNDTADAARDMFAAFIRLKSVLAVKRYMLDTWGVDRAYSKYVNYFRNRLYIGEVYGIENACPALVSKQDFALVNDIIRQRSQRCAGVETDRVYLFSGILHCKECGKTMQSETVKQTYTYYRCRTRMLDNSACPHTKRIREDALEDYLLNELEGIAERNNRYYKKAEKKPTQSADAIRKKMGKLKTLYLNDLIELDEYKREYASLKKALEATEERPEINLDALKKELQEYETYSRDEKKEFWTRFIRRIDANNDGAFFVTPR

SEQ ID NO: 9445 - protein, 432 aa, Unknown
  Description of Unknown: Integrase B9446 sequence
  PTHR30461:SF3,SM00857,IPR006118,G3DSA:1.10.10.2600,IPR036162, PF13408,PS51737,G3DSA:3.40.50.1390,IPR025827,IPR006119, IPR038109,IPR011109,SSF53041,PTHR30461,PS00397, PS51736,cd00338,PF00239
MRAALYIRVSTEEQARHGLSLGDQRESLLAYAADNGMEVVGVYEDAGISARKPYKRRPALLRLLEDCKDGKIDTILFVKLDRWFRSVAGYYAVQEELDRCHVTWQATREDYETRTASGRLKVNIMLSVAQDEADRTSERIKAINEGKRLKGQPTTWRTPIGICVKDRHYAIDEETADAARDMFPAFIRLQSILALRRYMATEWGIKRSYNKYKDALSNRLYLGEAFGVENVLPALVDQETFNLAGRILEQRSQRNASADRIYLFTGILRCRECGRNMQPETVKRVYKYYRCRTHTLDPADCPHILRIREDVLEDYLLREFEGIAKKYYSKSKTAEKKPPKTAEQIKRKMQKLKDLYLSDLIEIEEYKKDYTELKQQLAAINPEPIKEFDLETLRRELKEYPDLDRQAKKEFWVRTIQRIDADNDGAFFVTPS

SEQ ID NO: 9446 - protein, 432 aa, Unknown
  Description of Unknown: Integrase B9447 sequence
  PTHR30461:SF3,SM00857,IPR006118,G3DSA:1.10.10.2600,IPR036162, PF13408,IPR025827,G3DSA:3.40.50.1390,PS51737,IPR006119, IPR038109,SSF53041,IPR011109,PTHR30461,PS00397, PS51736,cd00338,PF00239
MRVALYIRVSTEEQAVHGLSVDDQKDSLKRWSEENKHKVVDYYIDAGVSGRKSVSKRPELQRLLSDVEAGKIDLVAFTKLDRWFRNIGEFYKAQEVLDAHGVVWQATYEDYETATAAGRLKVNIMLSVAQDEADRTSERVKRIMQHKRELGLCPAGKTPIGLKAVESRLCIDEETAHIARRMFEDYIATGSVNHVKKMLVSEFGIMRANHHIKGALSNERYIGLNSGIKVCDALIPPEDFALVQRMLTARSIRNNGSRHTWLFSGLVWCAECGHRLVTHSTRQRGTDYFYYRCKNYEIGICRHKKRINEAALEKYLLAKLPIEVQAHNAKLKAGKTKPPVDTAAIKRKMDKLTDLYLADLINREKYEIEYTALKEKLNVPPEPKPINEELVMSLLEAYDKLPPSGKKEVWNRFIRRIVISENGDIFFELVWL

SEQ ID NO: 9447 - protein, 432 aa, Unknown
  Description of Unknown: Integrase B9448 sequence
  PTHR30461:SF3,IPR036162,PS51737,IPR011109,PTHR30461, PS00397,PF00239,G3DSA:1.10.10.2600,IPR006119,SSF53041, cd00338,SM00857,IPR025827,IPR038109,PS51736, IPR006118,PF13408,G3DSA:3.40.50.1390,Coil
MRVALYIRVSSEEQARHGLSLQEQRDTLTRYTQEHKMTVVGIYEDAGISARKPYKKRPALLRLLGDCKAGKVDTILFIKLDRWFRNVAGYYDVQTQLDRYGVTWQATEEDYETRTASGRLKVNIMLSVAQDEADRTSERIKFINDGKRAKGQPAGSKAPLGYAIKDRQYQIDNGTVDAARDMFAAFIRLKSVLAVKRYMLDTWGIDRAYNKYVNYFRNRLYIGEVYGIENACPALVSKQDFDLVNDIIRQRSQRCAGVGTDRVYLFSGILRCKECGKTMQSETVKKTYTYYRCRTRMLDNSACPHTKRIREDALEDYLLHELEGIAERNNRYYKKAGKKPTQSADLIRKKMGKLKTLYLNDLIDLEDYKAEYASLKRTLETVEEKPETDLAALKDGLGEYDTYSRDEKKEFWTRFIRRIDADNDGAFFVTPR

SEQ ID NO: 9448 - protein, 432 aa, Unknown
  Description of Unknown: Integrase B9449 sequence
  PTHR30461:SF3,IPR036162,PS51737,IPR011109,PTHR30461, PS00397,PF00239,G3DSA:1.10.10.2600,IPR006119,SSF53041, cd00338,SM00857,IPR025827,IPR038109,PS51736, IPR006118,PF13408,G3DSA:3.40.50.1390,Coil
MRAALYIRVSSEEQARHGLSLHEQRDALTRYAKANKMTVVGIYEDAGISARKPYKKRPALLRLLDDCKAGKIDTILFIKLDRWFRNVAGYYDVQTQLDKYGVTWQATEEDYETRTASGRLKVNIMLSVAQDEADRTSERIKFINDGKRAKGQPAGSKAPLGYIIKDRQYQIDNDTADAARDMFAAYVRLQSVLGVKRYMLETWKIDRAYTKYVNYFRNRLYIGEVYGIENACPALVSKQDFDIVNDILRQRSQRCAGVDTDRVYLFSGLLHCKECGKTMQSETAKQIYTYYRCRTRMLDNSACQHKKRIREDTLEDYLLHELEGIAERNNRYYKKAEKKPTQSADAIRKKMGKLKTLYLNDLIELDEYKREYASLKKTLEAVEEKPKTNLDALRNGLAEYDTYSKEEKKEFWTRFIRRIDADDDGAFFVTPR

SEQ ID NO: 9449 - protein, 432 aa, Unknown
  Description of Unknown: Integrase B9450 sequence
  PTHR30461:SF3,IPR036162,PS51737,IPR011109,PTHR30461, PS00397,PF00239,G3DSA:1.10.10.2600,IPR006119,SSF53041, cd00338,SM00857,IPR025827,IPR038109,PS51736, IPR006118,PF13408,G3DSA:3.40.50.1390,Coil
MRVALYIRVSSEEQARHGLSLQEQRDALTRYAQEHKLTVVGIYEDAGISARKPYKKRPALLRLLDDCKAGKVDTILFIKLDRWFRNVAGYYDVQTQLDRYGVTWQATEEDYETRTASGRLKVNIMLSVAQDEADRTSERIKFINDGKRAKGQPAGSKAPLGYAIKDRQYQIDNGTVDAARDMFAAFIRLKSVLAVKRYMLDTWGIDRAYNKYVNYFRNRLYIGEVYGIENACPALVSKQDFDLVNDIIRQRSQRCAGVGTDRVYLFSGILRCKECGKTMQSETVKKTYTYYRCRTRMFDNSACPHTKRIREDALEDYLLHEMEGIAERNNRYYKKAEKKPTHSADSIRKKMSKLKTLYLNDLIELGDYKAEYASLKRALETVEEKPETDLDALKDGLGEYDTYSRNEKKEFWTRFIRRIDADNDGAFFVTPR

SEQ ID NO: 9450 - protein, 432 aa, Unknown
  Description of Unknown: Integrase B9451 sequence
  PTHR30461:SF3,SM00857,IPR006118,G3DSA:1.10.10.2600,IPR036162, PF13408,PS51737,G3DSA:3.40.50.1390,IPR025827,IPR006119, IPR038109,IPR011109,SSF53041,PTHR30461,PS00397, PS51736,cd00338,PF00239
MRAALYIRVSTEEQARHGLSLGDQRESLLAYAADNGMEVVGVYEDAGISARKPYKRRPALLRLLEDCKDGKIDTILFVKLDRWFRSVAGYYAVQEELDRCHVTWQATREDYETRTASGRLKVNIMLSVAQDEADRTSERIKAINEGKRLKGQPTTWRTPIGICVKDRHYAIDEETADAARDMFPAFIRLQSILALRRYMATEWGIKRSYNKYKDALSNRLYLGEAFGVENVLPALVDQETFNLAGRILEQRSQRNASADRIYLFTGILRCRECGRNMQPETVKQVYKYYRCRTHTLDPADCPHILRIREDVLEDYLLREFEGIAKKYYSKSKTAEKKPPKTAEQIKRKMQKLKDLYLSDLIEIEEYKKDYTELKQQLAAINPEPIKEFDLETLRRELKEYPDLDRQAKKEFWVRTIQRIDADNDGAFFVTPS

SEQ ID NO: 9451 - protein, 432 aa, Unknown
  Description of Unknown: Integrase B9452 sequence
  PTHR30461:SF3,IPR036162,PS51737,IPR011109,PTHR30461, PS00397,PF00239,G3DSA:1.10.10.2600,IPR006119,SSF53041, cd00338,SM00857,IPR025827,IPR038109,PS51736, IPR006118,PF13408,G3DSA:3.40.50.1390,Coil
MRAALYIRVSSEEQARHGLSLQEQRDALMRYAKANKMLVVGIYEDAGISARKPYKKRPALLRLLDDCKAGKIDTILFIKLDRWFRNVAGYYDVQTQLDKYGVTWQATEEDYETRTASGRLKVNIMLSVAQDEADRTSERIKFINDGKRAKGQPAGSKAPLGYIVKDRQYQIDNDTVAAARDMFAAYVRLQSVLGVKKYMLERWGIDRAYTKYVNYFRNRLYIGEVYGIENACPALVSKQDFDIVNDILRKRSQRCAGVETDRVYLFSGLLHCKECGKTMQSETAKQIYTYYRCRTRMLDNSACQHKKRIREDALEDYLLHELEGIAERNNRYYKKAAKKPTQSADAIRKKMSKLKTLYLNDLIELDEYKREYASLKKSLEAVEEKPKTNLDALRNGLAEYDTYSREEKKEFWTRFIRRIDADDDGAFFVTPR

SEQ ID NO: 9452 - protein, 432 aa, Unknown
  Description of Unknown: Integrase B9453 sequence
  PTHR30461:SF3,SM00857,IPR006118,G3DSA:1.10.10.2600,IPR036162, PF13408,PS51737,IPR025827,G3DSA:3.40.50.1390,IPR006119, IPR038109,IPR011109,SSF53041,PTHR30461,PS00397, PS51736,cd00338,PF00239
MRVALYIRVSTEEQAVHGLSVDDQKDSLKKWAEENKHKVVDYYIDAGVSGRKSVSKRPELQRLLSDVEAGKIDLVAFTKLDRWFRNIGEFYKAQEVLDAHGVVWQATYEDYETATAAGRLKVNIMLSVAQDEADRTSERVKRIMQHKRELGLCPAGKTPIGLKSVESRLCIEEETAHIARRMFEDYIATGSVNHVKKMLISEFGIMRANHHIKGALSNERYVGLNNGIKVCDALIPPEDFALVQRMLTARSIRNNGSKHTWLFSGLVWCAECGHRLVTHSTRQRGTDYFYYRCKNYELGICRHKKRINEAALEKYLLAKLPIEVQAHNAKLKAGKTKPPVDTAAIKRKMDKLTDLYLADLISREKYEVEYTALKEKLNVPPEPKPINEELVMSLLDAYDKLPPSGKKEVWNRFIRRIVVSENGDIFFELVWL

SEQ ID NO: 9453 - protein, 432 aa, Unknown
  Description of Unknown: Integrase B9454 sequence
  PTHR30461:SF3,IPR036162,PS51737,IPR011109,PTHR30461, PS00397,PF00239,G3DSA:1.10.10.2600,IPR006119,SSF53041, cd00338,SM00857,IPR025827,IPR038109,PS51736, IPR006118,PF13408,G3DSA:3.40.50.1390,Coil
MRAALYIRVSTEEQARHGLSLGDQRESLLAYAADNGMEVVGVYEDAGISARKPYKRRPALLRLLEDCKDGKIDTILFVKLDRWFRSVAGYYAVQEELDRCHVTWQATREDYETRTASGRLKVNIMLSVAQDEADRTSERIKAINESKRLKGQPTTWRTPIGICVKDRHYAIDEETADAARDMFHAYIKLQSILALRRHMATEWGIKRSYNKYKDALGNRLYLGEAFGVENALPALVDQETFDLAGRILERRSQRNASADRIYLFSGILRCRECGRNMQPETVKQVYKYYRCRTHMLDPADCPHMLRIREDVLEDYLLREFEGIAEKYYSKSKTAEKKPPKTAEQIKRKMQKLKELYLSDLIEIEEYKKDYTELKQQLVVINPEPIKEFDLETLRRELREYPNLDRQAKKEFWVRTIQRIDADNDGAFFVTPS

SEQ ID NO: 9454 - protein, 432 aa, Unknown
  Description of Unknown: Integrase B9455 sequence
  PTHR30461:SF3,IPR036162,PS51737,IPR011109,PTHR30461, PS00397,PF00239,G3DSA:1.10.10.2600,IPR006119,SSF53041, cd00338,SM00857,IPR025827,IPR038109,PS51736, IPR006118,PF13408,G3DSA:3.40.50.1390,Coil
MRAALYIRVSSEEQARHGLSLHEQRDALTRYAKANKMTVVGIYEDAGISARKPYKKRPALLRLLDDCKAGKVDTILFIKLDRWFRNVAGYYDVQTRLDQYGVTWQATEEDYETRTASGRLKVNIMLSVAQDEADRTSERIKFINDGKRAKGQPAGSKAPLGYIVKDRQYQIDNGTVDAARDMFAAYIRLQSVLGVKRYMLETWGIDRAYTKYVNYFRNRLYIGEVYGIENACPALISKQDFDIVNDILRQRSQRCAGVETDRVYLFSGLLHCKECGKTMQSETAKQIYTYYRCRTRMLDNSACQHKKRIREDALEDYLLHELEGIAERNNRYYKKAAKKPTQSADAIRKKMSKLKTLYLNDLIELDEYKREYASLKKFLEAVEEKPKTNLDALRNGLAEYDTYSREEKKEFWTRFIRRIDADDDGAFFVTPR

SEQ ID NO: 9455 - protein, 432 aa, Unknown
  Description of Unknown: Integrase B9456 sequence
  PTHR30461:SF3,IPR036162,PS51737,IPR011109,PTHR30461, PS00397,PF00239,G3DSA:1.10.10.2600,IPR006119,SSF53041, cd00338,SM00857,IPR025827,IPR038109,PS51736, IPR006118,PF13408,G3DSA:3.40.50.1390,Coil
MRAALYIRVSSEEQARHGLSLQEQRDALIRYAKANKMTVVGIYEDAGISARKPYKKRPALLRLLDDCKAGKVDTILFIKLDRWFRNVAGYYDVQTQLDQYGVTWQATKEDYETRTASGRLKVNIMLSVAQDEADRTSERIKFINDGKRAKGQPAGSKAPLGYIVKDRQYQIDNDTVAAARDMFAAYIRLQSVLGVKKYMLETWGIDRAYTKYVNYFRNRLYIGEVYGIENACPALISKQDFDIVNDILRQRSQRCAGVETDRVYLFSGLLHCKECGKTMQSETAKQIYTYYRCRTRMLDNSACQHKKRIREDALEDYLLHELEGIAERNNRYYKKAEKKPTQSADAIRKKMSKLKTLYLNDLIELDEYKREYASLKKSLEAVEEKPKTNLDALRNGLAEYDTYSREEKKEFWTRFIRRIDADDDGAFFVTPR

SEQ ID NO: 9456 - protein, 432 aa, Unknown
  Description of Unknown: Integrase B9457 sequence
  PTHR30461:SF3,IPR036162,PS51737,IPR011109,PTHR30461, PS00397,PF00239,G3DSA:1.10.10.2600,IPR006119,SSF53041, cd00338,SM00857,IPR025827,IPR038109,PS51736, IPR006118,PF13408,G3DSA:3.40.50.1390,Coil
MRAALYIRVSSEEQARHGLSLQEQRDALARYAKANKMTVVGIYEDAGISARKPYKKRPALLRLLDDCKAGKVDTILFIKLDRWFRNVAGYYDVQTQLDRYGVTWQATEEDYETRTASGRLKVNIMLSVAQDEADRTSERIKFINDGKRAKGQPAGSKAPLGYIIKDRQYQIDNDTADAARDMFAAYIRLKSVLAVKRYMLETWGIDRAYNKYVNYFHNRLYIGEVYGIENACPALISKQDFDIVNDILRQRSQRCAGVETDRVYLFSGLLHCKECGKTMQSETIKQTYIYYRCRTRMLDNSACQHKKRIREDALEDYLLHELEGIAERNNRYYKKAEKKPTQSADAIRKKMDKLKTLYLNDLIELDEYKKEYTALKKSLEAVEEKPKTNLDALRNGLAEYGTYSREEKKEFWTRFIRRIDTDDDGAFFVTPR

SEQ ID NO: 9457 - protein, 432 aa, Unknown
  Description of Unknown: Integrase B9458 sequence
  PTHR30461:SF3,IPR036162,PS51737,IPR011109,PTHR30461, PS00397,PF00239,G3DSA:1.10.10.2600,IPR006119,SSF53041, cd00338,SM00857,IPR025827,IPR038109,PS51736, IPR006118,PF13408,G3DSA:3.40.50.1390,Coil
MRAALYIRVSSEEQARHGLSLQEQRDTLTRYAKANKMTVVGIYEDAGISARKPYKKRPALLRLLDDCKAGKVDTILFIKLDRWFRNVAGYYDVQTRLDQYGVTWQATEEDYETRTASGRLKVNIMLSVAQDEADRASERVKFINDGKRAKGQPAGSKAPLGYIIKDRQYQIDTGTVNAARDMFAAYIRLQSVLGVKKYMLETWKIDRAYTKYVNYFRNRLYIGEVYGIENACPALVSKRDFDIVNDILRQRSQRCAGVWTDRVYLFSGLLHCKECGKTMQSETAKQIYTYYRCRTRMLDNSACQHKKRIREDALEDYLLHELEGIAERNNRYYKKAEKKPTQSADAIRKKMSKLKTLYLNDLIELDEYKREYASLKKALEAVEEKPKTNLDALRNGLAEYDTYSREEKKEFWTRFIQRIDADDDGAFFVTPR

SEQ ID NO: 9458 - protein, 432 aa, Unknown
  Description of Unknown: Integrase B9459 sequence
  PTHR30461:SF3,SM00857,IPR006118,G3DSA:1.10.10.2600,IPR036162, PF13408,PS51737,G3DSA:3.40.50.1390,IPR025827,IPR006119, IPR038109,IPR011109,SSF53041,PTHR30461,PS00397, PS51736,cd00338,PF00239
MRAALYIRVSTEEQARNGLSLGDQRESLLAYAADNGMEVVGVYEDAGISARKPYKQRPALLRLLADCKDGKIDTILFVKLDRWFRNVAGYYAVQEELDRCHVTWQATREDYETRTASGRLKVNIMLSVAQDEADRTSERIKAINEGKRLKGQPTTWRTPIGICVKNRHYAIDEETADAARDMFPAFIRLQSILALRRYMATEWGIKRSYNKYKDALSNRLYLGEAFGVENVLPSLVDQETFDLAGKILERRSQRNASADRIYLFTGILRCRECGRNMQPETVKQVYKYYRCRTHTLDPADCPHILRIREDVLEDYLLREFEGIAKKYYSKSKTAEKKPPKTAEQIKRKMQKLKELYLSDLIEIEEYKKDYTDLKQQLAAINPEPIKEFDLETLRRELKEYPDLDRQAKKEFWIRTIQRIDADNDGAFFVTPS

SEQ ID NO: 9459 - protein, 432 aa, Unknown
  Description of Unknown: Integrase B9460 sequence
  PTHR30461:SF3,IPR036162,PS51737,IPR011109,PTHR30461, PS00397,PF00239,G3DSA:1.10.10.2600,IPR006119,SSF53041, cd00338,SM00857,IPR025827,IPR038109,PS51736, IPR006118,PF13408,G3DSA:3.40.50.1390,Coil
MRAALYIRVSSEEQARHGLSLQEQRDALTRYAKANKMTVVGIYEDAGISARKPYKKRPALLRLLDDCKAGKVDTILFIKLDRWFRNVAGYYDVQTQLDRYGVTWQATEEDYETRTASGRLKVNIMLSVAQDEADRTSERIKFINDGKRAKGQPAGSKAPLGYIIKDRQYQIDNDTADAARDMFAAYIRLKSVLAVKRYMLETWSIDRAYNKYVTYFHNRLYIGEVYGIENACPSLVSKQDFDLVNDISRQRSQRCAGVDVDRVYLFSGLLHCKECGRTMQSETAKQIYTYYRCRTRMLDNSACQHKKRIREDALEGYLLHELEGIAERNNRYYKKAKKKPTQSADAIRKKMDKLKTLYLNDLIELDEYKKEYTTLKISLETVEEKPKTDLDALRNGLGEYDTYSREEKKEFWTRFIRRIDADDDGAFFVTPR

SEQ ID NO: 9460 - protein, 432 aa, Unknown
  Description of Unknown: Integrase B9461 sequence
  PTHR30461:SF3,SM00857,G3DSA:1.10.10.2600,IPR036162,PF13408, PS51737,IPR025827,G3DSA:3.40.50.1390,IPR006119,IPR038109, SSF53041,IPR011109,PTHR30461,Coil,PS51736, cd00338,PF00239
MRAALYMRVTSEEQARHGLSLQEQRDALIRYAKANKMTVVGIYEDAGISARKPYKKRPALLRLLDDCKAGKVDTILFIKLDRWFRNVAGYYDVQTQLDKYGVTWQATEEDYETRTASGRLKVNIMLSVAQDEADRASERVKFITDGKRAKGQPAGSKAPLGYIIKNRQYQIDNDTVDAARDMFAAYIRLQSVLGVKKYMLERWGIDRAYTKYVNYFRNRLYIGEVYGIENACPALVSKQDFDIVNDILRQRSQRCAGVETDRVYLFSGLLHCKECGKTMQSETAKQIYTYYRCRTRMLDNSACQHKKRIREDALEDYLLHELEGIAERNNRYYKKAAKKPTQSADAIRKKMSKLKTLYLNDLIELDEYKREYASLKKSLEAVEEKPKTNLDALRNGLAEYDTYSREEKKEFWTRFIRRIDADDDGAFFVTPR

SEQ ID NO: 9461 - protein, 432 aa, Unknown
  Description of Unknown: Integrase B9462 sequence
  PTHR30461:SF3,IPR036162,PS51737,IPR011109,PTHR30461, PS00397,PF00239,G3DSA:1.10.10.2600,IPR006119,SSF53041, cd00338,SM00857,IPR025827,IPR038109,PS51736, IPR006118,PF13408,G3DSA:3.40.50.1390,Coil
MRAALYIRVSSEEQARHGLSLQEQRDALTRYAKANKMTVVGIYEDAGISARKPYKKRPALLRLLDDCKAGKVDTILFIKLDRWFRNIAGYYDVQTQLDKYGVTWQATEEDYETRTASGRLKVNIMLSVAQDEADRTSERIKFINDGKRAKGQPAGSKAPLGYIVKDRQYQIDNGTVDAARDMFTAYIRLQSVLGVKKYMLETWGIDRAYTKYVNYFRNRLYIGEVYGIENACPALISKQDFDIVNDILRQRSQRCAGVETDRVYLFSGLLHCKECGKTMQSETAKQIYTYYRCRTRMLDNSACQHKKRIREDALEDYLLHELEGIAERNNRYYKKAEKKPTQSADAIRKKMDKLKTLYLNDLIELDEYKKEYTTLKKSLEAVEEKPKTNLDALRNGLAEYDTYSREEKKEFWTRFIRRIDADDDGAFFVTPR

SEQ ID NO: 9462 - protein, 432 aa, Unknown
  Description of Unknown: Integrase B9463 sequence
  PTHR30461:SF3,IPR036162,PS51737,IPR011109,PTHR30461, PS00397,PF00239,G3DSA:1.10.10.2600,IPR006119,SSF53041, cd00338,SM00857,IPR025827,IPR038109,PS51736, IPR006118,PF13408,G3DSA:3.40.50.1390,Coil
MRAALYIRVSSEEQARHGLSLQEQRDALMRYAKANKMLVVGIYEDAGISARKPYKKRPALLRLLDNCKAGKVDTILFIKLDRWFRNVAGYYDVQTQLDKYGVTWQATEEDYETRTASGRLKVNIMLSVAQDEADRTSERIKFINDGKRAKGQPAGSKAPLGYIIKDRQYQIDNDTADAARDMFAAYVRLQSVLGVKRYMLETWGIDRAYTKYVNYFRNRLYIGEVYGIENACPALVSKQDFDIVNDILRQRSQRCAGVETDRVYLFSGLLHCKECGKTMQSETAKHIYTYYRCRTRMLDNSACQHKKRIREDALEDYLLHELEGIAERNNRYYKKAEKKPTQSADAIRKKMSKLKTLYLNDLIELDEYKREYASLKKVLEAVEEKPKTNLDALRNGLAEYDTYSREEKKEFWTRFIRRIDADDDGAFFVTPR

SEQ ID NO: 9463 - protein, 432 aa, Unknown
  Description of Unknown: Integrase B9464 sequence
  PTHR30461:SF3,IPR036162,PS51737,IPR011109,PTHR30461, PS00397,PF00239,G3DSA:1.10.10.2600,IPR006119,SSF53041, cd00338,SM00857,IPR025827,IPR038109,PS51736, IPR006118,PF13408,G3DSA:3.40.50.1390,Coil
MRAALYIRVSSEEQARHGLSLQEQRDTLTRYAKANKMTVAGIYEDAGISARKPYKKRHALLRLLDDCKAGKVDTILFIKLDRWFRNVAGYYDVQTRLDQYGVTWQATEEDYETRTASGRLKVNIMLSVAQDEADRTSERIKFINDGKRAKGQPAGSKAPLGYIIKDRQYQIDNDTADAARDMFAAYVRLQSVLGVKKYMIETWGIDRAYTKYVNYFRNRLYIGEVYGIENACPALISKQDFDIVNDILRQRSQRCAGVETDRVYLFSGLLHCKECGKTMQSETAKQIYTYYRCRTRMLDNSACQHKKRIREDALEDYLLHELEGIAERNNRYYKKAEKKPTQSADAIRKKMGKLKTLYLNDLIELDEYKKEYTTLKKSIEAVEEKPKTNLDALRNGLAEYDTYSREEKKEFWTRFIRRIDADDDGAFFVTPR

SEQ ID NO: 9464 - protein, 432 aa, Unknown
  Description of Unknown: Integrase B9465 sequence
  PTHR30461:SF3,SM00857,G3DSA:1.10.10.2600,IPR036162,PF13408, IPR025827,PS51737,G3DSA:3.40.50.1390,IPR006119,IPR038109, SSF53041,IPR011109,PTHR30461,Coil,PS51736, cd00338,PF00239
MRVALYIRVTSEEQARHGLSLQEQRDALIRYAKANKMTVVGIYEDAGISARKPYKKRPALLQLLDDCKAGKVDTILFIKLDRWFRNVAGYYDVQTQLDKYGVTWQATEEDYETRTASGRLKVNIMLSVAQDEADRASERVKFINDGKRAKGQPAGSKAPLGYIIKDRKYQIDNDTADAARDMFAAYVRLQSVLGVKRYMFETWGIDRAYTKYVNYFRNRLYIGEVYGIENACPALISKQDFDIVNDILRQRSQRCAGVETDRVYLFSGLLHCKECGKTMQSETAKQIYTYYRCRTRMLDNSACQHKKRIREDALEDYLLHELEGIAERNNRYYKKAEKKPTQSADAIRKKMGKLKTLYLNDLIELDEYKREYASLKKTLETVEEKPQTNLDALRNGLAEYDTYSREEKKEFWTRFIWRIDADDDGAFFVTPR

SEQ ID NO: 9465 - protein, 432 aa, Unknown
  Description of Unknown: Integrase B9466 sequence
  PTHR30461:SF3,IPR036162,PS51737,IPR011109,PTHR30461, PS00397,PF00239,G3DSA:1.10.10.2600,IPR006119,SSF53041, cd00338,SM00857,IPR025827,IPR038109,PS51736, IPR006118,PF13408,G3DSA:3.40.50.1390,Coil
MRVALYIRVSSEEQARHGLSLQEQRDTLTRYTQEHKMTVVGIYEDAGISARKPYKKRPALLRLLGDCKAGKVDTILFIKLDRWFRNVAGYYDVQTQLDQYGVTWQATEEDYETRTASGRLKVNIMLSVAQDEADRTSERIKFINDGKRAKGQPAGSKAPLGYVIKDRQYQIDSGTVDAARDMFASFIRLKSVLAVKRYMLDKWGIDRAYSKYVNYFRNRLYIGEVYGIENACPALVSKQDFDLVNDIIRQRSQRCAGVGTDRVYLFSGILRCKECGKTMQSETVKKTYTYYRCRTRMLDNSACPHTKRIREDALEDYLLHEMEGIAERNNRYYKKADKKPTQSADSIRKKMGKLKTLYLNDLIELDEYKREYASLKKALEATEERPEINLDALKKELQEYETYSRDEKKEFWTRFIRRIDADNDGAFFVTPR

SEQ ID NO: 9466 - protein, 432 aa, Unknown
  Description of Unknown: Integrase B9467 sequence
  PTHR30461:SF3,IPR036162,PS51737,IPR011109,PTHR30461, PS00397,PF00239,G3DSA:1.10.10.2600,IPR006119,SSF53041, cd00338,SM00857,IPR025827,IPR038109,PS51736, IPR006118,PF13408,G3DSA:3.40.50.1390,Coil
MRAALYIRVSSEEQARHGLSLHEQRDALTRYAKANKMTVVGIYEDAGISARKPYKKRPALLRLLDDCKAGKVDTILFIKLDRWFRNVAGYYDVQTQLDKYGVTWQATEEDYETRTASGRLKVNIMLSVAQDEADRTSERIKFINDGKRAKGQPAGSKAPLGYIIKDRQYQIDNDTADAARDMFAAYVRLQSVLGVKRYMLETWGIDRAYTKYVNYFRNRLYIGEVYGIENACPALVSKQDFDIVNDILRQRSQRCAGVDTDRVYLFSGLLHCKECGKTMQSETAKHIYTYYRCRTRMLDNSACQHKKRIREDTLEDYLLHELEGIAERNNRYYKKAEKKPTQSADAIRKKMGKLKTLYLNDLIELDEYKREYASLKKTLEAVEEKPKTNLDALRNGLAEYDTYSKEEKKEFWTRFIRRIDADDDGAFFVTPR

SEQ ID NO: 9467 - protein, 432 aa, Unknown
  Description of Unknown: Integrase B9468 sequence
  PTHR30461:SF3,IPR036162,PS51737,IPR011109,PTHR30461, PS00397,PF00239,G3DSA:1.10.10.2600,IPR006119,SSF53041, cd00338,SM00857,IPR025827,IPR038109,PS51736, IPR006118,PF13408,G3DSA:3.40.50.1390,Coil
MRAALYIRVSSDEQARHGLSLQEQRDALTRYAQEHKMTVAGIYEDAGISARKPYKKRPALLRLLGDCKVGKVDTILFIKLDRWFRNVAGYYDVQTQLDQYGVTWQATEEDYETRTASGRLKVNIMLSVAQDEADRTSERIKFINDGKRAKGQPAGSKAPLGYVIKDRQYQIDSGTVDAARDMFASFIRLKSVLAVKRYMLDTWGIDRAYNKYVNYFRNRLYIGEVYGIENACPALVSKQDFDLVNDIIRQRSQRCAGVGTDRVYLFSGILRCKECGKTMQSETVKNTYTYYRCRTRMLDNSACPHTKRIREDALEDYLLHEMEGIAERNNRYYKKADKKPTQSADSIRKKMGKLKTLYLNDLIELDEYKREYASLKKALEATEERPEINLDALKKELQEYETYSRDEKKEFWTRFIRRIDADNDGAFFVTPR

SEQ ID NO: 9468 - protein, 432 aa, Unknown
  Description of Unknown: Integrase B9469 sequence
  PTHR30461:SF3,IPR036162,PS51737,IPR011109,PTHR30461, PS00397,PF00239,G3DSA:1.10.10.2600,IPR006119,SSF53041, cd00338,SM00857,IPR025827,IPR038109,PS51736, IPR006118,PF13408,G3DSA:3.40.50.1390,Coil
MRAALYIRVSSEEQARHGLSLQEQRDALTRYAKANKMTVVGIYEDAGISARKPYKKRPALLRLLDDCKAGKVDTILFIKLDRWFRNVAGYYDVQTQLDKYGVTWQATEEDYETRTASGRLKVNIMLSVAQDEADRTSERIKFINDGKRAKGQPAGSKAPLGYIIKDRQYQIDTDTADAARDMFAAYIRLKSVLAVKRYMLETWGIDRAYTKYVNYFRNRLYIGEVYGIENACPSLVSKQDFDLVNDISRQRSQRCAGVDADRVYLFSGLLHCKECGRTMQSETAKQIYTYYRCRTRMLDNSACPHMKRIREDALEGYLLHELEGIAERNNRYYKKAEKKPTQSADAIRKKMDKLKTLYLNDLIELDEYKKEYTTLKISLETVEEKPKTDLDALRNGLGEYDTYSREEKKEFWTRFIRRIDADDDGAFFVTPR

SEQ ID NO: 9469 - protein, 432 aa, Unknown
  Description of Unknown: Integrase B9470 sequence
  PTHR30461:SF3,SM00857,IPR006118,G3DSA:1.10.10.2600,IPR036162, PF13408,IPR025827,G3DSA:3.40.50.1390,PS51737,IPR006119, IPR038109,SSF53041,IPR011109,PTHR30461,PS00397, PS51736,cd00338,PF00239
MRAALYIRVSTEEQARNGLSLGDQRESLLAYAADNGMEVVGVYEDAGISARKPYKQRPALLRLLADCKGGKIDTILFVKLDRWFRSVAGYYAVQEELDRCHVTWQATREDYETRTASGRLKVNIMLSVAQDEADRTSERIKAINEGKRLKGQPTTWRTPIGICVKDRHYAIDEETADAARDMFPAFIRLQSILALRRYMATEWGIKRSYNKYKDALSNRLYLGEAFGVENALPALVDQETFNLARRILEQRSQRNASADRIYLFTGILRCRECGRNMQPETVKQVYKYYRCRTHTLDPADCPHILRIREDVLEDYLLREFEGIAKKYYSKSKTAEKKPPKTAEQIKRKMQKLKDLYLSDLIEIEEYKKDYTDLKQQLAAINPEPVKEFDLETLRRELKEYPDLDRQAKKEFWVRTIQRIDADNDGAFFVTPS

SEQ ID NO: 9470 - protein, 432 aa, Unknown
  Description of Unknown: Integrase B9471 sequence
  PTHR30461:SF3,IPR036162,PS51737,IPR011109,PTHR30461, PS00397,PF00239,G3DSA:1.10.10.2600,IPR006119,SSF53041, cd00338,SM00857,IPR025827,IPR038109,PS51736, IPR006118,PF13408,G3DSA:3.40.50.1390,Coil
MRVALYIRVSSEEQARHGLSLQEQRDTLTRYTQEHKMTVVGIYEDAGISARKPYKKRPALLRLLGDCKAGKVDTILFIKLDRWFRNVAGYYDVQTQLDRYGVTWQATEEDYETRTASGRLKVNIMLSVAQDEADRTSERIKLINDGKRAKGQPAGSKAPLGYAIKDRQYQIDNGTVDAARDMFAAFIRLKSVLAVKRYMLDTWGIDRAYNKYVNYFRNRLYIGEVYGIENACPALVSKQDFDLVNDIIRQRSQRCAGVGTDRVYLFSGILRCKECGKTMQSETVKKTYTYYRCRTRMLDNSACPHTKRIREDALEDYLLHELEGIAERNNRYYKKAGKKPTQSADLIRKKMGKLKTLYLNDLIDLEDYKAEYASLKRTLETVEEKPETDLAALKDGLGEYDTYSRDEKKEFWTRFIRRIDADNDGAFFVTPR

SEQ ID NO: 9471 - protein, 432 aa, Unknown
  Description of Unknown: Integrase B9472 sequence
  PTHR30461:SF3,SM00857,IPR006118,G3DSA:1.10.10.2600,IPR036162, PF13408,IPR025827,G3DSA:3.40.50.1390,PS51737,IPR006119, IPR038109,SSF53041,IPR011109,PTHR30461,PS00397, PS51736,cd00338,PF00239
MRAALYIRVSTEEQARHGLSLGDQRESLLAYAADNGMEVVGVYEDAGISARKPYKRRPALLRLLEDCKDGKIDTILFVKLDRWFRSVAGYYAVQEELDRCHVTWQATREDYETRTASGRLKVNIMLSVAQDEADRTSERIKAINEGKRLKGQPTTWRTPIGICVKDRHYAIDEETADAARDMFPAFIRLQSILALRRYMATEWGIKRSYNKYKDALSNRLYLGEAFGVENALPALVDQETFNLARRILEQRSQRNASADRIYLFTGILRCRECGRNMQPETVKQVYKYYRCRTHTLDPADCPHILRIREDVLEDYLLREFEGIAKKYYSKSKTAEKKPPKTAEQIKRKMQKLKDLYLSDLIEIEEYKKDYTELKQQLAAINPEPIKEFDLETLRRELKEYPDLDRQAKKEFWVRTIQRIDADNDGAFFVTPS

SEQ ID NO: 9472 - protein, 432 aa, Unknown
  Description of Unknown: Integrase B9473 sequence
  PTHR30461:SF3,IPR036162,PS51737,IPR011109,PTHR30461, PS00397,PF00239,G3DSA:1.10.10.2600,IPR006119,SSF53041, cd00338,SM00857,IPR025827,IPR038109,PS51736, IPR006118,PF13408,G3DSA:3.40.50.1390,Coil
MRAALYIRVSSEEQARHGLSLHEQRDALTRYAKANKMTVVGIYEDAGISARKPYKKRPALLRLLDDCKAGKVDTILFIKLDRWFRNVAGYYDVQTQLDKYGVTWQATEEDYETRTASGRLKVNIMLSVAQDEADRTSERIKFINDGKRAKGQPAGSKAPLGYIIKDRQYQIDNDTADAARDMFAAYVRLQSVLGVKRYMLETWGIDRAYTKYVNYFRNRLYIGEVYGIENACPALVSKQDFDIVNDILRQRSQRCAGVETDRVYLFSGLLHCKECGKTMQSETAKHIYTYYRCRTRMLDNSACQHKKRIREDALEDYLLHELEGIAERNNRYYKKAEKKPTQSAGAIRKKMGKLKTLYLNDLIELDEYKKEYTTLKKSIEAVEEKPKTNLDALRNGLAEYDTYSREEKKEFWTRFIRRIDADDDGAFFVTPR

SEQ ID NO: 9473 - protein, 432 aa, Unknown
  Description of Unknown: Integrase B9474 sequence
  PTHR30461:SF3,SM00857,G3DSA:1.10.10.2600,IPR036162,PF13408, PS51737,G3DSA:3.40.50.1390,IPR025827,IPR006119,IPR038109, IPR011109,SSF53041,PTHR30461,Coil,PS51736, cd00338,PF00239
MRAALYMRVTSEEQARHGLSLQEQRDALIRYAKANKMTVVGIYEDAGISARKPYKKRPALLRLLDDCKAGKIDMILFIKLDRWFRNVAGYYDVQTQLDKYGVTWQATEEDYETRTASGRLKVNIMLSVAQDEADRTSERIKFINDGKRAKGQPAGSKAPLGYIIQDRQYQIDNDTADAARDMFAAYIRLQSVLGVKRYMLETWGIDRAYNKYVNYFRNRLYIGEVYGIENACPALVSKQDFDIVNTVAQQRSQRCAGVETDRVYLFSGLLHCKECGKTMQSETIKQTYTYYRCRTRMLDNSACQHKKRIREDALEDYLLHELEGIAARNNRYYKKAEKKPTQSADAIRKKMSKLKTLYLNDLIELDEYKREYASLKKSLETVEEKPQTNLDALRNGLAEYDTYSREEKKEFWTRFIRRIDADDDGAFFVTPR

SEQ ID NO: 9474 - protein, 432 aa, Unknown
  Description of Unknown: Integrase B9475 sequence
  PTHR30461:SF3,IPR036162,PS51737,IPR011109,PTHR30461, PS00397,PF00239,G3DSA:1.10.10.2600,IPR006119,SSF53041, cd00338,SM00857,IPR025827,IPR038109,PS51736, IPR006118,PF13408,G3DSA:3.40.50.1390,Coil
MRVALYIRVSSEEQARHGLSLQEQRDTLTRYTQEHKMTVVGIYEDAGISARKPYKKRPALLRLLGDCKAGKVDTILFIKLDRWFRNVAGYYDVQTQLDRYGVTWQATEEDYETRTASGRLKVNIMLSVAQDEADRTSERIKFINDGKRAKGQPAGSKAPLGYAIKDRQYQIDSGTVDAARDMFAAFIRLKSVLAVKRYMLDTWGIDRAYSKYVNYFRNRLYIGEVYGIENACPALVSKKDFDLVNDIIRQRSQRCAGVDTDRVYLFPGILHCKECGKTMQSETVKKTYTYYRCRTRMLDNSACPHTKRIREDALEDYLLHELEGIAERNNRYYKKADKKPTQSADSIRKKMGKLKTLYLNDLIELDEYKREYASLKKALEATEERPEINLDALKKELQEYETYSRDEKKEFWTRFIRRIDADNDGAFFVTPR

SEQ ID NO: 9475 - protein, 431 aa, Unknown
  Description of Unknown: Integrase B9476 sequence
  PTHR30461:SF3,IPR036162,PS51737,IPR011109,PTHR30461, PS00397,PF00239,G3DSA:1.10.10.2600,IPR006119,SSF53041, cd00338,SM00857,IPR025827,IPR038109,PS51736, IPR006118,PF13408,G3DSA:3.40.50.1390,Coil
MKKVGLYVRVSTQEQKLHGISIENQLDALQKYCKEKEYIIVATYNDAGISAHVSYKKRPALLQMIQDCQEQKIELLLFTRLDRFFRSVEDYYLVLSQMEKVPWKAIWENYETETSDGQLRVNIMLSIAEAEAARTSEKIKSIMDYKRERGDHLGTVPLGYRTENKKLAIDPTTEPIVREIFSMYDSGKGPNAIRKYLSSVGHDMHSRSIRELIFSPVYAGDDNGRPCPAYFSKEEYQRRLATRKIHEPRNDRRETYIFSGLIKCGVCGATMHAQKANGKYLNYICTTGKQKFLHPGLCASEKWLESTLLSRLQDFADEYNFASASAAPDEAEREKEIATLKGKLKRIGVRYEDGDISTEEYRAKRDDLKSKIAALEVIPSAKQIILPDGFSETYAQLGRDGKQRFWRSLITSITFYPDRKYNIQVGDIFWR

SEQ ID NO: 9476 - protein, 431 aa, Unknown
  Description of Unknown: Integrase B9477 sequence
  PTHR30461:SF3,IPR036162,PS51737,IPR011109,PTHR30461, PS00397,PF00239,G3DSA:1.10.10.2600,IPR006119,SSF53041, cd00338,SM00857,IPR025827,IPR038109,PS51736, IPR006118,PF13408,G3DSA:3.40.50.1390,Coil
MKKVGLYVRVSTQEQKLHGISIENQLDALQKYCKEKGYIVVATYNDAGVSAHGSYKKRPALLQMIQDCQEKKIELLLFTRLDRFFRSVGDYYIVTSQMDKVPWKAIWEEYETETSDGQFRVNIMLSIAEAEAARTSEKIKSIMDYKRERGDHLGTVPLGYRTENKKLVIDPDTEPIVREIFSMYDSGKGPNAIRKYLSNVGHDMHSRSIRELIFSPVYAGDDNGRPCPAYFSKEEYQRRLATRKIHEPRNDRQETYIFSGLIKCGVCGATMHAQKANGKYLNYICTTGKQKFLHPGLCASEKHLESTLLSRLQDFADEYNFASASAASNEADRKKEIASLNGKLKRIGIRFEDGDISTEEYRAKRDDLKSKLAALEVIPSAKQIILPDDFFETYAQLGRDGKQRFWRSLITSITFTPDRKYDIQVGDIFWR

SEQ ID NO: 9477 - protein, 431 aa, Unknown
  Description of Unknown: Integrase B9478 sequence
  PTHR30461:SF3,IPR036162,PS51737,IPR011109,PTHR30461, PS00397,PF00239,G3DSA:1.10.10.2600,IPR006119,SSF53041, cd00338,SM00857,IPR025827,IPR038109,PS51736, IPR006118,PF13408,G3DSA:3.40.50.1390,Coil
MKKVGLYVRVSTQEQKLHGISIENQLDALQKYCKEKGYIIVATYNDAGVSAHGSYKKRPALLQMIQDCQEKKIELLLFTRLDRFFRSVGDYYLVTSQMDKVPWKAIWEEYETETSDGQFRVNIMLSIAEAEAARTSEKIKSIMDYKRERGDHLGTVPLGYRTENKKLAIDPTPEPIVREIFSMYDSGKGPNAIRKYLSSVGHDMHSRSIRGLIFSPVYAGDDNGRPCPAYFSKEEYQRRLATRKIHEPRNDRRETYIFSGLIKCGVCGATMHAQKANGKYLNYICTTGKQKFLHPGLCASEKHLESTLLSRLQDFADEYNFASASAAPDEAEREKEIATLKGKLKRIGVRYEDGDISTEEYRAKRDDLKSKIAALEVIPSAKQIILPDGFSETYAQLGRDGKQRFWRSLITSITFYPDRKYNIQVGDIFWR

SEQ ID NO: 9478 - protein, 431 aa, Unknown
  Description of Unknown: Integrase B9479 sequence
  PTHR30461:SF3,IPR036162,PS51737,IPR011109,PTHR30461, PS00397,PF00239,G3DSA:1.10.10.2600,IPR006119,SSF53041, cd00338,SM00857,IPR025827,IPR038109,PS51736, IPR006118,PF13408,G3DSA:3.40.50.1390,Coil
MKKVGLYVRVSTQEQKLHGISIENQLDALQKYCKEKGYIIVATYNDAGVSAHGSYKKRPALLQMIQDCQEKKIELLLFTRLDRFFRSVGDYYLVTSQMDKVPWKAIWEEYETETSDGQFRVNIMLSIAEAEAARTSEKIKSIMDYKRERGDHLGTVPLGYRTENKKLAIDPTTEPIVREIFSMYDSGKGPNAIRKYLSSVGHDMHSRSIRGLIFSPVYAGDDNGRPCPAYFSKEEYQRRLATRKIHEPRNDRRETYIFSGLIKCGVCGATMHAQKANGKYLNYICTTGKQKFLHPGLCASEKHLESTLLSRLQDFADEYNFASASAAPDEAEREKEIATLKGKLKRIGVRYEDGDISTEEYRAKRDDLKSKIAALEVIPSAKQIILPDGFSETYAQLGRDGKQRFWRSLITSITFYPDRKYNIQVGDIFWR

SEQ ID NO: 9479 - protein, 431 aa, Unknown
  Description of Unknown: Integrase B9480 sequence
  PTHR30461:SF3,SM00857,G3DSA:1.10.10.2600,IPR036162,PF13408, IPR025827,G3DSA:3.40.50.1390,PS51737,IPR006119,IPR038109, PF07508,IPR011109,SSF53041,PTHR30461,PS51736, cd00338,PF00239
MDKKITVIDALPKLEKKLRVAAYCRVSSGKDAMLHSLSNQISYYNNLIRNTKGWEFAGVYADEAISGTKNDREEFVRLINDAKNGKIDLIIVKSISRFARNTVTMLETIRELKAIGVDVFFEEQNLHSISSEGEMVLTFLASFAQEEARSVSENMKWRVRKNFEKGISWCTRKTLGYIYKDRKLVVEPEEAKLVRRIFDMYIGGLGLQAITNKLNEERVKPPESVKWKKDSIRYILTNITYTGDLLLQKYFNIDYMSKKHKPNKGELNQYLVEDDHEPIIRKETFNKVQQLMYERAEKVNSSRAAQIIHPLASLIKCSICGKSYHHRTTKYTKKWMCQTFNREGKSHCASKAVPASEMDRLVYEVVGDDIPKIKEIIVYPNNTLLLNLNDGSSITKTWNDISRSNSWTDEMKEEARKRSLKQWENIKREGK

SEQ ID NO: 9480 - protein, 430 aa, Unknown
  Description of Unknown: Integrase B9481 sequence
  PTHR30461:SF3,SM00857,IPR006118,G3DSA:1.10.10.2600,IPR036162, PF13408,PS51737,IPR025827,G3DSA:3.40.50.1390,IPR006119, IPR038109,IPR011109,SSF53041,PTHR30461,PS00397, PS51736,cd00338,PF00239
MRVALYVRVSTEEQAVHGLSVDDQKDSLKRWAEENKHKVVDYYVDAGVSGRKSVSKRPELQRLLSDVEAEKIDLVAFTKLDRWFRNISEFYKAQEVLDARGVVWQATYEDYETATAAGRLKVNIMLSVAQDEADRTSERVKRIMQHKRELGLCPAGKTPIGLKAVESRLCIDEETAHIARRMFEDYIATGSVNHVKKMLVSEFGIMRGNHHIKNALGNERYIGKNNGIQVCDALIPPEDFALVQRMLTARSVRNNGSRHAWLFSGLVWCAECGQRLVTHSTRQRGTDYFYYKCKNYEVGICRHKKRINEATLEKYLLAKLSIEVQAHNAKLKAGKTKPPVDTAAIKRKMDKLTDLYLADLINREKYEMEYTVLKEKLNVPPEPKPIDEALVMSLIDAYDKLPPSGKKEAWNRFIRRIVIANNGDIFFDLV

SEQ ID NO: 9481 - protein, 430 aa, Unknown
  Description of Unknown: Integrase B9482 sequence
  PTHR30461:SF3,SM00857,IPR006118,G3DSA:1.10.10.2600,IPR036162, PF13408,IPR025827,G3DSA:3.40.50.1390,PS51737,IPR006119, IPR038109,SSF53041,IPR011109,PTHR30461,PS00397, PS51736,cd00338,PF00239
MRIALYVRVSTEEQAVHGLSVDDQKESLKKWAEENKHKVVDCYVDAGVSGRKSVSKRPELQRLLSDVEAGKIDLVAFTKLDRWFRNIGEFYKAQEVLDAHGVVWQATYEDYETATAAGRLKVNIMLSVAQDEADRTSERVKRIMQHKRELGLCPAGKTPIGLKAVESRLCIDEETAHIARRMFEDYIATGSVNHVKKMLVSEFGIMRGNYHIKNALGNERYIGKNNGIQVCDALIPPEDFALVQRMLTARSVRNNGSRHTWLFSGLVWCAECGHRLVTHSTRQRGTDYFYYRCKNYEIGLCSHKKRINEAEIEAYLLMKLPIEVQAHNAKLKAGKIKPPVDTAAIKRKMDKLTDLYLADLINREKYEMEYTVLKEKLNVPPEPKPIDEALVMSLIDAYDKLPPSGKKEAWNRFIRRIVIANNGDIFFELV

SEQ ID NO: 9482 - protein, 430 aa, Unknown
  Description of Unknown: Integrase B9483 sequence
  PTHR30461:SF3,SM00857,G3DSA:1.10.10.2600,IPR036162,PF13408, PS51737,G3DSA:3.40.50.1390,IPR025827,IPR006119,IPR038109, PF07508,IPR011109,SSF53041,PTHR30461,PS51736, cd00338,PF00239
MIQKVVFPQKKQFPLKRTAAYARVSSGKDAMLHSLSSQVSYYNQLIQSNPEWLFCGVYADEALTGTKGNRAEFQKLLNRCRQGEIDLILTKSISRFARNTVTLLETVRELKSLGVDVYFEEQRIHSMSSDGELLLSILASYAQEESYSASENRKWQIRKDFSIGKIGSITILGYRRNAEGVLEIEPNEAELVRMIFSDYISGMGQQRIANKINEMGIPTRQGNLWTNPRIREILTNEKYIGNLMLQKYYRNNHIEKKKTRNQGELQKYYVEEAHEPIIDLETFAKAKAILAQRHEQYTHDGATNRYPLSGLIICGLCGKNYQRKQLPQGIIWMCATFLRRGKKYCPGSKQIPESILYALICDVLKLDEFDTAVFRDNIHHIVIPKPFEVQFFFHDGTSEIRHWEYPSRAESWTEEMKQAARERNQKWVEK

SEQ ID NO: 9483 - protein, 430 aa, Unknown
  Description of Unknown: Integrase B9484 sequence
  PTHR30461:SF3,SM00857,G3DSA:1.10.10.2600,IPR036162,PF13408, IPR025827,G3DSA:3.40.50.1390,PS51737,IPR006119,IPR038109, PF07508,SSF53041,IPR011109,PTHR30461,PS51736, cd00338,PF00239
MNAVIYARYSSDNQREESIEGQLRECLSYAEKNNLKIVNHYIDRAFSARTDDRPAFRQMIQESEKKEFSIILVWKLDRFSRDRYDSAYYKHQLKKNGVRVLSATENISEGPEGIILESMLEGMAEYYSAELAVKVRRGQQENALKCRSNGGVLPLGYCVSKDHTFEIVPEKAAIVREIFTRYDNGEALQAIANSLNKQGLCTQKGKEFRMSSLGKILRNRKYTGEYRYDTTVIPDGMPRIIEQDLFDRAQKRLDQNKRAPGRAKAEEEYLLTTKAFCGECGSMLVGDCGTSKTGSVYYYYKCAGRKRHNGCKLKPIKKAWLEQFVVETTVSRVFREKEDLKLSITQAKLCRPVYAKDEILRWIMQFKHGSLSDPVYRRRIIDVFVNSVYVFGDKIVFTYNFKDGTDTFSLKDVSAAIHAKSSDVAYSASP

SEQ ID NO: 9484 - protein, 430 aa, Unknown
  Description of Unknown: Integrase B9485 sequence
  PTHR30461:SF3,SM00857,IPR006118,G3DSA:1.10.10.2600,IPR036162, PF13408,IPR025827,G3DSA:3.40.50.1390,PS51737,IPR006119, IPR038109,SSF53041,IPR011109,PTHR30461,PS00397, PS51736,cd00338,PF00239
MRVALYVRVSTEEQAVHGLSVDDQKESLKKWAEENKHKVVDYYVDAGVSGRKSVSKRPELQRLLSDVEARQIDLVAFTKLDRWFRNIGEFYKAQEVLDAHGVVWQATYEDYETATAAGRLKVNIMLSVAQDEADRTSERVKRIMQHKRELGLCPAGKTPIGLKAVESRLCIDEETAHIARRMFEDYIATGSINHVKKMLVSEFGIMRGNHHIKNALGNERYIGKNNGIQVCDALIPPEDFALVQRMLTARSVRNNGSRHTWLFSGLVWCAECGHRLVTHSTRQRGTDYFYYRCKNYEIGLCSHKKRINEAELEAYLLMKLPIEVQAHNAKLKAGKIKPPVDTAAIKRKMDKLTDLYLADLINREKYEIEYTALKEKLNVPPEPKPIDEALVMSLIDAYDKLPPSGKKEAWNRFIRRIVIANNGDIFFDLV

SEQ ID NO: 9485 - protein, 430 aa, Unknown
  Description of Unknown: Integrase B9486 sequence
  PTHR30461:SF3,SM00857,IPR006118,G3DSA:1.10.10.2600,IPR036162, PF13408,IPR025827,G3DSA:3.40.50.1390,PS51737,IPR006119, IPR038109,SSF53041,IPR011109,PTHR30461,PS00397, PS51736,cd00338,PF00239
MRVALYVRVSTEEQAVHGLSVDDQKESLKKWAEENKHKIVDYYVDAGVSGRKSVSKRPELQRLLSDVEAGKIDLVAFTKLDRWFRNIGEFYKAQEVLDANGVVWQATYEDYETATAAGRLKVNIMLSVAQDEADRTSERVKRIMQHKRELGLCPAGKTPIGLKAVESRLCIDEETAHIAKRMFEDYIATGSVNHVKKMLVSEFGIMRGNSHIKNTLKNERYIGKNNGIQVCDALIQPDDFALVQRMLTARSIRNDGSRHAWLFSGLVWCAECGQRLVTHSTRQRGTDYFYYKCKNYEVGICRHKKRINEATLEKYLLAKLSIEVQAHNAKLKAGKTKPPVDTAAIKRKMDKLTDLYLADLINREKYEIEYTALKEKLNVPPEPKPIDEALVMSLIDAYDKLPPSGKKEAWNRFVRRIVIANNGDIFFDLV

SEQ ID NO: 9486 - protein, 430 aa, Unknown
  Description of Unknown: Integrase B9487 sequence
  PTHR30461:SF3,SM00857,G3DSA:1.10.10.2600,IPR036162,PF13408, PS51737,IPR025827,G3DSA:3.40.50.1390,IPR006119,IPR038109, PF07508,IPR011109,SSF53041,PTHR30461,PS51736, cd00338,PF00239
MIQKVVFPQKKQFPLKRTAAYARVSSGKDAMLHSLSSQVSYYNQLIQSNPEWLFCGVYADEALTGTKGNRAEFQKLLNRCRQGEIDLILTKSISRFARNTVTLLETVRELKSLGVDVYFEEQRIHSMSSDGELLLSILASYAQEESYSASENRKWQIRKDFSIGKIGSITILGYRRNAEGVLEIEPNEAELVRMIFSDYISGMGQQRIANKINEMGIPTRQGNLWTNPRIREILTNEKYIGNLMLQKYYRNNHIEKKKTRNQGELPKYYVEEAHEPIIDLETFAKAKAILAQRHEQYTHDGATNRYPLSGLIICGLCGKNYQRKQLPQGIIWMCATFLRRGKRYCPGSKQIPESILYALICDVLKLDEFDAAVFRDNIHHIVIPKPFEVQFFFHDGTSDIRHWKYPSRAESWTEEMKQAARERNQKWVEK

SEQ ID NO: 9487 - protein, 430 aa, Unknown
  Description of Unknown: Integrase B9488 sequence
  PTHR30461:SF3,SM00857,IPR006118,G3DSA:1.10.10.2600,IPR036162, PF13408,PS51737,IPR025827,G3DSA:3.40.50.1390,IPR006119, IPR038109,SSF53041,IPR011109,PTHR30461,PS00397, PS51736,cd00338,PF00239
MRVALYVRVSTEEQAVHGLSVDDQKESLKKWAEENKHKVVDYYIDAGVSGRKSVSKRPELQRLLSDVEAGQIDLVAFTKLDRWFRNIGEFYKAQEVLDAHGVVWQATYEDYETATAAGRLKVNIMLSVAQDEADRTSERVKRIMQHKRELGLCPAGKTPIGLKAVESRLCIDEETAHIAKRMFEDYIATGSVNHVKKMLVSEFGIMRGNSHIKNTLKNERYIGKNNGIQVCDALIPPEDFALVQRMLTARSVRNNGSRHTWLFSGLVWCAECGHRLVTHSTRQRGTDYFYYRCKNYEIGLCSHKKRINEAELEAYLLMKLPIEMQAHNAKLKAGKIKPPVDTAAIKRKMDKLTDLYLADLINREKYEIEYTALKEKLTVPPEPKPIDEALVMSLLDAYDKLPPSGKKEAWNRFIRRIVIANNGDIFFDLV

SEQ ID NO: 9488 - protein, 430 aa, Unknown
  Description of Unknown: Integrase B9489 sequence
  PTHR30461:SF3,SM00857,IPR006118,G3DSA:1.10.10.2600,IPR036162, PF13408,PS51737,G3DSA:3.40.50.1390,IPR025827,IPR006119, IPR038109,IPR011109,SSF53041,PTHR30461,PS00397, PS51736,cd00338,PF00239
MRVALYIRVSTEEQAVHGLSVDDQKDSLKRWAEENKHKVVDYYVDAGVSGRKSVSKRPELQRLLSDVEAGKIDLVAFTKLDRWFRNIGEFYKAQEVLDAHGVVWQATYEDYETATAAGRLKVNIMLSVAQDEADRTSERVKRIMQHKRELGLCPAGKTPIGLKAVESRLCIDEETAHIARRMFEDYIATGSVNHVKKMLVSEFGIMRANHHIKGALSNERYIGLNNGIKVCDALIPPEDFALVQRMLTARSIRNNGSRHTWLFSGLVWCAECGHRLVTHSTRQRGTDYFYYRCKNYEMGICRHKKRINEAELEAYLLMKLPIEVQAHNAKLKAGKIKPPVDTAAIKRKMDKLTDLYLADLINREKYEIEYTALKEKLNVPPEPKPIDEALVMSLIDAYDKLPPSGKKEAWNRFIRRIVIANNGDIFFELV

SEQ ID NO: 9489 - protein, 430 aa, Unknown
  Description of Unknown: Integrase B9490 sequence
  PTHR30461:SF3,SM00857,IPR006118,G3DSA:1.10.10.2600,IPR036162, PF13408,IPR025827,G3DSA:3.40.50.1390,PS51737,IPR006119, IPR038109,IPR011109,SSF53041,PTHR30461,PS00397, PS51736,cd00338,PF00239
MRVALYVRVSTEEQAVHGLSVDDQKESLKKWAEENKHKIVDYYVDAGVSGRKSVSKRPELQRLLSDVEAGKIDLVAFTKLDRWFRNIGEFYKAQEVLDAHGVVWQATYEDYETATAAGRLKVNIMLSVAQDEADRTSERVKRIMQHKRELGLCPAGKTPIGLKAVESHLCIDEETAHIARRMFEDYIATGSVNHVKKMLVSEFGIMRGNHHIKNALGNERYIGKNNGIQVCDALIPPEDFALVQRMLTARSVRNNGSRHTWLFSGLVWCAECGHRLVTHSTRQHGTDYFYYRCKNYEIGLCSHKKRINEAELEAYLLMKLPIEVQAHNAKLKAGKTKPPVDTAAIKRKMDKLTDLYLADLINREKYEMEYTALKEKLNVPPEPKPIDEALVMSLIDAYDKLPPSGKKEAWNRFIRRIVIANNGDIFFDLV

SEQ ID NO: 9490 - protein, 430 aa, Unknown
  Description of Unknown: Integrase B9491 sequence
  PTHR30461:SF3,SM00857,IPR006118,G3DSA:1.10.10.2600,IPR036162, PF13408,PS51737,IPR025827,G3DSA:3.40.50.1390,IPR006119, IPR038109,IPR011109,SSF53041,PTHR30461,PS00397, PS51736,cd00338,PF00239
MRVALYIRVSTEEQAVHGLSVDDQKESLKKWAEENKHKVVDYYVDAGVSGRKSVSKRPELQRLLSDVEAGKIDLVAFTKLDRWFRNIGEFYKAQEVLDAHGVVWQATYEDYETATAAGRLKVNIMLSVAQDEADRTSERVKRIMQHKRELGLCPAGKTPIGLKAVESRLCVDEETAHIARRMFEDYIATGSVNHVKKMLVSEFGIMRGNHHIKNALGNERYIGKNNGIQVCDALIPPEDFALVQRMLTARSVRNNGSKHTWLFSGLVWCAECGHRLVTHSTRQRGTDYFYYRCKNYEIGLCSHKKRINEAELEAYLLMKLPIEVQAHNAKLKAGKIKPPVDTAAIKRKMDKLTDLYLADLINREKYEIEYTALKEKLNVPPEPKPIDEALVMSLVDAYDKLPPSGKKEAWNRFIRRIVIANNGDIFFDLV

SEQ ID NO: 9491 - protein, 430 aa, Unknown
  Description of Unknown: Integrase B9492 sequence
  PTHR30461:SF3,SM00857,IPR006118,G3DSA:1.10.10.2600,IPR036162, PF13408,IPR025827,G3DSA:3.40.50.1390,PS51737,IPR006119, IPR038109,SSF53041,IPR011109,PTHR30461,PS00397, PS51736,cd00338,PF00239
MRVALYVRVSTEEQAVHGLSVDDQKESLKKWAEENKHKVVDYYVDAGVSGRKSVSKRPELQRLLSDVEAGKIDLVAFTKLDRWFRNIGEFYKAQEVLDAHGVVWQATYEDYETATAAGRLKVNIMLSVAQDEADRTSERVKRIMQHKRELGLCPAGKTPIGLKAVESRLCIDEETAHIARRMFEDYIATGSVNHVKKMLVSEFGIMRGNHHIKNALSNERYIGLNNGIKVCDALIPPEDFALVQRMLTARSVRNNGSRHTWLFSGLVWCAECGHRLVTHSTRQHGTDYFYYRCKNYEVGICSHKKRINEAELEAYLLMKLPIEVQAHNAKLKAGKIKPPVDTAAIKRKMDKLTDLYLADLINREKYEIEYTALKEKLNVPPEPKLIDEALVMSLIDAYDKLPPSGKKEAWNRFIRRIVIANNGDIFFDLV

SEQ ID NO: 9492 - protein, 430 aa, Unknown
  Description of Unknown: Integrase B9493 sequence
  PTHR30461:SF3,SM00857,IPR006118,G3DSA:1.10.10.2600,IPR036162, PF13408,PS51737,G3DSA:3.40.50.1390,IPR025827,IPR006119, IPR038109,IPR011109,SSF53041,PTHR30461,PS00397, PS51736,cd00338,PF00239
MRVALYVRVSTEEQAVHGLSVDDQKDSLKRWAEENKHKIVDYYIDAGVSGRKSVSKRPELQRLLSDVEAGKIDLVAFTKLDRWFRNIGEFYKAQEVLDAHGVVWQATYEDYETATAAGRLKVNIMLSVAQDEADRTSERVKRIMQHKRELGLCPAGKTPIGLKAVESRLCIDEETAHIARRMFEDYIATGSINHVKKMLVSEFGIMRGNHHIKNALGNERYIGKNNGIQVCDALIPPEDFALVQRMLTARSIRNNGSKHTWLFSGLVWCAECGHRLVTHSTQQRGTDYFYYRCKNYEIGLCSHKKRINEAELEAYLLMKLPIEVQAHNAKLKAGKIKPPVDTAAIKRKMDKLTDLYLADLINREKYEIEYTALKEKLNVPPEPKPIDEALVMSLIDAYDKLPPSGKKEAWNRFIRRIVIANNGDIFFDLV

SEQ ID NO: 9493 - protein, 430 aa, Unknown
  Description of Unknown: Integrase B9494 sequence
  PTHR30461:SF3,SM00857,IPR006118,G3DSA:1.10.10.2600,IPR036162, PF13408,IPR025827,G3DSA:3.40.50.1390,PS51737,IPR006119, IPR038109,SSF53041,IPR011109,PTHR30461,PS00397, PS51736,cd00338,PF00239
MRVALYVRVSTEEQAVHGLSVDDQKESLKKWAEENKHKVVDYYVDAGVSGRKSVSKRPELQRLLSDVEAGQIDLVAFTKLDRWFRNIGEFYKAQEVLDAHGVVWQATYEDYETATAAGRLKVNIMLSVAQDEADRTSERVKRIMQHKRELGLCPAGKTPIGLKAVESRLCVDEETAHIARRMFEDYIATGSVNHVKKMLVSEFGIMRANHHIKGALSNERYIGLNNGIKVCDALIPPEDFALVQRMLTARSIRNNGSRHTWLFSGLVWCAECGHRLVTHSTRQRGTDYFYYRCKNYEIGLCSHKKRINEAELEAYLLMKLPIEVQAHNAKLKAGKIKPPVDTAAIKRKMDKLTDLYLADLINREKYEMEYTALKEKLNVPPEPKPIDKALVMSLIDAYDKLPPSGKKEAWNRFIRRIVIANNGDIFFDLV

SEQ ID NO: 9494 - protein, 430 aa, Unknown
  Description of Unknown: Integrase B9495 sequence
  PTHR30461:SF3,cd00338,SM00857,G3DSA:1.10.10.2600,IPR036162, PF13408,PS51737,IPR025827,G3DSA:3.40.50.1390,IPR006119, IPR038109,PF07508,IPR011109,SSF53041,PTHR30461, PS51736,Coil,PF00239
MIQKVVFPQKKQFPLKRTAAYARVSSGKDAMLHSLSSQVSYYNQLIQSNPEWLFCGVYADEALTGTKGNRAEFQKLLNRCRQGEIDLILTKSISRFARNTVTLLETVRELKSLGVDVYFEEQRIHSMSSDGELLLSILASYAQEESYSASENRKWQIRKDFSIGKIGSITILGYRRNAEGVLEIEPNEAELVRMIFSDYISGMGQQRIANKINEMGIPTRQGNLWTNPRIREILTNEKYIGNLMLQKYYRNNHIEKKKTRNQGELQKYYVEEAHEPIIDLETFAKAQTILAQRHEQYTHDGATNRYPLSGLIICGLCGKNYQRKQLPQGIIWMCATFLRRGKKYCPGSKQIPESILYALICDVLKLDEFDAAVFRDNIHHIVIPKPFEVQFFFHDGTSDIRHWKYPSRAESWTEEMKQAARERNQKWVEK

SEQ ID NO: 9495 - protein, 430 aa, Unknown
  Description of Unknown: Integrase B9496 sequence
  PTHR30461:SF3,SM00857,IPR006118,G3DSA:1.10.10.2600,IPR036162, PF13408,IPR025827,G3DSA:3.40.50.1390,PS51737,IPR006119, IPR038109,SSF53041,IPR011109,PTHR30461,PS00397, PS51736,cd00338,PF00239
MRVALYVRVSTEEQAVHGLSVDDQKESLKKWAEENKHKVVDYYVDAGVSGRKSVSKRPELQRLLSDVEAGKIDLVAFTKLDRWFRNIGEFYKAQEVLDAHGVVWQATYEDYETATAAGRLKVNIMLSVAQDEADRTSERVKRIMQHKRELGLCPAGKTPIGLKAVESRLCIDEETAHIARRMFEDYIATGSVNHVKKMLVSEFGIMRANHHIKGALSNERYIGLNSGIKVCDALIPPEDFALVQRMLTARSIRNNGSRHTWLFSGLVWCAECGHRLVTHSTRQRGTDYFYYRCKNYEIGLCSHKKRINEAELEAYLLMKLPIEVQAHNAKLKAGKIKPTVDTAAIKRKMDKLTDLYLADLINREKYEIEYTALKEKLNVPPEPKPIDEALIMSLLDAYDKLPPSGKKEAWNRFIRRIVIANNGEIFFDLV

SEQ ID NO: 9496 - protein, 429 aa, Unknown
  Description of Unknown: Integrase B9497 sequence
  PTHR30461:SF3,cd00338,SM00857,G3DSA:1.10.10.2600,IPR036162, PF13408,PS51737,IPR025827,G3DSA:3.40.50.1390,IPR006119, IPR038109,PF07508,SSF53041,IPR011109,PTHR30461, PS51736,Coil,PF00239
MISDCRKGKIDRIYTKSISRFARNTKDCLKNIRELKSLGITVLFEKENIDTADMTDEMMITIMGGLAQEESVSISKNLKWSYQKRFEKGIVNVFSAPFGFKLNNGALIIDKIQAQIVEEIFDMFLNGIGYQRISEICQSKYKVYKDKFSYYGIRYILSNEKYIGDSVYQKTFTTNNLPYRKIQNNGQLNKYCIQNTHEAIISIEIFEKAQKLIESRKHKNIVSESPFRGKLICANCGTKYKRKDSRNKIYWVCRKHDNLAELCMNKRVEEKFIKQSFIRLHNKLWHDYKQILVPLQTALQDLKFRKFSGKTQVMDISKEIAKLREQTHVLARLKTKGFLDEAKYIEQTTELMAKINKLQAELKKFTRSDDEDETLDQIEMLIDFFERRDKPITEFEELAFESIVEKIIVINQHELEFHLIGGLKFKEKI

SEQ ID NO: 9497 - protein, 428 aa, Unknown
  Description of Unknown: Integrase B9498 sequence
  PTHR30461:SF3,SM00857,G3DSA:1.10.10.2600,IPR036162,PF13408, IPR025827,PS51737,G3DSA:3.40.50.1390,IPR006119,IPR038109, PF07508,SSF53041,IPR011109,PTHR30461,PS51736, cd00338,PF00239
MDKENKAVRCAIYTRKSHEEGLEQDFNSLDAQRESGENYIASQKTRGWICLPERYDDGGFSGGNTNRPALKKLLEDIASGKIDVVVVYKIDRLSRSICDFAELSKTFDKFGASFVAVTQDINTSTSSGRMMLNILVTFAQYEREVIAERIRDKMSASRKKGLWVGGVTPFGYRVLNKHLEIVPEQAEIVKRMFQRYSETASVKQVCDELTDGGIRTRTGKFFNPSMVYRILDNHSYIGKVQYKGEVFPGDHAAIIGQTLWNVVHEILKENTAAENGNSRRQQTSASLRGLLKCGHCDCAMGPTYTGKKGKNYLYYICEKDYKRTRPSCPVRRISGGDIEKLVIEQLQKLFNSQTFIDLTAENGNMSRDSVASAFANLSGFWKELFPAERNRLLKLLIERVTVNEGNIEITIKTEGMKNLMMEMEHEHN

SEQ ID NO: 9498 - protein, 428 aa, Unknown
  Description of Unknown: Integrase B9499 sequence
  PTHR30461:SF3,SM00857,G3DSA:1.10.10.2600,IPR036162,PF13408, IPR025827,G3DSA:3.40.50.1390,PS51737,IPR006119,IPR038109, PF07508,IPR011109,SSF53041,PTHR30461,PS51736, cd00338,PF00239
MIQKVAFPQKKPFLLKRTAAYARVSSGKDAMLHSLSAQVSYYNQLIQSNPEWLFCGVYADEALTGTKENRAEFQKLLNRCRQGEIDLILTKSISRFARNTVTLLETVRELKTLGVDVYFEEQRIHSMSSDGELMLSILASYAQEESYSASENKKWQMRKDFEQGKVGSMRMLGYRRTKSGKLEIVPEEAEIVRMIFLYYLSGMGKLAIAKKLNEQQICTVRGCAWTTEDVRRTLRNEKYTGNLLLQKSFRENHITKKKVANIGQLPQYFVAGSHEAIISQEQFDAVQKQMAERQKKYAGSCTTNRYPFTQKIRCACCGKYYRRKTTVTGVVWICSTYNTKGKKYCPTAKQIPENTLLSACCDVLEISEFDAEQFAERIEQIQIPAPNELQFCFSDGTEQTVHWKDRSRSESWTAEMREKARQKKWRQS

SEQ ID NO: 9499 - protein, 428 aa, Unknown
  Description of Unknown: Integrase B9500 sequence
  SM00857,G3DSA:1.10.10.2600,IPR036162,PS51737,G3DSA:3.40.50.1390, IPR006119,IPR038109,PF07508,IPR011109,SSF53041, PTHR30461,PS51736,cd00338,PF00239
MEQYLIYLRKSRSDLEAEAHGEGETLSRHEHTLLELAKRQHLNVTDIYREVVSGDTIAARPMMQRVLSEVEQGVWSGVLVMEVERLARGDTIDQGIIAQTFKFSGTKIITPIKTYDPDNEFDEEYFEFGLFMSRREYKIINRRLQRGRLASAKEGKWPSGLAPFGYRRVKLKNEKGCSLEPIEEQAAIVRMIFDLYTVGLQDEDGSARPLSLGSIATRLNDMHIPSPSGSQWARITIRGIIKNPTYIGMVRWGSRETKKKVVDGKVVSVRGPADPEKECVFKGIHPPLIPKETFELANDKLTRSENTSTHKEKVVRNPLAGLLVCSECGRQMMRMINPVHPDMPVVRCPRRGCPNCSSYLPIVEERVIQGLSEWMKGYELEWSSAAASSSVSTVFPLSHKSSVTSPPSLNTGKFRPIRFSGYSDSSFL

SEQ ID NO: 9500 - protein, 427 aa, Unknown
  Description of Unknown: Integrase B9501 sequence
  PTHR30461:SF3,IPR036162,PS51737,IPR011109, PTHR30461,PF00239,G3DSA:1.10.10.2600,IPR006119, SSF53041,cd00338,SM00857,IPR025827,IPR038109 ,PS51736,mobidb-lite,PF13408,G3DSA:3.40.50.1390,PF07508,Coil
MDRIIKRVDFPKIMQPQFLKVCAYTRVSSGKDSMLHSLSAQVSHYSEMIQSHTGWVYCGVYSDEALTGTKSDRDGFQQMLTDCRAGKIDMVITKSISRFARNTVTLLETVRELKSLGVDVFFEEQNIHTMSADGELMLTILASYAQEESRSVSENQKWRVKRNFEAGIPWNGRMLGYRMQDGKYYIIPEEAELVRRIYREFLDGMGRNRIAAKLNDEGIQPTRYGEEWHPQTIAKILRNYAYTGNLLLQRFFCESYITKKTVPNNGQKTMYHAERTHEAIIPLEEWKEVQTEIERRAEQHKSKPPAQPSFFYTGRIQCAKCGKNFRRKTTAARVVWICATLNTKGKKHCASKQIPEATLDELVRQVTDDPFSVKKIIADDGNTLHFHFSDGTAVTRTWTDRSRAESWTPEMKEKARQQSLARRRQKS

SEQ ID NO: 9501 - protein, 427 aa, Unknown
  Description of Unknown: Integrase B9502 sequence
  PTHR30461:SF3,IPR036162,PS51737,IPR011109,PTHR30461, PS00397,PF00239,G3DSA:1.10.10.2600,IPR006119,SSF53041, cd00338,SM00857,IPR025827,IPR038109,PS51736, IPR006118,PF13408,G3DSA:3.40.50.1390,Coil
MRIALYARVSTEEQAIHGLSIEAQSEALEEWAKQEHANVVGTYIDAGISARKPASKRPSMQRLLADIERGKIDMVVFTKLDRWFRNIAEYYKVQEVLERHGVSWKTIHEDYDTATASGRFKVNIMLAVAQDEADRTSERIKAVFDSKRKRGEAVSGSVPPGIKICNKKFTVDEDKAPIMRDVFNFFIANHSVYATQRYAANTHGFLRDTSTLKRLLANPLYRGRVVDEATFDLAKELLSVRSQRNSGSPRGRIYLFKGMLHCDVCGGMMSGIVCKDFYYYRCNKHTFTGNCPNSKYIRESHVEQWLLERVVSECDAYNSRITQERTERPRIDDAGIRRKMSKLKDLYLSDLIDRDEYERDYTELRQTLEKVQEAEPPAKPIDVEYVRSAIAMYDDLERPEKKEFWMRIVKEIIAYPDGTFSFVLRNI

SEQ ID NO: 9502 - protein, 425 aa, Unknown
  Description of Unknown: Integrase B9503 sequence
  PTHR30461:SF3,SM00857,G3DSA:1.10.10.2600,IPR036162,PF13408, PS51737,IPR025827,PS51736,G3DSA:3.40.50.1390,IPR006119, IPR038109,PF07508,IPR011109,SSF53041,PTHR30461, mobidb-lite,cd00338,PF00239
MPRTVEQIQFTPHMPKALRVAAYARVSCGKDAMLHSLAAQVDHYSTYIRHHPGWEYVGVYADEAKTGTRDSRENFQRMLADCRKGKINHIITKSISRFSRNTVTLLETVRELKGLGISVYFEEQSIDTATADGELMLSILASYAQEESLSASENQKWRVKRNFEEGIPWRFFMLGYRRENGKLAIVPEEAEIVRSIFDDYLAGKGVTAIAKRLNESGYATQSGCVFHKSAVERILRNYAYTGNLLLQTKFRENHLTKVTRKNQGELPRYHAADTHEAIISQETFDAVQAEILRRKRKYASTKPQQPSPFTGLITCAICNKHYRRKTTATGPVWICSTYNSYGKSYCPSKAIPEEKLMQTVALVGHTGEITAITAHNDNLLEFTLKDGTNAVKRWQDRSRAESWTAEMRKSAGEKTRERNKRHAES

SEQ ID NO: 9503 - protein, 425 aa, Unknown
  Description of Unknown: Integrase B9504 sequence
  SM00857,G3DSA:1.10.10.2600,IPR036162,PF13408,IPR025827, G3DSA:3.40.50.1390,PS51737,IPR006119,IPR038109,PF07508, IPR011109,SSF53041,PTHR30461,PS51736,cd00338, PF00239
MRVKVINKRPASVLQKKRVYAYARVSTDSRQEDSLENQMETYERLITGNSEYEFIGVFADQGISDYCENRQQFQRMMEKARAGEIDLIITKSISRFARNTVTVLKFARELKELGVGIFFEEQNINTLSGDGETMLAVLASFAQEESRSMSENNKWSIRKKFERGEVMITTSRFLGYDKNEYGDLIVNRKEAEIVSLTFDLYLMNVGSSRIGELLDYLGVKTVTGTTWESGTINGMLCNEKYKGDFHLQKYYTPENKRNHTRKNNGEVQSYYISENHEPIVSPEVWEQVQKVREQRKRDRNIGQDNTMKFQNRYPLSGMLICPYCGKTLRRRQVYKKKIQWLCSTYIEKGVKACKGIRIDDAELQGLNITEQTVIEEVVKNGKKHYCYTSKADFDCGIRNSTVSAEIEDGSVLPSVNRPRRTVIKL

SEQ ID NO: 9504 - protein, 425 aa, Unknown
  Description of Unknown: Integrase B9505 sequence
  PTHR30461:SF3,IPR036162,PS51737,IPR011109,PTHR30461, PF00239,G3DSA:1.10.10.2600,IPR006119,SSF53041,cd00338, SM00857,IPR025827,IPR038109,PS51736,mobidb-lite, PF13408,G3DSA:3.40.50.1390,PF07508,Coil
MYEDIKTACLYVRFSSHNQTEQSIEGQTRVCRDFCKRHNIRIVEIYADRATSASKDIEKRVQFLKMIKDSEKGLFDAVIVYKLDRFARSRYDSATYKYRLKRNGVQLISATENISNDPEGIILESVLEGMAEFYSAELSQKINRGMRESAYKHNSIGGAIPLGYKIEDKKLVIDPKTAPIVKEAFKKYADGETVAEICRQFNARGYKTSKGTAFGKSSFTKIFRNERYIGVYTFHDYRAEDAIPAIIDKDLWDRVQLRVGKIKNAPARNKAKVVYLLSGKIFCGHCGSKMNGNCNAGNYCYYQCYGKKNGNVDCKKKNIRKEFIERLVAQDALSLLTDEYIEQIATIACEKNQHEIELDSALPTIRDRIHQVDLSLNHLLKAIESGSAPDMLVKRMGELEKEKKDLQAQAKKESEDIVELDKAQV

SEQ ID NO: 9505 - protein, 424 aa, Unknown
  Description of Unknown: Integrase B9506 sequence
  PTHR30461:SF3,SM00857,G3DSA:1.10.10.2600,IPR036162,PF13408, PS51737,IPR025827,G3DSA:3.40.50.1390,PS51736,IPR006119, IPR038109,PF07508,IPR011109,SSF53041,PTHR30461, mobidb-lite,cd00338,PF00239
MDRIIEKMRFDVPTQPKAKRVAAYARVSSGKDAMLHSLSAQISYYSEMIQEHPGWLYAGVYSDEALTGTKENRSGFQSLLADCRAGKIDMVIVKSISRLARNTVTLLETVRELKSLGVDVYFEEQNIHTLSSEGELMLTILASYAQEESLSVSENQKWRIQKNFKEGKPWNGTMLGYRNVNGMLTVVPEEAEIVKRIFDMYLSGMGIQLIANTLNREGISTRLGAKFKRSAISKMLRNEAYAGNLLLQKTFKDNHIAKRTRINRGELPMYYVENAHEAIIPSEIFQKVQEMITQRAEKYAPPSLEKPAVYPFTSLITCTKCGKHFRRKTVRGKPVWICPTFNYEGKDACAAKQIPEEILEKITSDMDMENVAGITADDGNRLLFHFTDGTVTERTWCDRSRSESWTDEMRQKARDRTKARNQKK

SEQ ID NO: 9506 - protein, 423 aa, Unknown
  Description of Unknown: Integrase B9507 sequence
  PTHR30461:SF3,cd00338,SM00857,G3DSA:1.10.10.2600,IPR036162, PF13408,PS51737,G3DSA:3.40.50.1390,IPR025827,IPR006119, IPR038109,PF07508,IPR011109,SSF53041,PTHR30461, Coil,PF00239
MKRVYCLYRVSTKGQVDKDDIPMQKTSCREFAERNGWTILKEFQEKGVSGFKVSASDRDAIQDLKAAAEKKEFDVLLVFMFDRIGRIDDETPFVVEWFIKHGIEVWSVNEGEQRMDNHVDKLMNYIRFWQANGESQKTSARVKTRLNQMTLDGKFTGGVAPFGYKLIKSGEVNKKGKELMDIVVDDDEAPIVKKIFEMTVKEGYGSYRMADFLNSHGIRTHNNSKFQCNTVNRILKNKMYCGYFISGGVESPYIERLHIIDENVYEQAQFILSQRSNKNEEKKQIARTTKGSTLLSGNIYCAHCGQKMVSTSYIDKYDRADGSQYRVRRQRYICTNKAMKRGACDGQSAYVAHRIDGAVLATLRDYLAKIKSTPKDIALEKRYKSEISEYKRKQTKIEKEIDKLKRQVIELSAEIGRSLLGES

SEQ ID NO: 9507 - protein, 423 aa, Unknown
  Description of Unknown: Integrase B9508 sequence
  SM00857,G3DSA:1.10.10.2600,IPR036162,PF13408,PS51737, G3DSA:3.40.50.1390,IPR025827,IPR006119,IPR038109,SSF53041, IPR011109,PTHR30461,PS51736,cd00338,PF00239
MRAALYERVSTDEQRIHGLSLDAQREVLEEYAKNHGMVVAGHYTDAGVSGQKPLSKRPALRRLLEDVDAGKIDIVLFTKLDRWSRKVKEYYKAQDILDRHKIPWRAVLEDYETETPSGEFKVNIMLSVNQNEAQRTSERIKTVFDAKRSRGEVCSGKVPFGVRISADKCLEAVEPEASIVRDVFREYLAVRSSYIAQRYMANNYGVVRNTTAFRRMLRNQRYRGLVVDEAVFDAVQEVLAVRSQRNAPIGRVYLFKGLVVCGNCGHHAAAYFCKNVCYYRCSYRVNTGQCNFAKHVREDVIERKLLDGFLIAAERLNAELLGRRAAPPIDRAGIKRKMDKLTDLYMSDLISRDKYEVEYRELQAALSVPDPEEQRPIDIGAARSALEMYGQLDRAGQKEFWSRTIKEITLHPDAGISFSLRQL

SEQ ID NO: 9508 - protein, 422 aa, Unknown
  Description of Unknown: Integrase B9509 sequence
  SM00857,IPR006118,IPR036162,PF13408, IPR025827,G3DSA:3.40.50.1390,IPR006119,SSF53041, PTHR30461,PS00397,PS51736,cd00338, PF00239
MKAALYIRVSTEEQAIHGLSIAAQTEALDEWAKANGTTVVDHYVDAGISARKSAAKRPELQRLLKDVQAGRVDIIVFTKLDRWFRNIAEYYKVQEVLDKHKVKWRAIHEDYETETSGGQFKVNIMLSVAQNEADKTGERIKAVFDGKKARGEVCSGSVPPGIRIENKHCVADEPMASAVRDLFSHYIATQSLYKTRIYAGSKYNLYRDSKTFRRMLSNARYRGLVVDNAAFDLAQSMLSARAQRHSCSTLGNTYLFRGLMRCPECGSAMNACVCKNIYYYRCSLCFGNRKCSYNLYTREDKVEAFLLTNIMAKCTEYNAEIAGREKEEIDYAGIRRRMAKLKDLYLSDLIERDEYEHDYRELRKILETPQTAPKPIDIAQVRSSLTDYDELTRDGRKEFWTRTISEISPSGRDFFNITVRKP

SEQ ID NO: 9509 - protein, 422 aa, Unknown
  Description of Unknown: Integrase B9510 sequence
  PTHR30461:SF3,SM00857,IPR036162,PF13408,IPR025827, G3DSA:3.40.50.1390,IPR006119,SSF53041,PTHR30461,Coil, PS51736,cd00338,PF00239
MRAALYERVSTEEQKMHGLSLEAQKEALEAYAKERSMLIVGHYTDAGVSGQKPISKRPALQRLLADVQAGKVDIVLFTKLDRWSRKVKEYYKAQDVLDKRKVPWRAILEDYETETPSGEFKVNIMLSVNQNEAQRATERIKAVFDAKRARGEVCSGSVPPGIAITADKHLEAVEPGASMMRDIFREFIAVRSIYAAQRYMAQKYNVLRDTTTFRKLLCNKKYRGLVIDAEVFDVAQEILNTRAQRNAQTGRVYLFSGLLVCGCCGYRMNAYVCKDYYYYRCARRLSVGDCNFASHIREEKVERYLLDHFLIRVEEYNAELHARRQAPIDTAAIKRKMDKLTDIYIADLISREKYEREYRELQAALSAASRVDERPIDVAQARAVLELYNQLDKPGKKEFWSRTIKSITVHPDSSFSFTLRQL

SEQ ID NO: 9510 - protein, 422 aa, Unknown
  Description of Unknown: Integrase B9511 sequence
  PTHR30461:SF3,SM00857,G3DSA:1.10.10.2600,IPR036162, PF13408,IPR025827,G3DSA:3.40.50.1390,PS51737, IPR006119,IPR038109,PF07508,SSF53041, IPR011109,PTHR30461,PS51736,cd00338,PF00239
MRLRKIEPIEAKTKKIRVCAYARVSTDSLKQGESFENQVTTYEALIKSKPEYEFAGVYADQGLSGTSENRPEFQRMLADCRAGKIDLIITKSISRFARNTTIVLDYTRELKQLGIGVYFEENNINTLSAEGELMMTVLASFAQEESRSISENNKWSIGKRFERGEGMINTTRFMGYDKDETGDLVINKKEAKIVRRIFEMYLSGEGCHRIAKILNDEGIKTITGSTWHPSTIKGMLTNEKYKGDFHIQKYYTPEGKRNQTVRNKGEVKSFYVSENHPAIVSEEEWHQVQELMQYHKKQRNIQSGDKYQRRYPMSGMLVCPHCGKSLRRRYVYKRKVEWICSTYIQQGKEACKGIRVRDELLTGLSFTEPMVVEEVFENGEKHYGYTSKAAYDNGERAADRIEEERSSVLPRINRSRRTVIEL

SEQ ID NO: 9511 - protein, 421 aa, Unknown
  Description of Unknown: Integrase B9512 sequence
  PTHR30461:SF3,SM00857,G3DSA:1.10.10.2600,IPR036162,PF13408, IPR025827,G3DSA:3.40.50.1390,PS51737,IPR006119,IPR038109, PF07508,SSF53041,IPR011109,PTHR30461,PS51736, cd00338,PF00239
MKLRKIEPLKPKQKKLRVCAYARVSTDSLKQGESFDNQVSTYERVIKSNPEYEFVSVYADQGMTGRSENRPEFQRMIADCKAGKIDLIITKSISRFARNTTTVLKYTRELKEIGVGVLFEENNINTLSSEGELMMTVLASFAQEESRSISENNKWTLKKKFERGEGMVNTARFMGYDKDETGDLVINKEEAKVVRQIFKMYLSGMGCHRIAKALNEEGVPTIAESSWHASTIKGMLTNEKYKGDFHIQKTYIPEGTHQSVKNNGQVQSYYVTEDHPAIISAEEWQQVQELMEYHRKQRNIGKGEKYQNRYPMSGMLVCPYCGKSLRRRYVYNRKVEWLCATYIHKGKEACKGIRIRDTELTGLSFSEPMVVEEVMIDGEKHYGYTSKRAYDAGERAADRIEKESSSVLPRVNGPRRTVIKL

SEQ ID NO: 9512 - protein, 421 aa, Unknown
  Description of Unknown: Integrase B9513 sequence
  cd03768,PTHR30461:SF3,SM00857,G3DSA:1.10.10.2600,IPR036162, PF13408,IPR025827,G3DSA:3.40.50.1390,PS51737,IPR006119, IPR038109,PF07508,IPR011109,SSF53041,PTHR30461, PS51736,Coil,PF00239
MQQLIKDADTGLYDAVLVYKLDRLSRSQKDTLYLIEDIFQKNNIHFISLSENFDTSTAFGKAMIGILSVFAQLEREQIKERMSMGRVGRAKSGKIMEFNNPAFGYEIDGDNYKVDPLRAEIVKRIYKMYLSGTSINKIKETLNSEGHIGNKKNWSDTRIRYILSNPTYLGKIRYDGKTYDGKFSPIIDEETFNKTQNELKERQTATYKRFNMKLRPFQSKYMLSGLLRCGYCGATLFVNSYVYNGKRKLRYNCPSTYKSKQKTRTYKIMDPNCPFKLVYAKDLEPAVINEIKNLALNPQSIQKPVKKTPDIDVEAIQKELTKVRKQQQRLIDLYVISDDVNIDNISKKSADLKLQEETLKKQLAPLEEPDNDDKIVAFNEILAQIKDIDSLDYDKQKFIVKKLIKKIDVWNDNKIKIHWNI

SEQ ID NO: 9513 - protein, 421 aa, Unknown
  Description of Unknown: Integrase B9514 sequence
  SM00857,G3DSA:1.10.10.2600,IPR036162,PF13408,IPR025827, G3DSA:3.40.50.1390,PS51737,IPR006119,IPR038109,PF07508, IPR011109,SSF53041,PTHR30461,PS51736,cd00338, PF00239
MKLRKIEPLKPKQKKLRVCAYARVSTDSLKQGESFENQVSTYERVIKSNPEYEFVSVYADQGMTGRSENRPEFQRMIADCKAGKIDLIITKSISRFARNTTTVLKYTRELKEIGVGVLFEENNINTLSSEGELMMTVLASFAQEESRSISENNKWTLKKKFERGEGMVNTARFMGYDKDETGDLVINKEEAKVVRLIFKMYLSGIGCHRIAKALNEEGVPTIAESSWHASTIKGMLTNEKYKGDFHIQKTYIPEGTHQSVKNNGQVQSYYVTEDHPAIISAEEWQQVQELMEYHRKQRNIGKAEKYQKRYPMSGMLVCPYCGKSLRRRYVYNRKVEWLCATYIHKGKEACKGIRIRDTELTGLSFSEPMVVEEVMINGEKHYGYTSKRAYDAGERAADRIEKESSSVLPRVNGPRRTVIKL

SEQ ID NO: 9514 - protein, 420 aa, Unknown
  Description of Unknown: Integrase B9515 sequence
  PTHR30461:SF3,SM00857,G3DSA:1.10.10.2600,IPR036162,PF13408, IPR025827,G3DSA:3.40.50.1390,PS51737,IPR006119,IPR038109, PF07508,IPR011109,SSF53041,PTHR30461,Coil, PS51736,cd00338,PF00239
MQREESITAQKRYMMMYAKRNNMEVIDWYCDEAKSAKTVNRPAFQKMINDAKNNPEFKAVLVHKTDRFSRNLSDSIQYKKLLEEYGVQVIFVNERFENNPESHLLYHIMGSVNQFYNENLAREVMKGLKENAYQCKFTGGRPPLGYDVDKDLKLVINEKEAEAVRLIFEMSAEGYGYGETIDKLNILGYKTKKGLPFVKNSLYEILRNEKYKGTYIFNRSCSANSLNKRNNHRRKPEEEIIRIENGCPAIVSSGLWHRANAVKKATRSSYTNAKNTYLLTGLIHCGECGGKFHGNVRYNKNNTNLVYRCSSKKNKRKYESKEIRCEYLDSFVIDKFVEFFFNDDNIKVITKQLNEQYSKSCISDLEYNEAKSTLKILEKNINNLVEAIAKTGINDIMSDKIKEYEEQIKKTAEFIQKYEK

SEQ ID NO: 9515 - protein, 420 aa, Unknown
  Description of Unknown: Integrase B9516 sequence
  PTHR30461:SF3,SM00857,G3DSA:1.10.10.2600,IPR036162,PF13408, PS51737,G3DSA:3.40.50.1390,IPR025827,IPR006119,IPR038109, PF07508,IPR011109,SSF53041,PTHR30461,PS51736, cd00338,PF00239
MRYYTEVITRNAEYELVDIYADEGISGTNTKKRDDFNRMIADCRAGKIDLIITKSISRFARNTLDCLNYVRELKDLGIGIIFEKENINTLDAKGEVLLTILSSLAQDESRSISENCTWGIRRRFEQGKHKMSTKRFLGYDTDEEGHLVVNRQQAKIVVRLYEEFMSGKTVDYIARIFKTEKIKNWDGKYNWQASTLDSMLRNEKYMGDAILQKSYTADFLSKRRVMNDGSVQMYHIEEDHEPIIDIETWEAVQAELERRAQYCTDHFTNAYSQKSEINPFYAKIICGNCGNIYSRVKYTTRAGTKITKWRCGSCNKADGHKVCSNRYVTDETFTKLFVMGWNEIVEHQEEYQQYWQVNLKGEDVLLRYKTKLLIKRTAAGPIKKFEPELMMAVMDYITVFEDGRLQIKFYDGTEFEVATE

SEQ ID NO: 9516 - protein, 419 aa, Unknown
  Description of Unknown: Integrase B9517 sequence
  cd00338,SM00857,IPR036162,PF13408,PS51737, IPR025827,G3DSA:3.40.50.1390,IPR006119,PF07508,IPR011109, SSF53041,PTHR30461,Coil,PF00239
MKRVISYIRFSSEKQAKGDSLRRQSKMVTDWLKAHPEYYLDQDLSFRDLGVSGFTGKHLKGGLGDFLTAIEKGLVKAGIKVSKRCPAWLKLNDDRKSFSVIPEKVETVKRCFQLRLEGKSIWEIVRTLNAEGHQTLNQYKAGKFGQTSVQDLLKNRSVIGYFTPKGCEEIAGYYPSVIDETTFYKVQQLSHSRYGRKPASDKPLSVNLFKGVIRCSECGHALIITGFSDTRNGIYRCPLRNENRCSAKGLSRKQTDGTLLALLSRLDRFDSDMTNTIDTLKLHREHISSNIEKLVQLSLEIEDLSAITSKLRQLKNELSQVDADIEKETQRLKSIDVGCLSDCDLTTKAGRIEAQLIIKSAVKEVVLNTAKRRCKVTFHNGKAITLPITENPSDNVTEAIQSLSEVTERGLIDVDEVII

SEQ ID NO: 9517 - protein, 418 aa, Unknown
  Description of Unknown: Integrase B9518 sequence
  PTHR30461:SF3,SM00857,IPR036162,G3DSA:3.40.50.1390,IPR006119, SSF53041,PF00239,PTHR30461,PS51736,Coil,cd00338
MKIVDHYCDAGVSGGIAYKKRPEMMRLLQDVADGKIDIILFTRLDRWFRNIKEYFKVQEILEEHNVEWKAIWEDYRTDTANGRMAITIFLAIAQNEREKTSERIQVVFENKRKNKESFFGKSSTPFGYMEQKDEDGITRLVKDPELEPALQMFWDIAVKYENVNKAAKMVNLEYGIKKNKNKWMELSKKEIYTGNYRGVEGYCPAYVSVEDWLKLQNRKIPRQSKSDRVYLFTGLIECPVCHNNLASTYCVHKQPDGSKREYHNYRCQFKESYVCKYNHTFSELKIEKWLLKNIRNLMHEEVARVEVEKTKPRPRPKTNVAALKEQLRRLEVVYMTGNKQDEEYIKEQKELNNAIKKAENETPKTDADKDLNMLHEILSTDFESVYKTLSAEDRRRFWRGLINRIYLDGNKISHVDFN

SEQ ID NO: 9518 - protein, 417 aa, Unknown
  Description of Unknown: Integrase B9519 sequence
  PTHR30461:SF3,cd00338,SM00857,IPR036162,PF13408, IPR025827,G3DSA:3.40.50.1390,IPR006119,SSF53041,PTHR30461, PS51736,Coil,PF00239
MEKKERIVERVQFPNAQKVKLLRTAAYAKVSNGKDAMLHSLSAQVSYYNSLIQSNPEWLFCGVYADEALTGTKDNRENFQRLLSECRAGHIDLIITKSISRFARNTVTLLETVRELKNLNVDVYFEEQNIHSISPDGEFLLTLLGSYAQEESYSASENHITKRKMPNHGELPQYFVEHSHEAIIDPEEFELVQAEIERRKGLGKEYSGSSIFSAKIVCACCGGFFGSKVWHSTSKYKRTIWQCNHKFSNGVKCETPHLYEDDIKKRFIEVCNQIATDRADFLTSCREIVILLSNTAALDKKIEAQYAHINELTVSMQEFIKENAMEAQDEDFYKVKMAEYNAKKADMEKVLHELLNKRAERLSRKELLEGLIRTMEHDGIVTDTFDGKLWLLLVEKATVGTDGKLTFTLRNGMEIEV

SEQ ID NO: 9519 - protein, 417 aa, Unknown
  Description of Unknown: Integrase B9520 sequence
  PTHR30461:SF3,cd00338,SM00857,G3DSA:1.10.10.2600, IPR036162,PF13408,PS51737,IPR025827, G3DSA:3.40.50.1390,IPR006119,IPR038109,PF07508, IPR011109,SSF53041,PTHR30461,PS51736,Coil,PF00239
MSKNCVIYARYSSDRQRDESIEGQIRECTAYAENENLNIVKIYVDRAMSARTDHRPEFKKMIQDSTKGSFQYVLVYQLDRFNRNRYDSAMYKAKLKKNGVKVLSAKENIADDPSGIILESVLEGMAEYYSAELSVKVTRGMTENALKGIWPGGTVLQGYKLDKNKKLIIDEKYKPMVEFIFNEYINGCRMETIARQVNAMGYKRKSGKPFTMQSIAGILDNEKYTGTFIWKDIKIEQCYPAIINYETYYRVQELRQLRAKKKNSKSEIYQLCTKLVCGKCGASYIGMSARSSNGSTHYYYACYNRRKHGSCDAKNIRCADIENLVIDYTYKMLQDEEIINKIAQQAVKAQNIPLVEDNTLERLKAELALKEKELDNYMKAIASGLHSTTINATIETVEQHIEKLKQDVAKEELKKGL

SEQ ID NO: 9520 - protein, 417 aa, Unknown
  Description of Unknown: Integrase B9521 sequence
  PTHR30461:SF3,SM00857,G3DSA:1.10.10.2600,IPR036162,PS51737, G3DSA:3.40.50.1390,IPR006119,IPR038109,PF07508,IPR011109, SSF53041,PTHR30461,PS51736,cd00338,PF00239
MMRWRNRYTLTNYSSDVAQKSDGDRCSVRSCGVQILTRITIGHPILLTYIFERGDTSLETNKQNEIRDAYEHSAQVQCIPASIKKTTEHSEEDPLMVAPYCRVSTDSKDQLASYELQCQYYKEYVSKHPGWRLYDIYADEGISGTSVKKRTDFLRMIDDCKAGKINMIIVKNIARFARNVVDCVATVRMLKALDKPVAVYFEDIAINTLTQTGELLMVVMAAIAQGESEAKSESVKWGFQKRFEKGLPKLADLYGYTRDKRLLEIYEPEANVVRLIYQMFYDDRTIPEICYILNQQGIPSPRGGQWTYSTVKTILTNEKYSGDVLMQKTVTVDIFSHRSIRNDGRANQFFIQGYHKAIIPRALWLEVQQILKGENVVPVPSVDEVADLSASDVPRILDGFFVIKPRKDGNNEYLRQL

SEQ ID NO: 9521 - protein, 416 aa, Unknown
  Description of Unknown: Integrase B9522 sequence
  PTHR30461:SF3,SM00857,G3DSA:1.10.10.2600,IPR036162,PF13408, IPR025827,G3DSA:3.40.50.1390,PS51737,IPR006119,IPR038109, PF07508,IPR011109,SSF53041,PTHR30461, PS51736,cd00338,PF00239
MAHISVVTPVRPPTPKLVNVAAYARVSTNAVEQLASLSAQVSYYSRLIQSTPGWAYAGVFTDEGITGTSTKSRQGLADLMDTARSGVVDIVLCKSISRLARNTVDLLATVRELKDLGVAVRFEREQIDTLSADGELLLTLLASFAQEESRSLSQNVKWAIRNRYKSGGTNSFVVYGYQWADCQFTIVEEEAKIVRLLFANYLDGISPEKTATMLNAEGKRSRGGGRFYGSVFRRMLENERYKGCQMLQKMYRPTIQAPTRSFNDGELPRYWVEQALPAIIDEAMFDAVQAEIAHRREAGPAATPSKNTGVFTGRICCGACGKNYQRKTRTYKSGTSYKFWRCWSACTGNGNPCRGHNLRETLLEQACADMLGTQGFDPVQVGEQIVMIEAFEHQLTFHLADGTMTPVGLTSEGRLA

SEQ ID NO: 9522 - protein, 416 aa, Unknown
  Description of Unknown: Integrase B9523 sequence
  PTHR30461:SF3,SM00857,G3DSA:1.10.10.2600,IPR036162,PF13408, PS51737,IPR025827,G3DSA:3.40.50.1390,IPR006119,IPR038109, PF07508,IPR011109,SSF53041,PF00239,PTHR30461, PS51736,Coil,cd00338
MAHISVVTPVRSPAPKLVNVAAYARVSTNGTEQLASLSAQVSYYSRLIQSTPGWAYVGVFTDEGITGTSTKSRQGLADLMDAARSGGVDIVLCKSISRLARNTIDLLATVRELKDLGVAVRFERERIDTLSADGELLLTLLASFAQEESRSLSQNVKWAIRNRYKSGGTNSFVVYGYKWADGQFTIIEEEAKIVRLLFANFLDGISPEKTATMLNAEGKRSRGGGRFYGSVFRRMLENERYKGCQMLQKMYRPTIQAPTRSLNDGELPRYWVDNALPAIIDETTFDAVQKEIAHRREVGPAATPSKNTGVFTGRICCGACGKNYQRKTRTYKSGTSYKFWRCWSACTGNGNPCRGHNLRETLLEHACADMLGTQGFDPVQVGEQVVMIEAFEHQLTFHLADGTMMPVGLTSEGWLA

SEQ ID NO: 9523 - protein, 416 aa, Unknown
  Description of Unknown: Integrase B9524 sequence
  PTHR30461:SF3,SM00857,G3DSA:1.10.10.2600,IPR036162,PF13408, IPR025827,G3DSA:3.40.50.1390,PS51737,IPR006119,IPR038109, PF07508,SSF53041,IPR011109,PTHR30461,Coil, PS51736,cd00338,PF00239
MARKKSKLNDNNLAIAYYRYSSHSQNEASIEQQRELAHEWADAHGLKIVREYEDAAISGTKEDRPGFQLMLSEVAKIRPNTLIAWKTDRLGRDKYVLAMAKKTIRDAGCEIHLLAENIPTDTAEGILIEGLMEALAEYYSRNLSVHIQRGMDFNAEHANFNGHKVFGFKTEKVDKKRKYVIDPDTAPFVQLMFTKYAEGEPMQSICDEFNEAGLRTSRGNPFGVKTMHRMLKNRAYIGEYRHGEFVVPGGMPALVDEETFDRAQKRLAENKRKGSQRARGMDEDGAPRYWLTGKLYCGECGETMQGVSGTSKTGRTYYYYYCSAQRKKLCAKKKVKKDWIEDLVTDVLRYIIDDSENLMSLAVDAAVYYKEHYKETGYLEGLEAKRKEVEKGIANLMKAIEGGALSDTPHRAPEPA

SEQ ID NO: 9524 - protein, 415 aa, Unknown
  Description of Unknown: Integrase B9525 sequence
  PTHR30461:SF3,SM00857,G3DSA:1.10.10.2600,IPR036162,PF13408, IPR025827,G3DSA:3.40.50.1390,PS51737,IPR006119,IPR038109, PF07508,IPR011109,SSF53041,PTHR30461,PS51736, cd00338,PF00239
MKKIRLVLPPPKEQKKLRVAAYCRVSTKSKAQKESLRNQILYYTERILDNDNWEFAGVYYDFGKTGLRKKGRAGLERMLKQADKGKIDYILTKSVSRVSRDTLELLNIIRFLKERGISMYFENEKLDSLNPVAEAYITLSGAVAQEESRNISENMQWAVTRRFEQGTFTNYKAFMGYQCIEGELVIVPEQAEVVKMIFDFYLTGYTFAQIKAELEKRNIKTATGKSQWDTTTIQKMLKNEKYKGDSLFQKTFTEDYLNGIRKKNEGQRPKYYVKDSHPAIISPEIFDRVQEEMFLRARLVLDEKGEKSNIGNRYSSKYLFSNLLVCGNCGAGFRRRTERGKIVWRCGTRMEKGKMVCGCSPTLQDEKMKRILAVAVCGGVYDENIVKNKVKRVDVYEKQIIICFAEENEYKVCSL

SEQ ID NO: 9525 - protein, 414 aa, Unknown
  Description of Unknown: Integrase B9526 sequence
  PTHR30461:SF3,cd00338,G3DSA:1.10.10.2600,IPR036162,PF13408, PS51737,G3DSA:3.40.50.1390,IPR025827,IPR006119,IPR038109, PF07508,IPR011109,SSF53041,PTHR30461,PS51736, Coil,PF00239
MMADAMENKFDVIIFHKIDRNSRNELNYFIFKDKLEKLGIRYEYAAQPIDTDSPEGQVMETVMVGMAAYYSRNLAKETKKGMNENAYKTIFNGGYAPLGYKIVDKHYVIDEKEAEAVRLIFNLYLDGKGYGEICLALAARGYTTRSGKNFPKNSLHDILRNERYMGTYTFNRVPKAKRRNSHSYARPNDFISIPDAIPAIVSKETFLAAQEKMLLNKKRKGGAYTAKRDYLLSGKFFCGYCGSAMQGYSCCTRGNMYYYYSCARKDRVPADRCKQKMIRAEVIEHWIMSTLEKEIFSDAGIQRVADSMSTDFGNVNKEVKNATTVLLQRKAAAERKLNNLYQVIEDGDADEFDMQRLKKTKEELRNINNEICETAVKSAPDIDTSKIVSLLKNMREEIFAKKIATTQNKLLNCL

SEQ ID NO: 9526 - protein, 410 aa, Unknown
  Description of Unknown: Integrase B9527 sequence
  SM00857,G3DSA:1.10.10.2600,IPR036162,PS51737,G3DSA:3.40.50.1390, IPR006119,IPR038109,PF07508,IPR011109,SSF53041, PTHR30461,PS51736,cd00338,PF00239
MAYAMYLRKSRKDDDTGIEDTLARHEKMLQDLADRMGILVCEQDVYREVVSGESIEARPQMQRLLKHVELGEYDGVLCVELERLSRGNGEDQSRILKAFQFSDTKIITLNKTYDLAGEDEFDEEFFEFGLFMSRREYKMIKRRLLRGRMQSQQDGYFIGATPPFGYDKMKNPDGKGWILIPNEQTPIVQMIFERYASGESAASIMHELNRMGIQPSKVYDTAWTSHRVRDIIKNRVYLGEINVKIKRTEKRIEDGKIIESRVRNLNHGTVKGKHEPIVSVETFNKCQELLAMRSTRQAVSKQLSNPLASFLHCSKCGKVMRRTTYTWKGVTTEHLQCSTFKCETRNSSLPMVENMILDALKDELSRQLTVLAEMENPIYRIPNDARERKPLKRGAFLDVSREIYAVRRHM

SEQ ID NO: 9527 - protein, 407 aa, Unknown
  Description of Unknown: Integrase B9528 sequence
  cd00338,SM00857,IPR006118,G3DSA:1.10.10.2600, IPR036162,PS51737,G3DSA:3.40.50.1390,IPR006119, IPR038109,PF07508,IPR011109,SSF53041, PTHR30461,PS00397,PS51736,Coil,PF00239
MKNAIIYVRVSTEEQAKNDLKSSLEMQKSKCLDYCKQNNLNPVKIIQDIQSGGNDKRKGFLELQKELETGIYDIVVVYEISRISRVASTGLEFADMLSRLSVQFASIMQPQANKFILGILFSIAEEERTQGSQRTKSNKLERAKKGFYQGKAPYGYKNIPNSLEIVEEEAKIVRELFEEYLNSLSFSKLSRDYNISISTVKNILTNRAYTGWFKYGEKKRDNLFQEYKKSKDVQYYKGNYPHIIDEAIFYKVQEAISKKIKINAAFPVILFSGLVECSCGAKMYQEKKTKMIKGVKNISYYYKCNSCNKSFNANKEKIIIEAIKSYEVESGEVEKVDNSKIINKLKKELEQLPIKKQRLMELYTNGLISMEVIKEKCNNFDHEKEKIEKIYPRKQRNIYTRNFRYKS

SEQ ID NO: 9528 - protein, 405 aa, Unknown
  Description of Unknown: Integrase B9529 sequence
  G3DSA:1.20.140.160,PTHR30603,IPR036162,PR00046,IPR000943, cd06171,IPR013324,PF00239,G3DSA:1.10.601.10,PF04542, IPR006119,SSF88946,PS00715,SSF53041,IPR014284, cd00338,SM00857,IPR007627,G3DSA:3.40.50.1390,PF04545,SSF88659,
  CONT. FROM ABOVE: TIGR02937,PS00716,PTHR30603:SF17,IPR007630, IPR013325
MARTADTIAIYSRKSRYTGKGESIGNQIDLCREYIRTHYGDAAAEHAVVFEDEGFSGGNLNRPDFKKMMTAAKGRKFKAIVVYRLDRISRNISDFSSLIEELGRLGLTPALCHPDHTMLFPAEKMPKRKKPPENLWAALLPCHILILPQTTFFYKQKTILNPLSPFILYRRTVLEVFRMLLTLLQFFASKFLVLALHLEAGSFPRPLSPQEEIRTFAALRAGDPSAREKLIRHNLRLVAHIAKKYYALPSEQDDLISIGTIGLMKAVDTFDSTRRARFSTYASRCIENELRMHFRRERKNAPTLSLQETLDAGKEDSALTLADVLQDGFCMEDSCEKQDDAQRLRRLIEGLPARERKLILLRYGLAGQPPLTQLETAKLLQISRSYVSRLETHALELLRAGWEQP

SEQ ID NO: 9529 - protein, 405 aa, Unknown
  Description of Unknown: Integrase B9530 sequence
  PTHR30461:SF3,IPR036162,PS51737,IPR011109,PTHR30461, PS00397,PF00239,G3DSA:1.10.10.2600,IPR006119,SSF53041, SM00857,IPR025827,IPR038109,PS51736,cd03768, IPR006118,PF13408,G3DSA:3.40.50.1390,PF07508
MAYNKLSLPGHIRVAIYVRVSTMHQIDRDSLPMQKQDLLAYAKIMLGTDDCIIFEDAGYSGKNTDRPKFQEMMSQIRAGGFTHLLVWKIDRISRNLLDFATMYNELKELGVVFVSKNEQFDTSTAMGEAMLKIVLIFAELERNMTSERVTATMISRASNGLWNGGRVPYGYEWDSKSKEFSYNTDEYNIARLIHDLYEEERSLIREARILNAKGYRTRSGNEWNPVSLHIILRNVFYCGDYRYNVLKEGDRQKVKAESEWITIENHHPAIVSREQKMRIISILDSNSRINKKKNNYKSGKYTHIFSGLIFCGSCGNPMGAAPVSLRADGWRYSKYSCPTRRKSSMACIGKSTSDPIVGEFVFNYILNMLNTQRDFSKITSIDEMQDKLLTGNTFLNRFLCWSCWL

SEQ ID NO: 9530 - protein, 404 aa, Unknown
  Description of Unknown: Integrase B9531 sequence
  SM00857,G3DSA:1.10.10.2600,IPR036162,PS51736,PS51737, G3DSA:3.40.50.1390,IPR006119,IPR038109,PF07508,SSF53041, IPR011109,PTHR30461,mobidb-lite,cd00338,PF00239
MKITKKQPLRPRGRSEDKRQSTKNVIRDAYINGPQKEVQIIPAKRDMEAETEKKKLRVCAYCRVSTDEDTQASSYELQVQNYTRMIRENPEWEFAGIFADEGISGTSVLHREHFLEMIEKCKAGEIDLIITKQVSRFARNVLDSLNYIFMLRKLDPPVGVYFETEKLNTLDKSSDMVITVLSLVAQSESEQKSNSLKWSFKRRRAQGLGIYPSWALLGYRLDDEKNWEIVEDEADIVRTIYSLYLDGYSSTQIADLLTKSGIPTVKGLSVWSSGSVLGILKNEKFCGDALCQKTVTIDFFTHKSVKNNGIEPQYFVEGHHIPIIEKTDWLLAQQIRKERRYRKRRSTHRKPRIVVKGVLSGFMIVDSSWDEEYVDNLLTPATKKPDPASAVAEEDENFIVIEKE

SEQ ID NO: 9531 - protein, 404 aa, Unknown
  Description of Unknown: Integrase B9532 sequence
  SM00857,G3DSA:1.10.10.2600,IPR036162,PS51736, PS51737,G3DSA:3.40.50.1390,IPR006119,IPR038109, PF07508,SSF53041,IPR011109,PTHR30461, Coil,mobidb-lite,cd00338,PF00239
MKITKKQPLRPRGRSEDKRQSTKNVIRDAYINGPQKEVQIIPAKRDMEAETEKKKLRVCAYCRVSTDEDTQASSYELQVQNYTRMIRENPEWEFAGIFADEGISGTSVLHREHFLEMIEKCKAGEIDLIITKQVSRFARNVLDSLNYIFMLRKLDPPVGVYFETEKLNTLDKSSDMVITVLSLVAQSESEQKSNSLKWSFKRRRAQGLGIYPSWALLGYRLDDEKNWEIVEDEADIVRTIYSLYLDGYSSTQIADLLTKSGIPTVKGLSVWSSGSVLGILKNEKYCGDALCQKTVTIDFFTHKSVKNNGIEPQYFVEGHHIPIIEKTDWLLAQQIRKERRYRKRRSTHRKPRIVVKGVLSGFMIVDPSWDEEYVDNLLISATQKPEPAPAVAEEDENFIVIEKE

SEQ ID NO: 9532 - protein, 404 aa, Unknown
  Description of Unknown: Integrase B9533 sequence
  cd03768,SM00857,IPR006118,IPR036162,G3DSA:3.40.50.1390, PS00398,mobidb-lite,IPR006119,SSF53041,PTHR30461, PS00397,PS51736,Coil,PF00239
MAIKKGDDGYLINDMGEVWGYCRVSTTQQKTDRQEIAMEEYGVRSTKIFIDKQSGKSFNRPAYKKLIRILRKGDIIVIKSIDRLGRNYQEIIDQWRMITQDLGCGIYVIDMPLLNTTGDPEDLISKFITDMMLQVLSFVAQNERENTISRQREGIDAARRKRIVSIGRPKIPMPYDFWEIFIMWKKKEFSTADLFRFCHEAYGMSNRTFYRRINELNQRFGEMDPERLEDLMLDKEYFEGITFDNERLEQGIGFYNQYVLNNPEKERKLRERHRKEREEKPELSKEEEEALQRAMLYKRQKEFREKFNMPPLSIYDRTDMPTELIRRPEPKKPTLSKNGKRVGRPPKETTSKMYVFGDGQSYNCHNKNSGVDQAVVLLDKDPRIPDIDESKLDSQRPMKTIVII

SEQ ID NO: 9533 - protein, 403 aa, Unknown
  Description of Unknown: Integrase B9534 sequence
  SM00857,IPR006118,G3DSA:1.10.10.2600,IPR036162, PS51737,G3DSA:3.40.50.1390,Coil,IPR006119, IPR038109,IPR011109,SSF53041,PTHR30461, PS00397,PS51736,cd00338,PF00239
MECVAYIRVSTERQVEEGYGLESQKRDIEEYCKKNEMLITDWYIDAGLSGMDMSKRVELQRLISDVSKINNIVVYKLDRLARDSVDALYMIEKLFTPKGVRVNSVHDFARYETPQDKFQTHIMAAVAEYDRNTMLLRMRGGMLERVKNGYWMGGGNTPYCYRYDKNLGYLVPIPERAEQANRAMDLFIGGMSDVKIQRLLGYKSEFVVRNILTGVVNIGYIPYKGGTYKGLHEPIFERDKFYLAQELRKSRRKQHVYSFTEPHLLTGLCYCKTCGCKMRYQKITGMGIHKIYCCSHDKYLDYLPNYNADCDNSGAWASDIEKAFEHEILDISINLSQYKPKAKETKLQILTNQLEKQKSKLKRLYTLYAEGNDMVLNMIKALETEIRETTEKISAERKNGQYE

SEQ ID NO: 9534 - protein, 401 aa, Unknown
  Description of Unknown: Integrase B9535 sequence
  PTHR30461:SF3,IPR036162,PS51737,IPR011109,PTHR30461, PS00397,PF00239,G3DSA:1.10.10.2600,IPR006119,SSF53041, cd00338,SM00857,IPR025827,IPR038109,PS51736, IPR006118,PF13408,G3DSA:3.40.50.1390,PF07508
MKKAVLYARVSSNRQEKEGFSIPAQIKLLKDYTFQNNIQIVEEFVEAETAKKSGRKKFNEMVSYLHEHEDRRIILVEKVDRLYRNLPDYGTIDNIKGLEIHFVKENEILSENSRSSIKFMIGIRVLMAKQYVDNLAEESAKGLNERIEQGYALYPPLGYMYGNDGTHKHAIIKDPERAEYAVKAFNLFVYENLSASSINNILYEEGLRNPDGNKYAVSTIQRMFKNPMYVGDYIYQGKLYPNGKHEPLISRKLFQLAQEKLNNANNTTRQYDVEFPYIGLFKCSVCGCSYIAERKVKPSGKEYIYYHCTGKGKIKTCKKTSYINESKIDKFIIEILKNLENLPQSLINEIKDCLKEIYDLKNEYSNITQDNIYKRIKEIDRMIQNGYKHMLRSNNDMENEL

SEQ ID NO: 9535 - protein, 401 aa, Unknown
  Description of Unknown: Integrase B9536 sequence
  PTHR30461:SF3,SM00857,G3DSA:1.10.10.2600,IPR036162,PS51736, PS51737,G3DSA:3.40.50.1390,IPR006119,IPR038109,PF07508, IPR011109,SSF53041,PTHR30461,mobidb-lite,cd00338, PF00239
MKKIKIDRAIQERPATRKQTRNEKIRQSLTEHVDVQVIPAITDREGYEKPKLRVCAYCRVSTDMDTQALSYELQVQNYTDYIRGNDEWQFAGIYADRGISGTSLKHRDEFNRMIEDCKAGKIDLIITKAVTRFARNVLDCISTIRMLKQLEHPVAVYFETERINTLDTTSETYLGLISLFAQGESESKSESLKWSYIRRWKRGTGIYPTWSLLGYEMGEDGKWQIVEAEAELVRIIYDMYLNGYSSPQIAEILTRSGVPTATNQTVWSSGGVLGILRNEKYCGNVLCQKTMTVDVFSHKAIKNAGQKTQYFIEGHHEPIILKSDWDRVQQMIDEKYYRKRRGRRTKPRIVLKGCLTGFTQIDLDWDEDDIARIFYSTTPAAEAATPAMADHIEIIKVKGEN

SEQ ID NO: 9536 - protein, 401 aa, Unknown
  Description of Unknown: Integrase B9537 sequence
  PTHR30461:SF3,SM00857,G3DSA:1.10.10.2600,IPR036162,PS51737, G3DSA:3.40.50.1390,IPR006119,IPR038109,PF07508,IPR011109, SSF53041,PTHR30461,PS51736,cd00338,PF00239
MKKIKIDRAIQERPATRKQTRNEKIRQSLTEHVDVQVIPAITDREGYEKPKLRVCAYCRVSTDMDTQALSYELQVQNYTDYIRGNDEWQFAGIYADRGISGTSLKHRDEFNRMIEDCKAGKIDLIITKAVTRFARNVLDCISTIRMLKQLEHPVAVYFETERINTLDTTSETYLGLISLFAQGESESKSESLKWSYIRRWKRGTGIYPAWSLLGYEMGEDGKWQIVEAEAELVRIIYDMYLNGYSSPQIAEILTRSGVPTATNQTVWSSGGVLGILRNEKYCGNVLCQKTMTVDVFSHKAIKNTGQKTQYFIEGHHDPIILRSDWDRVQQMIDEKYYRKRRGRRTKPRIVLKGCLAGFTQIDLDWDEDDIARIFYSTTPAAEAATPAMADHIEIIKVKGEN

SEQ ID NO: 9537 - protein, 401 aa, Unknown
  Description of Unknown: Integrase B9538 sequence
  PTHR30461:SF3,SM00857,G3DSA:1.10.10.2600,PS51736,IPR036162, PS51737,G3DSA:3.40.50.1390,IPR006119,IPR038109,PF07508, SSF53041,IPR011109,PTHR30461,mobidb-lite, cd00338,PF00239
MKKIKIDRAIQERPATRKQTRNEKIRQSLTEHVDVQVIPAITDREGYEKPKLRVCAYCRVSTDMDTQALSYELQVQNYTDYIRGNDEWQFAGIYADRGISGTSLKHRDEFNRMIEDCKAGKIDLIITKAVTRFARNVLDCISTIRMLKQLEHPVAVYFETERINTLDTTSETYLGLISLFAQGESESKSESLKWSYIRRWKRGTGIYPTWSLLGYEMGEDGKWQIVEAEAELVRIIYDMYLNGYSSPQIAEILTRSGVPTATNQTVWSSGGVLGILRNEKYCGNVLCQKTMTVDVFSHKAIKNTGQKTQYFIEGHHEPIILKSDWDRVQQMIDEKYYRKRRGRRTKPRIVLKGCLTGFTQIDLDWDEDDIARIFYSTTPAAEAATPAMADHIEIIKVKGEN

SEQ ID NO: 9538 - protein, 401 aa, Unknown
  Description of Unknown: Integrase B9539 sequence
  PTHR30461:SF3,SM00857,G3DSA:1.10.10.2600,IPR036162,PS51737, G3DSA:3.40.50.1390,IPR006119,IPR038109,PF07508,IPR011109, SSF53041,PTHR30461,PS51736,cd00338,PF00239
MIKRNILDCMTLVGGTPLRFEGEKTYVSTGAVDCDHVDYAQTERVTYEKPKLRVCAYCRVSTDMDTQALSYELQVQNYTDYIRGNDEWQFAGIYADRGISGTSLKHRDEFNRMIEDCKAGKIDLIITKAVTRFARNVLDCISTIRMLKQLEHPVAVYFETERINTLDTTSETYLGLISLFAQGESESKSESLKWSYIRRWKRGTGIYPTWSLLGYEMGEDGKWQIVEAEAELVRIIYDMYLNGYSSPQIAEILTRSGVPTATNQTVWSSGGVLGILRNEKYCGNVLCQKTMTVDVFSHKAIKNTGQKTQYFIEGHHEPIILKSDWDRVQQMIDEKYYRKRRGRRTKPRIVLKGCLTGFTQIDLDWDEDDIARIFYSTTPAAEAATPAMADHIEIIKVKGEN

SEQ ID NO: 9539 - protein, 401 aa, Unknown
  Description of Unknown: Integrase B9540 sequence
  PTHR30461:SF3,cd00338,SM00857,PS51736,PF13408, IPR025827,IPR036162,G3DSA:3.40.50.1390,IPR006119,SSF53041, PTHR30461,mobidb-lite,Coil,PF00239
MNIAIYPRKSKKDDNSESMEQQIDDCKKYINKTYHNANILVYSGDYAITGHSTAKRKDFQRMMDDVRAGRINAVVIMRYDRIARNMRDFCNLYHDMESAGCNLISVSQQIDTSTPYGKNFMYQMANMAELEWAVISERYKDTAAYKIREGKAYTGRVPIGFKIEKIDGVKKVVHDNEEQTRAIFDYLLATKSKRGTVLWVRENFIPDFTRHKLDTMIKSDLYIGKVRENDHFCEPYFTKEQMEEIRSVNQIKYAPSGHIYLFSGLFRCPICGRKMASFYSIDRKTKKHRQYQRCWFGGNEKLHKTKLVSEAKTEKYLLENLDAALKNLEFDVKKEAGKPKRNLNKKLNDAIAERDRLNYLFEKGRIDIPEYEKKYSVLSEKINSINEEMSNNKEVRIEEFK

SEQ ID NO: 9540 - protein, 400 aa, Unknown
  Description of Unknown: Integrase B9541 sequence
  SM00857,G3DSA:1.10.10.2600,IPR036162,PS51736,PS51737, G3DSA:3.40.50.1390,IPR006119,IPR038109,PF07508,IPR011109, SSF53041,PTHR30461,mobidb-lite,cd00338,PF00239
MKITKKQPLRPRGRSDEKRQSTKDAIREAYANGPQKEVQIIPAKKDLVTDAEKKKLRVCAYCRVSTEEDNQASSYELQVQNYTKMIQENPEWEFAGIFADEGISGTSVLHREHFLEMIEKCKAGEIDLIITKQVSRFARNVLDSLNYIFMLRKLDPPVGVYFETEKLNTLDRSSDMVITVLSLVAQSESEQKSNSLKWSFKRRRAQGLGIYPNWSLLGYKGHEWEIDEDEADVVRTIYSLYLEGYSSTQIADLLTKSGILTVKGLSTWSSGSVLGILRNEKYCGDALCQKTVTVDFFTHKSVKNNGLETQYFIEGHHAPIIEKSDWLLVQQIRKERRYTRRQTRKCKPRIVVKGPLAGFIIADPKWGPEDVDSIMEKLSRPTEIVTSPMLEDENFMIEKE

SEQ ID NO: 9541 - protein, 822 aa, Unknown
  Description of Unknown: Integrase B9542 sequence
  cd00338,PF13408,IPR011109,IPR038109, PF07508,Coil,PS51736,IPR036162, IPR006119,PTHR30461,G3DSA:3.40.50.1390,PTHR30461:SF3, PS51737,IPR025827,PF00239,SM00857,G3DSA:1.10.10.2600,SSF53041
MTLFSTKNKYNKTLKNADVIEQNTISIGVLIRVSTDMQVEDGDSLEMQMDLANNHAKQIKGLIYKPYVEEGVSARKVRIENRNVIQELMQDIRDGKVNYVIAYKRDRMFRNTMEYIGFLQFLADYNVDIHLSASGEQQVDLEAFKFAGASKMMEVVMSMVAEMESATTATRVSDTMLMKAKKGEFTGGSAPIGYTFGKGQYKLELLPRAKEVIELVEDLYLEGIGMLSIAKYLNGGKIRGKNQLSEPIPKPIRIEESTVDEWNHKNIHTILFNPIYTGHFSYESKMNPDLDRVIEKSELIEVCRTEERQKKINDAYEKRKSGTKERVTLNTQFLLSGLVYCSECGERMTVITSQPKGTKKQFSYYTCRNKRSSRKENCPHNTLYRKEVLEKIIVDIAKEKIQQLIKPDMIETIKLKLEADKFTYTSEADKVKKDIEKLQTKLDNITELVSELDDDLNLQVVYLKKQKVLLHELNDMKEFYSTLEEKSIQDQDKVFNIEEFMELAIKFGHVFDNAPIGVKKQMLNNLFSNIYIDKDGEIRMMLKVGLTDVESDKASDDGTSDDLNEVISSIMGRSPVVTEDINDLIKVKQEFDIKINYFEEISKQAKIVSEAFAEFAEQFDRMANPINSSMLLKSLTPTQLKRVDNKSKKAETMFKTYFIDYYDSSFYIANIITTVGYNYSAMCSFLKKHNLQFEDFTDYLLDKHKLDFDEDLIEYVLKKRVGKLDKRDKTNTEMLFRGKIICSKCGKNYTRKGGKNVRYICTGRLKSKEFCDTNVITILESDLLRQITKDTGITDFTEKSMAVLIDHVDIYEDTTFKIIYSN

SEQ ID NO: 9542 - protein, 817 aa, Unknown
  Description of Unknown: Integrase B9543 sequence
  cd00338,PF13408,IPR011109,IPR038109,PF07508, Coil,PS51736,G3DSA:3.40.50.1390,IPR006119,IPR036162, PTHR30461,PTHR30461:SF3,IPR025827,PS51737,PF00239, SM00857,G3DSA:1.10.10.2600,SSF53041
MVMDENLFSKENKYKKMQRSNVIVDEFGERQILIGVLERVSTDTQAVDGDSLEMQREMAQDYANSIGGIIYKFYTEEGVSASKVRLEKREKVQQLIQDIKDNKVNYVIAYKRDRMFRNTQEYMWFIQFLADNNCEIYLTARGEQQIDLSAFKTAGASKMMEVVMSMVAEMESATTSARVSDTMISKAQKGEFTGGSVPIGYKLENGKYVPIKGAKSIFEKIEDLYLQGYGMMTIAKWLNGAEIKNLPTLTLPIPKPISYSSTELWNHRNINTILFNPVYTGHLQYQSKKNIDLDRIIEKSDMIIPLRTEERQRDINLLQAKKKKGVRPPRAYNTTFLLSGLLFCDECGEKFLTSTTQDKEGKRRSYYVCKNKRSNYKNTHCNNHGYRKEVIEDLILKAAKDKIAEFLSPNVYEKLKAKIELDKLTYSKQSDNVEKRIEALQEELNNYTELVGQLKDDFELQKVYLQKQKQILIELNDMKEAYAVLAEKSEGESKDFNLEDFMRLATNFGDVVENAPVGIQKQLLEDLFTDIYVNKEGNVSLKIRAGLADNSNILDDADSNDDSEASISFSTGRSPVVVKGRQQRINEFEIEFNYFDFVYEITSMLYKNLEDYLSSFDKNILIENAHAIDLITLPDYKNRAYKDDFIIRKAINAQYLITHYGLNYYSLTKYREKTGLSLKTIKSMIDTSGGSFEEYLEYLLDIYPNMIVDEELLGVCINISNERDKIYDEALFKGKIRCKCGKLYVRKKSIHTSRYVCPNKKNCRTIGIKELELIEKIKVDTGYIIKSYKDVENLIEGIQVYNERKKYKVFYNDSNTN

SEQ ID NO: 9543 - protein, 784 aa, Unknown
  Description of Unknown: Integrase B9544 sequence
  cd00338,IPR011109,IPR038109,PF07508,Coil, PS51736,G3DSA:3.40.50.1390,IPR006119,PTHR30461,IPR036162, mobidb-lite,PS51737,PF00239,SM00857,G3DSA:1.10.10.2600, SSF53041
MKPGTVVKKLDQQALFEKGYIASPNRPDSSSLLSPPVQPSPAPLCVNGTGRVENSGTVEHVEDITQNLSVATQDASRHRTAPTVHTQSPDAIQSIQGSQESARITAGTQGTVEMQKPRPVQKIHTLSTQDLKTGTDASRGDRRSSRRNQVSRQRIRVASYCRVSTWHEVQVDSVRAQEAHYRRVINANPEWELAGIYIEIGVTGTRADIRPQLQGLLAECRKGRVDLILVKSISRFARNVTDALQMIRELTSMGVVIRFEEEKINTGTAVSEFMIAIMSVFAEEESHSISGNTKWGIRQRFREGKYRPARDLFGYSILRRATGVPTPGRRAGTDVKPAVGNDIPAAGETVENSSPGKYDAGNLHILHDEAAVVREVYGMVLSGIGTELIAESLNRRRIRTRDGFEWTAARVADLVRNPTYRGDRLYQRTYKDENFRQRRNLGNLPWYYDEGCHIGIVSREVYDVAQGVVAQHRHENGIARLEEDGIRAGKINTRYGFSGRLYCKHCGRVMRRKTSPHYSSYACVSKRRRATTSGTTADGRPGSTASGEPGKPHPTVRVQEDSIKAAFLTVLNKLAYSEKQRKQHRVVSRYIEMIDACHPQSGTTGSGGTGSVGNSGSGGSTVSVEDRGAREREEAETLEAELKAVRQEAARLAATAQVEGFSARNIEQSNELHDREQRILREMEHVDTMHSATGIHSDTGSRDKKQAAVELKSFIRKWTPTCELSAYRDKDFLRFVEKVVVGRSTSDVSDDTGRQDEKRGTGEASYTITFHFICGLILTEEVGA

SEQ ID NO: 9544 - protein, 732 aa, Unknown
  Description of Unknown: Integrase B9545 sequence
  cd00338,IPR011109,IPR038109,PF07508,Coil, PS51736,IPR036162,IPR006119,G3DSA:3.40.50.1390,PTHR30461, mobidb-lite,PTHR30461:SF3,PS51737,PF00239,SM00857, G3DSA:1.10.10.2600,SSF53041
LKDIRKAAEDRAAHPSNTPAGHSFETERKRQKAAVGMQFDALEGTRIRKIAAMTEDDSGMPRKLRVAAYCRVSTDDLDQALSIHMQQRVYREKIKANPEWIYAGTYVDNGFSGTNTFHRPGFLKLIDDCRAGKIDMVITKAVSRFARNLLDCIGYIEELSNLDPPVRVFFEQEGLDTSVQTSGIILFVLAMVAEEESHMKSEAMLLSLEWRFSRGRFLTPALFGYDKVEVPDGFGGKRKILDINPQEAKVVKWMYAMLLNGSTPEEIAGVLTELQIPTGGRCKDGSLNTSWTGRSVVTLMRNERYCGDVLARKTYTPNFKDHKSKKNRGKKNKYFQADHHEAIVPRRVWNAAQRILNSRRYGHEGEYLPMRIIDKGILAGFISMNRSWAGFDVEDYYRASQIAMGLLDAELDDNLDNEYLPDGGHRLAGMIDDHGISQIARELTEAEQKIKDELDGVDREKQSLDEQAEIIKTFQVVSGDMFSRIHEPVVRIDLHQISFNQNCVSKMVTEYAEILFNPVERMIVVRPCTKKNPNAIKWGGKSRGASYLCKIIYDSMGWDTEYAYRIPCQTIAIEKPDGDYQPILLFDLDNYIGRAVNKKEEIIQARQVQEQAERMEEEAKSYFFPPEEDEEPEELAEIAEQVQKALELSKKIFGTPAFRHTSTFRSIDGEGSWEEWLAPARPLDTNHRYDAEEVDDMLRNIQEDPPELPQEPPPEHKDIIEVPPSDTGEEVP

SEQ ID NO: 9545 - protein, 680 aa, Unknown
  Description of Unknown: Integrase B9546 sequence
  cd00338,IPR011109,Coil,PS51736,G3DSA:3.40.50.1390, IPR006119,IPR036162,PTHR30461,PS51737,PF00239, SM00857,SSF53041
MKSAENSNKRVCFYLRNSTNAGGQDFIFQREALQSVFNTRNDLIFVGEYAEQVSGKLEDIEERPELSKLMQAVNNGDVDSVWVYDVKRLARNSIVLQTVCRDCAKVGVNVFFKEENINTLTPKGEQDAMAKMILNLLGEFAEQDRSAFIRKGIDGKKTSARAGNYVGGNLPCGYAFENAGIKSKFLPKKIFIDDKQRKIVEFVFDEIGNKKQSCNATAINLNNKKLIDSSFDTVMKSKNYGSKNNRWLFHSWAGGTVKSIINCTWYIKGEGYRIYDNEKIELDDSLTFIDSELWHRANEQLKKNQFVKTKTKHSYLIKDLLFCECGQPMYPQNSTRWHYKCKLNIQNNRDKSIKCDSSKSIGIEQLENTIFLLIKNKLPEFKLTVQKKENKIDQINNQINENNSIIGIINSNNITKLTDQRKRTLNLFEKFGGDGADLENKILAIDNEIKQERKKINQLESDNKQLSMSLTQLDMATEIENNIRMIETDRNLIKYYFERLIKKVTVLGGLKRQLVNVVKIEWNDNINNNNSTYLLYHSKVKINPLYYFMSSTENNTIDWTASTKTLNITENNETIKLSIEEIVKVLNAHYWEYAEQLLPNKMLENFPLIREHKNLSTAEQFNTPVKPETFGIDLNNLNYTEHPNYQQYNNLLTVVNSGAINYKFRLNMGVGKLEIVTPFI

SEQ ID NO: 9546 - protein, 670 aa, Unknown
  Description of Unknown: Integrase B9547 sequence
  IPR006119,PS51737,PF00239,G3DSA:3.40.50.1390, PTHR30461,IPR025827,SM00857,SSF53041, IPR011109,PS51736,PS50042,cd00338, PF13408,IPR025161,Coil,IPR036162,PTHR30461:SF3,IPR000595,PF13340
MPSLTMPVATGVLRAVDYNRVSTEEQRKGYGIAAGLRKSASFITRKGWDHVGTYKDEGLSGSLEMGSRADFDRLMLDAKTIDTFGRRAFDVVVVPKGDRIGRTGRAFWRWVWALEDIGIFVALVDKDCDNTTQAGRSEFRKSADYAETEWETIRSRTQDGLQEKAYAGGWIGGPPPFGYEIENQGKRGESHLIVCDREALMVRIVVKALQEGDSLNDAAIILNMEEQFTRSGRPWGRENLRHQIFSDAILNGYVIFRNTAVNAKAGPDGEPLYGPSVKIPVPQFLTDDEVAYLREWQMRSRKPKRRADATYPLSLRLIGMCGKHYSGQGRSESGYIRGYRCSGKNQSYPGAPTCNDHNIDASTLEKAVWDLLCTKLGDRDKLEEISAEWLSLAGEGFEMHESRISDLESAIKRQNSVISTTVVSLARLGQSEEEIAVAVRPLNEELEQIQKMKADAEAWFKEREDGAQRGRDLAALAQMAQERLGDESLETQARFLDLLDVRVHILSPVPILAGGHPCTVAGWYEERKRGVPMELTDDQWARVAPLVGSTDALRRRVNAVLHKARSRCRWADLPSEYGSPNTARRAWTQWSTGLWAQVDQVLDDAERSDFVPTMRPLPDFELRVDVDPRILVVAEPSRTEWFPHSQDVRPRLHLRIDRESAQLRTVLTAA

SEQ ID NO: 9547 - protein, 668 aa, Unknown
  Description of Unknown: Integrase B9548 sequence
  IPR038109,PS00397,IPR006119,PS51737,PF00239, G3DSA:3.40.50.1390, PTHR30461,IPR025827,SM00857,G3DSA:1.10.10.2600, SSF53041,IPR011109,PF07508,PS51736,IPR006118, cd00338,PF13408,Coil,IPR036162,PTHR30461:SF3
MAYVRNKKKILKFWSKKKAALYVRVSTRYQVDKDSLPFQRKKLKEYCKFLGIEDFVIFEDDGYSAKNTDRPHFQEMMSRVRDGEFSHLIVWKVDRVSRNLLDFAAMYQELKDHKVTFISMNEQFDTSTAIGEAMLKIILIFAELERNMTSERVTGIMLDRAEQGLWNGARMPVGYRWNPEIKFPEPDPEETKIVQFIFDEYERVRSTTKIARYLNHNQIASKRGGQWTSKLIRDIIRNPFYIGTYRYNLRESGRGPLKPESEWIVRENNHPAIIAKEQFDRCNAIMDENGTSRDTSDLRARKYVHTFSGRLVCGKCGANMIASKDRARANGWRPSMYRCAQRSRMMDCDNSKTVNESYIGPFIFNYVANLARIQKNFKNIKTLEQLEKELLKGSEFENMKVSKESLRRTFDALAFQEVGKGAYLPDIDLSGGDDDCTAAEQLSILKRELDKCKTAIDRLTDLYLYDPDSMTKEEFAKKKRDLVNKIAGYEKQIEASQATGDKDDLADLEFIRKASAFLVAQRIVSKKHVDYIQMALDLDNEILKDFVDQVIDRIEILEGRVRSIRFVNGLVHEFTYSTPADLPVCQKCGGRIGSTCGCRTRTFDFAGKPYRRIKVGDPGDKFHGVTGAVCPECSAQVGRWHHWKCGIERCPICGEQLIACEHGPNGKD

SEQ ID NO: 9548 - protein, 660 aa, Unknown
  Description of Unknown: Integrase B9549 sequence
  cd00338,Coil,PS51736,IPR036162,IPR006119, PTHR30461,G3DSA:3.40.50.1390,PF00239,SM00857,SSF53041
MGKSIQVKSGIMGIYVRTSVDKENTSIEQQKKLGINFCKKNNFQYYIYEDIGKSGFKIEDENNPFKNRKGLLKLISDIENKIIDKVWVFEHSRLSRNDYSSFLLNRIFQKYNIIIYELDKQYDLNNPQNKMIQGILTQISQYERHLITSRTARGVHDIINSGIHSFNELYGYKRDGTKTIILSGREKTYINWKPFDSEIKQIKYAFNKILEGKSISQIILDIFKSKLTEKNRSSLIRKFSAILRQFVYTGYCLNIEGQEIYRKYKNFEIDSIKELKNKKYYIKSISYPIQIISIDDWIKVVEKINGKRLIYKDRMRRTNSEMLTGIMSCPYCELHYYLTNDKDFIYYKHFPKKLCNQKPKSIRVEKLNKYFEIFFFYFYLVYDDTKSLMEENQKLIDLNLLEIKDKIKSIIESNKRLDNQINKIQSVYESSDDKEIIKLSLKKENDLSIKKEENNIILLQLNNELENLIIKYNNDKLELTYYNVIELITNFFEKMNNEEKRTELIKIISNFQLFGKYILIDTGKLLFIFNLDNEVILSEKIYNKFKNDKRFKNNFLNSSSVIDENGILNIINDWKYFNNNYKNKDFKYKELSENEKLKLIENIIDYFSVRILDNIQIQEIYLKSENDINIKSVIKNQLQNIGIDYPLNNIEKIISFTELF

SEQ ID NO: 9549 - protein, 429 aa, Unknown
  Description of Unknown: Integrase B9550 sequence
  cd00338,PF13408,IPR011109,IPR038109, PF07508,PS51736,G3DSA:3.40.50.1390,PTHR30461, IPR036162,IPR006119,IPR025827,PS51737, PF00239,SM00857,G3DSA:1.10.10.2600,SSF53041
MATKMTVIQPKKIKEFKELRVCAYARVSAKNDDMLRSLGSQVAYYIDYISSHPGWKFVEVFHDKPTTGTKEERPEFLRMIEMCRRGEIDMIITKSLSRFARNTVTTLTYTRELKSLGVDVFFENENIHTMSADGEVVLTCYASFAQDESLSVSENCKWRIKKRFEKGEMTDFRILGYDWVDHQLYINPKEAEIIKRIYREYLEGKGFQGIANGLNKDGLRTKDNNNFGYTSIRCILINEKYVGDLILQKSFYDNHLTKKKIVNKGERDRYFIKDNHEPIIDRETFEKVQQEIQARSKKAPKTQSAPCIFTSLLTCGICGKNYRKKINSKKLVWMCPTYNHIGKSACDSQMIRDDILKETSAKALGMPEFDEEVFKKKVKGIQVLRNNRLIYFFTDGTSKEMIWKQKSRADAWTPEMKEKQSKLILERNL

SEQ ID NO: 9550 - protein, 653 aa, Unknown
  Description of Unknown: Integrase B9551 sequence
  cd00338,IPR011109,IPR038109,PF07508,PS51736, IPR036162,PTHR30461,G3DSA:3.40.50.1390,IPR006119,mobidb-lite, PS51737,PF00239,SM00857,G3DSA:1.10.10.2600,SSF53041
VKENSGQDRKQKIRDKYKGTDASEIEIIPAKPTADFMESGGIRRVAAYVRVSTDNDEQTSSYELQKNYYTEYITGHPGWELVGIYADEGISGTSIAHRKGMLQMIEDCKAGKIDLIMTKSIARFARNIVDCLSVIDLLKNLEPPVGVQFEADNIYTLDNNGRMILTILASVAEEESHSKSVIMNWSIERRFRKGLFLTPELLGYDRDEDGDLIVNEDEAETVKAIYYLYLNGVSFSDIAELLKAYKRKTKQGSYEWSASTLAEIVANERHCGDIRAWKTFTPNFLTHKAKKNNGERTQFRRKNHHEAIVSRTVYEAANFLRASRAYAKKARPLPVLSVVDNGILRGYVPLDKDWTGFSTDEYQKASESVMSELEDTRQIEYKAGLDMRGYEVVRSQYFSTTQNPAMTIADGKLNFNTACLKKFENVEYVELLLNSVNRCIAVRPCDGNNPNAIHWGKLREGRWCALSKSCRGLAKTLFDIMDWDQDLKYRFRGDFIENDDQKVMLFQLDEPEMVKTENIVLPPKEAETDDRAEIAGRTVKQIIYILPPEWEDTFGRPITSIGEINLLEQRHYAADWDVLRPAKELAEYSTLTSEDLEELLQEAEKIIEGWPIPDEHGTGETADNGDGESADVGTVCGSDVGEGTEENRDRADL

SEQ ID NO: 9551 - protein, 652 aa, Unknown
  Description of Unknown: Integrase B9552 sequence
  cd00338,IPR011109,IPR038109,PF07508,Coil,PS51736,IPR036162, G3DSA:3.40.50.1390,PTHR30461,IPR006119,PS51737,PF00239, SM00857,G3DSA:1.10.10.2600,SSF53041
MQSYTFKRCCLFIRAHRLLIDSNIKSYNNEKGMREMRQLLDINNYVIKLDSLGKIIIYLRKSREDMIDGRYASDEETLARHEEQLQQWAKNTLGYEIPPENIFKEVGSGEKIKTRPVFQKVLTMIENEEVDGVLVLNCSRLSRGDLIDCGTIIRTFEVTNTLVLTPPKIYNLNDKYDKRFFKDELLRGNDYLELTKELLGGGRHWSASQGKYIHSVAPFGYDRVTCKEMKVSDGKGFTLKPNQDAEFVQLIFSMWLDGMGTFKIASHLQDINAPFCGQTEWNHCKVKKILQNPHYCGYVTFGRRKKVEKIVDGEVIEKRITNPDCPTYKGLHTAIVSVEDFDRAQNRFKKGQSPTRHDYEDKNSFVGLLKCAVCGRIMTRNVHTNEKKIKRAHALDKIALHQFIKMHQERIKIPKIEVARRLGLKRSVVYDWLGNNPKKFYPSQLFADKWHDMKAVLQIESDEFDKAITEFAEVTKEPTITCTGFKCKNVSSNFAVVESKVLEMVKAKFEDYTYFLDNYEEEITKKVASAKDTIANIDKQIAMKEKQLKNAKIAFEQGADTLQEYIDRKKELNAEMQELIDKKAEISAEKEEEQTLVIKKAVPVLKNVFESYFEMTPAERNELLKTVIESIMYMKTEKGNNDSIVLDVCWLV

SEQ ID NO: 9552 - protein, 650 aa, Unknown
  Description of Unknown: Integrase B9553 sequence
  cd00338,PF13408,IPR011109,IPR038109,PF07508, Coil,G3DSA:3.40.50.1390,IPR006119,IPR036162,PTHR30461, mobidb-lite,PTHR30461:SF3,PS51737,IPR025827,PF00239, SM00857,G3DSA:1.10.10.2600,SSF53041
LASAGGGASYALPGARTERASNGRICSRMSAALCTSVAPSRIKHTAVALRVRRRLTPVMTLPAFLYARYSSLEQGRGTSLVRQFENGRKYAEKKGWLLDPDREISDKGRSAFHGANRSEGGELYAFERQVEKGFYRNGAVFVCEHFDRISRQGWEEVHAFLKVCVENGVSVATIDGDRFYPAGQRIDGGTIMELVFKSEGAREESNKKSERGLFNWSEKIKAIEAGDRKAKIGLPPGWMMRDAKTDDVVLHPHRTAVLREIYDLYVEGHGLPSIVAKLNARKEPSWAVKNKDKGNGWNTAYLHKLLTNRAVLGEYIPMSRTHGGINETSKGIVKPDHYPQAIPAELFARVESVRKLRRFSGGPVEANVSNLFSGSAFCTCGAPMYFQSQQKVGRPTNHKSKIDGRKLSYVSGVDRSYLRCNNNRRKHECQNNKSFRYEALEPAILDAVLAVAIDDRKFTIPDHVAALSANVAEAERLLQSKRQNLQSIVDMIAEHFIKALAVKAAEIEAEIDVEEAKLREMRDELSRQQGGANPIEHLARVREVKDSINSEDKDARYSARVRVKQALAFLTRSTFGADGVATVMLQNGLMAWRFDQKGVMIGEPVDLRNRLDLHRGLPGPKQMIDDVRNRMEQPERPVVHPSEQKWKYGS

SEQ ID NO: 9553 - protein, 633 aa, Unknown
  Description of Unknown: Integrase B9554 sequence
  cd00338,IPR011109,IPR038109,PF07508,PS51736, G3DSA:3.40.50.1390,IPR006119,IPR036162,PTHR30461,PTHR30461:SF3, PS51737,PF00239,SM00857,G3DSA:1.10.10.2600,SSF53041
MGTTEGTTETMIEQKAIRQPLMPEQNILPSGAKLTITPATKRSTQNVKTLKQQENVRVAAYCRVSTDELDQQNSFENQSNYYKDFIKQKEGWTLCGIYSDEGISGMSTKGRHGFNRMIRDAKAGKFDYIITKSISRFSRNTVDGLSIVNDLRNLDPPIGVYFEKEGLDTMQKGCEFLLSIMMSMAQGESDSIGENIQWTYRKKYSEGDPLINPDNIYGYKKGENGEWEIDEEQGDVVRRIFDLFLAGWGTQKIAHTLTADEVLTPRGKSQWNPGTIHSILGNEKYKGDVQMQKYVTVDRKSKKHKKNSGEAKTYYLENHHPAIVSRAEWDATQRIMEAKKRPSTYKHGDATHFSPKKILTCGDCGKELHVRNIDRSVSGYLDDRKKLNGFGSYYFYEKEYSCPNGHARVFRGTFEQSFMEALYRLKRDFEKYGDTSDLATSFQKALDDAALDEKIDLDLLEINYQDFVNALESLPEKNLAGYDMKINGVDTDGSLIRTEDGKLKGTRLYDLKAGKIKITSDKIEEAPDILPFSEEIMKGFIKNGKLYNDRIVFTTTFGIEITAKNTDRKIDSFLGFRKCGNDGKIHMVLDPYEVENDKPYYRMTGNCVGKIEELEEKEEPAETTEEPNDKVAV

SEQ ID NO: 9554 - protein, 649 aa, Unknown
  Description of Unknown: Integrase B9555 sequence
  IPR038109,SSF47413,IPR006119,PS51737,PF00239,PF01381 ,G3DSA:3.40.50.1390,PTHR30461,SM00530,SM00857,G3DSA:1.10.10.2600 ,SSF53041,IPR011109,PF07508,cd00093,PS51736, G3DSA:1.10.260.40,cd00338,IPR036162,IPR010982,PTHR30461:SF3,
  CONT. FROM ABOVE: PS50943,IPR001387
MTPLLPPGTRIGLFIRVSTDDQVRNESPEVHLQRGQEYTDGHGWIVVAVYQLDGVSGASMMNEPDTKRMWRDVESGVIDALLFSAVARMGRNMFDLFKIERHLRAHDKWLVDTRRGVIDTDTQEGLDYFFHSAHRAHSERLELSARVKAGLITRAKMGQFVASLPPYGYKKVPAAQTGKAKKLEIDPIEGPIRVLMYDLYLQHRKFMIVAAELNRRGYRNRNGKPFSLHNVRAILLDSSAMGVYYSNRTAHNNPTGKTEADRIPIPVPQLIDGEKWERVKSLIESNLPKVRRAIYPYSGLLNCICGPKMYTNSSMNNSKSQYRYPPRYSCRQCGNRIRMNLLDEAIGVLFTGFLLDGVPDGVEVELSKTEQQLLALKSELKNVIAGKNRWADAYQAGALELDDFKKYHSPLIERERELTTEISCLEQGLRTDKDQLQAQEQAVQVFQSASWSDLTTEEKHALLREFVQSIILGPENITIKLLYTPAALQVSEPGLAKLHKIIAPRPDHLVMPNDQYAWSWLLHRERKARGEATRKVSTILGIHETTINHWEKMSRPPGPTHIAKIMEYLGYIPWVRTPYAQDTLGAAFRTIREALGVTQLELSNKLRISQAAISKVERGEVVSVKLLNRIEMALKVPVRQIYRAYQPEN

SEQ ID NO: 9555 - protein, 647 aa, Unknown
  Description of Unknown: Integrase B9556 sequence
  cd00338,PF13408,IPR011109,IPR038109,PF07508, Coil,PS51736,G3DSA:3.40.50.1390,IPR036162,IPR006119, PTHR30461,PTHR30461:SF3,PS51737,IPR025827,PF00239, SM00857,G3DSA:1.10.10.2600,SSF53041
MKTKVYIYTRVSTAMQTDGYSLEAQKTRMKAYADFNDYEIVGEYEDAGKSGKSIEGRDAFNQMMEDIKTGKDGVSYVLVFKLSRFGRNAADVLSTLQIMQDFGVNLICVEDGIDSSKDAGKLMISVLSAVAEIERENIRVQTMEGRLQKARDGKWNGGFPPYGYDLKDGMLYINPDEAPVVRQIFDLYTTTNSGANGVAKYLETHGIKKHKRHNNSTPYFDAQGIRKLMKNPVYCGKIAYGRRKTEKVHGSRNEYKIVNSDDYLLSDGLHEAIISEEEWQKAQAKLLAQSKRYERTSTSKHTHLLSGLLRCPICGAAMYGNKIKKRKDGTTYYYYVCRNHNMHKGYICTYNKQINEKMLDAAVVEIVSSLVSRPKFAAELQQKISIDVDTSKIDQEINSLESQLKQFYAIKKKTLEEIECLDPEDRHYERRKSDLNDRVNHMYDKIDEYEQNIIEARSKKQAIEADKISSDNVYSILIHFNKLFDAMNEQERRQLMEILIDNIQIYPKRKPNGQWLKSISFRLPIIDKDIDWDIKCGLGNEEHVETCALLTKLSDTRHHVDVTINMSELDSTKPETKATYNEIRDWVQDNYGFRVTNLNIAQVKRKYGIIERKNHNLPKSSKSKQPGCPSEKVEAIIQALRHFQMIE

SEQ ID NO: 9556 - protein, 646 aa, Unknown
  Description of Unknown: Integrase B9557 sequence
  cd00338,IPR011109,PS00397,PF07508,Coil, IPR038109,PS51736,G3DSA:3.40.50.1390,IPR006119,IPR036162, PTHR30461,PTHR30461:SF3,PS51737,PF00239,SM00857, G3DSA:1.10.10.2600,IPR006118,SSF53041
MDSKNQEEKRIAGIYIRVSTEDQAREGFSLGEQEEKLKQLCAFKEYQVYKVYQDRGISAKDMEHRPGFQEMMDDMRKGKINYIVAYKLDRVTRSVRDLELLIAELEKYDCYLICERDDVNTSTANGRFFVRMLTVLSQLEIEVVSERTKFGMSGAIKAGHLPGTCPLGYYRDTDKVVKLDPNTKGIVRRIFNMYLEGKSYYQISCILDEEKVLYPEHNKWTEAAVRTIINNRIYVGDYVRNKTSKDASKEEVYPDVVAPIITRAEWEEVQIQKEKNMQSFSRDRVYIFFQKLICPKCGKLMLCKGAGGKKKKYMYYNCGDCHLYFREDKIEDVLLNFILSLVEYDEVVKKYFYPILAEKGEVNTENIDKEIAELEKQRNRIKKAFMSGIVEMEDFAEDYKSIEDKLNKLEQDKMKNMEIDTEHFSLMKIMADRDFEIESRLNSDSFVEDLKTEWNTKTKLEKQEFISKFIESMVLEKDEENDSFKIIKINFRSRYLDELKKLNKADCIDLAKPTEDMQGISVIKSTPRITKSELNEYIENLKEHYDVKYYEDVYDWTHSYVQEDKMITMPREKGNERLMRAVFVDNNKSFPIKDSKGKVRGKLGAVSYREKGTTDKNELDDYYEAISDLVLYKKEQTEDEEESSED

SEQ ID NO: 9557 - protein, 645 aa, Unknown
  Description of Unknown: Integrase B9558 sequence
  cd00338,PF13408,IPR011109,IPR038109,PF07508, Coil,PS51736,IPR036162,G3DSA:3.40.50.1390,PTHR30461, IPR006119,PTHR30461:SF3,PS51737,IPR025827,PF00239, SM00857,G3DSA:1.10.10.2600,SSF53041
LINYIENYNLNSLDDLNFLKDNILSIIYPRVSTYDQADRKWSLNSQIEEGIKLAENKLKHIEENILVIPEPGESGDDPDRPAMNNALWCLENGIGRTIIMLHPSRLSRDSYLQSKIADRVWSAGCTIEFCEMDFNPDNAESMLMFNVQGAISQYNKAKILADSKRGRRNKVKNGQIPGMRRLYGYSFEKEFDVLIPNEEEKSTYLLMVDWILNGKDGTSMSCSSIARELAKADTPAPSGDIWYQATVSRILKNFSYTGKYHYGKTETLRRRGKSSIIKKPEKEWVSIPIPSFITKETYDQIQDKLLGLQKKHTGRPTSNYLLKGLLECGKCGKSYISGSATKNKNSTTRYYACSKKNKRNYKVGSGERDNCSAKNHRVEYVDKYVWEYLCDVIKHPEDILEKIIKQKSDPAHLDGLIKKRKQLIILIEEKERILQKKKQMFETGIIENIEDLIKEVNPIKKEIIVIKKDLEIIEKSIEQVKKVFDDFERVQKNIKALQNRIKSKGKDISFEDKREFVTKLIIKVILFDNNDIHIKTIWSTYEESNQDNTHSKSIPGQDDSLVYYVDYHEILPPVIKNKKLSYKVLAISEHLDKVKEMYYEKGLSFANIGQVVGCSWWSIRSLLIYYDLPILPKARKRNTPYLIGE

SEQ ID NO: 9558 - protein, 644 aa, Unknown
  Description of Unknown: Integrase B9559 sequence
  PS00398,IPR038109,IPR006119,PS51737,PF00239, G3DSA:3.40.50.1390, PTHR30461,IPR025827,SM00857,G3DSA:1.10.10.2600, SSF53041,IPR011109,PF07508,PS51736,IPR006118, cd00338,PF13408,Coil,IPR036162
MLRPICYERVSTIYQAVMANGLDDQRSSLTAYLDRNAGKFSTDRIFIQDAGLSAYKNANISAASNLGKFLQDVRDRKYGKGDALIVISLDRLSRRSSWAESTIQFIVNSGIEIHDISTNLVLREDDPMSKIHMELIQHRSHNESLMKSVRAKLAWDNKILRALQNGEVISNRMPNWLRNVDNKYQVISEQAELIVKCFEWYREGLSTGEIVKRIGKKWQMVTVSRLIRDRRLLGEHVRYNGEVVPNVYPKIIDEDLFLTANRMMDRVMLEKKKPAEDLLLEPDVVREIFKLYESGLGSGAIVKRLPKGWSTVNVLRVLRDKKVVTMKIIDNLTFERVNEKLSRNGIANRIRKDITIAQDDYITNLFPKILKCGHCGGNIAIHYNHVRTKYVICRNREEKKICDAKSFQYTRIEKNILQLVKNIDFNKLMIEGQSDAGLLLASLREELSTLKREEETYQNKINERKVAGKKTSLPLMTGLTEVQDRIEEIESEILNAKNIKEIPAFDFDINKVLDPMNVELRAKLRKELRLVLKSVKYWIFEKRIFVQLEYFNEVLSHVLVIDNKRGGGGVLHEIVISESNGERVYTVNEEGKTVFIASVTSGTDLWSLAMSRTKTLDDVGVYLNLLKREDFEIVVNEDLIDWID

SEQ ID NO: 9559 - protein, 528 aa, Unknown
  Description of Unknown: Integrase B9560 sequence
  cd00338,PF13408,IPR011109,IPR038109,PF07508, Coil,PS51736,G3DSA:3.40.50.1390,IPR006119,PTHR30461, IPR036162,PTHR30461:SF3,PS51737,IPR025827,PF00239, SM00857,G3DSA:1.10.10.2600,SSF53041
MARAITVIPATKDKFTALPTASIAKRRVAAYARVSTDSDEQFTSYEAQIDYYTQYIKKRDDWEFVKVYTDEGISGTNTKRREGFNEMVADALAGKIDLIVTKSVSRFARNTVDSLVTVRKLKEHHVEVFFEKENIYTFDSKGELLITIMSSLAQEESRSISENVTWGQRKRFADGKVTMPFKHFLGYDRGEGGVPVINEKEAEVVRMIYRLFLEGKTAAGICKHLMSLGIPTPGGKTKWVQGTVMSILQNEKYKGDALLQKKFTVDFLTKKQKVNEGEVPQYYVEGSHPAIITAMDFDRVQAEIARRQRLGRSYSGSSIFASKLICGDCGGFYGKKVWHSTDAYRREVWRCNSKFKCEARCETPALDTEVIQQMFLKAYNQLMGSREQVIQACQVMRSIVADFTELDAEIDALNEEIQVVAGLVSQCIKDNATSQQSQEEYGKKYSRLVKRYEKAVEKLKKANADKESRMERDRDLRIFIGSIEKQPLVLETWDERLWISLLDSATVHADSRITFRFKDGTEIEVGAE

SEQ ID NO: 9560 - protein, 452 aa, Unknown
  Description of Unknown: Integrase B9561 sequence
  cd00338,PF13408,IPR011109,IPR038109,PF07508, PS51736,G3DSA:3.40.50.1390,IPR036162,IPR006119,PTHR30461, PTHR30461:SF3,IPR025827,PS51737,PF00239,SM00857, G3DSA:1.10.10.2600,SSF53041
MTVTDAKVNKKLRVAAYCRVSTEQEEQLNSFENQVSYYTAYINSKADYEMAGIYADEGISGTSTKRRKDFNRMIEDCEKGFIDLIIVKSISRFARNTQDCLFYARKLKNMGIGVFFEKENINTMDGAGELLFTILSSLAQEESRSISENCKWGIRKKFSDGKVHLNAKRFMGYDKDKDGNLIVNEEQAKVVKRVFAEFMDGINPDTIVRRLNEEQVPGCTGAPRWTCSTIMGMLANEKYMGDSILQKTYTADYLTKKMERNTGQVTQYYVENSHEAIIDADFWKAVQMELERRRIYMEKHGIRCMGRSTDELPFSNRVVCGKCNHVLWRRTLTRANGNKHKAWICSSRLAEKGVKGCGMETMPEYIIHEAFIKAWNKIIENRADYLPKWREYAKGDNPLLAFRSKQMMELTKGKTMKELDLRLVGKVLDHCVVHSKDAIDIHFLDGTIVKVR

SEQ ID NO: 9561 - protein, 635 aa, Unknown
  Description of Unknown: Integrase B9562 sequence
  cd00338,PF13408,IPR011109,PF07508,Coil, G3DSA:3.40.50.1390,IPR006119,IPR036162,PTHR30461,PTHR30461:SF3, IPR025827,PF00239,SM00857,SSF53041
MDKILVAGYRRVSTKSLDQAKSYEDQDARLREFVDDTEKYELYDVYQDEGLTGTALFKRKDFVRLIKDAGLAIYEKEVEREGKAKKRLVYTVYADPTKTPKFRRILVKDTSRFARNVNIKTILDELLINGIAVDFIDKGKSIETQEDLADILSELAFDEKYSRDLSRKLLAGNLRSAERGVVRSGYEKYGYKYIPRERGKITEENNNRLVLIPHEALVIRQLYRLYAGCWDYATQPVYVECDGLCDACTIPKTQGIGYRSILQIFRTFGYKTRKGSDFTQSSLKHLLENEKHCGLLNNRKFTHGTVFNQLPTPAVRQDYVLNLQQSQHIEAIIQPTLYLYCLEKAVSRSINSKGKFIGSYSKYKGRLYCGNCKGPYVHTKSNKYHEVKGYYTCKKRRMQGKDVCPAVTAFDWQVDAYITQLCATDLHAQITHEYKRLIGKIFMRYEYAYDRIVACDTPAIVALDAEIKNETKVFATLAIQSARSAVYAEAVSSEITRLEAWLTEARDRLTELRKTPDELLHETQELTTNADKVLSLIHSVKPSYTLDELWEVVDRVIVYGQSKRGNKTPDCAFVPVLHPATLAERLVLDVPISLYKAKRPVDISYVASLSLDALQCKIDGYKAEVATLSKSFDNR

SEQ ID NO: 9562 - protein, 633 aa, Unknown
  Description of Unknown: Integrase B9563 sequence
  cd00338,IPR011109,IPR038109,PF07508,PS51736,IPR036162,IPR006119, G3DSA:3.40.50.1390,PTHR30461,PS51737,PF00239,SM00857, G3DSA:1.10.10.2600,SSF53041
MIDYAAQETRKKKRAKIKQRVRVSIDEGNFEHYPAQKQMDFYDDKIHQRVAAYCRVSTDSDEQQFSFHLQKKYYEDYVANHGNWELIRVYADEGISGTGRLKRVEFNEMIDACFDNKIDLVVTKSVSRFSRNVVDCISLVRELQELKRPVGVFFESECIFSLNEDSQMALSFIATMAEEESHIRSRSMETSLRMRLDNGLPLTPKLLGYCHDCDGNLAINPEEAPTVKLAFYMYLYGYSTQQIADSFNEQERKSYLGNVNKWTSSGIVQILRNERHCGDVLTRKTYTPNYRTHLSKKNRGQRPQSRYFNHHEAIISRDDFNAVQKMLDNAKYGNKSLLPELRVIDSGLLKGFVSINPRWAAFKEQDYFMAAQSVYRNDDDKVPVEKEDSQSVEIRVEAGDFDLRGFEITRSEFFDAYRKPAVTFSERRIKFNAECVRKFGDKNRVELLVNPVSKKFAVRPADEKNRNSVVFSKLSGGVYQPREVAASAFIETLFSLFEWNIDYKYRIIGSLLEKEGELAYVFDVANSEAFFKTYILPRQTVEGNTALDVQPFLPSGKRIRAIPEEWTSSFGREFYLHELDVSTLEAQSEEAWKLRLEGRLFESGKRLNVTSFAELRQYLEAFNIIKKEDAANE

SEQ ID NO: 9563 - protein, 633 aa, Unknown; identical to SEQ ID NO: 9553
  Description of Unknown: Integrase B9564 sequence
  cd00338,IPR011109,IPR038109,PF07508,PS51736, G3DSA:3.40.50.1390,IPR006119,IPR036162,PTHR30461,PTHR30461:SF3, PS51737,PF00239,SM00857,G3DSA:1.10.10.2600,SSF53041

SEQ ID NO: 9564 - protein, 632 aa, Unknown
  Description of Unknown: Integrase B9565 sequence
  cd00338,IPR011109,IPR038109,PF07508, Coil,IPR036162,PTHR30461,IPR006119, G3DSA:3.40.50.1390,PTHR30461:SF3,PS51737,PF00239, SM00857,G3DSA:1.10.10.2600,SSF53041
MKSQDDVLMYFRKNREDEEIPVDIKIKRFQDEYLMYLRKSRNDGEKVPVEVIVQRHEQTLQELAEKELGFRIPEKNIYREIVSGGEAIEDRPEFINVLKRMEVGNIKGVFVFDPHRLSRSGLYGAGDVLEAFEVTHTLICTPMKFYDLDNKMDKKYLEMIMIQAAEYLNYSKDVMGAGRMTSFAEGKAIMSTPPYGYGKEKLKDEKGYKLVPNPKEAPHVKTMFDLCCEGMGATAIANYLNERNVKPRKKAYFEPSTIRDILHNETYYGYLTWGKNPIKKILENGKTKKKRFYNQKGFKVAKGMYEPLITKEQFDQAQEMMRQRTSRTYHTNTIKNPLAGLVFCGFCGNAMIRRPYNKSFKKNHVRVYELDKQALLEYLRKHKETSGLSLTKIAKELNVTRDIVIGWFPPKLEKFYPSKTLADKWFDLKSLLKIEDNKFDKEVTTYKEPDIQKDTLMCSSLHCNCVSSYLEVVEKGLIEKLNIELENRKYFLNNYEQELKKEKVSNVKELKEVEKKIEEINGYIKNAIKKNAMDLITDEQFLELKTDFEQELKPLLKRKEQLSNTKDEERIIQYKKSIPILEHCVKDYDLLTVEEKNELLKTFIDKIIYKKSVGGRWNKEATVSLEVETYDF

SEQ ID NO: 9565 - protein, 631 aa, Unknown
  Description of Unknown: Integrase B9566 sequence
  cd00338,PF13408,IPR011109,IPR038109,PF07508, Coil,PS51736,IPR036162,IPR006119,G3DSA:3.40.50.1390, PTHR30461,PTHR30461:SF3,IPR025827,PS51737,PF00239, SM00857,G3DSA:1.10.10.2600,SSF53041
MRIPGAFINARYSTDNQNPDSIEVQVEKCTEWCRQNNIPILGVYADEATSGMKDTRPQYERMMRQLRMGVADTVVIYDQSRMFRKMTAWFNFRDELESMGVRVVSVTQPMIGKDLKDPTNFLTEGSMALFNQIWALQSRQKTTEKMRFMARNGLHTGGKPALGYTVKDGRLVICEEEAAIVRRIFSEYAEGRSYKQIIDGLNADGIRTKHGNAFGSNSLHDLLHNEKYIGVLTYGKLAYREDGTRNTHSREGKRALRIVDGVPPIVEESLFRVVQERMTKNRRQQGGRPPKNREYPLKGKVFCADCKAAMTISTSQQKYNYYRCTGKKRLHTCDALPISADDLERTVADGIRQMLGNPHRVENLLAVLRQEADQLQAGAVTRLKALIGKEKEISKKLNNAVEALLSGFNSPTVKKRIADLEAEKAMTERDLQALRASVNATTVPESRLREILAQAISDIHGDNELLLTLVYRVEVAKDTITIWTLLDTGPTGNVDLDSEGVTISPGVPSGVPIKDAVDDTIRCVFYLCKEEGTRTIKCNSPADCCRRQLDGGEHLSAPHGSRCKRVPSGVPHFPSNFDRVRRELFIFKTMTKHAFLRKKQNICRNGRFRICISLKLPLFSRVTNSSFRVTN

SEQ ID NO: 9566 - protein, 631 aa, Unknown
  Description of Unknown: Integrase B9567 sequence
  cd00338,IPR011109,IPR038109,PF07508,Coil, PS51736,IPR036162,PTHR30461,IPR006119,G3DSA:3.40.50.1390, PS51737,PF00239,SM00857,G3DSA:1.10.10.2600,SSF53041
MKEKEERIGNAASQKEKIRQRYKGIDSDELDIIPALPQTNFYEDSREKRVAVYARVSTDDPRQTSSYELQKNHYQDVVSRHPGWKLIEIYADEGISGTSLQHRDSFIRMIEDCHAGKIDLIVTKSVSRFARNVLDCIGYVRKLAALNPPIGVFFETENIYTLNANSEMSLSFISTLAQEESHNKSEIMNASIEMRFRRGIFLTPPLLGYDHDEDGNLVINEDEAKTVRLIFFMYLYGYTCQEIANTLTDLGRRTKKDNTIWSPGSIMQILQNERHCGDVLARKTWTPSYLDHKSKKNRQDRNQYRQKNHHEPIISRDDFIAVQRLISNAKYGNKGILPELKVIPDGLLRGFVSINPRWSGFKANDYRLASESIYDPVIELPGQPLKVNRGDFDLRGYEVARAQFFDTGNKICITFSSTTIKFSTECVKKFDTQYIELFVHPGKDQLVVRPASKQDKNAVQWSRQSEGKILSKQISGAAFLPNLYELFGWNTERKYRIIGVKKQFGDDSLLFFNLQDTEVLIPNKLLQTDEDENGSPIFEENVKPLGTQKNILAYPMSWSHTFGNNYYSQAQAAELAAQTDEDGWNIRAEGTAYHPEPPLQVTSKADIERHIETIIDDMKQEVSDERSNSDE

SEQ ID NO: 9567 - protein, 631 aa, Unknown
  Description of Unknown: Integrase B9568 sequence
  cd00338,IPR011109,IPR038109,PF07508,PS51736,IPR036162,IPR006119, G3DSA:3.40.50.1390,PTHR30461,mobidb-lite,PS51737,PF00239,SM00857 ,G3DSA:1.10.10.2600,SSF53041
MTEAERQLGTRDEQKERIRKKYKGINADELDVILAKPPDSLYEESRERRVAVYARVSTGDPRQTSSYELQKNHYLDVVDRHPGWKLVEIYADEGISGTSLQHRDEFVRMIRDCQRGKIDLIVTKSVSRFARNVLDCIGYVRQLGDMKPPVGVLFETEGIYTLDHRSEMQLSFMATTAQEESHNKSEIMNASIEMRFRRGIFLTPKLLGYDLDAEGNLVVNEEEAKTVRLIFFMYLYGYSTQQIADTLEKYGRPTKKGRMEWSPNTVLGVLQNERHCGDVLARKTWTPNYLNHKSRKNRQDRNQYRQRNHHEAIISRDDFIAVQKMIANAKYGNKGILPELHVIATGALRGFVSIHPRWAGFSVKDYHKASESVYDPQLCLPDETKNIVVDEGSFDLRGYEIARSQFITSQHQLTCTMGIQELKFGIHGIRKLESVEYVELLIHPTEKALAVRKSTKENKYAIWWAQPKDGVITPRKIAATSFMKTIFEMLGWREDCRYRVRGVRKQDENETILIFDLQDTEVFLPHQTPPTMDEESESTEVQAAESSSVSKTATRISAYPAEWVESFGDEFYRHVHTRDPKGFSETEDWQLHAPGQVYNEDPLNTTSREEIQLGISSMLAEMDNRGVDSNE

SEQ ID NO: 9568 - protein, 630 aa, Unknown
  Description of Unknown: Integrase B9569 sequence
  cd00338,IPR011109,IPR038109,PF07508,PS51736, G3DSA:3.40.50.1390,PTHR30461,IPR006119,IPR036162,mobidb-lite, PS51737,PF00239,SM00857,G3DSA:1.10.10.2600,SSF53041
MSKSAKKAADQAEREKVHKRYSNRREPDVIYPAKKQVDFYDADIHQRVAVYVRVSTDNLGQETSYELQKNYYEEFVLKHPNWKLVKIYADKGISGTSTKHRVELNQMLADSRAGKIDLIITKSVSRLARNTVDCITMVRNLAELRNPVGVFFESECIFSLNEDTNMPLSFLASIAENESRIRSRSMEVSLAQRLNGGLPLTPKLLGYSHDADGKLVINPDEAPTVKLIFYMYLSGYTSSHIAKTLEALGKRTFLGNSKWTSGTVIQVLRNERHCGDVLTRKTFTPDVISHKSKKNRGERQQSLYKGEHEAIVSRDDYIAVQHMINNAKYGGKSILPELRVIGSGVLKGFVTISPKWAGFKAADYLQASMSVYTDDTYYGQPAEGDATFEVAAGDFDLRGFEVTNSSLFDANKRPYVLFQSKQIKFSTDCVRQFGKDNKVELLIHPGLRKLAVRRASKDSRQCVQWSRPDDGKYYAKEIPCTAFGGTLFELLDWETDFKFRAYGRLLQNEGDSVFLFDLSEPEIFIQSYLMTGTDSPISGNGELSPLSVSGKRVRAVPKKLADRFGSDFYSHRLTSSSPELQSEDAWKLWLEGQLFETGEKLRVTKFDEMQRFIAEQLAPIKQKEEVDFNA

SEQ ID NO: 9569 - protein, 630 aa, Unknown
  Description of Unknown: Integrase B9570 sequence
  cd00338,IPR011109,IPR038109,PF07508, Coil,PS51736,G3DSA:3.40.50.1390,IPR006119, IPR036162,PTHR30461,PTHR30461:SF3,PS51737, PF00239,SM00857,G3DSA:1.10.10.2600,SSF53041
MMYNMNDYQIELDKLGKIIIYLRKSREEMTDFKHTTEETLARHEEILQKWAKANLGYEIPEEHIFREVVSGETIEDRPEFKKVLSLINEGDIDGLLVVEPERTTRGDLIDCGTVIRSLEITKTLCITPMKIYNLNNEFDKRLFKDQLLKGNEYLEYSKKIMKRGKDLSAEQGKFLGSVAPYGYNRIKCAELGISDGKGWTLKANEDAEIVKMIFNMADEGIGMDRIVKHLVNIDAPLPHDSEWNDSTLKCILNNEVYYGMIAWGKTKIITKLIDGVPVKKAVKQKDYPLYKGLHTGIITKEQFDRVQRGLKDRYKNPIPKGEIFKNPLGGLCKCGKCGKAMIQNSHNGITHTKRKYEVDKEKLYNLLQSQRKALKIPIAEINRQMGYDAFKGGFYYIFSPKFNEKRFYLGDMITNNWFKLKEMLKIETDEFDKAITEFEEITKPTTLLCSENCGMTSSKLYLVEDKLIDSLKILLKEYNVYLDNYEDEYEKVVKTNSKSLGSIEKEIAKKEQQLKKAKEFVEQEIYTPQEFLERKKELTSAIEKLTLEKDKITNHKEEDKVIKIKKAIPSLEKIIENYYSLTMEERNDSLKFIIDRIVYNKNERHINSASDEEQKESIKLDIYLNNRFKL

SEQ ID NO: 9570 - protein, 630 aa, Unknown
  Description of Unknown: Integrase B9571 sequence
  cd00338,IPR011109,IPR038109,PF07508,PS51736, G3DSA:3.40.50.1390,IPR036162,IPR006119,PTHR30461,PS51737, PF00239,SM00857,G3DSA:1.10.10.2600,SSF53041
MIDIEKRELLAQKKAKTRQRMQVRIDPDNYEYIPAEKETDYYDNDIHQRVAIYVRVSTDDIRQTTSFELQKKYYEDFVRQHPNWTLVKIYADEGKSGTNKEHRQEFMQMIEDAKASKFDMIITKSVSRFARNLEDFIGVVRSLAHLKRRVGVFFESEAIFSLNDDAQLALTFQATMAEEESHTRSRSMETSLRMRLDNGIPLTPKLLGYTHDAEGNLVINEDEAPTVKLVFYMYLYGYSTKHIAEALNALERKSYLGNVKWTANGVVQILRNERHCGDVLTRKTYTPDYHDHKSKKNYGKRPQSRYFNHHEAIVSRDDFIAVQHMLDNAKFRNKAFLPELRVIEEGKLKGFVSINPRWAGFKFTDYINASQSVYITEADGTESVPTQSKDEDLKIEFSAGDFDMRGFEVTRSEFFDTFRKPSVSFGSKKIKFSTEIIRKFGAKNYIELLIHPIEKKFAIRATDANNRHGVHCSKLSMKKYVPKDISSAAFNDTLFELFSWNTDCRYKIIGSIYEKDDELVYIFDAQNSEAFLNPHMLERATPDEQSEQAKPLTTAGKRIRAIPQEWTSSFGKDYYLHELTLDTLDTQNEQDWNLRLQGQLYETGKRINVTGFDVLKKYIHAELSGVSLQE

SEQ ID NO: 9571 - protein, 630 aa, Unknown
  Description of Unknown: Integrase B9572 sequence
  cd00338,PF13408,IPR011109,IPR038109, PF07508,Coil,PS51736,IPR036162, IPR006119,G3DSA:3.40.50.1390,PTHR30461,PTHR30461:SF3, PS51737,IPR025827,PF00239,SM00857,G3DSA:1.10.10.2600,SSF53041
LNTPENPDTAPRCAIYCRYSSEQQRDSMSIEAQKRACSEFAERQKWNIARFYIDEARSGTSDDRANFQAMIADATAKDKPFDYIVVHKLDRFARNRYDSIKYKHLLNRKGVRVVSASQPIIGSGDPTEVLLESILEGMDEFYSLNLAREAIKGMAENARNGWYNGGHPPYGFDFETVKTAKGAKKKLVVNSAEAKIVRRIYRDYLSGSGIIAIRNGLNADGSKNRSGRPWTKNVVTGILKNEKYAGDMAFGKRPNRARRNYAPKYEAVIVKNCHEAIVSREDHEEVQRRLARNHPSVTHPRAVASEYLFSGIAKCRLCGGHMKGLSAHGRSERYRYYVCSVNDRVNRKACPQRKIRANVIEEIVIAKLKERLTSREVLEDIIRINNEALKELKAKSEKTLERIEADIARIEQKRRRLFEAIEDGIGGLASEDIAPRLRELQEKKTEAEAERERIKASIAQKPIKSSEEILRKWVEFFKALFDDPDFWKNKARIHSLIESIEIDASRVYVTYCAKLKGETDVLMLDKDPPPDGGGGGGKAVCLPHGAGSHYFLRQTVSIDLKEIIAACRRRVQARPAPAPEFQVSGGRAIMKIPVPSTKQVEMKDGKKIEVWELNGHVFVTAGSSGERCQS

SEQ ID NO: 9572 - protein, 630 aa, Unknown
  Description of Unknown: Integrase B9573 sequence
  cd00338,PF13408,IPR011109,PF07508,Coil, IPR036162,IPR006119,G3DSA:3.40.50.1390,PTHR30461,mobidb-lite, IPR025827,PF00239,SM00857,SSF53041
MSNSNGMGGRRYTRRKKEDQQAERTPRAKFYGRMSTDSDQQAESIDQQRDDCMLLIQRKGWELKGEYTDPAISGWKEREGLNSLLDDVTSGEVDVIVVYHIDRLTRFEPIDAIKRIAFPLFVNKCKIECATGQSFDFSEFGDLITFCVVAGQAHEQSDKQGKSAYRGQLAKAKKGLHVQGALPYALDLDAEGRYKLGDRRQVASMRLMGKLYLAGDSDESIAAALDAKGYESPGLLKWNNRREGSKMKKPESSWRGEAVHDKLTDPVYAGTFIWGGRTLAKFANVQEKPEIKEQNHPAVFDAKTWAALQAERERRRANRNFDTSPRKGVDAFLFTSLVQCGGCGRPMHGYEDRAPKVPVKRYRCVSCKGRGVKCEGNSISESLLLLYVSHALEMYFCNETSIDRLRESMRRRVLPKGRKTTPKAIRSQLGASQRHKAELLQTLMAVGRIDDAQLRDETVGRIEAELLTVRERIDALQESLDAASTPVAQLEERIESAIAESQKAYADLSGAIAEGRPEARDLMRRVIKRHGITLHSKRDGREYVLEKGVIDITQDLPGTSGSGLEVISITFTRLYCSTREAERILGVSGATFNRWKRAGKVTPVQGGGHGQRTAYLMSDIETLAAERGTA

SEQ ID NO: 9573 - protein, 625 aa, Unknown
  Description of Unknown: Integrase B9574 sequence
  cd00338,PF13408,IPR011109,IPR038109, PF07508,Coil,PS51736,G3DSA:3.40.50.1390, IPR006119,IPR036162,PTHR30461,mobidb-lite, PS51737,IPR025827,PF00239,SM00857,G3DSA:1.10.10.2600,SSF53041
MAKPEVSELAVVYARYSSHSQGEQSIEGQLSNARDYAAAHGYTIVHEYVDRAKSGRTDNRAEFQQMLKDTAKRQFSVIILWKVDRFGRNREEIAINKMKCRKNGVRVEYVAETIPDSPEGVILESVLEGFAEYYSLQLSQNIRRGRAESAEKCQSLGGNRPLGYKTGPDKKFIIDENTAPTVKMIFTMYADGKTVTEIVDKLNEMGLRTLRGGPFTKNSLHSILKNKKYIGIYEYQGREIMDGVPRIIEDDVFNKVQEMLKINKRAPAKTWSRADYILTDKLFCGKCGALMFGESGTSHTGAKHNYYICSNKKRFRSCDKKAVRQADIEDTVLNATHELLQDDELLDYIVDRTWEYYLAQDNSQEELRNLQRQLAQTDTAISNLIRAIEAGILTEETKKRMDELTQQKADLKASIADREIARGFHLQKSHIAFYLRSLRDADWSDKEAQKRLIQTFVNAVFVYDDHITLTYNFSGDKSTITLRDMQRFEDGEEFGCRASRSTIMWRQKCLLRKARLYRAFLLPKRRFFSVPKRRCKFPAGTVPSPGGLRPGAKRGLTNRRSGGRVRVIQKPMSKRSTRRGAFQRAAGGGMAAGEAAANGLYEGGEKAITACNTRRHPRPLSRRSA

SEQ ID NO: 9574 - protein, 623 aa, Unknown
  Description of Unknown: Integrase B9575 sequence
  cd00338,IPR011109,IPR038109,PF07508,Coil, PS51736,G3DSA:3.40.50.1390,IPR006119,IPR036162,PTHR30461, PTHR30461:SF3,PS51737,PF00239,SM00857,G3DSA:1.10.10.2600, SSF53041
MSDLRRNPLYYLRSNKDLQDLPRRVAIYARVSTEHEAQLYALENQVDWYNEILARHSNWTLVEQYIDRGITGTSAKKRPSFMKMIDDAANEEFDIVITREVSRFARNTVDTLQYTRELKRNGIEVYFVEDNIWTFDPDGELRLTIMATLAQDESRKTSLRAKAGQRTSMEKGVFFQNGSILGYDYNKYDRTLTINEEQAETVRMIFDLYNQGLGVRKIQWELEKAGRKTARGSDLWSASVISRVLKNKIYCGYLVWYKQFVPDFLEQKKVNNHGEKEQFEVLGSHEPIITLEEWQKANDRLNARKSTDGKQTAKRKPVDVWTKKLRCICGRGFNRRAWHKDAKNGKEYYGYTCYNVVKSGSAKTRANKGLTMEGVCTTPSVSRWKLEAMALYIFRTMSINKDHIIEVATRMIDSHIKDGESDLEKNKKTIKSLNLELEKLEKKIDNIIDMRTEGEISKEVFLSKKEQFEDRVKEIEAQLDELNTDEETQDYSKQIALWKDCLEQMLNYQDADKIPEYVIDAMVDYILVDGTTFKWKFRFMPDEYDLTVEGNRESNGVLIDNKSGEKVSSFAQCFTGSNKRRTKIERWKVAEYLFTKDIAIKYMNKRPQDRIHKWYDILIEIYF

SEQ ID NO: 9575 - protein, 621 aa, Unknown
  Description of Unknown: Integrase B9576 sequence
  cd00338,PF13408,IPR011109,IPR038109,PF07508, Coil,PS51736,G3DSA:3.40.50.1390,IPR006119,PTHR30461, IPR036162,IPR025827,PS51737,PF00239,SM00857, G3DSA:1.10.10.2600,SSF53041
MKAALLLRVSTEQQDLDSQKNDLKPIAEGFGYDIPDSYIFGEHITGKDDIRVSERKSITRLKEACATGEIKAIFIYEVSRLSRSSIDGRSFVRDFVEMKIPIYFKDRGIWTLDRTTLEEDPTTKMVVGMFFDFAEQELKTLKSRTMRGRRNSASKGLATGGYINYGYKKDVETGKTVIDETEAPFVLDMFEKYSTGKYSLSALTRYANTLGFDTRYKKNSTSGTFKNASGFSKSTDNIKWNVGVISSMLKNKIYIGETYFQEIKKEVPAMVDKEVFDKVQQKLVLNPKFLEKTRNHTHLLQKKVICGHCGNLMSGHLDTSGKSGSYLCTSYTSTKEKCGNTTFNYFRFEALVWDFIKNNSFVFANLDEEEKAKKITELEAEKQPLFEIISLRERYILIEKQKVANLLDVVKQGIFSINDIAKDKIAIDKSINDYEREISKARSNISLIDNRIDLIKNSDFSADSITKIESDRVQMKKVINDVVDNIVVYKIDNNSVVLQVNMYDYPVYNILLNQRSKRIFKYWFIEDFVATFLKGKDRPATLKESDNFYFSNPTDLAGSSYWEYYVFDEMCAILEHSGLYSEYYPAVEYTNPKSKKTDVIPEDETEFREYMSTKFGTEFED

SEQ ID NO: 9576 - protein, 619 aa, Unknown
  Description of Unknown: Integrase B9577 sequence
  cd00338,PF13408,IPR011109,IPR038109,PF07508, Coil,PS51736,G3DSA:3.40.50.1390,IPR006119,IPR036162, PTHR30461,PS51737,IPR025827,PF00239,SM00857, G3DSA:1.10.10.2600,SSF53041
MTRCLIYARQSSGDNEQSESVDLQVARLKALAASRGWDVAGEFTDLDISGKCYPDTTDAVALSRLDDAFQEWAAGRRDIYRKGLGELLGRLDGIDAILVWDITRLMRPLRGSHLESYIVQSLKRHGVKVIQLDGGEVDFSSFENSLVVTLTSMINDNQLKIMREKQMGAYKAMRDRGMQCSGPAPVGYRRINGTMEIDDAGAQIVRDAYTLYLAGEGVSRICRRLNEVHRFTVMPSNLKQLLKRPIYAGLAYNSSGELIKALPSLPIISEADWKRAQAMMATGKRGYVRKRINALSGLMRCGYCGGAMNVVSVPKKKGGNALTTKCNRVDQGVATCDLCRVAGVRYRGDDVENEGVVEIPLSPFDRHAAKSLATVGVDPEWQSIGLHEALMPLVALALLDTIREQSDREEIADKAANIELRLARMHESRGSIAALIKDGLLSLDDARTQLEELNREEASAQAELTDAIALLSGTTEDDLARAYSMINMIQEGTLPTSTYRVLAHKAIRKVSCRASCVTVELADGNSFTVEKIRRAGVMTMPPVRMDLVPLSDGSHRLEVSYYYSSYFAGKDSLPSILMDAGRIKIYSIGRNMPPEGKDGLKSKLVREGWERDRNDGLIQ

SEQ ID NO: 9577 - protein, 618 aa, Unknown
  Description of Unknown: Integrase B9578 sequence
  cd00338,IPR011109,IPR038109,PF07508,Coil, PS51736,G3DSA:3.40.50.1390,IPR036162,IPR006119,PTHR30461, PTHR30461:SF3,PS51737,PF00239,SM00857,G3DSA:1.10.10.2600, SSF53041
MNKIPIFEEIDLMLLRKSRSDNIKEPIEITLKRHEEQLQELCIKTTGKPVKEENIYREIVSGGENIKDRPDFLRLLRRLENGNIKRVWCVDPERLSRSGMYGAGDVLKIFDVTNTLIATLDQTYDLKNPMDKKYLEMRMIQSAEYRNYAKDVMNRGRHKSVRDGYYIGSSAPFGYKRKQLHDEQDRFILEPHEEESQTVILMFEMLLEGVGTSNLANHLNKYKYKARKNEYWTPAMVRNIVTSEVYCGYNTWEKFKTVEEIINGEVVKKRKLNDKYYVYKGKHKALISEEEFKNVQEILKSHPSSKLGGNKNASNPLAGVVFCKKCGRHMIRRPYNEKHLKNGFRKYKYDKQELLDFMRSSKEKSNLSLSQIAKKMNISRDTVKGWFPTNIDKFYDGKNLANHWYQLKEVLEIKDSKWDKIITTYNKKVKQNDSLICLTPFCDNVSSELQLVEKRLLQALEIQLNDFRYYVDNYEQEIIKEAKSNAKTLNKIEKQIEDLKKELKNLRRSYNREEFTYNEYIEDKNDIENELKEIEKTKEEILKDTNQDKIIRYKKAIPIIADCLKQYDKLSIQEKNDLLKDIFIKVEYEKNEGGRWNKEAIDKFTLTPHLKILIDETE

SEQ ID NO: 9578 - protein, 617 aa, Unknown
  Description of Unknown: Integrase B9579 sequence
  cd00338,IPR011109,IPR038109,PF07508,Coil, PS51736,G3DSA:3.40.50.1390,IPR006119,IPR036162,PTHR30461, PTHR30461:SF3,PS51737,PF00239,SM00857,G3DSA:1.10.10.2600, SSF53041
MDNYITSLDRNRPRNIAFYGRVSTEHEAQLSALQNQMQWYDDQLKFHPNWNLVEKYIDEGITGTQAKKRPGFLRMIEDSKKGKFDLIVTREVCRFARNTVDTLVYTRELKSKYNIEVYFVDDNIWTMDGDGELRLTLMATLAQEESRKTSDRVKAGQKISRENGSLYGNGNILGYDRVGNTYVINEEQAETVRMIYDMYLDGLGSMKIAKSLSVQQRKNASGDIKWSAERVMRILKKSTYTGVLAYGQSHSNNYLEQKRINNLDRDSYMYQKVNIPVIIPQNKWDDVQKIIARRTKSVGDKLSGKKDVKEFWSKKLLCNCGSSFRRNKWRTNKTGEAVYGYQCQRQLNYGSKQFREKNGLDTDGYCGIRMVADWKLDMMAKMVIEHIWKNKGESVILALKMISENYEEDVKPNKKNIKETELKIEKLQKRLQNLIEMRADGEISKEEFAESKNTINEQISILNSELTIDEVESDEPESIEKKIEVIKQAMNEVIDFSQPKLPKYIIDKFISKVLVLDNNKFRWYINLGNDYDKNSDIYLDTQVEGRKNNYSAQILSNDDSLSSVHSSTGSYRRNKGEIINLNFVITYKMAQDYRKSIGKYLRKNQWSDAIIDVAVEL

SEQ ID NO: 9579 - protein, 617 aa, Unknown
  Description of Unknown: Integrase B9580 sequence
  PS00397,IPR038109,IPR006119,PS51737,PF00239, G3DSA:3.40.50.1390 ,PTHR30461,IPR025827,SM00857,G3DSA:1.10.10.2600, SSF53041,IPR011109,PF07508,PS51736,IPR006118, cd00338,PF13408,Coil,IPR036162
MNQYAEKELSGLVFQTFEQLAINGYIGDPSGEDAYGYLRVSTDQQADENRAGLPRQIERIHEISKEKRKRISWDRIVADDFSGFDFEHRPQLQKLLKETINPNTRRANVIVMEQLDRLSRQADWHQGYLLEKFIKDRGMEVIFWKSFGSRIERVVMGAISQDGMEDAQGRMKDGKKRKAKNKKVTASVRAYGYERVDPDGKFSERTQRETHYKIKDDESIWIIFIFNEIAIKGTSARQVAKMLNEKSVLCRNSKAWEASDITRIIHNPLYKGMFTANRYREYKMEVVENGVSRLINKTEMRPESEWIYVPVPPTVSEEMWELANNMLSKNKQMSPRNQKKYIYILSGLIKCATCGYTLVGDVKTVKAGTNRMKETKTYRYYRCTSTTAWRKKNYKMECNQKSISVEKLEETVWSVIRKVIYEPEILLQAMDAEYNSISNQQIIDTIKHLENEINKLEKHLAKDYELYRNDYLTAQEFGEKKRLYELDINNKSREIEQRNNQIITQDKLEQRKEFILGLSERAKQYDYGKNAPTNIKQTLIKSIVETIYVNSNEGWVTITGQIKGTWSLIDNNALHIVKQSLERMLYNRETLRFKIHYWIKDGITSSITLLSSDPNLD

SEQ ID NO: 9580 - protein, 616 aa, Unknown
  Description of Unknown: Integrase B9581 sequence
  cd00338,IPR011109,IPR038109,PF07508,Coil, PS51736,IPR036162,IPR006119,PTHR30461,G3DSA:3.40.50.1390, PTHR30461:SF3,PS51737,PF00239,SM00857,G3DSA:1.10.10.2600, SSF53041
MNIYEIMNQMRVERKRIEDFQLRVVIYARVSTQKEEQDGSVEHQISHFKEMVERNQNWSLIKIYTDRVRAESAENREQFQQMVDDAYNGEFDLILTKEVSRFARNTIDSLTYTRDLLRHGVGVFFYTDNICTVDPDSELRLTIMSSMAQDEVRKLSERVKFGHKKSIESGHVLGNSRIFGYTKVNSKLIIDEREAEMVRLIFETYATGEYGLRYIEQLLWDKGYRNRNGKKIHHNTLSGIIQNPKYKGYYCGNKVKIIDYRTKEQKFLPPDEWVIFKDESGEIVPAIVSEELWQKANVIFTERSNKVKELDRSAKKTSPLSGKIMCGVHNTPFWRTSYSHRLHKDKSIYQWICREKKRGKSCYCTTIAIYESELYSILGELITRLIPNIDTYLDEFVKTYNETKAMKSVKTDVGTMESAIDAVNQKLERLTRKKDKLFDLYADDIIDKNEFKDRNASLVSEIEELEKQLAEFRKKDEDTDDDVVSSIHSLKLLFHKILQKDNESYVINEDYINYFSELIIDKIIVYPVDNSSMNLEICLKVGSEEVEYKRLGRSSGHTFKKMMPKQRTIQERKGNQFCSPNNNQIGIPLISYETNVKRELRYRQKYCLKYLITVAL

SEQ ID NO: 9581 - protein, 616 aa, Unknown
  Description of Unknown: Integrase B9582 sequence
  cd00338,IPR011109,IPR038109,PF07508,Coil,PS51736 ,IPR036162,PTHR30461,IPR006119,G3DSA:3.40.50.1390,PTHR3046 1:SF3,PS51737,PF00239,SM00857,G3DSA:1.10.10.2600, SSF53041
MYCYENNVAKPRNVVVYARVSTEHEAQLSALENQKDWYKPFLAQHPEWEVVGMYVDEGITGTSAKKRPQFMKMIEDAGSGKFDLILTREVSRFARNTVDTLQYTRELKSKGVEVFFINDNIKTFDGDGELRLTIMATLAQDESRKTSIRVKSGQQTSMENGVYYGNGNILGYDRVGKELIINEEQAKTVRMIYDWYLDGVGMRAIQFRLEQAGRLTSMGKTRWHQSNISKILKNSFYCGIITYHKEYTPDYLIQKKIRNFGDIELTQVKGTHTPIVTEEEFNRVQQIMGSRTSVMTNNVTGKRKELGKKPYGDVWTQIMECECGHKFNRKVWHKVNGVNQYGYQCYSSLRTGSVETRKRKGLPLEGICQTPMIPGWKLQMMVKHIFNTFISNKAEVLSLAESILEAHINDTPPENDNSELIARKISEREKLNKRLDNLIEMRADGELSRDLFKKKKEEIESAINKIDDELERLQPAEEPEENIDSEEKIKILKYYLEQSVIPLEDENLPEDIIKAFIKKVVAGKDHFDWYLRFPGDDDEPQQLTMSGKRKSSAVISSLCTTLHRQLLAKEGNNRIDKLIKVQEFVIDLPQAKAYLYSFSTKHRIYNWEDLNITVYL

SEQ ID NO: 9582 - protein, 613 aa, Unknown
  Description of Unknown: Integrase B9583 sequence
  cd00338,Coil,PS51736,G3DSA:3.40.50.1390,IPR006119, IPR036162,PTHR30461,PF00239,SM00857,SSF53041
MSIKLYFIQKYVILEDMEVLGVYARTSRDSGDFSTIDQQVKAGIDFANHNNMKYKVFQDKGFSGYKIDDSEDKDPFANRPAFSEMIEAIKLGTINAVWVWEHSRLSRNQYASAVIFNLFLKHKIRLYEKDKEYDLYDPNVQLLRSMLDAVAQYERQLIVRRTTRGLYNAIDSGKRSYTSFFGYRKTVKNEKGNYLWEAVPSEIAQLKEWFKRFKNGESLRSIIVSEADFKDTTRYKLTRTSQLSRYMQHFDYTGYTLNTKGLDYLKKFDNFEIDSLQVLQNPDYWVKSSAYPIEIFTREEWIENKERLRVHRGKRKEAKNRKAEKALGTGIIQCALCGSKYFHQIQIQKRNGKEQHYLYYFHHKTIAGACSQKPKSIVQHKIDTILKTFVLYNILASDGETKFLKEQLFQEEIEKKAIKEKLKTLKANRKKLEIQKNKLKKALEAAEDVGTITVLAKQIDNAEGAISEADKNIIDAEIDLENKNADMEKTQAQLLYYSAKDLLIQFFEKWNIEEQRNHLLRVVDSATLNGTKLTIISGGVTYIFNTTKHYQFPQSMYQELLEKGGKNIDYLISHHKEELTDEEMYIATMRRILLSGIVNGLSSFDMISKRIVF

SEQ ID NO: 9583 - protein, 428 aa, Unknown
  Description of Unknown: Integrase B9584 sequence
  cd00338,PF13408,IPR011109,IPR038109, PF07508,PS51736,G3DSA:3.40.50.1390,IPR006119, PTHR30461,IPR036162,PTHR30461:SF3,IPR025827, PS51737,PF00239,SM00857,G3DSA:1.10.10.2600,SSF53041
MQVTKLPSLPQLPKKRKVAAYARVSSGKDAMLNSLSQQVSYFSSLIQSNNDWVYAGVYVDEAITGTKDDRTEFQRMLQDCKEGKIDLIITKAISRFARNTVTLLKTIRELASMNVEVYFEEQNIYTLSSEGEFLITILASYAQEEARSVSENQLWRVKRSFENGLPWGAYLYGYKVIKNKYYVVEEEAKVIKLMVELFLQGNGKGKIATMLNEMGIPAYYGGKWHPTTILGILRNYDYTGNLLLQKTYTKDYISKKTMKNKGEKQMYHVEGSHEAIIDLDTHLKIQIELQKRNEIFTDRNNHSIYKGKIKCGHCGKSMLRKVSNWRTFWTCATFQRKGKEGCIAKRIDEEELLNILNEIQNSTKYDIETEIKEIIVYPDYTLKVIFNDGYEVNANWTKRSRSKSWTPEMREAVSVREKERWSKVLWQR

SEQ ID NO: 9584 - protein, 613 aa, Unknown
  Description of Unknown: Integrase B9585 sequence
  cd00338,IPR011109,IPR038109,PF07508,Coil, PS51736,G3DSA:3.40.50.1390,PTHR30461,IPR036162,IPR006119, PTHR30461:SF3,PS51737,PF00239,SM00857,G3DSA:1.10.10.2600, SSF53041
MNDVAWTQTEPGLQQQIYRPSVQLEKTFIPARPKINIYESGRVFRVCAYCRVSTENDEQLSSFELQQSHYRQLMGNHPNWNLVHIYADEGISGTSLKKRDDFNRMIAACEAGEYDLIVTKSVSRFARNLVDCVSIARKLKSQNPPIGIFFETDNFNTLSEGSELMLSFLATFAQEESVKKSESMNWSLQQRFKDGKLLTPAPLGYKKPKDSSGHYIKYAPLEIVESEAEVVRFIFNAFLSGRTTKEIACLLNDIGFPTKTGGKLWYDGSISYILQNERYCGNILTWKTFTSDMYEHKHRKNRQDRDQYLYTDMHEAIVSIETFESVQVLLENRKHHVRGPLPAMQVIGSGIFRGYIPINHHWVNEDTASYYEASNSTCNKLEMRRIKRNLLSVFDFEGYQVVRGQFMAAHAECPSISITGTRITFNIYCVRKFNTVPYIQLLLHPSERKLAIRPCDANDIHSIRWRPEIGKPVFAKTIKCQYFSSALFQIMNWNPDFLYRIRGAWATRGNAQIIVFNLENAVPYVSIEQKCDSSPKPHKNKIPLCPEEWSDNFGENFYDHRVQYGFYFFAADWDAQADSVPVPGFNKTTNLSAEKLKESLENLKTKAGSLDGT

SEQ ID NO: 9585 - protein, 612 aa, Unknown
  Description of Unknown: Integrase B9586 sequence
  cd00338,IPR011109,IPR038109,PF07508,Coil, PS51736,G3DSA:3.40.50.1390,IPR006119,IPR036162,PTHR30461, PTHR30461:SF3,PS51737,PF00239,SM00857,G3DSA:1.10.10.2600, SSF53041
MYQYGYQAPKQRKVAVYARVSTEHEAQLSALENQKDWYKPIIAQHPEWDIVRMYTDEGITGTSAQKRPQFMKMIEDAGDGEFDLILTREVARFARNTVDTLQYTRSLKAKGVEVFFINDNIKTFDGDGELRLTIMATLAQDESRKTSIRVKCGQQTSMDNGVFYGNGNILGYDRVGKDMVINPEQAKTVRMIYDWYLDGVGIRAIKFRLEQAGRLTAMGKSNWHESNISKILQNSFYCGIITYHKEYTPDFLEQKKIRNFGEIELTKTRGTHEPIITEEEFERVQEMMAKRRKELPNTGAGKRRQIGEKQPGDVWTELLICECGHKFNRKVWHRVEDDVQYGYQCYSSIRTGTVTTRLRKGLPIDDVCKTPMIAGWKLQMMVKNIFREYLHNTAEVLALAEAMLERHIDDEEPQTDNNRLIEQKQAEVEKLNKRLHSLIEMRADGEITRDIFKAKKQEVEDRLLAIQNELNQLQPQEEAIDDATHDEKIKILKFYLEQSVNPDAMENIPEDVIRAFIVKVVVHENSFDWYLRFSPDKPPKSLCIDGKRKTTAKVSSLCSPQHRLLLTKVGKSNFVKVQEFSIDLGQAKAYLYAYSTRHRIHKWNDIHISVFI

SEQ ID NO: 9586 - protein, 612 aa, Unknown
  Description of Unknown: Integrase B9587 sequence
  cd00338,PF13408,IPR011109,IPR038109,PF07508, Coil,PS51736,G3DSA:3.40.50.1390,IPR036162,IPR006119, PTHR30461,PTHR30461:SF3,IPR025827,PS51737,PF00239, SM00857,G3DSA:1.10.10.2600,SSF53041
MNKATEPPHKRAVTYSRFSSDLQNERSIADQQALCERFAVRSHLTITKHYQDKAKSGASMNERAGLRQLLDDAGHGHFDCVIVEALDRLSRDQVDMLMIYKRLAFLRVEILTVNEGAATQITVGIRSLISSIFLKDLGDKVARGQVGRVMEGKIPGAVTFGYRLVAGKPGEREINPEEATIVRRIFEEYAAGKSPRAIACGLNNDDIPSPRGKRWTGTAISGGGADGMGLIANPIFIGQTTWNKRKSTINPETGRTVRRRTEKHLTIDVPQLRIIDQALWDACTSVKANRSNRKNGGNGVARLVLPRKSWPLAGLVKCGTCGGDMHLRGHSKSANGKTFRGIRCATAFGDERKCDHRRSYDLDRVQRLTFESVHKILSNPKHLDLFMRCYDREFKAAQRQASNGLQKGEKRLAQIEAGLMRLVGALELGSMPADIINERIQKLEAERVAIREQVDICAADAEPSRAHPATIRRWLTELEAKLGNLDAPGKKTLSEGLGGLVADVIVHPVARGEEYRVEPRIYRTALTSRPSPGLARPSAQIAREYGVDQNSSKYSQCSQSVTLAEAAEAISGRGPGFNTTPSNCDNAKSKTADLTISPFRKDVISLGISKVA

SEQ ID NO: 9587 - protein, 611 aa, Unknown
  Description of Unknown: Integrase B9588 sequence
  cd00338,PF13408,IPR011109,PF07508,Coil, G3DSA:3.40.50.1390,PTHR30461,IPR036162,IPR006119,IPR025827, PF00239,SM00857,SSF53041
MKAAFLIRCSTKKQDYERQVKDLTRLAKRFGYEYGDSTIYGEHITGKDDATKRDRLSIQHLKEGAEEKKFDVVLVSEVSRMSRDPMSGRMYIRQLINMEIPVYFRDIDTWTIDPQTGRKTRDAETIIGAAFDAAWKYLKSMKTQIASGRRDELDNNCMSIGQPFFGYKRFGGRDKAKKNSWIVDEDAAEVVVDVFNEYLKDGATLKSTALAITAKYGEKFGKNFSIGTIEHILTYESYYTGIKKVNLTDPDTEDVDVFEVEVPTIINKALYDAATQKRATNRTVTDPYPKQKTYVLSKLLKCPNCGHSLTPRKKSDAHSGIRLQNGKPAVSWCCMSGITNATDCKSRITISNEKLEAVIWGLVKKELIGFANLNTEDRMAKIEEMEQKIANIKADIANYEAQKAKMDKDIKNAMKLYMEAPDDDIREMMKDDYYSTLTRCKNEKADCDSKIEGLKEKKDMNEKFLVSLRQPTLPDDAISKAEADPEEMRRLVKELIEKIYPYRIESYVSPATHRVMKNGVVLLEVYAIDAIYYILFDGNQRNNKTAYYISSHFATFQNGKSKYEAYDEGEYFVIPNADMVMETEELVETATFNEMMEICETNGWEIDYTYK

SEQ ID NO: 9588 - protein, 609 aa, Unknown
  Description of Unknown: Integrase B9589 sequence
  IPR038109,IPR006119,PS51737,PF00239, G3DSA:3.40.50.1390,PTHR30461,IPR025827,SM00857, G3DSA:1.10.10.2600,SSF53041,IPR011109,PF07508, PS51736,mobidb-lite,cd00338,PF13408,Coil,IPR036162,PTHR30461:SF3
VKTVKKIEVTRPVLPTRKKVAAYARVSMETDRMMHSISTQVSYYNELIQSNPEWEFAGVYADNFISGTAIDRRPEFKRLLDDCEAGKIDIILTKSISRFARNTVDLLETVRHLKELGIEVQFEKEHINSLSDDGELMLSLLASFAQEESRSISENARWAIQKRFEKGIPNGHFRVYGYRWEDDQLVPVPEEAEIVKRIYQNFLDGKSRLETEREFAAEGITTRDGCRWVDSNIKSVLSNITYTGNMLLQKEFIEDPITKKRRKNKGQLPQYFVENTHEPIIDMKTFQYVQDEMARRRELGALANKSLNITCFTGKIKCGFCGKSFMHNTRKNRAQFTTTYTDEDGMYTTWVCGSRKQKQKGDPCKAKEIPDKILKACCAEVLGLDEFDDDVFAERVERIDVPDGGTLVFHFYDGTEVTKEWKSTAKQDCWTDEYKDRQREWVRNYMAKGDGRFSPFTTRIKCGCCGGSCRRQVQGSSDGKIAYWRCSGSGATYCGIRGIREPELMEIAADLMGIPEFDGDAFRERVDHITMVKSGLLEFTFTDGHTEEAEYSTKRKMPGWTAERRAAFEARPKRQVTEEQRKAMSEHMKQIRRERHWNSKGKSKQSQQP

SEQ ID NO: 9589 - protein, 608 aa, Unknown
  Description of Unknown: Integrase B9590 sequence
  cd00338,PF13408,IPR011109,IPR038109,PF07508, Coil,PS51736,G3DSA:3.40.50.1390,IPR006119,PTHR30461, IPR036162,PTHR30461:SF3,PS51737,IPR025827,PF00239, SM00857,G3DSA:1.10.10.2600,SSF53041
MISPPPTAMPCCEYYRMSTLDQDDSISQQQREVAKLRKQHQYNTRHQFIDEGWSGDDDYRPHFQEMLTQIERSDNPFRVILCWDLDRFSRANPLEVLSQFNLLRKAGVNVHTCQQGYFDLQQVDIAQLVILAVESEQNHKYLQKLAVGTSRGMLSAFRAGKWTGGDAPYGFVLEDQRLVPVDREVELVREIFHWFVNLRLAYGQIADRLNARRIPSPRGKKWHRNTIKKMLANEIYIGDRRISKNWTGKHAKIQNGEITKLAGDELQKIAAEKEKIMQRRVKDAKIGLERKTKPRVCRQNSEDEGNYQVGFLDYQVVTPEIFCVARERIAQIREEKFRPKKGAMPLTGIACCGHCGHKLSGLDTSSRRTLANGTEKVYRRYVYRCCGAQNTGSHHNYSVSADLLHSVVAMKIRQCCLNPRAIERLVDDLRRQFEQPSAADDPERLQAQIRAIRNEIRRQQDRATRAPETIWSAIDREIRKQEGLLRDAEQRLQAAKRRAGSSVAASEYSRRVAAYLGDLGEQFASCDPRRLREEFQRILGRVTIWAAPGTLSPERRQKEGRTESRRWQLDRGEIEVRLSVPTENYGSPYAPLPTIVLPFDASDVACAA

SEQ ID NO: 9590 - protein, 608 aa, Unknown
  Description of Unknown: Integrase B9591 sequence
  cd00338,IPR011109,PF07508,Coil,G3DSA:3.40.50.1390, IPR006119,PTHR30461,IPR036162,PF00239,SM00857, SSF53041
MAKAVARTKAYSYVRISSKGQIEGRGIARQFAAAQEYAAKHGLELDEQLKDVGKSGFRGDHVKFGALGGFLRLVKDKQIPVGSYLLVESLDRLSREDVLIAQAQFIEILSAGISIVTLIDGMHYHKDKDFTQLIISLTYMSRANNESQEKSKRIKDVIRNRKLDALAGKPRYNHHLAGWITQTRIGDSKDYEFTLNEKAKGVLRAFELYDSGMGAWSVAKALNTEGHPVLRPKQNVDAKWKEAQVQLMLRNEIVIGTYQASETIDGKSVPLGDPIRNYYPAAVPDDLFWRVQAKINKPKPVGRLGRRYSNLFARNTSCSGCGRILRLSKGGGPNRRISYFSCMQKALVDGHPCSGKFFPYDTLEHAILTYATDFYEAAATEMQVPEKNKQKLEKQLAEAKTYLARIDNERKNTLAMSGEDLDPEDKAELLNNVRALRTKVEQQKVYIGELEAQLLNSQDKRDELKSVMDQIQAERAKWKTAPDDEVMQSRSRISAMLREFVTTVEVDFEAQEAIVWVGGYTSAYKFDRDGNLIGTFFLMPSLMPELYPHVIDRTPSGRIRQIRKVNEDIERKPMTDADMIDFMQSMGWKADRIDMALKASKRIREALA

SEQ ID NO: 9591 - protein, 607 aa, Unknown
  Description of Unknown: Integrase B9592 sequence
  cd00338,PF13408,IPR011109,IPR038109, PF07508,PS51736,IPR036162,PTHR30461, IPR006119,G3DSA:3.40.50.1390,PTHR30461:SF3,PS51737, IPR025827,PF00239,SM00857,G3DSA:1.10.10.2600,SSF53041
MRCLPLQHSTLFGYGQAKAPALVRCSAGETWSAAQNRTKRILCLQGSVYHTPCIWATARKGSVFMPRKKAPAAEAPRLVAYYRYSGGSRQTEQSIEGQRRDCEAYARAHGMTILREYVDRHISGKTDDRPAFQQLVADSAAHTFDAVICWKTDRLARNRYDSAVYKKKLRDNGVEILYAAESNISGAEGIIIEGLMEALAEYYSAELAEKARRGMRESALKGKALGSSRPLGLTVDADKHYIIEPTGAEAVRYIFEQYAAGLSSSSIVERLNAMGLRTSHGGPFNKSSINRIIQNEMYRGVYVSKKFDVRIEGAIPAIIDNDLWERAQKMFERNRQSRTPHASRADYILSGKLYCGECGCLMKGVCGRSSGNGQMYHYYACPGRSIGRACTRKNIPQDELEAMVVNAVADLLLEPALLEQIADAIVELQQAEAARPDPEKQALEKSLSDVRSKIQNILTAIENGTSSAALSARLADLEQQESTLSYQLSSLTAKKPLTFTRDQILFLLQQFRVSPSERTKAYCRRLVDTFVDHIELTNTELILYFNLSDETIDKNKKAPRSNHSEESSTEKRLVHLAHQQANYSLYAASGYFSLVEHQFSARLWRTA

SEQ ID NO: 9592 - protein, 607 aa, Unknown
  Description of Unknown: Integrase B9593 sequence
  cd00338,PF13408,IPR011109,IPR038109,PF07508, Coil,PS51736,G3DSA:3.40.50.1390,IPR006119,IPR036162, PTHR30461,PTHR30461:SF3,PS51737,IPR025827,PF00239, SM00857,G3DSA:1.10.10.2600,SSF53041
MPRKKKLQEVGGLRLVAYYRYSNGGQQTEQSIEGQRRDCEAYAKAHGYKIVHEYIDRHISGKSDSRPAFQQMISDSDSHLFDAVICWKTDRLARSRYDSIIYKTRLRKNGVKILYAAETVVDGPEGIIIEGLMESLAEYYSAELAQKLRRGQRESALKCIALGGNRSFGYDIGPDKHYCINEKQAPAVRYIFEQYAAGATAADIVRELTARGYRTSRGNPFNKNSICRIITNEMYLGVYKYADIRIEGGVPAMIDRELFNRCQTQLAFNRAHGGGKGAPRADYVLVGKLDCGLCGHAMKGASATGHTGSKHYYYTCTQHVEKKCPKTSIEKNYLEQIIVDGVAKYVLTPEKISQIVDCMMELQAKEQEPKGNPEKDALEAELAECRRKQNNILEAIEEGGSARLAARLRALEEQEAQLTFALGEINNAPAPPQFSREALTFMFEQFRREEDEVDEEYRRRILDTFVSSILLYEDRAEVKFNITDQKTGDFERVILPISANKKPPEDDDIPSNSEGSTALRLVEHQGVEPWHRSPGLSHFESLKLLDEAGPLRLSLAAEGILATSKKARHTAICRQKSAAFCEMTLEKAFFTQAVSGCISGVVVLDVR

SEQ ID NO: 9593 - protein, 607 aa, Unknown
  Description of Unknown: Integrase B9594 sequence
  cd00338,PF13408,IPR011109,IPR038109,PF07508, Coil,PS51736,IPR036162,PTHR30461,IPR006119, G3DSA:3.40.50.1390,PTHR30461:SF3,IPR025827,PS51737,PF00239, SM00857,G3DSA:1.10.10.2600,SSF53041
MAKRIPGAFICARYSTDNQSQDSIEVQAEACAKWCAQHSVQVLGIFADEAVSGMKETRPQYEEMMRRLRLGEATMVVIYDQSRLFRRMTSWFLFREEMTSLGVKIISVTQPLVGLDIRDPANFLMEGSSALFNQMWALQSRQKTMAKMRFMARNGQYTGGKPALGYEVVDGKLQICEEEAAVVRRIFREYADGRSYRDIIAGLNADGIKTKRGNAFGSNSLHDLMHNEKYIGTLVYGQSPYREDGTRNTHAKDGEDPIRIEDAIPAIIDKETFRIVQERMAQNKRQQGGRPPKNREYPLRGKVFCAACKSAMTISTSKGEYYYYRCTGKKRLHNCEASPISVDQLERTVAIALRNVLGAPSEVNGLIRILRDQAEQITAGSVERLATLLEQEREIQKQLDNAIDAILSGLTSTALKEKITALEKRKAEINVDLNALKRSVDAASIPEHRLREILDYIIRSDNAALMSIVYRVEVSEDAITIWTLLDSDPTGHIDTAQEGVTITPGTSFAVPKKQIPIRVSAFLLCRGTRIINSNSPVGCWAMGRAPSPPYEVFPSGNTSATSPFRPVPLLKHLLCFLFFWYGERGENDIMRMSGGHSLDPGSTGSTP

SEQ ID NO: 9594 - protein, 607 aa, Unknown
  Description of Unknown: Integrase B9595 sequence
  cd00338,IPR011109,IPR038109,PF07508,Coil, PS51736,G3DSA:3.40.50.1390,PTHR30461,IPR006119,IPR036162, PTHR30461:SF3,PS51737,PF00239,SM00857,G3DSA:1.10.10.2600, SSF53041
MRVENNQPRNIAIYARVSTEHEAQLYALDNQIDWYEIILQSHPNWNIIHKYIDRGITGTSATKRPQFMQMIKDAESKEFDLIITREVSRFARNTVDTLQYTRQLKKIGIEVYFVEDNIWTFDADGELRLTIMATLAQDESRKTSLRVKAGQRASMEKGVFFQNGSILGYDKIGNNMVINPEQSATVKLIFDRYNSGMGVRKIQWELESLGRKTAKGSTKWTASVICRILKNKFYAGYIVWYKQFVPDFLEQKKINNHGEKEQFEVLGSHEPIVSLEDWELAQRRLEQSSQIVNKGRKVGAKPKTGLWTNKLRCSCGRSFNRKIWHKDKKDGSIQYGYQCYSSIKSGSVATRINKGLPLDGICKSPAISEWKLEAMALYIFKDFTFNKDRIIQLGMREIEKALRSVNNNDNKEQINSLKNELDKYNKKIDNLIEMRTDGEISKEQFTAKKKDFEIEINRIEKEIESISDKQDAIKDIPQLLSEFKANLTSMLNEPIVDKVPEYIIDAMVEYILVDENKFTWKLRYPSDKYYLSIDGSKKQHTVSESPSLRQCLTGCNTRNAEQAVNNISFTNDSILILFDKKMVQQYGNLKPTDRIHRWYDIVIEIIF

SEQ ID NO: 9595 - protein, 607 aa, Unknown
  Description of Unknown: Integrase B9596 sequence
  cd00338,PF13408,IPR011109,PF07508,PS51736, IPR036162,IPR006119,PTHR30461,G3DSA:3.40.50.1390,mobidb-lite, PTHR30461:SF3,IPR025827,PS51737,PF00239,SM00857, SSF53041
MEGVLEPAAAYVRGSTLMQKDGYSPEVQRASIADRAPRDGYYIAIEDEDWESGHKVTRKGYQRILDAVRAKKVKAVYVFMFDRWGRDGVEWLARAQELRRLGVILISVQEGKEEGGLISFVRAGMAQEESHKIARRVIGPRRAAAWAGQYMGETPFGYKRLYPEWDGKGKRPAGRLVPDPATDWIVAELYRRYAAGEGSLRVLAGWMQADPRVPPPPGGAQRWNGGEIRNILRKVVYKGCVSYDVHPSGRFERAAEGTAFVRPGTHPAIVDPDLFETVQRRLVDARSHSAYRSQRKDGPPPAVLAGLLRCHVCGGLVIRSHRHERGQYICLRRQRAVDVCASRGYNVDLADDAIIREISRLRGHPWTAQTDRRLTTARRLDDGATVRQALADERARLERHVRRFGDRDDEPTRAERDAHRVVTAEIAVRIEALAARCDEARKTIVPLPDLRMAHELLRHISIRDAAMDCVAKGDGARLRQLIKGWVSSATLVERWPDINSTWLRFEVDWSPVARALMGAGLLTLEDAPGHPEPDSDAAALAREEVARRHRESALRWYHETKKPRLLADPIAHEAAREAGRQSSRRLYQRRKQQERPKDTEENETSPL

SEQ ID NO: 9596 - protein, 607 aa, Unknown
  Description of Unknown: Integrase B9597 sequence
  cd00338,PF13408,IPR011109,IPR038109,PF07508, Coil,PS51736,G3DSA:3.40.50.1390,IPR006119,IPR036162, PTHR30461,PTHR30461:SF3,IPR025827,PS51737,PF00239, SM00857,G3DSA:1.10.10.2600,SSF53041
MEQMFSSPSSIKRVCAYGRVSTKHEEQESSLETQHLLFNRWIETHKSQGYELVNEVYEQKTGTLVTKRPKFQQMIEDAKQGEYDCLLFKDSKRFSRNIEDFLVIVRELNVHNVQIIFITEGLVVSNETDRTNLALLGAMSENYSNALHSNLQTSLRMKFNSPLGRVPGDVYGYKRVKGDSSQAIIIPEQAYIIRELFNRYADGEGIASIAQDFIDRDIRTYRGGKMSMFALRRYIRNPLYKGLLVMNKYSKPSVRDKRVQNNSEDWVYRERPDLQIVDTELWDKCNSIMDKNKKKMDEYTNGKIGYKPNILSNKLLSKVVVCGCCGRNYNRKESHHKDSSKRYIYLMCGYKKYNKKNQANLQVCTNEQVIRLDYMTKILSEVIKSILESSDSLEDQVQAKIANILKERNRKSDSLSTEKSLKEAEERLKRIVELYKDGLVGKDEYREARDKVKELKSLSNVHSVQISKEMIHELTDKFIGNLSNIISESLVDEGGVDTKAFNRLFDKIVINDGQMDIIFKALGSKQVEPIELKLADLQNVQVFVPIVDNQLSSCKSLVQREKRHKKAKWTADRTSEFIQLGSEDFNGKLTNQVIIGKRKMKIRVYIV

SEQ ID NO: 9597 - protein, 606 aa, Unknown
  Description of Unknown: Integrase B9598 sequence
  cd00338,IPR011109,IPR038109,PF07508,Coil, PS51736,IPR036162,IPR006119,G3DSA:3.40.50.1390,PTHR30461, PTHR30461:SF3,PS51737,PF00239,SM00857,G3DSA:1.10.10.2600, SSF53041
MKRKIAIYARVSTEHEAQISALENQIQYYDEILKKHPEWELYERYIDEGITGTSIGKRDSFLRMMSDAKDKCFDLIVTREVSRFARNIVDTLQQTRTLKQYGVEVYFTDDNIWTMNDEDGELRLSIMATLAQNESKKTSMRVKAGQMISFKNGVFYGNGNILGYDREGKNLVINPTQALTVKRIFELYLQGNGIRKIQFIMEQEKRKTSLGKTKWSASNIARILKNPFYCGRIEYRKQYVPDYLTQKKINNHGEIERVITKGTHDPIVSEEDFDKVQEIFKTKTTKKDNKKYGKPLADNVWVRKLKCKCGHGMNRKINYVSKITGVKTYSFQCHDQIHTGTIKTRLKKGLSIDGICDNKSFPEWKLEVQADFIFRKLLSNKQEIYETAIEMLESSVAVDTHIQDKKQKIENHIQSIDKLRARNDMLLDMCTDGDISRETFKKKTELNNQNIHELEEKIKLIRKQIKENDTQEDLNKRIECLSAFLKMKCFSKKEKIPESIIEKYVEKIIFYKDDFEWYLRPTIGNVDFLSIDAKNMKKGTHELEKTMCYVPSSTGSDCRRRKIDKRKYFYFTTLIVTRDDVNEYMKYHAEYTKANRFKDIVCKIYI

SEQ ID NO: 9598 - protein, 604 aa, Unknown
  Description of Unknown: Integrase B9599 sequence
  cd00338,PF13408,IPR011109,IPR038109,PF07508, PS51736,G3DSA:3.40.50.1390,IPR006119,IPR036162,PTHR30461, mobidb-lite,PTHR30461:SF3,IPR025827,PS51737,PF00239, SM00857,G3DSA:1.10.10.2600,SSF53041
MSKNGTKPAVGYIRMSTDKQEDSPARQRRDIEALAERLGYRTISWYEDHGLTGTESANRPEFRRLLNNAKGGKFQAVLLSEQSRMSREDVFDAMVHWKLLRDAGVKIVTCQRGELDFSNLGGVITAIVDQYGARDESVKLAQRVASGQRLKAKQGQRIGGIVFAYDRDVFDDAGKHVKRIHFRDRFRKPPTWRTKLVPSDDHNAVAGVQWAFDSIRQGQSIGYVMKGLNKRGLTTTHDNPFTFTTTINLLTNPAYAGVLRVGKYSRGKFSSVAEDGMIVVENAHEPIVDPEVFEQVQQVLLDRKSRTPRARPEQYVLSRIVTCQHCGIRMYGVRRSKRDKHVAFYQCNPSPGVMPYSPNCPHPAVRADRLEAFVLEMIRERLLDTGVEQQIRDAILRAKRKDATKVSRDERRLGDLRRKIDRGTENLALADRDDFLAISKLLTRWREEEAELVEQIERRGRELEPLPDALRVLARLSEVPGNLAKADRAKLAHAIRQTVASISIGVRDATSGEIAYRELHGELQFHEAFGLRPIAIPDEVIGQRRIWREIGELARRAKHPIRLADVCELIGSSCPSRACHNMRRAEAAGLVRKVGKNGGWVSAK

SEQ ID NO: 9599 - protein, 604 aa, Unknown
  Description of Unknown: Integrase B9600 sequence
  cd00338,PF13408,IPR011109,IPR038109,PF07508, Coil,G3DSA:3.40.50.1390,PTHR30461,IPR006119,IPR036162, PTHR30461:SF3,PS51737,IPR025827,PF00239,SM00857, G3DSA:1.10.10.2600,SSF53041
VTSTRKPAAKNSALRLVDDVMSGAVATGSNACAIYNRYSTDLQDPRSLVDQETQNREQAKRKQLSVHGIYNDAEMSSRTLHGRTGYARLMDDVRAGKFRTIIVESMDRLSREGGSIYTMFQTLQHYGVEIIESGNGGKVITLTEIAVYALTGTFFMKTLTEKVRRGMTGRVKDGLVMWKPPYGYRFKQGEKKLEVVTEQATIIVRVFNEYAAGLSTRSIAERLRNEDVRSPSGKPWTHEAIMGGMSKALGGRRSGIIGNRTYLGQLHWGVGRYSLDPATGNRVARPPTEEPLVIDAPELRIVSDDLWRAAHGRADARAAKNNIVGLKDRRVRQAISRNDRPLADLVHCGGCGAHMILAFGRGDGRYRCSSAHKGFGCSHGKSYDTKTVQSAVREYLSDKFNDPDVIKIQLKAFTDGWNDHAADARKKLGKTQKRLAGIEAELTRVQTGYVKGILAEEDVKRIAQPLMVERAHLRERETSAQSDIKPIGLHPKAFDYCQTFIRQLPADLDDMSVDVRMAFRNVVGRVVVKETAPRAPYDVEVELFSEALTGGFNLTPQAACHTKLLAEQGLAKSDNVGSGSPQPTLSYQRPRLVSLGAWRERRAA

SEQ ID NO: 9600 - protein, 603 aa, Unknown
  Description of Unknown: Integrase B9601 sequence
  IPR038109,IPR006119,PS51737,PF00239,G3DSA:3.40.50.1390, PTHR30461,IPR025827,SM00857,G3DSA:1.10.10.2600,SSF53041, IPR011109,PF07508,PS51736,mobidb-lite,cd00338, PF13408,Coil,IPR036162,PTHR30461:SF3
VDIFSTRQLLRTMSIYDIPLRVTFYARVSSESDEQLNSLGNQVSYYENLIKKNSAWTFVPGYIDEGLSGISTKKRENFHRMVSDGKDGLFDLVITKEITRFARNTLDSIQYTRQLLSYGVAVFFQNDNINTLDEDSELRLTIMSGIAQDELRKLSSRVKFGHQQAIKSKVVLGNSRIVGYKKDNKRLVIDDEQAPMVRLLFEMYATGEYSLKQLENILWDKGYKNTKGNKISHVTLSNIISNPKYKGYYVGNKVKVIDMFTKKQKFLPKEEWVMFKDETGEIVPAIVSEELWDAANQVLNKRSADVKARQGICNHDNLFTGKIFCTCCNMPYYRKESQDRDGNKNSRWVCSGKIRNGKQSCKSFAIYEKDIQPLLYDVFKDTKADADQIINEYIRLYSEMTKNSEIPNLIAEQEKIVTNAKRKKDKLLQLNVDGMIDDADFRSMMSECSKEMDEARIKIVELKEKTYDSDSFNEKVKEIRRILMDAQKDAGSGVIDKQFVDKYIDKIYATPINDSSMRLEIKIFTGEVTEMLLSKLKGSTGNTTDESQKPDKSPENTGDSDDDDSMGNTFLNKIPIRTILRIATGHYVNGKLSSIEYGASIRT

SEQ ID NO: 9601 - protein, 602 aa, Unknown
  Description of Unknown: Integrase B9602 sequence
  cd00338,Coil,IPR036162,IPR006119,PTHR30461, G3DSA:3.40.50.1390,PTHR30461:SF3,PF00239,SM00857,SSF53041
MLPTHSPVPMLAVAYSRWSSASQTTGTSMARQSADPEAYCRARGWQLWDGKAYSDAGVSAFAGDHLADGDLGRFLADHRAGRFGGQPVALLVEDVDRFSRSFPLAVLPVLTDDILNAGITLSLLSYDRDYSRESIRANPIELQELLMRLSAAHEFSERLSRRVAFAHDQRCQQIRAGRPVAPGQAPSWIDLGPAGWRFTSYADVVRRVLELSLHQGATTIARLMNQEGVPSPGAVIAARQGRARPILWSYSTVEQLITSPQIHGARPMRAPGHAAALRAWKEQVAQARRQGIPPEQWPARPRQQWAEPQPGYFPALLTPDEHADLLSAIARRRPKACGRTDQHRWIGATLTRCVCGETMGATGTTSSLSQGQQRRYLYLRCRGVGRGNRCTSPMVALTMAQSALLVRLTGDQFAAMLEAAAGGDRTQALAQAIARQEATDRRVHQLEQQHAAGEQALADEADATVVAVLARRAAALDVKLADARRVLAEARSDVAQLQAAPSLTALGAEAREQICTVLARFAGGADTVADRRMVWAHLRALGISIVIDAAARRMGLAIGDGEPDWQPLDRELAGEALGQGATGAVFFAGDEDGLGAGVEWRA

SEQ ID NO: 9602 - protein, 602 aa, Unknown
  Description of Unknown: Integrase B9603 sequence
  cd00338,PF13408,IPR011109,IPR038109, PF07508,Coil,SSF46955,IPR009061, IPR036162,IPR006119,G3DSA:3.40.50.1390,PTHR30461, PS51737,IPR025827,PF00239,SM00857,G3DSA:1.10.10.2600,SSF53041
MITDSKRRDARRKRVILYLRMSSDQQDTSIDIQRQRLQDRLAKENVEIVGEYVDEGCKGWDDRRQHELALKAIERGEADAVAVYQQSRFTRKKPLKAMADFARLEEVGAEFFTIDNGWVSLDDIGGLVGVMVKSHQDHQFCHDLSALVYDGHRDVAEKGLHVTGRPPLGLAVNDDRQYILGPTEERRLVRTIFDLYERLGSLRQLVIELNGRGKRTRDGAKWSRATVERLLKNPKLKGVYVWGAEANPKRENRKFRKRREPILKRTNHPAVIEPKQFDRVQRKLTRNKRQTTPSGARKLFTMTGLARCGYCGAAMHGTSLRNQLKSLRYACRRHGSEGSCPGCDHSNSVRQGDLLDVVITLLEAHFLSPDRLDAYRERALEFLQAEFVDPKELKARAVRLKTQVRRAREEYEDLVEESDDRDEVRSARQRWRNKKQELAEATAMLESGCIDEAEIESQVDAELAEMTADYSEIRRAFDEEDTESLRRLFADLIADEGLRVWAGHDGDAPKGSQYWIEKVEVDLKSRSDLSQSITSPGQVWTLSVTPERLLGSDDVIEILDVSRRTFARWMERGWLSPVERRQTGRPLKFRHAEVMEAARLHG

SEQ ID NO: 9603 - protein, 463 aa, Unknown
  Description of Unknown: Integrase B9604 sequence
  cd00338,PF13408,IPR011109,IPR038109,PF07508, PS51736,G3DSA:3.40.50.1390,IPR006119,IPR036162,PTHR30461, PTHR30461:SF3,IPR025827,PS51737,PF00239,SM00857, G3DSA:1.10.10.2600,SSF53041
MARNITVIPAKEKKIATNAPLATSHIRLAAYCRVSTDQEDQLHSFEAQVQYYTDYIESHKEYDLAGIYADEGISGTNTRKRKDFQRLIQDCEDGKIDLVITKSISRFARNTQDCLTYSRKLKALGIGIIFEKEHINTLDASGELLFTILSSLAQDESRNISENCKWGIRSKFKKGEMHIDASTFLGYDKDDNGKLVINEEQAPIIRRIYDEFLWGKNPQQIAADLERDGIKTGRGNTKWHTTTVISILTNEKHKGDALLQKTYTADFLTKRQVKNHGEVTQYYVTDSHEGIIDKETWSAVQEELQRRTDYMEKHHLQKYSYGDAWSPFIGRVYCGKCGDSYGRHSWKTRNRVQWQCKNHRDSGVLTCDNRHVFESDLEKGFVLAFNAIYSDKDAFIKAKEEQVATGSPLAKVRARQMIELIGQPPLEGFIPEMAQLIIDEVIILGAKEYKFRFLDGTVKKMKV

SEQ ID NO: 9604 - protein, 601 aa, Unknown
  Description of Unknown: Integrase B9605 sequence
  cd00338,IPR011109,IPR038109,PF07508,Coil, PS51736,G3DSA:3.40.50.1390,IPR036162,IPR006119,PTHR30461, PTHR30461:SF3,PS51737,PF00239,SM00857,G3DSA:1.10.10.2600, SSF53041
MRTDDSKKRNIVIYARVSTEHEAQIYALDNQMDWYDIILQSHPNWNIVAKYIDRGITGTSATKRPQFMKMIEESTDGTFDLIITREVSRFARNTVDTLQYTRQLKKVGVEVFFVEDNIWTFDPDGELRLTIMATLAQDESRKTSIRVKAGQRASMEKGVFFQNGSILGYDKAGNDMVINEEQAETVRMIYRLYNSGMGIRKIQFELEKAKRKTAMGKYNWSCSVISRILKNKFYAGYIIWYKQYVPDYLEQKKVNNHGQKEQFETVGTHEPIVSLEEWEMAQKRLASSRVENGGQSNVKQGVDIWCRKLKCICGHSFNRRQWHKDSNNGKKYYGYQCYSSVQTGTVKTRLNKGLPIEDICTTPTVSGWKLEAMATMIFKNLVVNKDGIVELAVNELNKHLKCDEEHKDVILSLRNNLDKYNKKLDNLIEMRMDGEISKQIFAEKKHAIELEIANIESQISEIDNTDEDTLSISDRIDLLKTCIEELLDYDIEDKVPDFIIDSMVECIIVDDTTFKWKLRYIPDQITTTINGTRKNHEIHLIQPNNSPYFANGNTGSNTQSAVNSIKIADILFTKELAMKYMNKRPQDRIHRWQNLSVQIYI

SEQ ID NO: 9605 - protein, 601 aa, Unknown
  Description of Unknown: Integrase B9606 sequence
  cd00338,PF13408,IPR011109,IPR038109,PF07508, Coil,PS51736,G3DSA:3.40.50.1390,IPR006119,IPR036162, PTHR30461,PTHR30461:SF3,IPR025827,PS51737,PF00239, SM00857,G3DSA:1.10.10.2600,SSF53041
MPQKFKIDLSMLTPEEQQQFRDDPTTLTKGEVDVALYLRFSSERQKEQSIEGQLRDCIAYCKRKSFRIVAIYVDRATTARKDVEKRVHFQEMISDSAHHLWNFVVVWKLDRFARNREDSAVFKMRLRKNGVRVKSATETISDNPEGIILESVLEGIAEYYSADLSQKITRGLRESAMKGHCVGGHVPLGYKIEDHRLVINPETAHIVQEAFQLYANGESVAEICRIFNGKGYRTAKNSEFNRSSFKSIFKNVRYIGTYIYKDIEKENAIPAIIDKDLFETVQRRLSLAADAPARGKAKVDYLLSGKLFCGHCGAAMHGESGTSKTGAIHNYYTCYSRKRRKGCNKKPLKKDFIERVVAKDAMALLTDDVIEELADMAMSQADRDLKENTRIPELSARLTEIEQGINNITNAVEKGIASDALLNRLTELEKEKKDLTSQLREEEKYIYRIDRDQVVFWLTKFQGGDIEDEDCRRRIIDLLVNSVTVWDEPDGYKITTAYNLTSCKTKTFRVSNNADSPSGGGFGFGELSSTKAEPDEPRGRLALLLSLQSIWSAESSFWSVRSTRKNKKEATAQDCSCAVASLCFFIAITDFVIIYQNPARF

SEQ ID NO: 9606 - protein, 600 aa, Unknown
  Description of Unknown: Integrase B9607 sequence
  cd00338,PF13408,IPR011109,PF07508,Coil, G3DSA:3.40.50.1390,PTHR30461,IPR036162,IPR006119,IPR025827, PF00239,SM00857,SSF53041
MAQKLYSYQRWSSAVQADGTTKARQTKSAEEYAQKNGLEIEEIVDAGVSGFKSANTNENGALGQFLRAVDEGLIACNSVLYVEALDRITRSEIDTALELFLGILRRGITVVTGMDNKVYTREAIKGNPVDLLTSILMFSRAHEESKTKQNRTNGNALALIDRFIKQGLPVNIKSIGSHPWWIDDSGSMYEAVKTHPVLWACAQFAIENFMEGLSVFKVTQMLNEKFPHYYKGKAWAMANIRKLRINKAVYGVREVTVGGKTYVLPNYYPALITEGQFLRLQQIRTTTKYIGKVGEGRVVTNADGSTKIIAEKNNINLLAGMKLFRCGHCGGTMMAMRHGDTIRYLCEKGRGNNHDCKTWSMPGMLVEHTLMLVTTIAYMDLQKKGQGDKADYTQQITAMESTISGYSIQINKATKLAIALDDVDVDELADTIRELKRKRDNAIIELEVLQRKQLLANDSTFESTMMDFFKYVQYKVIQDPLHEYRSKLRDVVYSAIGDVRAWKHDRRLFISFQIKGNEGYYNFSAGNTPYDWGCYVGALPFSQHELEVANEEVPEHALDRVRERYAELHAVNMMMLRHAKELLSHVGYPELDSKMFWPRK

SEQ ID NO: 9607 - protein, 599 aa, Unknown
  Description of Unknown: Integrase B9608 sequence
  cd00338,PF13408,IPR011109,Coil,G3DSA:3.40.50.1390,PTHR30461, IPR006119,IPR036162,IPR025827,PS51737,PF00239,SM00857,SSF53041
MTKKRCVIDNSQGAIVGYLRKSDVKFPAKSTVEERRKIVEDLKRFRTSELIQDAANAGVGPITEWYCDMDISGTGKYLDKRTDFLRMTQRAKEGKIRVVVTRDLSRANRSLVNNEIWIEELKRCNVQLIAEDLPQTGSESVNKLSRRNLGAFYEFMAERTGELIRSHHFTEVSEGRWVGRTIDMWGLRYNPETKGYDYDPFTADRAIFVYETFNTCLGVAGATAREMNRLYQENAPRATLSPRGSEWATDMVLDFVRLSVYRRKAYYTLWADIGGRRERESSISVDMPHLIPEVIPPDIVAETDRFLEERAPWREELQQRQKAGRLEHTYTGLLKCGDCGANMVTLKNPDGRGGKGEIRWVSWLCQNAAMGECVHPRKISTQQYRLDALIKRAILLAFDLSKEEQQAKKRPARSRVARGTENMDRQLAEIDRRIAAAEQMYEGGSIGYTWEKLQSRLGQLTEERNRLLALKTVDEPEKISTATLTPKQWREMRERIDLIWDSDEICFDKSKSAYLRTLGLRADVVVSVRAPKRRRAGNERQYPGPVTVRVHVEALGRTDERAIEISETEEEFKAYAHWRASFGNMGGRPRKKPVGISDG

SEQ ID NO: 9608 - protein, 598 aa, Unknown
  Description of Unknown: Integrase B9609 sequence
  cd00338,PF13408,IPR011109,IPR038109,PF07508, PS51736,IPR036162,PTHR30461,IPR006119,G3DSA:3.40.50.1390, mobidb-lite,PTHR30461:SF3,IPR025827,PS51737,PF00239, SM00857,G3DSA:1.10.10.2600,SSF53041
MRKINKIEPLMPTLPSRKKVAAYARVSLETERLQHSLSAQVSYYSELIQSNPEWEYAGVYADDGITGTKSTRAEFQRLLQDCEDGKIDIILTKSISRFARNTVDLLETVRHLKELGIEVRFEKERINSLSGDGEVMLTLLASFAQEEVISLSNNVKWGTRKRMEQGIPNGHFRVFGYRWEGDQLVIVPEEAAIVRRIFQNFLDGKSRLETEREFAAEGITTRDGKRWVDSNIKVVLTNVTYTGNLLLQKEYIEDPLTKKRKKNRGELPQFYVEDTHEAIIDKETFDYVQAEIARRKELGAFANKSLNITCFTSKLKCCHCGCSYVRNQRSNRTKHTSTYDDTIVAWGCGTTKKKGGRCSNKDIPERVLREACATALGLDEFDEDIFLERVDHIQVLEGQVLEFHFYDGTTALQEWVSTAKKDCWTDEHKDRQREWMKNYMANASDGRFCEFTTRIRCEHCGSTFRRNTQPSKSANGGKMHYWRCPTSGDCVTTGIREDRLKDITASVMGLAEHDADAFKEQVEYISVSDDMKLTFHFFDGREPVVQYNTKRQGTPWTEERHKKFSESMQGKYTEERREAMSQRMKQIRSEKHWSSKRK

SEQ ID NO: 9609 - protein, 597 aa, Unknown
  Description of Unknown: Integrase B9610 sequence
  cd00338,IPR011109,IPR038109,PF07508,IPR036162, IPR006119,PTHR30461,G3DSA:3.40.50.1390,PTHR30461:SF3,PS51737, PF00239,SM00857,G3DSA:1.10.10.2600,SSF53041
MTATRPGQGTAGIQATTGATSLYGGLEPAAAYTRISDPRKQRDNHSVEVQRAAIERLAAQLGCVVIQWEQEERKGRHIDRGGYQRILETARRHEITRILVFSFSRWGRGPLERVMRGDELDKLGVELWSVQQGRDKPGFMRYGHAGIDEEAVRQLAANVRPARRAAAESGTFMGPTPRLGYTRLYPAWTGAGKRPAGELVVDEATAWIVRALYARYDPLHEGHARGAAVSCRSLARWMNTDPRVPAPRECAAWADHHVRAVLRSVVYKGWVSYDKTPQGAYERAALDGSDYYAGPGRHEALIDPAQWQRVQERMDTIGHAPGQARRRHVWLGADLLRCAGCGAVMRANVPATIPHHKGSYLCRTRGRGTGACATPGYRMDLADAALVAQVARLRGRPWTREAARRLGEARPGQRPADVSRIQRDITATRLTLRDQAAALAALGADIDPAAISAFRALAAETGARLAALDEQRALATRSAPPLADLRALYTEVTRQDLTVGLARLDYAHDPEDRALVRRLLTRLVASAVVVERRPERHARWLRVEVTWTEGVRDLLDAGLLTLDPAPEPPVFATPMELRTAAQRRWRERKQTGAIAEE

SEQ ID NO: 9610 - protein, 596 aa, Unknown
  Description of Unknown: Integrase B9611 sequence
  PF13408,IPR011109,Coil,PS51736, IPR036162,IPR006119,PTHR30461,G3DSA:3.40.50.1390, PS51737,IPR025827,PF00239,SM00857, cd03768,SSF53041
MAPKQSAAKRRVHLVPLSPVVRASQDVPYGRVSSDIQHDSQTIETQKRILRKDITSRDDPNLPVGEQRKLVDEFWDDPCSGTIPFEDRPEGKRLVRSICARGDIDCDGSCGGTGIVIDTVWVTKLDRLARRLLILIEIEKFLRLHRVGLKCLEHNIDTSSPTGALIFTILGAIAQWEHGVILERTANGKRTKTVEGRHMGRKSLGLKTDEQGYLVIDDALVGQTGKMAYQIVQEVFANIIDGSSIEREAERFGITPRRIHLMLHNPRYRGEGGMYWDGNWIAAERNKPPQLVSPEDWELAQEKLADHKRFAARNRKREYIVSSLMICHEPKDNGTPCGRVFVARTAKGKYAYYCCYRKGCTAHPIRGNDVETAVWTAVRERLVNPDAWLQRALEQGGQTDKVRELRSELSVVIDKLSKLSTQRLSVARQTDEGVYTEEESRARQAEIREQVESLTDRKTTLEIQLRLVNKSQATLRRSGLQSVDIGPELDRIEAWCESSDPEEVHRGRTQKTALIRSRIERIEVRNGSGGQRLTIFWNEDEHADELSLTPRGSAQALCNEQPILIVTELDLPAPCGQGRRTDLETLSSEEASGILA

SEQ ID NO: 9611 - protein, 596 aa, Unknown
  Description of Unknown: Integrase B9612 sequence
  cd00338,IPR011109,IPR038109,PF07508,Coil, G3DSA:3.40.50.1390,IPR036162,IPR006119,PTHR30461,PS51737, PF00239,SM00857,G3DSA:1.10.10.2600,SSF53041
MKAVILTRVSTKEQEEGHSLPAQNTRLSDYAKRKGLEVIKTFQIIESSTRGKRKEFMQMIEFCKQQTETIAIIADAVDRVQRSFKESVMLDDLIRQEKIELHFFREGMIIGKKSSSTDIMRWDFSVMGAKAYVLQLSENVRRSLDYKLKNGERAGVAPCGYENFTDENGKHSIRPKEPDATKVRRLFELYSIGGTSAHQLARIANDWGLTSYSGRKLTTTSIFHILGNPFYYGEMLAKGKLHRHVYEPLVSKTLWDKCQEQKALQGAKPFKHGELPFLYRGVFTDYYREIVCPCEVKKKKFIYVVCYKENGTRLYIPEHEIDNQIISILNRIAIPEEMIQHFKEHIKEAKEAEIAFRDTELARLKAEITKIEGRLEKLFNMRLDDEIDKQTYEDKRDEMNLKKSRLEKEIKAHGVADDGFNEIVLDLFDLVNHVGDAFSMGKSIENKQLLLHFIFKKLVLKEGNVGYELNPPFCYMEIDTDFKSGGGSCEPSGNTGFSTDSVENSGLQKMASANRVFSCKNNGLQSKLQPVFSLAALAGQSSNDIITRLRAHRAEVLAIKEQLEFVLIAHDARPYFAFLTFVVFQFNFVHYHFLSK

SEQ ID NO: 9612 - protein, 596 aa, Unknown
  Description of Unknown: Integrase B9613 sequence
  cd00338,PF13408,IPR011109,IPR038109, PF07508,G3DSA:3.40.50.1390,IPR036162,IPR006119, PTHR30461,PTHR30461:SF3,IPR025827,PS51737, PF00239,SM00857,G3DSA:1.10.10.2600,SSF53041
MKYEDPKRYRQWNVEDLVMVTEEQHRKLHGKQFLEDVRNRTMRAFVLCRQSGGVNDPEESLSLDVQEAACVKLAEDRGITVKGIFKEASTSGRLYPVGFENIAAQDMIYNQWCGETKKIGQYRKGLGEILNRLNDVDYIICYDITRLYRPLNGSYLSNIVNQLLQFNKVKVLTIKEGEIDFSRFQDTLISSLTSQINSEQLLIQREKAKAGQKRIKDNGEYYAGFSKTIGFTSTGKKNIVIVEHEAKVVRKIYYYFLVDGLSLNEIVRRIGSEYPDVFPKCWTNTIKNILSNPIYAGYMRNSEGELIKSKQTNGIVSLDEWMNVDKILSARKLTNYRHKTTWLPLTPFVYCGQCGEKMHAHKGANEKNVYSCRRHLRDGKQPCKNTIMVSFDLSQGNGLIETIKPLLLAEAIKRMHKEDDEKIKTSLNEIDLALADIKKKAQKFTEMYTASTMDESIYENAMKELKTKEGSLIRRKTELEMSLNGDTSQFDWVKLMMKFKGDSLTEAEYTLLASSMLKKILIYKDFIEVKTAYGDVTIPRQRIYKWRLCLNYDLQMKKKEALIYYYHGKARIISAKERESAKMFAVLSNVKLFSID

SEQ ID NO: 9613 - protein, 595 aa, Unknown
  Description of Unknown: Integrase B9614 sequence
  PS00397,IPR038109,IPR006119,PS51737,PF00239,G3DSA:3.40.50.1390 ,PTHR30461,SM00857,G3DSA:1.10.10.2600,SSF53041, IPR011109,PF07508,PS51736,mobidb-lite,IPR006118, cd00338,Coil,IPR036162,PTHR30461:SF3
MAAAPHATTRLVAIYVRVSTDEQAAHGYSLGDQQARGAAWITSQHTPGHPTVLAGAYADEGYSGATRHRPGLRRLLADAEAGRVNTIVFTKLDRLARRLTLLLELWDRFEEMGCAIVVLDESIDTATPVGRLVRNVLGSIAEFERELIAGRMRHGRLAKARAGHVWKAQCPYGYRYLPKEAGIRAHGVLLIDEEEASAVRLIFDLAAGGMAQSAIAAELGRRGVRPRRGGAAWKQGTISDLLRNRTYMGDAIYNQRAAVTPKRPTKDVEQRRREKSAQTYRPEEEWIHVPAPAIVDPAVWHAVAARRAGNVAAATRNAKRVYMLGHGLLRCGVCRPDPADGRRLSMVGHMRRAWYRYECSDAWRTGRVAGDTGDTDETTVCKHYVAGPLIEERVWAAVMEMVAAPALLAHDPAPDGREGEASAEARVGHPADDGAGLRLAAVRRQHDLLVDNLGQATTPAQIAAMLTQIEALDHRRQDAERAAIAEEARRQDAAAHRAAAALARDVCRDIARTAVAAPPAERAALLRVLVDEIVVYADHADVRGALTRGAGHPLRVQLQREAANNSITGREVARIGGGADGVLGEERAVRGDVGR

SEQ ID NO: 9614 - protein, 594 aa, Unknown
  Description of Unknown: Integrase B9615 sequence
  cd00338,PF13408,Coil,IPR036162,PTHR30461, G3DSA:3.40.50.1390,IPR006119,PTHR30461:SF3,IPR025827,PF00239, SM00857,SSF53041
MYAFHDTRLISIAVRSHTAVSASFRQIPIHLTVMVTASVVKVDKMNNSQITFPPGSSVVAYLRDSGGDEQDLSVAQQQNVVEKWCTEHNITLSRVFSDVATPGSSTIGRSAFKQMISHFHNVNCADKGVIIWKFSRFSRDIDDAQFYRADLRRRGYIVYSIQDNIPDTTDGRIYEALLDWMNNKFLEDLSVDVKRGLHHIVREYGAVPGTPPRGFKREITTIGIRRDGSPHKVSRWVPDPEWWNICRRAWELRSTGVPIRQIHKELHIFGSMQSYTTFFTNRIYLGELHYGEITIPDYTDPMITKEEWDAVQFLNRKNSVEYDPMKRNQNPHHPRRISSSFLLSGLIYCVRCGSLLNGEVLRFKNGQYLMYYHCGNAHRNLDCNARRIPKAAIEKVVIDRLREYILDPALIAERDREYAIAHSGERDKIHEEQKKVKYEISELQRKMDNISRQIADDPSPSRTLMTLIKELEQQEQKKIDELERLRSIENRETVFIGSPANYARLSEKFTTELVSGDPERIKLILRGLIDRISAERDGDYIRGMIYFFNPELGEDNSTSSDELYMSMNQSHRRGSSYTHINVYNVDFCTTLPHK

SEQ ID NO: 9615 - protein, 593 aa, Unknown
  Description of Unknown: Integrase B9616 sequence
  IPR038109,PS00397,IPR006119,PS51737,PF00239 ,G3DSA:3.40.50.1390,PTHR30461,IPR025827,SM00857 ,G3DSA:1.10.10.2600,SSF53041,IPR011109,PF07508,PS51736 ,IPR006118,cd00338,PF13408,Coil,IPR036162,PTHR30461:SF3
MARKNPKTLDAARLLSCVLYIRVSTKLQVEKGESIDAQRFELTRYAENHDMRVLGEYVDAGFSGKNVQGRPQFRQMMDDIIKAQPSKRPAYVLVFKLSRFGRNAADTWNSLQTLQDYGVELCCVKDGIDSGTSMGKAMLSIAAVFAEMERDNIRTQTMSGREEKARKGYWNGGQAPFGYRLVDKGNKFKELEVDEDEAKVVRRIFEMYACENKGSMAIATWLNNHGIKKKPRGNARMDTFSSGTVQRMITNPVYIGKIAYGRRRTETIEGGETHVVKSDGYEMHDGQHDAIIDDATWAAAQALVGTRKPNMKTHDDGHVNMLNGLLVCPVCGRKMSSKPNRGKLKKDGTRGKTTWAYYCPHTSKARGASCTFKSQYPQECVDAEVVQLVSLASRSDAFVDALRRRIDDATDIEQLKEDIERIEGEKAANDKRMRMLMTQIDSLDPADRSYERKFNDLQRRLDDLYDRDAGLSDALEEAQAKMTTAEKRMDGERRLLEELDRIPELLEGADEQTRFDLIHEAVSEVHILPDKNPRKERVVANVTFKCPVRFFWEEIPGVANAYTPMTPDSLGENDFRDDEAHVETIVLLQRETL

SEQ ID NO: 9616 - protein, 592 aa, Unknown
  Description of Unknown: Integrase B9617 sequence
  cd00338,IPR011109,IPR038109,PF07508,Coil, PS51736,G3DSA:3.40.50.1390,PTHR30461,IPR006119,IPR036162, mobidb-lite,PS51737,PF00239,SM00857,G3DSA:1.10.10.2600, SSF53041
MMVRTYRRRSKNDEGKQQFSLDVQAAGCDELIARLGLADQPRKDYVDDGRAGDDFLTRTGLRQLLADAQRGDVIVCRDQSRLGRDAIEVTLVVRDLVHDRGCRLYYYATSQEVQFANAIDQATTFIQGTGHQMELEAIRSRTREALRSRVRNGQIAGGACFGYKLERKSDAAGRKHTIAIVHEAEAPIVRRIFAEYLAQRGIRSIAHQLNAEGIPAPAAGRRGSGSWAPGAVRTILLNPRYRGIYVHGRIKKLRQGSGVVRVKAEPHELITVEIPEWRIVDDETWFAVQSRFTTRGPQPRSAIANGAKYALSGIARCQCGGAIVCTRVRAPRGSRCVKTYSCHRNHQRGSAVCPITIHQPIEEVEGLLLDHLRDHVLNDEMIALVLDEIRAEIKAQIPQREADLAALEAELSAVTTEQKRLARAVAMSDEIPELMTELKQRMSRMKNLEAQIAAARRTPAELAALSNEVETSVKERLADVRAALADRRDLRDLLLGLFPRGLMFSPARTPDNSRAVWKLSGPAVYKVLSRRTPSGTPFRGGSDNSNYSDGLDGPAEPALSNPSGDPNGIRRLRPTHGDSSEDKRLQWFRRLS

SEQ ID NO: 9617 - protein, 592 aa, Unknown
  Description of Unknown: Integrase B9618 sequence
  cd00338,PF13408,IPR011109,IPR038109,PF07508, Coil,G3DSA:3.40.50.1390,IPR006119,IPR036162,PTHR30461, mobidb-lite,PTHR30461:SF3,IPR025827,PS51737,PF00239, SM00857,G3DSA:1.10.10.2600,SSF53041
MSRNRFRDPEKTLARYDEQDSQKHRPLAGRIAALYERVSGDRQAKEASIETQDSYLRQYCQHHDIFIYDTYKDDPAKSEVPMAERAEGHRLIEDAKRDCFDLVLVHSICRWSRYPDVYKQAQGTMHKLGIDLDCPSEHLSWDSPGESFASDVRLRSSQLVRDIIDKATSDGKYTWAAKGAALGAAPHYGYLPIPAPEWGKNRKRLVIDEQEAAIIRRIFDLLVRQRLSCRQIAALFNQEGVPLPSASPKWDGFRNHVSARKCQGRWSASRVSQIVRDRLFLGQCLYGGTDQRRPVLRLVPAIIDAETFALAQLRLAENSKRSSRNSKRCYLLSGKLRCATCNAAYTGVTENNGTKAKARGWTPRPIYRCQGYQRKFDGQDTQCPFYRLPAVALEDDLWETLVNYLEHYEDRLTELRDEWRNDSQSRGRAACQRDELFRRQRRLEEEETDALRGKSRLGFDLTREQARQILDTVREEKKQLDIKISELDALLLHLDQRQAHVETAEEYIERYRANIREVLDPKMRQEIVAVFLESALVKPGPSGECLVTYRFYTHEALSEHTSIAKAGSRPRFINWCVEVVRILLYGRQRTKG

SEQ ID NO: 9618 - protein, 592 aa, Unknown
  Description of Unknown: Integrase B9619 sequence
  cd00338,PF13408,IPR011109,IPR038109,PF07508, PS51736,G3DSA:3.40.50.1390,IPR036162,IPR006119,PTHR30461, mobidb-lite,PTHR30461:SF3,PS51737,IPR025827,PF00239, SM00857,G3DSA:1.10.10.2600,SSF53041
MPNLRKIEAAVPAIREKKKVAAYARVSMQSERMLHSLSAQVSYYSGLIQKNPDWEYAGVYADDFISGTNTVKRDEFKRMLADCEAGKIDIILTKSISRFARNTVDLLETVRHLKDLGVEVQFEKERIRSMDGDGELMLTILASFAQEESRSISDNVKWGIRKRMQNGIPNGHFRIYGYRWEGDELVIVPEEAEVVKRIFRNFLDGKSRLETERELAAEGITTRDGCRWVDSNIKVVLTNVTYTGNLLLQKEFISDPISKQRKKNRGELPQYYVEDTHPAIIDKATFDFVQEEMARRRELGALANKSLNTSCFTGKIKCPYCGQSYMHNKRTDRGDMEFWNCGSKKKKKKGTGCPVGGTINHKNMVKVCTEVLGLDEFDEAIFLEKVDHIDVPERYTLEFHMADGNVVTKDCLNTGHRDCWTPERRAEVSMKRRKNGTNPIGASCFTGKIKCVSCGCNFRKATRNCKDGSKVSHWRCAEHNGCDSPSLREDLLEQMAAEVLGLDAFDAAAFREKIDRVEVLSSSELRFCFKDGRTVSRNWQPPERVGRPWTEEQRAKFKESIKGAYTPERRRQMSEHMKQLRKERGDKWRREK

SEQ ID NO: 9619 - protein, 525 aa, Unknown
  Description of Unknown: Integrase B9620 sequence
  cd00338,PF13408,IPR011109,IPR038109,PF07508, PS51736,G3DSA:3.40.50.1390,PTHR30461,IPR006119,IPR036162, PTHR30461:SF3,IPR025827,PS51737,PF00239,SM00857, G3DSA:1.10.10.2600,SSF53041
MAQRKVTAIPATITKYTAVPIGSKRKRRVAGYARVSTDHEDQVTSYEAQVDYYTNYIKGRDDWEFVAIYTDEGISATNTKRREGFKAMVADALAGKIDLIVTKSVSRFARNTVDSLTTVRTLKEKGVEIYFEKENIWTLDAKGELLITIMSSLAQEESRSISENTTWGQRKRFADGKASVAYKRFLGYDRGPNGGFVVNQEQAKTVKLIYKLFLEGLTCHAIAKELTERKLPTPGGKAVWSQSTVRSILTNEKYKGDALLQKEFTVDFLQKKTKKNEGEVPQYYVEGNHEAIIDPATFDYVQAEMARRMKDKHRYSGVSMFSSKIKCGECGCWYGSKVWHSTDKYRRVIYQCNHKYKGGKPCSTPHVTEDQVKDAFVRAVNILLSEKEELSVNVQMVIAMLCDSAELEKRQTELKEELEVVVGLVERCVAENARVALDQDEYTQRYNGLVSRYEAVKAQFDEVTQAVADKADRKKLLEQFLHTVEGQAPVTEFDERLWSSLVDFVTVYSEKGIRVTFKDGTEIQV

SEQ ID NO: 9620 - protein, 591 aa, Unknown
  Description of Unknown: Integrase B9621 sequence
  PS00397,IPR038109,IPR006119,PS51737,PF00239,G3DSA:3.40.50.1390 ,PTHR30461,IPR025827,SM00857,G3DSA:1.10.10.2600, SSF53041,IPR011109,PF07508,PS51736,IPR006118, cd00338,PF13408,Coil,IPR036162,PTHR30461:SF3
MTMRKDIDPEARKAALYIRVSTKYQAEDGDSLPMQRDELPKYVQYALGITDFVIFEDAGYSAKNTDRPDYQRMMARVRQGEFSHIVVWKLDRISRNLLDFASMYAELKRLGVIFISKNEQFDTSTAIGEAMLKIILVFAELERNMTSERVTATMISRAQAGQWNGGKVPFGYEYDKASGTFSFNEAEKRIVLRLYDKYETLRSLLQVAAYLNENGLFNRSGIPWNPTTVRLILVNPFYVGTYRYNRLNENQKTFTQKSKKEWVLIPDHHPAMIPEERQNRIIDILSSNDRVTNLHKSYQRKNIHIFGGLIECGACGNLFQSSVDRPRAESGWRPSVYLCSRHRRFKDCENKYVSDITIGPFILNFISNYIRASRNIGKDASLDILERKLLRGDWFPGTRIDRQSLEDIRRSFLLAKYGIDGPEAFQLSQEQAPRPDDREMLAAEVKRLERAMSRLKSLYMFADAQMTEQEYVQENNRLAERLADVNAKLEELDRHPETNPASGGLDDEIFFEQASFLSITEELLSRRFVDYEKLIRTLDKNTLKLFINSVVKKIVIFQGQTLRLELKNGISIKFLYDGQTPDTDKEPVTAL

SEQ ID NO: 9621 - protein, 591 aa, Unknown
  Description of Unknown: Integrase B9622 sequence
  cd00338,IPR011109,IPR038109,PF07508,Coil, G3DSA:3.40.50.1390,PTHR30461,IPR036162,IPR006119,PF00239, SM00857,G3DSA:1.10.10.2600,SSF53041
MSVRAAIIVRLSREDLNQPGSAEEKVARHLAIAQDLAKRHDLPPIQTEDIYTESGISGRRLSKRPDTLRMLDRCRTGYYTHVVTAYQSRILRGDKRDEADVEDAFLDGCITLITSESVICFDDTYEASNALVFEIRAAADRNYLRDISKKLKESNRQRTLLGRRSGGMAPYGYFWKTAAYDQRKQIDAAHHEVVGELEITDLSAAIRYAQSVPELQPFDAAKYLEVARRTAGPDGNLLPGVVCSSGEYAVLCEIFARIRCEGYTQIVRALNQRGIPTAGASRFREGFAAMVWHDSTVRTIIRNFHYSGFPAHTVTTDRKGRKVKLPTEKHILPNEEQMYPHPIRLPDHRALLEQITARATPGSVRPQGPSLLTGLLKCSQGRPCRANSTSYQCRCDRETERHLGSGIRRDPANRVAISVLREALSEMPTSSAPAANQRPQQTSELITIDREIAGKKRDLADLQRHAATFARSGGADAFAATISALRQEIGEAERKYKAILSNAQTRQAAEALSALNKLRGIDFEEFWSAATIVQQRSILRLVIAELRIVPQPDKGRRVRTITITVQPWITPYYNPGAIKLVGTRRKIERHI

SEQ ID NO: 9622 - protein, 591 aa, Unknown
  Description of Unknown: Integrase B9623 sequence
  cd00338,G3DSA:3.40.50.1390,PTHR30461,IPR036162,IPR006119,SM00857
VDRDLGFKAGTIWSFERVSHIIQAKGAGLARQGCDALDWCDRYGLELADERALSDPGKSAYHAKHMRKGSPLDRFLEMADRRLLGTNPVLLIEAVDRVSRMKSRKALEGVFLRLINADVTIVTIEDNNFYNKEKIDGDGAALIMLVLKCQAAHEYSLRLARRQEYNWEEVRKQLASGVVSRKKQNAPCWVSWDEKRQRWELNEKAVAIAKAMELLKNYGYSQTAKVLNEEGHKPMKASMWTASNLSSMIRASHQIYGAVAIKPKGAWKPLKRGPNGELKDGSGKYYDPRAQQGVVRGAAQEPKEIVEGVFPPVLPKREVEEVISIIAARNRTQNRPGPNTKMHWIGRGLTRCVCGGSMSTCVGGHPPNALIRYIACRSRMNSEVCRRPYLPMRDILAIVLSRINLNSLLQLSGNGNAEGEAVNLRSQVDRLVLKKEQVVTERLNIQESIGRAAEIGGPAFDSIFSTLQHRIADKDQEERSVDIQLADIRAKLSRNENPLALEAVETIIEPLKFDLINGTSSQEQRHQANAALKQLGIGIHIDSEALLLGLSIGEGEIDWQPIDFSAAYELLAEGGHSLTTVTTEEGVTLTE

SEQ ID NO: 9623 - protein, 590 aa, Unknown
  Description of Unknown: Integrase B9624 sequence
  PS00397,IPR006119,PS51737,PF00239,cd09607, G3DSA:3.40.50.1390,PTHR30461,IPR025827,SM00857,SSF53041, IPR011109,PF07508,PS51736,mobidb-lite,IPR006118, cd00338,PF13408,Coil,IPR036162,PTHR30461:SF3
MKSKPKAVIYLRVSTPAQMKQDKLSLENQREKTTKHCNDEGFELSHEYMDAGLSGSKDDRPKLQELLAAAKRREFQHVVVNDITRFGRSASDLLRNVNKLRDSGINFHSVKNRLDLASAQGRFFFHILVGMAEMEAETLKIRMGEVKLAKLRLKRIILGKLAYGYRWNDETEQIEVNGKDEDGNYTGEAAIFLRIVKMYVDLNKSLQDIAIAFNKEAIPSREGRKWHSGTLKNFFAQDKTIYCGSTKIKIREEIEGEDGKKTREIVEEVEFECEPLLTRDQWQKIQDRMASGRVDRSGRPMVGADRFILRNLIKCGVCGNRVGPRHITNGQTYYACHWKSAGAKHREENDNHPRCTLPHIPSKKLDQFVYGYILFLLQYEEDPEAESSFYKGLVSDEQYDNRIKELEQEIQIHRDSLARNERGLSNTRKSKEAPGFRDFEGYNKEVNQYLDTIALIKSQIERLAETIKEIRKARADQEQFREIAQSEAIIDIRDKLYDLPNEDRHRLVAGLLDGDIVITPPTPDAKLDRNSTSDIKDWVKFKIRPNMAILQDILGIPGGDDDPGGGIDGGSNNCCSDEQHLLPHAQRVGP

SEQ ID NO: 9624 - protein, 590 aa, Unknown
  Description of Unknown: Integrase B9625 sequence
  IPR038109,PS00397,IPR006119,PS51737,PF00239,G3DSA:3.40.50.1390 ,PTHR30461,IPR025827,SM00857,G3DSA:1.10.10.2600, SSF53041,IPR011109,PF07508,PS51736,mobidb-lite, IPR006118,cd00338,PF13408,Coil,IPR036162,PTHR30461:SF3
MPNVVTYCRVSSDEQALKDLSIPAQRKALHRWVDERDEIELADEFVDEGESAYAPADKRPGFCRMIAYCRKHPVDFILVHKLDRFSRNREESILFKSLLRKHGVMVKSITENYDPETPQGFLYEGMIEVINQFYSMNLATETMKGMRENAERGYHNGGQSPYGYRSERSADASGREHTRLVLGPDEEVATVREIFRLAVDENRGAKTICHMLNKRGVPGPRSPNWSQSSVGNVLNNRVYVGDSIWNKRNSKTGNAKNADDWIVNENTHEPIIDRELFMRRKEMAAQRTFNLRSSPRRAVKYLLARLIRCDHCGGLFVGRRQKKRSRKDGEPYDLYRYRCNTYVTKGKEVCPSIGLHCDWIEGEVIDIIRREICSPERLAALQELVHKKIEARRSRYGKDPRELERKMADIDRRIQNYFRAIGDGVDAKTCKEHIARLEADKAEVEEEAELLRQDDYYRRALELNLSELERFAAAFKDDFRDLPMAVQRRVILHFIEEIRVVDHEVVRVTVKVPFDENGVRHLTDELQVPPDGGGSSALSASSKAGLLFGPARGILDQAEARQEALLGPARGAKFSPDGFAVGWVYWKPRR

SEQ ID NO: 9625 - protein, 524 aa, Unknown
  Description of Unknown: Integrase B9626 sequence
  IPR038109,IPR006119,PS51737,PF00239,G3DSA:3.40.50.1390, PTHR30461,IPR025827,SM00857,G3DSA:1.10.10.2600,SSF53041, IPR011109,PF07508,PS51736,mobidb-lite,cd00338, PF13408,Coil,IPR036162,PTHR30461:SF3
MAKTVTTIPATISRFTSSPINENKKRRTAGYARVSTDSEEQNTSYEAQVDYYTNYIKSRDDWEFVEVYTDEGISGTNTKHREGFKRMLADALAGRIDLIVTKSVSRFARNTVDSLTTVRQLKEKGIEIYFEKENIWTLDSKGELLITIMSSLAQEESRSISENVTWGQRKRFADGKVTVPFNRFLGYDRGEDGNLIVNPEQAATVNLIYSLFLQGMTPFGIASKMTADGVLSPGGKERWNAGSVRSILTNEKYRGDALLQKSYTVDFLTKKKKVNEGEIPQYYVKNNHPAIITPDVFDMVQRELARRGQSRGRHSGIHLFSGRIKCAQCGNWYGSKVWHSTDKYRRTIWRCNHKFKNDEICTTPHLTDEEIQNFYLSALRKLLADKDEIIAAFELAQDGAFDLSALTAERDELQNELLVVSELMHQCINENAHIALDQADYQKRYNGLTDRFDKAKTRLEAVTGEISDKQARQATIEAFLDELKRLDGVTEFQHALWYSLADFMTVYSKDDVWVTFKDGTVIQA

SEQ ID NO: 9626 - protein, 590 aa, Unknown
  Description of Unknown: Integrase B9627 sequence
  cd00338,PF13408,IPR011109,IPR038109,PF07508, Coil,PS51736,G3DSA:3.40.50.1390,IPR006119,IPR036162, PTHR30461,PS51737,IPR025827,PF00239,SM00857, G3DSA:1.10.10.2600,SSF53041
VEQRPGHLRLIVRGTARCPRTGKAGITEMAATTRIHRRDQLDPTSNVRTQLGNDEIVGMLMPSAIIYAHFSTTEQSKGYSLERQQTLGTAFAVDHGWSVEATITDEGRSAFHGTNRLEGSALHQFELEARNGLHRDKVLVVENIDRLSRQGAKAAAQLIWGLNEHGVDVATYHDGTIYMASSSGDLLDVFKLIMGAQQSHLESANKSKRTRDTWTNRFKKMSEGTQKKPVPHTPHWIDKVEGGMKLNPRRTALLNEIYDLYIDGVGIHRIVTLLNDRGEPRWSPEKSERVKNGWFYSYIYRLLTKRTVLGEYVTMDGKTVAPDFYPQAITAEKWNRAQAALGMRKGNQKTSKANFNRNLLQGIVVCEQCGGGAHFRHTTDTPQIYIDRMGLPRSYARKTYRRLLCDRARRKHECDNKTVLNYDVVEATVLNEMLPRLVEKRSETDLVIKLRERIAEQIRLREADQARLANLIDILADGGSKAILARVNVLEAQIEQQTASIESATKELAIERSKPSSDDDVLAIESLRAELTSEDDAIRTYARGRVNMTLRRLIGRIAITNVDTFKIEPDELSSWHFNHEGGMLEGQYIP

SEQ ID NO: 9627 - protein, 589 aa, Unknown
  Description of Unknown: Integrase B9628 sequence
  cd00338,Coil,IPR036162,IPR006119,G3DSA:3.40.50.1390, PTHR30461,PF00239,SM00857,SSF53041
MLGVPYSRISSAGQVSGLGLDRQAAAPRSYCAARGWTLWEGEAYSDAGRSAFDGSNLEAALGRFLSDLRAGRFGPGPVALLVEDLDRFSRSFPLAVLPVIIDDMLNAGVTIAVMAKGRDISRASIRENGMELHELLFWLGSAHEFSSRLSRRLSHVHAVKRDRIRTGAPTAAGSAPCWISLTDGCWQFNSYAATVRRVLDLVREHGGGRVASILNSEGVPPPAAARQQRAGAAARPRLWSSSSVLNLIGQPAIYGARQILAPGYRDEVRAWKEARALARRQGIPADQQPPHPRRQYEPPQLGYYPALLSQAEHEALLLAMRGRRQQQLGRTDLMRWIGGGLTVCSCGAAIVATCSTRSNGQPSSYLRCQARFKGGDCRQPFTPLRLAQAALLTRLAADDYLAMLEARGGASRATAHSQALAQRDAAAQALEQAQAVVAAGEQAMASLDDPAVLVVLARRQAAAALQQEQAQQELAAATLALQQLQGQRSIEALGAEAQQTIRQLLATFSAGAETVEDRRLVHGHLRRLGLRIHVDGQGRALGLQLGGGPIDWQPLDQELAGQALAAGVTGAQFFIGDADGLGAGVEWPA

SEQ ID NO: 9628 - protein, 589 aa, Unknown
  Description of Unknown: Integrase B9629 sequence
  cd00338,PF13408,IPR011109,IPR038109,PF07508,Coil,PS51736, IPR036162,PTHR30461,IPR006119,G3DSA:3.40.50.1390, IPR025827,PS51737,PF00239,SM00857, G3DSA:1.10.10.2600,SSF53041
MRCYTLYDSTPCLLREKCTMNIYYVREKLRNCSIYDIELNVAYYARVSTEKVEQQASIKHQEEHFEELIHSNNRWKFAGSYIDDGISGIHADKREEFQKMLRDAKLGKIDMIITKEISRFARNTLDSIQYTRELLSYGVCVWFQNDGINTIDDDSEFRLTIMAGVAQDEIRKLSSRVKFGHAQSIKNGVVLGHRMYGYSNNQGKLELVPEEADMVRMIFQDYASGISTPRIEKKLWDMGYRSLKGGKINRDVIKNIIRNPKYKGYYCGGKVKVIDMFTKKQEFLPQSEWVMFKDDGSRVPQIIDEATWEKANAYLRERGEAIKSRRTSFKNENIFTGKLFCANDGAPYWMKQHYIRGKEDVRWVCSYKIKNGAASCNSFGLAESELKEVIAELINKSSENIDSILEEYFEILQSSIKNIPDNINEITRLEKQIDLLKQKREKILEYNLDGKISDDEFVSRNKEYVKQIKQTESHIRELQNTKSPEPVEIQLNAIKEQLKKFKGVTQKDINRQIVNELFEKITVEPLAVTCATLTFQLRSGSLEKWGFPLSRSDDMIFTLHSEQHKIFSRKTCIKTQDMVFFKYKYLLAL

SEQ ID NO: 9629 - protein, 523 aa, Unknown
  Description of Unknown: Integrase B9630 sequence
  cd00338,PF13408,IPR011109,IPR038109,PF07508, Coil,PS51736,IPR036162,G3DSA:3.40.50.1390,PTHR30461, IPR006119,PTHR30461:SF3,PS51737,IPR025827,PF00239, SM00857,G3DSA:1.10.10.2600,SSF53041
MAKSVTTIPATLSRFTAAPINSTKKRRVSAYARVSTDNEEQLTSYEAQVDYYTNYIQGRDDWEFAGVYTDEGITGTNTKKREGFKSMVADALDGKIDLIITKSVSRFARNTVDSLTTIRSLKEHNVECYFEKENIWTFDGKGELLLTIMSSLAQEESRSISENCTWGQRKRFADGKVTVPFKRFLGYDMGPDRNLMVNPEQAKLVKRIYGMFLQGQSPFQIATALTKEGIPSPGGKDHWNASNIRSILTNEKYKGDALLQKSYTVDFLTKKKKMNEGEIPQYYVRDNHEAIIPPETFEMVQALMATRKKGKNRLSSVSIFSSKIKCADCGSWYGPKVWHSNDAYRKVIWQCNHKFENQKCGTPTLTEDKIKELFLRTANKVVDQKEQFIAIYEQVLMKSLDTTALESELSELEAEINIAAELIEDCINENAHVALDQTEYQKRYDALVARFDKAKARHTEVTDLIAERKSRKHQIESYLKELRSREPLTEFRETDWLAMVDYITVHSKDDIRVTFKNGTEIKG

SEQ ID NO: 9630 - protein, 589 aa, Unknown
  Description of Unknown: Integrase B9631 sequence
  cd00338,PF13408,IPR011109,IPR038109,PF07508, Coil,PS51736,G3DSA:3.40.50.1390,IPR006119,IPR036162, PTHR30461,PTHR30461:SF3,IPR025827,PS51737,PF00239, SM00857,G3DSA:1.10.10.2600,SSF53041
MRCYTLYDSTPCLLREKCTMNIYYVREKLRNCSIYDIELNVAYYARVSTEKVEQQASIKHQEEHFEELIHSNNRWKFAGSYIDDGISGIHADKREEFQRMLRDAKLGKIDMIITKEISRFARNTLDSIQYTRELLSYGVCVWFQNDGINTIDDDSEFRLTIMAGVAQDEIRKLSSRVKFGHAQSIKNGVVLGHRMYGYSNNQGKLELVPEEADMVRMIFQDYASGISTPRIEKKLWDMGYRSFKGGKINRDVIKNIIRNPKYKGYYCGGKVKVVDMFTKKQEFLPQSEWIMFKDDGSRVPQIIDETTWEKANAYLRERGEAIKSRRTSFKNENIFTGKLFCANDGAPYWMKQHYIRGKEDVRWVCSYKIKNGAASCDSFGLAESELKEIIAELINKSSENIDSILEEYFEILQSSIKNIPYNKNEISRLEKQIDLLKQKREKILEYNLDGKISDDEFISRNKEYVKQIKQIESHILEIKNTKSPEPVEIQLSAIKEQLEKFKGVNPKDINRQIVNELFEKITVEPLAATCATLTFQLRSGSIEKWGFPLRRSDDMILTLHSEQHKIFSRKTCIKTQDMVFFKYKYLLAL

SEQ ID NO: 9631 - protein, 589 aa, Unknown
  Description of Unknown: Integrase B9632 sequence
  cd00338,PF13408,IPR011109,PF07508,Coil, PS51736,IPR036162,IPR006119,PTHR30461,G3DSA:3.40.50.1390, PTHR30461:SF3,IPR025827,PF00239,SM00857,SSF53041
MSDAHIKPGTVAYSYIRMSTDQQLKGDSLRRQAELSRQWAEQHGLVLDDSLRDIGVSAYKGKNRKEGALGRFLDMVETGRVRPGSYLLVESLDRLSRDQVLEALSLFLEIIRSGITIVTLADNQTYSQETVGNDWSKLIISLTIMARAHEESQRKSERVSQAYASRLARAWQGEYNMSCAVPYWIDAKRINRDRIEYTLNEHAATIRRMYELAANGLTRHAICVVFNSEAVATLRAGDHGWNAAVINRILDSRESLGEYQAQRRADGKRTLVGEPIPGYFPAVVDEALWMAARANKRKTATNRGRKGDRFTNLFIGLGRCVHCGGTMTYHRSTQGQVRNSLKDRAYSRAYYSCSNRRRGKVCSGPHKAFHYDAIERAILDNVGEFRLSEILRIRRESSPVAALDRKIAALQRKLEDASRRESNLLNQLEDADEALPLIMARIKERQREKVELEKEISLLDREKIEAELSLVETASEADIRKMRREWGYADDAQAYIMRARVHAALSSFIDFINFDASRCAYEVIILNNIRVYQFEDHKLAAKIDLSDQIGAREDGLIDPTVLASNGVDREVRPDRIEAALKLRRAQPEA

SEQ ID NO: 9632 - protein, 523 aa, Unknown
  Description of Unknown: Integrase B9633 sequence
  cd00338,PF13408,IPR011109,IPR038109, PF07508,Coil,PS51736,IPR036162, PTHR30461,IPR006119,G3DSA:3.40.50.1390,PTHR30461:SF3, PS51737,IPR025827,PF00239,SM00857,G3DSA:1.10.10.2600,SSF53041
VAKVTTIPATISRFTATPINERKKRRTAAYARVSTDSEEQLTSYSAQVDYYTNYIKSRDDWEFVSVYTDEGITGTNTKHREGFKRMVADALAGKIDLIVTKSVSRFARNTVDSLTTVRQLKEKGVEIYFEKENIWTLDSKGELLITIMSSLAQEESRSISENCTWGQRKRFADGKVTVPFKRFLGYDRGPDGNLVLNKDEAVIIRRIYSMFLQGMTPHGIAARLTADGIKSPGGKDKWNAGAVRSILTNEKYKGDALLQKSYTVDFLTKKKKVNEGEIPQYYVEGNHEAIIQPEVFELVQQELKRRKQGRGPHSGVHLFSGKIRCGQCGEWYGSKVWHSNSKYRRVIWQCNHKYDGEEKCSTPHLTEDEIKAMFISAANKLIGKKTAIISPLRASLDIAFDTSALEAETEKLQEELMVASDLIQKCIYENAHVALDQREYQKRYDSLTARFDIAKARLEEIETAIADKKSRRAAIESFLGTLAQADLMGKFDPVLWCGLVDHVTVYSKDDVLFTFKNGQEIRA

SEQ ID NO: 9633 - protein, 588 aa, Unknown
  Description of Unknown: Integrase B9634 sequence
  cd00338,IPR011109,IPR038109,PS00397,Coil, PF07508,G3DSA:3.40.50.1390,IPR006119,IPR036162,PTHR30461, PTHR30461:SF3,PS51737,PF00239,SM00857,G3DSA:1.10.10.2600, IPR006118,SSF53041
VTDTPSDRSLGATDTVCYLRVSTEEQARDDRASLSQQREACTQLAGVVRRTVGAWFVDAGASGGSAKRSGFQALVAFCRAHPRKLMAPGFIFCLNHSRWGRFPDPNDATWWMQEMKHVGWHVRFAEGGGLEGTPVAPIMDAVQHTQATAYREALRANCVRGWRSTAAQGYWQNEAPFGYRREAIGLRGRRVLQIGQQKSKDERAKLVPGPDEEVTLVQFLFREYAKGAVGCDRLAHHAMARYREKKWSKQVVRHILTNPAYVGDVVWGRRETGPEGLSQRRDRAGWVTTSDAHPALITRTLFARVQQRLQANQKQTRLSTGGYPLSGLLVCAHCGDPMIGGGGPKGPEGDPDRYRMYRHASISNARPGQDSPALRCFARMATVPKRLVEPAVIVAIGDILGSSRFRLLLERACDRVLTRFTTKAEPHRNQLERRREKLLDERARLVKLASSGVLTEEEVAPPLHAMRDQLAVIDQELQRAQFAERRVDALGGLRAELLEQAAHFVSVATSASGPELRELIRPWIHSAVVDREQNVVKLAIAPLPIEAGFRLSTTGLGPDSRAEKEVVPLIRRILPLPPARSLRRKRLA

SEQ ID NO: 9634 - protein, 588 aa, Unknown
  Description of Unknown: Integrase B9635 sequence
  cd00338,PF16793,PS51736,G3DSA:3.40.50.1390,PTHR30461, G3DSA:3.30.70.1790,IPR006119,IPR036162,IPR039459,PF00239, SM00857,SSF53041
MDTNAYIAYFRVSTPRQGVSGLGLEAQRAAALRHIGGSQLIAEYTDVESGKRHENRPQLKAALEHCRRIRATLLIATLDRLARKVHFISGLMESGVPFVMADLPNATPFEIHIRAAMAEEEGRKISERTKAALAAAKARGVKLGNPRLDEARARAAEALKKNRVSDSTLRLMLDLRANMTLRQVAAQLNAYQFKGPRGGRWHASTVHRTLLRVTTEALNDGLTQKRFDATVNPRNNATALECSHGTTQERNRACAQTSHLQDREMATIPPVFSPSAGRGPKTGGMPMPSEIREAERMLDLFTSVGARDFVVTKTDVEQKLKWGKTYSAPELRRLLPAMVRTAEIRHPHQLATGETVMAGENLIIRPTGPDAVFVQLDDLSAEQLDRVRPAAFIIHATSPGNHQCWIAVSGVSKLESKDFIRRVRKAVGGVDGAASGATRIAGSENFKLKYGPDYPMVQIVSGVPGRVMTPERLQDMGLLAEPEPIKEVHFAPPRVSTISGRQWPSYEKALAGAPPNSEGTGPSRSHADYWFCFLAQQRGHGLQETAEKLLEFSPNARERAARGDTGYALITAQNAASAVERGRNRARA

SEQ ID NO: 9635 - protein, 587 aa, Unknown
  Description of Unknown: Integrase B9636 sequence
  cd00338,Coil,G3DSA:3.40.50.1390,IPR006119, IPR036162,PTHR30461,PF00239,SM00857,SSF53041
MSARRGRGGLIPLTDEFVAYAYKRVSSDDQEKDGMSLPVQDKELLAEIARHETWTFGGSFQDVQTGTNPTRADYQRMLAAARAATAAGKRVVITVVRQNRLGRDGEEALRAWKEFDRLDAQLWATRDGGHLADPLMYGVRAILAEHDVRQISENVKGTFAEIRANGWLKPGRPRWGYRWEPATTEQRQLQGSPMVVPVPHPIEAEYVRELFLRRARGETIRALSTWVRSLPVAARGEVRRHNGSMSPRELSVSAVKDVLDSPVYIARNPEPGQDALDAPVGKWEPLCDDVAWRAIHPRTGARENVVSTSARGQYVLTGFLFCELCGARMCGQLQRGARRVRPGRRDTISSDTRVYICTSRMAGASHGTKPCYRTIKADLIEGQILGILGTLLDALKEPGVREAVRKAARDLESRDAATGDARRLRNAEQDRAALVAERVGLTRTLSAGIITGEAYAEAVAVISAGIDAQAAEIARLTALQVGQQRRMAERPAVDVILDTAEDWAWMLREGAVEDQRAFLKLVLERATPKRLKPGKYQAGMHYTGLGWQVIELGAAVLPLLGRVEDVQRVWAHCTASTRPDEALAAAS

SEQ ID NO: 9636 - protein, 587 aa, Unknown
  Description of Unknown: Integrase B9637 sequence
  cd00338,PF13408,IPR011109,PF07508,Coil, IPR036162,PTHR30461,IPR006119,G3DSA:3.40.50.1390,IPR025827, PS51737,PF00239,SM00857,SSF53041
MDAIIYIRWSSLEQTKGDSYARQINRCTKFCADKGYNVLETVVDEGRSAYTGENILTGNLGKLVERFERREVPEGTLVVVEQLDRLTRLPALEVVGWLTRVFPTGIKFVTADRGTMVSRAAMEADQLSFMSLIFDSFRSHGESKRKSDLLLDSWQNRRKDVVEGKKRNITGVCPAWLRWDKEVNEFVVITDPDPHLDRRLIIQRIFDERDAGVGHAIIARKLNEDGIPSWGVGKRKADGWHPSYVYKILHNPAVIGEFQPRSRRKGEVTGTKMGQPIPDYYPQIISPAQFERVSASKQVMNVGGGTKGRVNLLAGLVYCGVCNQRMIYLKKANAGRARTNPKTGTVTIDKSEGVYLKCSGAHRGHRCDHKAAFNYHWIAEAVLDNLLNSALRDVHFEQRSVMIQLADQLASARRELERFEAQAQTALDMTLDPAFKHDQRVKQRYIDVGRQADQQRELVNALDEKLSLSKGQVSPAEHLNRVASVRTSIDSEDEKVRDAARTKVMDAFQRLIDRITFKPDRTVEVSALEGSLGWQFDDKGKLVNRFDLTVGLNEDRLRNGLLRRDNVDRQDIAQQIEEMQKRRLEAL

SEQ ID NO: 9637 - protein, 585 aa, Unknown
  Description of Unknown: Integrase B9638 sequence
  cd00338,IPR011109,PF07508,Coil,G3DSA:3.40.50.1390,IPR006119, PTHR30461,IPR036162,PTHR30461:SF3,PS51737,PF00239,SM00857, SSF53041
MPTVQPAADGRAVKTIGVLVRNSTAKQVGNYRSEAQYDLGPRVEQRGYAVRYYDEQGTSGADLTKRKKAMQMLDDLKAGQIQGIAAYDFKRLTRDEFGMDGATIARRIVEAHAIFQTWDREYNLRLDDDLLQFQFGCFIAGIDWRNIRNTLWSGTFKKLEQEPHYMKTPLGYRNVADDRGKSHVAKNPEHQHVIDALARAFDECDSLAQVARRLNTEGPGRPWFRGRGGTSTHWNVFGLRYILRNTIYTGTFTFGAGLKERSTVWDRFALDPATSTPKDFLQFCPELAYWSIAQVRRWRRKFDKPANARVMKNGSVHALSGVLHCVACGSRMISHGIGKYACSALGSGKGRGGLDCPAPQILTESIVLQVLRRELPNVLVDAQDLAARARTHILEHAPSAAAQRLDFLQERLMSLSDSLTDENTPASALKAVIARIAQTETEIAALRDQVADEEDARLGDEELARTCEVLLRTNTLEVIDHMRPEQQGRVYSMLFAQVRIETQGFAAGRQWRLHSYTARLLDEPRISDWAPWGRLPNPMSKDDAPKDVLVFVDRDERTLATDISERVYVDYLPSLRELAGVLTPA

SEQ ID NO: 9638 - protein, 585 aa, Unknown
  Description of Unknown: Integrase B9639 sequence
  cd00338,PF13408,IPR011109,PF07508,Coil, IPR036162,IPR006119,PTHR30461,G3DSA:3.40.50.1390,PTHR30461:SF3, IPR025827,PS51737,PF00239,SM00857,SSF53041
MSAPRLLRGRTAPLDDVTIARIYGRVSSDEQEKDGVSLADQLATNRRYCASNEFVIGGEYQDVQSGMKAARADYQRLLADVRADRAEGRRAAVVVKFQDRLGRNLLESAKVYDELQKLGVEVHVAESGRAPSEDEYILRAFVAHIESRNIRARTKSAYRHLAEKGWHRPGQLPWGYALRPRTVEERADDAPQNVMVIDPVQAAYVRDAFARVAAGTSIREVARWVATLPDVARGGRKLTYNTVRKLLSAPVYVGRGGGPDHEEPEAVLERPAGRWEPLVTEDTWRQVASQRRLAGKMPNQASGEFVLSGLLRCARCGERMQGRTRPLPSGPRREYCCSSALVLGTEHIARPCWYTVPADPIEDEVERTISGTLKAAGEPTARRAIIRDLQAQAAAPDADALGQQIRELEMVRTRTQDRMHNLTIQLTDGVVDAEAYKDSAKRLRDQLDATTRTLEDLRRARPRAAAIGPLDALLGSCAGWARVLASGDVAAVRAVYGLLLEDVTPMRVARGRYQVDPTPTESGMVLLEAAVVALRQERSGGAKRLLIRLVAVGDRASSRHPTLTMSALLGAQSENFSTLLCPTGT

SEQ ID NO: 9639 - protein, 584 aa, Unknown
  Description of Unknown: Integrase B9640 sequence
  cd00338,IPR011109,IPR038109,PF07508, PS00397,PS51736,IPR036162,PTHR30461, IPR006119,G3DSA:3.40.50.1390,mobidb-lite,PTHR30461:SF3, PS51737,PF00239,SM00857,G3DSA:1.10.10.2600,IPR006118,SSF53041
MSGRGSSPPRRTRRSAIGYVRVSSPGQEENCSLDTQEAGVRAYCDREHLHLLAVYEEAETAIEEELGARPVLTDVRRRLREGEADTLVVFKVDRVFRNQYQPAHLLPELRLNGCGLEFVKERFEDTAIGRFSLGAMAFAAELEAEAIKERTMRGRLDSLTKHGRLPPAPRALYGYRFVFGRNHRGDEIIVGYAEEPATARVVRRIYADYLAGQTLRGIATALTREGVTAPSGRSNPWSYVTVRDRLVNPRYTGEATGWRHERRRTPNGKPGWRYRPEAEQHPLPAGTVPALVSREDWEAVQRRLPQNRAQASRNNRAPDAALLRGGLVRCAYCRRQDAAELGRVMVVANANRHRGAMYRCVAVRPDGRQCTNSILVDVLDGLVWGHATALLARPEHVGEHFAALADADPTAGEVAGIEAALRESRREQGNLQAALGRLTPEAQAGVVALLNRKAAEVASLERSRAAILGRRAVWHAERDRLAAAQALVRGMAEALGAGGEVALLAAALAPAKRQELVRALGVAAEVRRPAEPYPNGLRVALTQTLSPGDCGKNGLSFTTQEPATASPLVLRWADLPPLALPAAA

SEQ ID NO: 9640 - protein, 583 aa, Unknown
  Description of Unknown: Integrase B9641 sequence
  cd00338,PF13408,IPR011109,IPR038109,PF07508, Coil,PS51736,IPR036162,IPR006119,G3DSA:3.40.50.1390, PTHR30461,PTHR30461:SF3,PS51737,IPR025827,PF00239, SM00857,G3DSA:1.10.10.2600,SSF53041
MDIYNIANELKLSHKTIHDIPLRVTFYARVSTTREEQEGSIEHQISFFTEMIQNNHNWTFIPGYVDRIRGESASNRENFMRMIEDGKNDKFDLILTKEVSRFARNTIDSLTYTRELLRCGVGVFFQNDGICTIDTDSELRLTIMSSIAADEVRKLSERVHWGQKRSIENGRVMGNNRMYGYHKSDCKLVIDEAEAEMVRLIYQLYATGDYSTRKIEKILYERGFRSRSGTKIFHGVISGIIQNPKYKGYYCGNKVRIVDYRTKQQKFLPEEDWIIYKDETGEVVPAIVSEELWDKANAVFQERSQAIKVRGRSFKDKSPLTGKIWCGADGSAYWRTSYSNSIKMGSPIYQWVCSSKKKDGAASCKSFALMEWEVYYILSNTFKSLVDDIDTYVSEFLELLKATDPTKDVQKDILALTAKIDQCKTKKDKLLEIYMDDAISKAEFKAKNDDFNRKIEEYEGEINDLKELKSDTAMTSRKLHEIEKSIKGIYQSDDEVIPKAQLDDLIKTVLDKIEVYPDTEDSMILKIFLKTGSETSVTHSKDLRCSGHIKHMIKPQQQYIFKRNSIKRQHHEFQIRYDAEIYI

SEQ ID NO: 9641 - protein, 583 aa, Unknown
  Description of Unknown: Integrase B9642 sequence
  PF13408,IPR011109,IPR038109,PF07508,Coil, PS51736,G3DSA:3.40.50.1390,IPR006119,IPR036162,PTHR30461, PTHR30461:SF3,PS51737,IPR025827,PF00239,SM00857, cd03768,G3DSA:1.10.10.2600,SSF53041
MKAAIYSRKSKFTEEGESIENQINMCIHYLKNILNIDEYEIFEDEGFSGGNTNRPKFQKLMKEIKSKKFTHLICYRLDRISRNVADFTGTLEILNKNGVSFISIKEQFDTSTAMGRAMMNVSATFAQLERETIAERIKDNLRELSKTGRWLGGPAPLGYESIEVENNDQQGKNRKKHILQINENEINIPKIVFELFLQHRSFQKVSRLLESQGIYSRKGSVFSRELVKQTINNPVYCIADKKLMDYFKNTGCEIYGMQNINGTNGIMPYNRRKENGSFNSIDNWLISVGEHSGIISSDVWIKCQQINKLIKEKASNRQCTSQDALLSGLVVCAKCNSGMAPRQHKNGKYHYRYYSCNLRNKAADRCDNDSLNAYDAEDYVVKRLKALTPNEVIEKYKELQKKQYVKMDNENIINEHLKEIESNKKAISNLVMKMVYLENDMDILEPIKLEIKRLKDRNVELENLIEKLKSQNVEIIDTFESLDEILTRLDNFHKFYDYIELFEEKQALIRSLVKFITWDSETRKIDIILVGSDKNRTQSACPPLSDSSRRNGPCRNNCYNGISTYGKRNYRRDKKSRTCWALC

SEQ ID NO: 9642 - protein, 583 aa, Unknown
  Description of Unknown: Integrase B9643 sequence
  PS00397,IPR038109,IPR006119,PS51737,PF00239,G3DSA:3.40.50.1390 ,PTHR30461,IPR025827,SM00857,G3DSA:1.10.10.2600, SSF53041,IPR011109,PF07508,PS51736,IPR006118, cd00338,PF13408,Coil,IPR036162,PTHR30461:SF3
MKSVSKHERLNGHSNPLVGPVLRVAFYVRVSSEEQAERATARNQVDFLRKKYAPNFEPDSLEPMQFVGMFVDDGWSGALPLEDRPEGRRLLELVHARGVDLVVCYRLDRLGRKLTVLLDANVAFERFDVAIMSATEPFDTRTPIGQFLFQLLGSMAQLERETIRERVTMGRDRVARDGKFINGPVPIGYAVEDERLVPSDRKVPQLGGITEADLVRTLFQRAAEGESAAALTVWLRAMGVPSTKRYMRRDGTEKEETYPEWNAARMQDLLHSTTYYGDRALRYSGSVIHQDVPALVDRATWDRANATLTGRLTRFNSGQNEGYVYLLSGKLFCSECGNRMLGNYQRRQRGDKPRLYYVCSSARSPRARRTENSCQSARNHDGWALEAFVLEQIDEYVANPDHFLNILREQIRERRGTTQQQDEHVRALRQRLAGYERGKQTLLTMVSRNEITREDYLAQIAASAEEANVVRHELELAEAEDNLSAVIETRLLESVRVLHELREQWAAARKADDRVALRAMVQGTLREMRVAADRAVHLAFSFTAPSSRENNQSHYHLLYREDSAAVGLLDLELGFTLGLGKSA

SEQ ID NO: 9643 - protein, 582 aa, Unknown
  Description of Unknown: Integrase B9644 sequence
  cd00338,PF13408,IPR011109,IPR038109,PF07508, Coil,IPR036162,IPR006119,PTHR30461,G3DSA:3.40.50.1390, PTHR30461:SF3,PS51737,IPR025827,PF00239,SM00857, G3DSA:1.10.10.2600,SSF53041
MDGPPSAMEGEGTRISAIKPGAALARTRCACRCYNRKMKNKTAVIQVRVSSKRQADKELPLESQLQRCQDLAKRLGTTVTRVFVEKGQSGWSGPRPVFEEALQYCEKTLPDYFITWSTSRFSRNQEVSISSRARLERVGTEVAYASFDAGADPDTRFLSIGFRELMDEYKSREISKDTKRSMARNAQNGFWNGGRVPFGYMLHRTESGRQRLVINNIEARVVRKIFSMRLSGKGSLLIARELNENHEYNRNAGWNKSSITNVLKSEAVHGCVAYGKRTRPSRRLLPRDQWIIVKSHEAIIDDETWNKVQVLISESTPTQGSGSPRSKFIFSGLMRCGQCGGSLQIETARNSAGTTYAYYNCRNALKNGTCDNRRITANELDNFLIDAVVGRVLTKRNMEQIFHDMQKACGAFTKEQKTRIVTLNIEIRELQRRNEKLMATIEEHNSEIADMSLLVNRMNVNNARIQSAVAEIEEIESCPVPEISLTAEEVGKLSSFCRKVIKTTRNPEKTRGFLKAMIERVIIRDATAEIYYRPELLMRKQNVHSSGWLAPRDGHTLNTRGRIIKSKRFVINLPERWHRKVA

SEQ ID NO: 9644 - protein, 582 aa, Unknown
  Description of Unknown: Integrase B9645 sequence
  cd00338,PF13408,IPR011109,IPR038109,PF07508, Coil,PS51736,IPR036162,IPR006119,G3DSA:3.40.50.1390, PTHR30461,PTHR30461:SF3,IPR025827,PS51737,PF00239, SM00857,G3DSA:1.10.10.2600,SSF53041
MGLFMSTKKRAVIYARFSNEDLQKKRSIDDQLALCRVHAARKDLEVIAEFTDHGKSGTTMSGRDGLYEMMQAAKRGEFDTVVMESLDRLSRDRADLPALHKRLLFSKVSIETVNEGEATHIHVGIRSMVGSMFIADLADKCRRGATGRVREGKFPGARVYGYRCIPGKPGEREIDPEQAAIVLRIFREYAAGKSPRKIAGDLTREGITSPSGSPAWSNQCLTGGRLRQGMIGNRLYVGEIRWNRTRVSTNPETESKVRRATPAEDHMVVAVPHLRIVPQKLWDAANAVRSQRAIQKFGPGGKPVRAPVIARKEHLLAGLLRCGDCGGAMRIYATSATKGTRVACAGAKDRSTCEHTKTYNLETLERGILECMRVRLAEPELLKESLKAFHLEWAKQRKHCLTEHTALKRRLVEIEASTTRFVSALERGSMPEKQIMDRLQALETERVGVAERVRLLDGQTNVVDLHPTAMTAYCASMDKLHAALEANRDDAEARQAFRTLIDSIVVHKTEERAPYQFTPYHRMEALMGADLFPASRSVPEIIRENGGKTRSIIAKSPNPDLAEANPDLRGRIYTLGRYRMAA

SEQ ID NO: 9645 - protein, 582 aa, Unknown
  Description of Unknown: Integrase B9646 sequence
  cd00338,IPR011109,PS00397,PF07508,IPR038109, PS51736,IPR036162,IPR006119,PTHR30461,G3DSA:3.40.50.1390, mobidb-lite,PTHR30461:SF3,PS51737,PF00239,SM00857, G3DSA:1.10.10.2600,IPR006118,SSF53041
MRAALYIRVSTDRQASEGISLDAQTERAAAYCASRGLTIAATLREEGQSARKLRLEQRPAGRELLRLIASGAISHVVAFKLDRIFRDNIEALQRSKEWDAAGVHLHILDIGGDTVDTGSASGRLYFAMLSAFAQHESDQTSERVRSSMRQIASSGRSPANRPFGYARADRALVPDPITAPIVREMFMRAAAGASLVELVRWLHSEGITTRNGNARWSISSVRWVLSNPIYVGDVVWGDMIVPGAHEPLASAEDFLLTQEHIASRAPTRGRSSAHYTPLLRCGQCGGRMALTGSHGPSADRYYYCVQRKRYRPPLHPQARIGERLLVAMLFRHTELLIADADLPSAAQRAAARLSSAPPSPRGAAVPAAAVSAPPSPRGAGVPPADVSVPPLPRGAGIPPADVSVPPLPRGAGVPPADIASAATVPPLPPFPQTPKAYGEGGQGGLGSSTPSSLRSELTALALQRQQNMRMLHAGAITEDDLAALNAPLMAQEQALRASIATSASSSDLTSVAVLIAAAETLLPDLAAASIPEQVATFRRLYPLIELLPGVLRFHALPALGIEPIDRPILPRYCPKHGTPLPF

SEQ ID NO: 9646 - protein, 582 aa, Unknown
  Description of Unknown: Integrase B9647 sequence
  IPR038109,IPR006119,PS51737,PF00239,G3DSA:3.40.50.1390, PTHR30461,IPR025827,SM00857,G3DSA:1.10.10.2600,SSF53041, IPR011109,PF07508,PS51736,mobidb-lite,cd00338, PF13408,Coil,IPR036162,PTHR30461:SF3
MAAEPGPGRRGDAYLRKSPGSSASKTEISLERQLDDIKARMEADGVTLGMIHEDVHPRWELWERPALSALRERIKDGLVDVVYAWDTSRLATGIEHQAILLEEGDRFGCSYRFVTEQVDRTTPLGKAVWLMTSTFNEIERERIRDRTQGGKRKHLERGKMLFYAKPNYGYRWANAAHTCWVVDADEADVVRAVFRDVVGGATLSDVALRLTGAGVPPPGRAQTWQTSTLAEWLHNPAYKGAPAVYRTERVRRDGRWIRLRRDPEHWLALNPNSVPALVDPEDWALAQLALTRHRTQAPRGMAPDRQTEFLLRGGLATCAHCGRPLHALTVPRKRDYAPEKVIYRTYACASVSRKRAQKVAGADDGFPACPSPVRVRAEALDLAVWRGVLEHLQSPPPADGGAAEAARAQREHADAARAVRAAERVMANTATELVLAETDEERETLRGLQRTQAAVLRAARGRHEKAVRDLAAVAQAREQALALFVAFTERGRDLEGLIPGRVGLVQYQTMRAILGTSGVGVVVWHKDAPAGPPDRGAGRYAVRPYEAVPWPTVSGSSCGPGSSTPHYPDPDRLARLVRALAG

SEQ ID NO: 9647 - protein, 582 aa, Unknown
  Description of Unknown: Integrase B9648 sequence
  cd00338,PF13408,IPR011109,IPR038109,PF07508, Coil,PS51736,IPR036162,PTHR30461,IPR006119, G3DSA:3.40.50.1390,PTHR30461:SF3,IPR025827,PS51737,PF00239, SM00857,G3DSA:1.10.10.2600,SSF53041
MTSKLLNIKNALNAGISIFDMKLSVTFYARVSTDKDEQLNSLDNQVCYFKSFIEGNPNWVYVDGYIDEGISGKSAENRASFMRMIRNAQDGMFDLIITKEISRFSRNTLDSIKYTQQLLDCGVGVYFQSDNINTLMPDSDLRLTIMASIAQEEVRKLSERLRFGYKRAIEKGRVLGQDNLIGYDKKDCVLTINEDEAAIVRRIFEIYIEGKLGIRAIARQLEKEGIVGPESGEMLSYGTMKGIITNPKYKGYYCSRKTVSIDFRNNKPIHQDPSQWIIYKDDTIPPIVSEEVWDLANALYRERGENAKAHSQASQNRYPFSGKLVCAEHGTCYHRHVYSSKKNGDQEVWNCKMYRLKGRKDGCESPTVYTHELQAILNNVYKTLYENKDAVIEGLLDLYSGVGETNYLKDMEKTQKELSQLERKKEKLWELLLEGFVSKKDFQVQNDKLLVQIEPLQKRIAEAQKAIDAEKLKEQRLIILRKELELEYENTEDSPFGQNNAFLDKIIVHKIDGDKRHVRLEIFLTIGRKYTAEIDRNAENAPFISLYEIGIWHSEMISIFTRWKDAYKGSFFFTYETSVVIS

SEQ ID NO: 9648 - protein, 582 aa, Unknown
  Description of Unknown: Integrase B9649 sequence
  cd00338,PF13408,IPR011109,Coil,PS51736, IPR036162,IPR006119,PTHR30461,G3DSA:3.40.50.1390,PS51737, IPR025827,PF00239,SM00857,SSF53041
MQPNELPPEVISLIRFSTAEQVGEGKAGIDGQRQVNQSSAAYHGLKIRREMVVVDVSGKHVKDDPQFQALFKELEDPTLAGVVTSEQSRIVRPESFDDYPILGHFQRNKKLIYTPTGRIDPNTPEGRMALTVGGMMSGEELHNLRSRFARGKATKRLEGKHVGGNQMLPKTVRFVRERNAEGVKTGKSHWELVPLEAERMKRAFQLLLEGHSYETIAEMVGGWTGSGLHRAFMNPIHIGIRRCEWTVGAEYLPEPTVKNPTPKKRRYLIKRAAPLDVPTRQELESGAKPPVVEPIISLADWDRAQEIIAARMSHWRKGKLKNEGRDRGVATGIADCSCGMPLYMKYGSRGSHTDAYICKSRHPRGKGCGMKSIKRIDLDAAIAQTIMMLADASFVMSALEAALALQVAVPDPARVQRELALAKLESGRKEMIVMVRKGEMTRDEFREQMGALEMEVRALEALVPAPAPKVDARQLVELVVAVFTEFAFLAFVQQREVLRGAVRSIIVDGHARAITTVTIDGGYLGRGANSVLHSRAQYGINSIPDLTIRFPEPFMIPDTYVDRRTANGHHPASIASRWESVQ

SEQ ID NO: 9649 - protein, 581 aa, Unknown
  Description of Unknown: Integrase B9650 sequence
  cd00338,PF13408,IPR011109,IPR038109, PF07508,Coil,PS51736,G3DSA:3.40.50.1390, IPR006119,IPR036162,PTHR30461,PS51737, IPR025827,PF00239,SM00857,G3DSA:1.10.10.2600,SSF53041
MKTKDKQAEPKKAAIELIRVSTEQQAEEDRGGIPAQKLACRDIATEYNLQVKWTIEIEGVSGAQVMRSPGMRELLRICATGLCHGVIMREESRLVRPGSFGDYMVLGILQTNGVKIYLPDGVIDFSTPHGRLWASMKFGMADHERAVIRERTTSGRRSLRSAGKWVTGGDHVPYGFKKDPKSKQLVVDEAKIEKVKWIFNEFISGNTNILGIARYLGFNRDRVQYILRNPVYTGYNVIRRTVDPELNVYREDGRLRYQRFKYFDQEEQERIRLAGFENGGPISEEIFEQVQRILKIREEFSTSRGKWSTNDQYVYRGRLRCSFCGGLLQTQKQRHTTNHSLSYLYYRCGNAERGRTITPASGEPFACKSPNVSKDKIETELDKAIKNLANPEFVEKLFSVEIGSESEEEISSKRRALEEEISNLESSINRLQDLYVDGRIDRKVFAEKDDKLQAELKATKRMLNGMTSRKEPVDTDKFLDLLKPLLEWDYLNNEAKRKLLASIGVGFQVAVYAEKNRKDVRIRIDGFWISVAGMDGNLIDIASRRASDVAENKALFSTTDNEATPYFGHEIGSNQIYLSLQ

SEQ ID NO: 9650 - protein, 581 aa, Unknown
  Description of Unknown: Integrase B9651 sequence
  cd00338,PF13408,IPR011109,IPR038109,PF07508, Coil,G3DSA:3.40.50.1390,IPR006119,IPR036162,PTHR30461, PTHR30461:SF3,PS51737,IPR025827,PF00239,SM00857, G3DSA:1.10.10.2600,SSF53041
MKTRARTVTTSTTASYQTNIAASYERVSTVAQAEFGYGLKVSGRDVDDMAREHGLDLPQEFRFIDGVDQNASGTDWTLPALNAMLDLAKAKRFTTLLVPATDRFTRDTPKGLTLTAQLASYGVRVIWGNLPQIEDTDGHPMKRYIRRRMESDAFQLAELEREMITFRTARARHAKAKDGRVVGNGPPPFGYEYRRADDQKHKVNGLVEVAQEALIVRQLFERARTASTTRLQRWLDSQNIPTPRQMRGLRGAPSGGWNYGTIAEILNNAVYVGCYRYGDQEIAVPPLVDRATFDAVQKGLALRYRRPSGWWKKKLEREDPFVLRGLLECGHCSKPGQPQILHAQEKVVARRRYYWCANKFASRVKDGQQTCPLPGIRAEVLEDWLWHAVVSAIANVDEFDASLQASQERRDAELHERADRLAAIDQEVARYQRRLDRAVAKLLDDDFEDEDERGSVERNRDDSKRLLARLRADREREVAETRPAGLSAEDVIAFRQLLRHLNTDGLDKATPSERREVLELLGIRGVVRVASDGADAVLVQESPQRWARIDWDGEIRLQSEQSFKKLRLVCNPTPRFVLLAA

SEQ ID NO: 9651 - protein, 581 aa, Unknown
  Description of Unknown: Integrase B9652 sequence
  cd00338,PF13408,IPR011109,IPR038109,PF07508, Coil,PS51736,IPR036162,IPR006119,PTHR30461, G3DSA:3.40.50.1390,PTHR30461:SF3,PS51737,IPR025827,PF00239, SM00857,G3DSA:1.10.10.2600,SSF53041
MEDFYKIKEALKIMPITQIPLRVVIYSRVSTDSEEQLTSITNQKTYYKKLIENTPKWTLIEEYVDEGITGTSTKKREAFQRMISDGIEGKFDMIITKSVSRFARNTLDSLQNVRILTAHGVGVWFHSDGILTFEADGELRLSIMSAFAQGESEKKSEAVRFGLQESIKRGTVFGFDNMFGYRLHGGKLEIDEAEVPMIQKIFELYATDRYSMNQIEKILYDDGYRNHNGNRISHATLSHIIRNPKYKGVFAGRKVRKKDLFDDRVEMLPQNEWVIIDGEKGRSIVPPIVSEELWAKANRVLEARSIDVKTRQNKCNHPNLLTGKLWCVHCNLPYHRKASKTSNTVLNSAWVCSGKIRNGTASCPSIYLYENEVKQCLYELFIEDDFDIDDYIDQYIKLVSEASSSEKNTNRQNELEKELALIEKKKTKILEFNVLGQVSDQDYIAQNNALNEEYQRKSEELVNVRLALDTKKRTEEDFEKMRGALQQLKGRKNIDFIDPTFVRTYIERIDVSMIDGRTMNMDVILKTGDKISRILKKNLSSVNRRKHIYTGRRLTFRRKTPYGRGSHEIPIQINICFFSLN

SEQ ID NO: 9652 - protein, 581 aa, Unknown
  Description of Unknown: Integrase B9653 sequence
  cd00338,PF13408,IPR011109,IPR038109,PF07508, Coil,PS51736,IPR036162,IPR006119,G3DSA:3.40.50.1390, PTHR30461,PTHR30461:SF3,PS51737,IPR025827,PF00239, SM00857,G3DSA:1.10.10.2600,SSF53041
MEDFYKIKEALKIMPITQIPLRVVIYSRVSTDSEEQLTSITNQKTYYKKLIENTPKWTLIEEYVDEGITGTSTKKREAFQRMISDGIEGKFDMIITKSVSRFARNTLDSLQNVRILTAHGVGVWFHSDGILTFEADGELRLSIMSAFAQGESEKKSEAVRFGLQESIKRGTVFGFDNMFGYRLHGGKLEIDEAEVPMIQKIFELYATDRYSMNQIEKILYDDGYRNHNGNRISHATLSHIIRNPKYKGVFAGRKVRKKDLFDDRVEMLPQNEWVIIDGEKGRSIVPPIVSEELWAKANRVLEARSIDVKTRQNKCNHPNLLTGKLWCVHCNLPYHRKASKTSNTVLNSAWVCAGKIRNGTASCPSIYLYENEVKQCLYELFIEDDFDIDDYINQYIKLVSEASSSEKNTNRQNELEKELALIEKKKTKILEFNVLGQVSDQDYIAQNNALNEEYQRKSEELANVRLALDAKKRTEEDFEKMRGALQQLKGRKNIDFIDPAFVRTYIERIDVSMIDGRTMNMDVILKTGDKISRILKKNLSSVNRRKHIYTGRRLMFRRKTPYGRGSHEIPIQINICFFSLN

SEQ ID NO: 9653 - protein, 580 aa, Unknown
  Description of Unknown: Integrase B9654 sequence
  cd00338,IPR011109,IPR038109,PF07508,Coil, PS51736,G3DSA:3.40.50.1390,IPR006119,IPR036162,PTHR30461, PTHR30461:SF3,PS51737,PF00239,SM00857,G3DSA:1.10.10.2600, SSF53041
VTKLQLVRPSPILRGAIYARYSSDVQNDRSIERQNADLEKAAPRLNLKLDKRLYFEDRGQSATTLFDRPGLTRGLLGAVERGLVDVVLVEHTDRLARKGADSYWLFEQFKFYNVKVYTLKGEVTDIQLAFESYQNQADSEKTSFRVHSGHNDAAREGHICGPSAYGYVDVVGKPGEKDKNPREAEIVNRIVREMAGRKPPRQIAADLTRDGIPAPKGGAWTFQTVVKILQNELYVGVYVRNKVRKIRNPNTGNRVPRPSAPDDILRVDMPRLRIVDQALWDAAQKVRQERAHIYGGKRGTDRGTTARRLHPFAGLFRCSQCGGKMIICGSTRTGDRSIACSAAWWSKSCSHGKSYSLTRLTKHATEKMHAHLTDPDFVKERAKEREKELARLDREVNGERAAAQRELDRVDLRMKKIVRLIEDDEGDDVPPEVQARYKELRVEQRGLQQRLALLDAASHTPLLPSAVKALARDVDTLHTMLLDTPDDPACRMALGNLIERVVVHPTGYKEAYDVSLYARHAAYSGALPLFPHARDINPVRKQALARTDIDHAMVPSLSISDRPILLGRWREDASHQVKVA

SEQ ID NO: 9654 - protein, 580 aa, Unknown
  Description of Unknown: Integrase B9655 sequence
  cd00338,PF13408,IPR011109,IPR038109,PF07508, Coil,G3DSA:3.40.50.1390,IPR036162,IPR006119,PTHR30461, IPR025827,PS51737,PF00239,SM00857,G3DSA:1.10.10.2600, SSF53041
MTTPAYIYARFSSMEQGKGTSLKRQLEGARDFIKLHTDWDYPFDDPQAQQERDFTDQGKSAYAGVHREPGGALYELERKAAAGHFKNGAVLVVENLDRLTRQGWEEALKILSNLTLAGVTVHTIHSGKVWKAGEKPDMGQVITVIVEAEADHKQSDDKSKRVRKAWDLKIAAIEDGDRKAFSKHLPAWLDIDPKTGFTIANSHRASLVREIYQLYVEGHGLPAIVRTINARKEPSWARGKRRGDGWNTAYLHKLLKNRAVLGEFAPKSRKHSEPSHHAVSKGIVIPDYYPQIVPTDLFNKAQAAKASRKFTGGAEESRLRNLFAGLASCSECGSKMYYQLEQRKDRMVPHTTKHGEKRLYIVRTDRSSYRCNSNRRSAGCTNKTRIRYEHLEQTILDVLLNSALDNKSFALPDRIAEIENSIAENERRIGHMEGQTRNLTDNLAVRFSEALANRLGDLEDEIAAEKKKVEALRHELAGVSGSASPEQHIARVREVRGSLEDKDPDTRYAARVKVIHALRGIIHSMTCYPDKRTYVHTDLFSLRINQDGTYDVLDVIEEAQRHRMELPAQVLAQLQRVEEG

SEQ ID NO: 9655 - protein, 580 aa, Unknown
  Description of Unknown: Integrase B9656 sequence
  cd00338,PF13408,IPR011109,IPR038109,PF07508, PS51736,IPR036162,PTHR30461,IPR006119,G3DSA:3.40.50.1390, IPR025827,PS51737,PF00239,SM00857,G3DSA:1.10.10.2600, SSF53041
MPEKIINCAIYTRKSTEEGLEQDFNSLDNQYEFCTNYLKSLNDPALQLLPARYDDGGYSGGSLNRPALQRLLADIQCGLVNRVIIYKIDRLTREIRDFFKLLDVFEKYNVEFVSVKENQYYNTTTAIGRLMVNMFLVFAQFERENAGDRIRDKIATSKAKGMWMGGCPPYGYDIGDRCLVINETEAQNVRFIYQTFCNTHSLADTTDALNSGGIRTKRYTTRQGRTFGGRKYSVKTVQRILQNPLYKGMVAHRGKQYPGQHAAIIDAVQFDMVQAVFAAHKEKRETRRPKMPSSGGERETAALTGLIYCGCCGSAMTPSYCCKGEIRYHYYRCYRRASKLEDKCPINQIRTSEIDRVVMEQVLAILKSRDFFVQYISHHHEFDVSTAFALFNSLDDVWNSLFETEKRRILRELLAKVTIYKDKIVLDVKKAGLAGVFAELSQNNRLAEVEYKENETFQISVAYRATRLANGAKIIVPATAKEESRFNGSLRLARQIAKGFAWRKMMESGLSLQELTASAKTNERDIRFAMRLSMIDPAIVESVLSGKSPEFLTYAFMKKHPIPLLWSDQRKLYGFEERKQ

SEQ ID NO: 9656 - protein, 580 aa, Unknown
  Description of Unknown: Integrase B9657 sequence
  cd00338,PF13408,IPR011109,IPR038109,PF07508, PS51736,G3DSA:3.40.50.1390,IPR036162,PTHR30461,IPR006119, PTHR30461:SF3,IPR025827,PS51737,PF00239,SM00857, G3DSA:1.10.10.2600,SSF53041
VRAALYTRYSTEDQSSTPAQLAGCRRRAEAEGWPVVATYSDEAISGDDHRRPQYQAMLAAARDRSFEVLIVEDLSRLARDSVESELAIRRLEHWGVRVVGLFDGYDSTHRGRKLLRGMRGLMNDLALDEIRDRTHRSQRDRAEKSLSAGGLPYGYRAVDAFDGTKRVGRTREIDPARADIVREVFDRFAAGESLRVIANDLNRRGLPSPGAGWNRERRASDGLWRVSALHSMLGNEAYAGRYTWNRTQWVKDPETKKRERRERPKADWIVREWPELRIVDEDTWQRVQTRMGQRATLYGQPKGGRARYLLSGLLRCGECGGAYIVAAHRPVRYGCATHRQAGAAGCSNSRLVAREVAERLILADVRDQVLSPEAVALAVRVMREEAKAASQPGPDPEVEAVDRDIEAVERLRREGVLSPRAAAAALEPLRAQRAAMATRATSVVAGAFGAESDYVAVAGALWEAITGDDVDEAREALRGLLGTVRLVVEGEELVAEMAGGAIPLRRAVGGSTGLVAGAGFGASFSRVRLVEPARSPHSNAPRGDRNAEIRAARAAGASFAELARRYGISEARVRQLCGSR

SEQ ID NO: 9657 - protein, 580 aa, Unknown
  Description of Unknown: Integrase B9658 sequence
  IPR038109,IPR006119,PS51737,PF00239,G3DSA:3.40.50.450, G3DSA:3.40.50.1390,PTHR30461,SSF53784,IPR025827,SM00857, G3DSA:1.10.10.2600,SSF53041,IPR011109,mobidb-lite,cd00338, PF13408,Coil,IPR036162,PTHR30461:SF3,IPR035966
MNAQHPLPPGTPVAAYLRDSGGEEQELSLAQQETEIRAWCQSQGFALTRIFRDEARPGSSTVGRTGFQAMMRHFRSGQAPEKALIIWKYSRFSRDIDDAQFYRADLRRRGIQVISLHDQIPQGPAGRLYEAALDWMNQQFLADLSTDVKRGLRHIVAQYGCVPGTPPRGFRRVPIHIGKRRDGTDHTCHRWEPDPDLAPLIRQAFEMRAAGTPVSQIHAKLHIYRALNAYTTFFRNKLYIGILEYGSETYENYCEPIVPIETWQTVQRIMDDHAARFGKRHPRRVNSPFLLSGLAYCGRCGAPLYGHVTTRPGKGRDEAYRCSRAKRKAGCNAPRIPRHTLEQAVLESLTQHILTPENLAQIQQAHRAAIQRQQTERKSQIRALHKQKRSLQQRITNITTAIAQAGPLPSLLTELKELETQKAVIEAQLQALQRLQPEIPELTPAEITQISQKLIHYIQQATQEEKRQLLRGLIAKIIVSREGDHIEGTIQYYTPFAQPPPPFPPTPRGPDPTAPTPSGMLPMYFSPVGAHGGLFRPPFCFLVQFFRLYSSFSPGANAMPRLGILTGGGDAPGLNAVIRA

SEQ ID NO: 9658 - protein, 580 aa, Unknown
  Description of Unknown: Integrase B9659 sequence
  cd00338,PF13408,IPR011109,PF07508,Coil, PS51736,IPR036162,IPR006119,PTHR30461,G3DSA:3.40.50.1390, mobidb-lite,PTHR30461:SF3,IPR025827,PF00239,SM00857, SSF53041
MTDAPKPKAYRYHRFSTPEQDSGTSLERQRRATQKLVSEKDWEEVEVIEDKGLSAWKGDHLRVGGLGRFTDRVAAGEVEPGSFLVIENLDRLSRAKLKNARRWIEDINEAGITVAVCSPPLLLDEEAMSGSNMGTMILYLMEASRSGGESNRKSDMLLGAQERRMSKARDGIIYTSRMPAWLSGVKDGKFEIIEERAQVVRDIYEWCAEGYGFQAITKLLNDSVEPWTKPHKKSTATWKPGYIRDILTKPHVEGEYHRRTGDARKLTGEVIDYYPRVVPADLVARARTALRERSTSTSPNQHEARNLFTGLLKCGHCGDTMVRVVSRAAGREYEHLKCLRFNNAGMPIAGDDDEVNARRCINSTYYRYDAFERAALGQILHLALDSTYFTRPDLTAPLVVEVAQLSKDLEVMQAKQRRYMTWIEEDDEATEAKDMLREMRPALAALRLKLDEAKLALERARGNVSPEEHLRRVVEVQDAIYSEDNETRQSARRKVAEAVRSVVSVATFRRDYVEKKRTPVREAILAVAGGALAFKFGNDGTLLAKVDYTSVMGQFGSTNSGAEDVVPDIRRRTQSAAKNV

SEQ ID NO: 9659 - protein, 579 aa, Unknown
  Description of Unknown: Integrase B9660 sequence
  IPR038109,PS00397,IPR006119,PS51737,PF00239, cd03768,G3DSA:3.40.50.1390,PTHR30461,IPR025827,SM00857, G3DSA:1.10.10.2600,SSF53041,IPR011109,PF07508,PS51736, IPR006118,PF13408,Coil,IPR036162,PTHR30461:SF3
MRNKSLAGRANNRAERPRKVAIYIRVSTTHQIDKDSLPMQRKDLIAYCELILGIEDYEIFEDAGYSGKNTDRPAFQEMMQKIRSGSFSHLLVWKIDRISRNLLDFAEMYEELQSLRVTFVSKNEQFDTSNAMGEAMLKIILVFAELERNMTSERVTATMISRANQGLWNGGRVPYGYSYDAETSVFSIIQDEADVCQLMKTDYFEHKSIIHTAKLLNDRKVPTRSGALWSPTAVWKILSSPFYAGIYRYNHYKGTENRTINPEEEWVLVPDHHPAIFTLEEHEKICDIMDTNKRMSNLPGQKHRAKNVYAFSGILYCGKCGSKLVSTPGRLQADGFRTTTYSCPKKRKTHECDNPSVNDLIVGEFVINYILNMLNAKSSFSSINSPAELEERLLYGGSFKDVQHISEDGLNEFYNLLSRYGSDSSYVFAVKHPRKKKAAVNPEVEALRKDKEKQERALKRLQDLYLYSERAMTEKDFIIQKNEISSRIQDINTRLGMVTHDANSTLSDEDFVRQASHLLITKKLIGRDYIYYKALAQTVSPDVLKIYMETILDSVYVIDGRVSSIVFRNGLTHTFIYQK

SEQ ID NO: 9660 - protein, 579 aa, Unknown
  Description of Unknown: Integrase B9661 sequence
  cd00338,IPR011109,IPR038109,PF07508,Coil, PS51736,G3DSA:3.40.50.1390,PTHR30461,IPR006119,IPR036162, PTHR30461:SF3,PS51737,PF00239,SM00857,G3DSA:1.10.10.2600, SSF53041
MRLGVVTGMDVHAGVYGRQSLRRANKSEVSTEDQLKKGVARARELGASSIATYEDLGISAFSGAERPDFERMLADCRAGRLNVVIVYYVSRFSRLEVADALPVCQELLNLGVTIVSLTEGTFKRDNIMDLIHLIFRLDAAHQESKNKSVAVKSAKATAKELGGWSGPAPYGFETYEDVMTRTGQDGRSRSIVIKRLRPNKEECAIVATHVFAPVIAHMDTPYDPGYMRFHPGSVSGVTTNLNRLSIPTRGAKVGKERAASQWDRKTVGRILQDPRFIGYMAEPVYDKEARGRKVTGYRVIRDDDGHPVKAPWDPIVDPGEFWRVQEWLQGRRTSSANNKGDSLLSGLGLMRCLCGATWKATRYPATKTHPEGQRAYRCNIGQRDTQVHTGTPTIGMDALDNYVANRIFSLIRAAEDDEDALLILAEVQERYSRKLETPETSGERQTLLTERAEVRQGLEELYDERDAGGFRTDIGRRRFLKSETALAERLEGLDKRLEELEAGKERPLPLAQWQAWGEDPTGPGSWWSKRTLEERREFVQLWIKSITIRPLARPRVAEPLSRRVRIEWHRPTEELGAVA

SEQ ID NO: 9661 - protein, 579 aa, Unknown
  Description of Unknown: Integrase B9662 sequence
  cd00338,IPR011109,IPR038109,PF07508,Coil, PS51736,IPR036162,IPR006119,PTHR30461,G3DSA:3.40.50.1390, PTHR30461:SF3,PS51737,PF00239,SM00857,G3DSA:1.10.10.2600, SSF53041
MNILEMRDLLLNQGKTIYDLPLKVTHYSRVSTEFKAQETSLKNQEYYYKELIKNTPNWEYIDGYTDDGVSGTSTVKREEFNRMIEDGLNGKFDLILTKEVSRFARNTLDSIFYTRELLKNGVAVYFENDNINTLYPDSEFKLTIIASLAQEESRKTSQRVKWAKRRAIEQGEIFLPPNMHGYRKVDGKVEIVEEEAEMVRRVFELYCQGLGFRLIGRQLAKEGYLNGGGNEYGISTLRKIITNPRYKGYYTGGRYETVDHITKKVIEKDPEDWVMYPAPDIIPPIVSEEVWDRANEILEEKRKRVHIKHETSYQNKYKYSGKIYCKKHDAAFHRSLYRYKTMPDKEVYQCSIYRLHGKKVCDSPTIYTTELDAIMACIFKTIFKNKDNFIDELLTMIEKHLQGDDFSKDITRTINKIEKIKERKDKLLDLVLNDLITEKEFRQRNDEFNQEIDVLEKELEKYEHLRKAKRSSKEQLKLMEEFLNKEYDLDKNMPDELIDTFLDKIYVEKDEKIDDLINFEVYLKTGQKIPVYFRKDISLCLATHIDRHKMMFEFPRTKNNRKVDPVRIRVVDIRLNIAV

SEQ ID NO: 9662 - protein, 578 aa, Unknown
  Description of Unknown: Integrase B9663 sequence
  PS00397,IPR038109,IPR006119,PS51737,PF00239, cd03768,G3DSA:3.40.50.1390,PTHR30461,IPR025827,SM00857, G3DSA:1.10.10.2600,SSF53041,IPR011109,PF07508,PS51736, IPR006118,PF13408,Coil,IPR036162,PTHR30461:SF3
MEVYIMAYNAQNKTGARVAIYVRVSTLHQIDRDSLPMQKQDLLAYAKLMLNTDDCVIFEDAGYSGKNTDRPKFQEMMSQMRAGAFTHLLVWKIDRISRNLLDFATMYNELKALGVTFVSKNEQFDTSTAMGEAMLKIILVFAELERNMTSERVTATMISRANNGLWNGGRIPYGYDYDYETHEFSVNEEESKVVILMHDMYEQERSLVRVVRELNERGYRSRAGNLWSPVSLLIILRNVFYCGDYRYNMLKEGDRQKVKDESEWVTVENHHVAIIPKDQKERIMATLDSNSKLCKQRNIYKSSKHTHVFGGLIYCGSCGKPLGSTPGNLTRDGWHYSKYTCPTRRKSVTLCTGKSTSDPIIGEFVFNYILNMLNAQNDFDKINSPEELEKLLLIGDTFAYIDHIESNGLNDLFNVLSSGTVKGAVFGKGASLPTRKATVEPEVARLRNEKQKTERALDRLRSLYLYADEAMSEAEYMIQKNKLEETLEDINDQIGMMNTDSWQQSVSDEEFIQRASEFIIAQKLSGRKYVNYKRLAMSVDSEVLKNFVVSIIDSITIQDGLVSNIVFKNGLCHTFIFR

SEQ ID NO: 9663 - protein, 578 aa, Unknown
  Description of Unknown: Integrase B9664 sequence
  PS00397,IPR038109,IPR006119,PS51737,PF00239, cd03768,G3DSA:3.40.50.1390,PTHR30461,IPR025827,SM00857, G3DSA:1.10.10.2600,SSF53041,IPR011109,PF07508,PS51736, IPR006118,PF13408,Coil,IPR036162
VKKTAEELLNTIKVAIYIRVSTHWQVDKESLPVQRQDLISYCKLILNTDNYVIFEDPGYSAKNTDRPDFQRMMARVRTGEFTHILVWKIDRISRNLLDFAAMYQELKELGVTFVSKNEQFDTSTAIGEAMLKIILVFAELERHMTSERVTAAMLSRATNGKWNGGKVPFGYKYDKGAQEFVIDEAEARVVKLMYDLYDEQRSLLVVSKELNDRGYRSRKGSLWSPVTVGNLMRSPFYIGVMRYNYRDESGATFTFKPEDEWIMIEEHHPQIVTHEQWNRVVDTMKSQRRGQPGHGKSFNRGNVHIFAGLVTCGYCGSLMRATKDRVRADGSRPSIYNCASKRTGSDCPNKYISDLTIGPFVLNYIANIIRARKSFGVSTSIETLEKKLLRGDTFKDVIHIGRPGLEELYRHFQGTRGVEQNFMASPGATASNTEEERDLLLAEKHRKERALNRLKALYLYSEEEQAMSEAEYIVERKRLLDSLEGIDARLAEIDEALAQQIKLSDEEFIQKASYFIMAQQLTEKRQIDYTRFMRKADPQIVKNFIQNVCANFCIKSGRVTSIRFKNGIEHQFFYRDPE

SEQ ID NO: 9664 - protein, 578 aa, Unknown
  Description of Unknown: Integrase B9665 sequence
  cd00338,PF13408,IPR011109,Coil,PS51736, IPR036162,IPR006119,PTHR30461,G3DSA:3.40.50.1390,IPR025827, PS51737,PF00239,SM00857,SSF53041
MTPRKENESFDRIPVVALIRVSTEEQATEDKGGIPAQQDAIKRIAQQHDLDIRWTVQIEGVSGAVVMQSQQMKEVLRIVRGGVCKGIVMKEESRLMRAENFEDYAILQTLQQHGVKIYLVDGVMDLSKAGDKLFSHIKFAFAGYERTIIRDRMLGGKKAKRRRGEWVAGPNSVAFGLKLVKDGKINRLQVDDASIHRVQHLFQLFISGVTSFGKLARETGISYYSIPYILENEIYAGVHVPRKTVDPNRNVYRDDGSLRYQRRLVVPVTERERIQVLDNPPISPEVFAQAQWLLKLKREMRWKRTQETEDLYIYRGFLRCAECGMRLTTVKYLNKQANNFRADYYVCRAAHGAARANGTWQIKPASCKTRRIRREVLEPMLDDLVVRRFANPNFLLELIEAHSVAETQAAVTKTIERLHLEIEEADRAIERNQEMYIRGKISQAVFDKNDHNLQLEKRTSEVELAKLRPNVEQITPEMWVPIARQFQRWPKVAPQQKKVLLAAIAPIFIVGGYAGEKYHDTVVKVKGCHVNLTGEHLSVESDKSAEGEGSEEEDVLVDIGSRLYSGRDVNQSSIYIPF

SEQ ID NO: 9665 - protein, 528 aa, Unknown
  Description of Unknown: Integrase B9666 sequence
  cd00338,PF13408,IPR011109,IPR038109, PF07508,Coil,PS51736,IPR036162, IPR006119,PTHR30461,G3DSA:3.40.50.1390,PTHR30461:SF3, PS51737,IPR025827,PF00239,SM00857,G3DSA:1.10.10.2600,SSF53041
MPKTTKKITTIPATLTRFTATPITEQKKRRVAGYARVSTDHDDQFTSYEAQIDYYTNYIKSRDDWEFVDVYTDAGITGTSTKHREGFKRMVADALAGKIDLIVTKSVSRFARNTVDSLTTIRQLKENGIECYFEKENIWTFDGKGELLLTIMSSLAQEESRSISENCTWGQRKRFADGKVTVPFNRFLGYDRGPDGNLAVNREQAAIVQRIYAMFLQGMTYNGIAQQLTDDGILSPGGKPKWNTSAVKSILSNEKYKGCALLQKTYTVDYLTKKKKVNEGEIPQYYVEDNHEAIIDPDTFEMVQREMEKRGKGRKYHSGVHTFSSKIRCGECGSWYGSKVWHSNSKYRKVIWQCNHKFDGDKHCSTPHLTDDIIQQAFLSAANKLLATKDTVIADGREMMALLFDTTDLEREQEELQQETQVVSDMVQQCIYENAHVALDQAEYQKRYDGLTERFEKAKARLDAVTAEIHQMQTQRASIEDFLKAFAAMPDELTEFTLESWHGLVDYGTVYAVDDIRFTFKNGQEVKA

SEQ ID NO: 9666 - protein, 503 aa, Unknown
  Description of Unknown: Integrase B9667 sequence
  PF13408,IPR011109,IPR038109,PF07508,Coil, PS51736,G3DSA:3.40.50.1390,IPR006119,IPR036162,PTHR30461, IPR025827,PS51737,PF00239,SM00857,cd03768, G3DSA:1.10.10.2600,SSF53041
MNNRIDAIYARQSVDKKDSISIESQIEFCKYELKGGNCKEYTDKGYSGKNTDRPKFQELVRDIKRGLIAKVVVYKLDRISRSILDFANMMELFQQYNVEFVSSTEKFDTSTPMGRAMLNICIVFAQLERETIQKRVTDAYYSRSQRGFKMGGKAPYGFHTEPIKMDGINTKKLVVNPDEAANIRLMFEMYAQPTTSYGDITRYFAEQGILFNGKELIRPTLAQMLRNPVYVQADLDVYEFFKSQGTVIVNDAADFTGMNGCYLYQGRDVKPSKKNDLKDQMLVLAPHEGIVPSDIWLTCRKKLMNNMKIQSARKATHTWLAGKIKCGNCGYALMSINNPVGKQYLRCTKRLDNKSCAGCGKIITSELEAVVYQQMVKKLEKHKTLTGRKKAAKANPKIAALQVELAHVDSEIEKLVDSLTGANNVLLSYVNVKIAELDGRKQELLARIAELTVEAISPEQVSQISGYLDTWENVSFDDKRRVVDLMITTIAATSDSLNITWKI

SEQ ID NO: 9667 - protein, 528 aa, Unknown
  Description of Unknown: Integrase B9668 sequence
  cd00338,PF13408,IPR011109,IPR038109,PF07508, Coil,PS51736,IPR036162,IPR006119,G3DSA:3.40.50.1390, PTHR30461,PTHR30461:SF3,IPR025827,PS51737,PF00239, SM00857,G3DSA:1.10.10.2600,SSF53041
MPKTTKKITTIPATLTRFTATPITEQKKRRVAGYARVSTDHDDQFTSYEAQIDYYTNYIKSRDDWEFVDVYTDAGITGTSTKHREGFKRMVADALAGKIDLIVTKSVSRFARNTVDSLTTIRQLKESGIECYFEKENIWTFDGKGELLLTIMSSLAQEESRSISENCTWGQRKRFADGKVTVPFNRFLGYDRGPDGNLVVNREQAAIVQRIYAMFLQGMTYNGIAQQLTDDGILSPGGKPKWNTSAVKSILSNEKYKGCALLQKTYTVDYLTKKKKVNEGEIPQYYVEDNHEAIIDPDTFEMVQREMEKRGKGRKYHSGVHTFSSKIRCGECGSWYGSKVWHSNSKYRKVIWQCNHKFDGDKHCSTPHLTDDIIQQAFLSAANKLLATKDPVIADGREMMALLFDTTDLEREQEELQQETQVVSDMVQQCIYENAHIALDQTEYQKSYDGLTERFEKAKARLDAVTAEIHQMQTQRASIEDFLKAFAAMPDELTEFTLESWHGLVDYGTVYAVDDIRFTFKNGQEVKA

SEQ ID NO: 9668 - protein, 578 aa, Unknown
  Description of Unknown: Integrase B9669 sequence
  cd00338,IPR011109,IPR038109,PF07508,Coil, PS51736,G3DSA:3.40.50.1390,PTHR30461,IPR006119,IPR036162, mobidb-lite,PS51737,PF00239,SM00857,G3DSA:1.10.10.2600, SSF53041
MVRAVTYGRQSHKSETDSQASPLMQKEKGIAYINSQDNWKHVGHYEDVGLSGYDPNVYRPDFERMMEDARQRKFDVVVIYMLSRLTRQGAAEALKIQEELAQHGVAIVSTQEPFINTSDDNPFGVAFFALIAGLAHQESKNKSKFIRDAFAELKAKGSHSTGPVPYGFDAESVQVDGVTIRVLRPGETSDEEIGPKSTPADNVMHIIQEAERGVKENAIAYALTEKRAKTPLGSLDEEAAKARREAASKRRKGGASDTADYEWSSTVVRRILRDPRLAGFAIGPVDPKTKRRQILRDENGQPVRPHEGFITPKRWYDLQAILDGRKRERVVDRAGTLTFLGSWGVLRCGLCDSGMTVSNTDSTYVCNLRRSVGTVGKHVLRIRQEDADAIVASRLWTKVASLDPEDDDDIAILAAAAERFAVQGADPEAAAELAEQEAQLAHVQQSMKDLYADRDEGLYEGKTGRQAFKDTIRKYQQHEARCMARIDELKAAATVATRLPIDDWFADSDEGNPFEPGGLWDRWDVADKRAFLSLFVDSVSVGPAGTKRGSRLERAEKRIEITWASPAEDEEDNESVTG

SEQ ID NO: 9669 - protein, 578 aa, Unknown
  Description of Unknown: Integrase B9670 sequence
  cd00338,IPR011109,PS00397,IPR038109,Coil, PF07508,G3DSA:3.40.50.1390,IPR036162,IPR006119,PTHR30461, mobidb-lite,PS51737,PF00239,SM00857,G3DSA:1.10.10.2600, IPR006118,SSF53041
LTIQRRPSSSDPPPPGTPAALYIRVSTGRQAAADRHSPDVQRTRLLALAVREGWPVALVRQDVGRRHNLTREGYQDIIAAVRKREIGVVLVYMHDRLSSGIEWLSRLQEFDALGVPVVSEQEGASERGMLRFVRAGMQYEESLRLARRVGPARIAGARTGTHMGRTPYGYRRVYPQRQDATARPAGQLVPHEPEVRVVRDLYRWYLDGASTWSLALRLNEETVAGRAIPAPHGGGLWGETAVYTILRSPVYAGRVRYGQRPSGAYEPGDPVDVFVAEGRHEAVVDEEMWRAVQARLSAGNRRGPLGTRSGPRLGSGLLRCATCGAATIFCAAPRPDPSKPRRAGMYECGAARRGAARCQGVAINARAVHAAIRAELGRLTVVDRAYRPRRVAAEPDRARQTTARLTAEIATAERDLDAINRSAALTGELSAEQVASWRRLAGEAETHLMAARAQLQGVGQQGAVHRQTRDQVRQVITAALPAALRDADDDELIPLTRLLIRSACVMERVPAINTRWCRLDVEWSPLVVAMMADGDVTLAPPEPTPTRTARQEDDRLKARRYRERRRTQAVVTPTETSG

SEQ ID NO: 9670 - protein, 528 aa, Unknown
  Description of Unknown: Integrase B9671 sequence
  cd00338,PF13408,IPR011109,IPR038109,PF07508, Coil,PS51736,IPR036162,PTHR30461,IPR006119, G3DSA:3.40.50.1390,PTHR30461:SF3,PS51737,IPR025827,PF00239, SM00857,G3DSA:1.10.10.2600,SSF53041
MPKTTKKITTIPATLTRFTATPITEQKKRRVAGYARVSTDHDDQFTSYEAQIDYYTNYIKSRDDWEFVDVYTDAGITGTSTKHREGFKRMVADALAGKIDLIVTKSVSRFARNTVDSLTTIRQLKENGIECYFEKENIWTFDGKGELLLTIMSSLAQEESRSISENCTWGQRKRFADGKVTVPFNRFLGYDRGPDGNLVVNREQAAVVQRIYAMFLQGMTYNGIAQQLTDDGILSPGGKPKWNTSAVKSILSNEKYKGCALLQKTYTVDYLTKKKKVNEGEIPQYYVEDNHEAIIDPDTFEMVQREMEKRGKGRKYHSGVHTFSSKIRCGECGSWYGSKVWHSNSKYRKVIWQCNHKFDGDKHCSTPHLTDDIIQQAFLSAANKLLATKDTVIADGREMMAMLFDTTDLEREQEELQQETQVVSDMVQQCIYENAHVALDQTEYQKRYDGLTERFEKAKARLDAVTAEIHQIQTQRASIEDFLKAFAAMPDELTEFTLESWHGLVDYGTVYAADDIRFTFKNGQEVKA

SEQ ID NO: 9671 - protein, 578 aa, Unknown
  Description of Unknown: Integrase B9672 sequence
  cd00338,IPR011109,IPR038109,PF07508,Coil, PS51736,G3DSA:3.40.50.1390,PTHR30461,IPR006119,IPR036162, PTHR30461:SF3,PS51737,PF00239,SM00857,G3DSA:1.10.10.2600, SSF53041
MLATSTLPIDPPSGEWEYLLPKTIRRNALYRRVSGDDQERGSSLSDQFDAFVTRVGQDGGVFKEEHIFTDVRSGDGKYWRDREGIQALLAAAKRHELDFVYVAALDRFGRDYAVQEFLIQELKYYGVTLISMKKDEQTEGRNDPSSVLARTFFGMMAQEELKRIKDRTHLGIRGRVTKKGALLAGRRPLYGYHWADKEMEWDGQLITVPKACYVIYEPEAKVVRYVFDLALKRTPIRRIAIMLTEMGVPTPDGKQLWRPASLHNLLRHQGYTGQAVAWKHHYEYVPGQGVRKTVKDKSEWVSVEGCIPPLIDLSTYEKIQEILVRNKETAPRNNKHPLDALCRSGIAICGYCGHNLIAFTDAHKKSPSYICAIKIRGYHECRGVRATTFAVDGAAWTKAKEIICHPELIEEELKKRRVEDPVSGSLHAAETLMKDVTEAIINLTKAMEHTTDPTTIMILTQRLEELAKQKASYENQYDQVMRYRINWEDAMRALDDFKAWCDEVRPHLCSPDFEPTYQEKREALEMIGIRVAVFGKDQKQRYRVDVEPSEIMNKFSIVSRTSYTCDHNQPLLSYFVEG

SEQ ID NO: 9672 - protein, 577 aa, Unknown
  Description of Unknown: Integrase B9673 sequence
  cd00338,IPR011109,IPR038109,PF07508,PS51736, IPR036162,PTHR30461,G3DSA:3.40.50.1390,IPR006119,PTHR30461:SF3, PS51737,PF00239,SM00857,G3DSA:1.10.10.2600,SSF53041
MTKKRAALYARFSSDLQKDRSIDDQLALCRAHAIRKDFDVVTSFVDRAKSGASMNNRDGLWEMMSAAKRGDFDVIVMESLDRLSRDQADLPALHKRLVFSNVAIETVNEGEASHIHVGLRSMVGSMFLRDLADKCRRGATGRVREGKFPGARVYGYRCIPGKPGEREIDPEQAAIVVRIFREYAAGKSPRIIAADLSREGIISPSGTAVWSNQCLTGGRLRQGMIGNRLYIGEIRWNRTRIHRDPDTELEVRRATPAADHMLVPVPQLRIVPQKLWDAANAVRSQRAIQKFGPTGKVTRTTSAPARKEHLLAGLLRCGECSGNMRIYVTSATKGTRVACAGAKDRSTCEHTKTYHLETLERGILECMRTRLAEPELLKEALKAFHAEWVKQRKHCLTEHATLKRRLGDIEASTVRFVSALERGTMPEELIITRLQALETERTGVAERMRLLDADTTVVDLHPTAMTAYCASMDKLHAALEANRHDAEAMQAFRTLIDSIVVHKTEDRAPYQFTPYHRMQALIGADLFPASRSVPEIIRENGGTVRFASAKPANPDLAEANPDHRGQICTFGRYRMAA

SEQ ID NO: 9673 - protein, 577 aa, Unknown
  Description of Unknown: Integrase B9674 sequence
  cd00338,IPR011109,IPR038109,PF07508, Coil,PS51736,G3DSA:3.40.50.1390,PTHR30461, IPR006119,IPR036162,PTHR30461:SF3,PS51737, PF00239,SM00857,G3DSA:1.10.10.2600,SSF53041
MTKKRAALYARYSSDLQKDRSIDDQLALCRVHAIRANLEVVTTFVDRAKSGASMNNRDGLWEMMQAAKRGEFDVIVIESLDRLSRDQADLPQLHKRLEFAGVKILTCNDGETTKMHVGIRGLVSSIFLSTLADTVRRGHAGRVSEGKFPGARVYGYRCITGKPGEREIDPEQAAIVLRIFREYAAGKSPRTIAGDLTREGITSPSGTAVWSNQCLTGGRLRQGMIGNRLYIGEIRWNRTRVFKNPETEAEIRRATPAEDHMIVAVPHLRIIPQKLWDAANAIRRERAVQKFGPSGRVLRAAPVLARKEHLLAGLLRCGECGGKMRIYATSATKGTRVACAGAKDRSTCEHAKTYHLGTLERGVLDCMRARLAEPELLKEALKAFHLEWSKQRKHCLTEHTALKRRLMEIDASTTRFVSALERGTMPEAQIVARLQALETERVGVAERVRLLDGQTNVVDLHPTAMTAYCASMDRLHAALEANRDDAEARQAFRTLIDSIVVHKTEERAPYQFTPYHRMEALMGADLFPTSRSVPEIIRENGGKTRSIIAKSPNPELAEANPDLRGKIYTLGRYRMAA

SEQ ID NO: 9674 - protein, 577 aa, Unknown
  Description of Unknown: Integrase B9675 sequence
  PS00397,IPR038109,IPR006119,PS51737,PF00239, cd03768,G3DSA:3.40.50.1390,PTHR30461,IPR025827,SM00857, G3DSA:1.10.10.2600,SSF53041,IPR011109,PF07508,PS51736, IPR006118,PF13408,Coil,IPR036162
MKKVIGYVRVSTDKQDLQRQKVLITKYCESMGYSLVRFIGEKVSGAKSERSGLAELLTVSKDEADLIVVSELSRISRQDDIMNVISQLNSIRVNGLDLYILDTNTAINAADNMDGLEVMKLVFKAVGNADERRKITERMRTGRYTKLVKNPYAYVGGQIPFGFKTIDNPNYNEKSANDKEPKTILIPDEEQVKVLEMMFTKIANGFTLHRLAKYMIDNGMTYFKSKKFVSYQGIISEIIHNPIYKGERQYSGETFIIKPVINVELFEAANEALNSNRWMVSTSNNHFNPLKGILYCSCGRSLYFTNCKDYNYYKCSKKLNDAKEVICNNKGLRAETAFKAIWIAARTLLYQDKFNIKTTEKENLLQNDINIVKSALVTFKNEVKAKESEKEDIINKIQNLTNLSLISVFEKKFDSLESEIAELNEKITKKEIELNKLESKYNEIKQISIDEKLDSLDLEAKSELLHKVVEKAVWYSDTLRKGFLDVTYKNGYREVIMIQTDKTHRLIMQLPSTFTLNPLTRKVGAMMMKPTANKFSLEQEYTEYSFKEFLDNFGEVEEWIIEREIVNGFTQKKGSRK

SEQ ID NO: 9675 - protein, 577 aa, Unknown
  Description of Unknown: Integrase B9676 sequence
  cd00338,IPR011109,PF07508,Coil,PS51736, IPR036162,PTHR30461,IPR006119,G3DSA:3.40.50.1390,PF00239, SM00857,SSF53041
VKNQQKTAYSYVRFSTPRQQHGDSLRRQTEATESYCAANGLTLDRTLNLKDLGVSAYHGKNAAAGKLGKFITAVESGKVQPGATLVVESIDRLSRAEVLTALELFTRIINLEIEIVTLIDGKKYTKASVNGNPMDLMFSIMVMSRANEESAVKSHRSRANWTAARTKARENGKCKPGNCPFWTTPNATRTAYDVIPAKMSIARRIIDAAIAGYGTYSIAKTLNADGIANPTGKTLWSAHAVEHLLKSKTLIGQYQPRDITGKPIGEAVKAYYPAVCSEAEFYRIAASRKAPAAIAKGRTGTGVSNLFTGLLTHQPTNSSMRILVSRGKRLIPSAAHAGKVTWDSFGYAAFEDAFLRFVSEIEINTAPRSSKVAAIETELGMVSETLARLQNELNQNGNVDAFIIAAKNWTSRKEALTNDLENERAKNATPAVSTADISAMYAAMSKMPEDQRTAARLQLRSAIAAVVKQIDMAYETVRCVTIAAVRVTLANQTSRFFVIRYASRGADARKCQNGGPVTQIAGTSAIGHADFIPADLMATVRAMHTELADHKTVTPAEFGLALNAVWDAPPASKANAA

SEQ ID NO: 9676 - protein, 577 aa, Unknown
  Description of Unknown: Integrase B9677 sequence
  cd00338,IPR011109,IPR038109,PF07508, Coil,PS51736,IPR036162,PTHR30461, IPR006119,G3DSA:3.40.50.1390,PS51737,PF00239, SM00857,G3DSA:1.10.10.2600,SSF53041
MIKKTRKLSHDEKIVEKRKQLAEKGKVAAIWTRVSSADQYKQNYSIDTQKAACREYCERNNIRIKGYFGGENESAKFAGEKFLDMIGTVGENPEYNTIVVFDFDRFSRNSIDGITYKSTLKRKGITIESVNQPIDTNNILAEQIENILIIMADIDNAMRRHKCHDGMVACIKRGELYSRPPFGYDSRKEGKRHIITINEDGKTLKKAFEWIVEEPEISQAEIIRRLEARGLNISKQKLSQCLHNSFYCGLLEHRYLNGEIIKGKQEAMISESTFYKVQDILAGNNKNYQQAEETPEFPLKMHVFCAKDNHALSGYTVKKKGLKYYKCGVKGCGTNVSAKELHSKYAEILNGLNVPESLLPIYKRVIERKFKEKENDNLISKNAIEKNLSTLKTKLKKAKMRFLTEDGIDNDDYNEVKSDLETKIANCEKELKDCSRDLSNLAEYTDVAFKIASSLGSTWGEMDFKVCQKIQNLAFPKGIKWDGEKRCYRTDGMNEFFRQIGLQRGSARGEGIKKTGTDYSMSVLVAGEGHFTGIFGDSYPQLKAVQGRRTGSFGANLAHATAPSGRFPSTNMLIVLH

SEQ ID NO: 9677 - protein, 577 aa, Unknown
  Description of Unknown: Integrase B9678 sequence
  IPR038109,IPR006119,PS51737,PF00239,G3DSA:3.40.50.1390, PTHR30461,IPR025827,SM00857,G3DSA:1.10.10.2600,SSF53041, IPR011109,PF07508,PS51736,mobidb-lite,cd00338, PF13408,Coil,IPR036162,PTHR30461:SF3
MRRPTSQIGRRSVPIGVGTMPGNTAEGTIAMPRKKIAQTKDRNSTIAAAYARFSSDRQREESIEIQLEAIRKYCEGHDLTLGPVYKDLAMSGTNDRRPDFQRCLRDAERGLFGTLVIYKQDRFARNVEDSKRNMRRLRAAGVRVVSVREGELEDTPDGFLRESIGEIFAEYYSRNLSVLVKDGMRKSAEQLRTVGVRIYGYSVDESDHFVIDPEQSFYVSEIFRLYLAGTSGNEICAWLNSEGQRTLRGNRWDVRTLSNLLGQRAYMGVYHFGDIEVEGGMPAIISKETFAAVQELRKRRQSMKRCKQVNDYVLTDKCYCLDCGRAMCGTAGTSSSGKKYTYYGCMNKGGCRKRVSSQLVEDAVIDAIVEVLQDDEAKDAIVADMLEWSAMQPQMAEEWREQIQADKKRRDRLVAAVADGLPASSVMDAMKEIEDEIAALEAKVAREEAEMSATMDAESARAFLDSFLLGSRENVEYRKLLADSFIDKVFIDKRNAVVIFNLGLADEEQGYTLEDIQGIRDDLEFARRKCAYMKTCEPADKSGVRTSAIWWAKIRSLRTLKLYSRARTYAIGLPLAA

SEQ ID NO: 9678 - protein, 576 aa, Unknown
  Description of Unknown: Integrase B9679 sequence
  IPR038109,PS00397,IPR006119,PS51737,PF00239, cd03768,G3DSA:3.40.50.1390,PTHR30461,IPR025827,SM00857, G3DSA:1.10.10.2600,SSF53041,IPR011109,PF07508,PS51736, IPR006118,PF13408,Coil,IPR036162,PTHR30461:SF3
MKKNFKMPGSGSETPIRVAIYVRVSTVYQIDKDSLPMMKQDLTSYCKYILNTDDFVIFEDAGYSGKNTDRPAYQKMMSQIRQGLFTHLLVWKIDRISRNLLDFANMYAELKDLGVTFVSKNEQFDTSTAIGEAMLKIILVFAELERNMTSERVTATMINRASNGVWNGGRIPFGYSYDKPTQVFSIDPEENKIYNFMVETYEDTQSIVHTSRRLNEAGYRSRNGNMWSPVAVWTILRNPWYKGVYRYNYYKIPGRKAIKDESEWVIVENHHPASIDPDRFDRIQATLDKNARYRNTPGRKTAQKNVHVFSGLVWCAECGSAFTASPGKLHVSGYRPSKYGCPNVRKTKTCHAKYTSDVVLGEFLLNYILNILNAQKQFAYIHSTDDLQKRLLHGSTFSSVDHVDPDGLASLLNMLEKCSGSDPVLLKRPRSKPKMDPELKRMMADQKKQQRALDRLNDLYLYSDDSISEREYLVRKQQITDRLQEINEAIGMMSQEPWMRTMNDEEFIRQASSFILTQKLADKQYIYYENLAESLDPEILKNFFVSILDSIILRDGRPETVVFRNGLSHTFTYKDS

SEQ ID NO: 9679 - protein, 576 aa, Unknown
  Description of Unknown: Integrase B9680 sequence
  PF13408,IPR011109,IPR038109,PF07508,Coil, PS51736,G3DSA:3.40.50.1390,IPR006119,IPR036162,PTHR30461, PTHR30461:SF3,PS51737,IPR025827,PF00239,SM00857, cd03768,G3DSA:1.10.10.2600,SSF53041
MLAAIYSRKSKFSEKGESVENQIKLCEEYGNYLGIKEFKIYEDEGFSGGNVERPQFQKMLRDAKNKKFDMLICYRLDRISRNVLDFSQTIEELKKNNIEFISIKEQFDTSTPMGRAMMNIAAVFAQLERETIAERIKDNMLELAKTGRWLGGTAPLGYKSEPMEYSDSNGKAKKMYKLVQVPEEIELVKLIFTLYLDNKKYSSVATHLCKNHYKGKNGGEFSKGTVEQIIGNPVYCIADEHILNYFKKQGSTMCGELNGINGLMTYNKREGGKKDNPVSEWIISVGKHKGIVSSDIWLKCVEINNQNKQKASPRSGTGNKFLLSGLIVCGCCGSGMASWSHLNKKTDLTERYYRCNLKNRAATRCSTKMLNAYKAEDYVISHLKSIDEETFIKNYKAISKDIELKNNIGTEIASLKKHIEENNSIIKGYMRKLAVEEDADIISMMKEDIKALKEDNLTTQYKINKLEATDLTIIISSHEQLEDIIDRLRNFKKFIDFCEDVESKRKLILSVVENIIWHSESEILEVNLIGSGKKLTRGAVQSRNLCFGNSSRWDYYQNTNINTNPLLINFKKNPSK

SEQ ID NO: 9680 - protein, 576 aa, Unknown
  Description of Unknown: Integrase B9681 sequence
  cd00338,PF13408,IPR011109,PS00397,PF07508, PS51736,G3DSA:3.40.50.1390,IPR006119,PTHR30461,IPR036162, PTHR30461:SF3,PS51737,IPR025827,PF00239,SM00857, IPR006118,SSF53041
VRAVVYARVSSAIQRDRETIASQLRVLPEYIARQGWTLAAPATTYVDDGRTARAGHLEARLGLAALLRDAGARMFDVVVVVDVDRLTRSEDLAERGAILGALQRAGVKIATSTGQLIDLSTSSGDLMSSLNAFFAAEWVRKHRERIKAGKDTAIARGRKPAGPTPYGLAYDRSSGAWSIDQVTGPIAVEIVTRVADGESCVAISDDLDARGVPGPRGRTTWNRASVYRIVRGRHLIGEFVANKARRQVIAVPRLIDVATFERAQEALGASRRRGLRRTRHDYLLEGLGVCGVCGAPMLIRSATPQRRGRMSPAAYVCRNRKFGRPSIRNGAAACRAPIVVCAEADAAIWSTFIAELAEPELAAAVVAERARGADDGATWAGDAAAAERHLARLEKVETVVMSRFRRGAVSEGALDAELAAIGRERAAVRAQLATAELAIARTVATRVRLEDAESALRRLREVAATAPAPLRAEVLRTFVDRGGVVFERGRLRLAMSVAFAAAPSEERRSGAQLVLVNGPGSRTVDVVPLRVRALAMLSRRACGMCGRELEHDANRRREFCSNVCKHAAWRRVRTAA

SEQ ID NO: 9681 - protein, 576 aa, Unknown
  Description of Unknown: Integrase B9682 sequence
  cd00338,PF13408,IPR011109,IPR038109,PF07508, Coil,PS51736,G3DSA:3.40.50.1390,IPR036162,IPR006119, PTHR30461,PTHR30461:SF3,PS51737,IPR025827,PF00239, SM00857,G3DSA:1.10.10.2600,SSF53041
MIAAIYSRKSKFSEKGESVENQIKMCEAYANTIGIEKFIVYEDEGFSGGNVERPQFQKMMKEAKSKKFNYLICYRLDRISRNVSDFTQTIEELKKYRIEFISIKEQFDTSSPMGRAMMNISAVFAQLERETIAERIKDNMMELSKTGRWLGGTPPLGFKSESVKYNDSNGKDKKMYKLIEVFEEMKIVKLIYNLYLEKKGFSAVANYLCKNYYNGKNGGEFSRQTVQQIITNPVYCVADSLAFEYFKNVDATIYGEPCLNGFMVYNKREGGKKDKPLNKWIFAVGEHPGVINSNDWIECQKINEHNKSKTSPRVGTGSKFLLASMITCGCCGSGMASWSHNNKKSGKMEKYYRCNLKNRASNRCNNKMLNAYKAEDLIIESIKNTNVELLIKNIELHKKEVETTDSAVIEVMRIKKEIEQNNKIRQGLIRKSAFMDDDPETIEMFKQEIFEMKKENIELESKIKAIEIDSVTLEKMNEKNISVDEIIASLTHFKTYINYVDDVEAKRELILNMVESIVWYGESETLEVNLIGSGKVLPRGTVLARNLCYGSKSRRNNYQNTSMNTNALIVSLSTKK

SEQ ID NO: 9682 - protein, 575 aa, Unknown
  Description of Unknown: Integrase B9683 sequence
  PS00397,IPR038109,IPR006119,PS51737,PF00239, cd03768,G3DSA:3.40.50.1390,PTHR30461,IPR025827,SM00857, G3DSA:1.10.10.2600,SSF53041,IPR011109,PF07508,PS51736, IPR006118,PF13408,Coil,IPR036162,PTHR30461:SF3
MNKIIDTLNTQKAAIYIRVSTHHQIDKDSLPLQREDLINYAKYALNIDNYEIFEDAGYSAKNTERPSYQYMMSKLRTGEFSHLLVWKIDRISRNLLDFATMYEELKTLGVTFVSKNEQFDTSSAIGEAMLKIILVFAELERNMTSERVSAVMLSRATNGQWNGGRVPYGYNYDKSTKQFSIHPIEGNHIKKLYDLYLETQSMLAVAKYFNEHGINTKTGNNWSPTTIGKILASRFYLGEYQYNLHKDGIGGAGVASLKPEDEWITVKDHHPAIIEIEQWDKCAEIRACNHRNSNAPKRYRRKNTHIFAGLIICGECGSTYQATIDRARTGGYRPSIYLCSRRKQYSDCQNKYMSDITLGPFILNYISNIIKANANMGKTTTPDMFKKKLLRGDVFKDVKDIAPSGLNEMYNMIVSKKFNSDPFTSAVNRDESQPDFASERELLISEKRKYLRALDRLKTLYLYNDNAMAEKDYIIENKNILDNLKRVDERLEEIEKNSSQNFTITDSEFIEKASYFIISQELSNQRYINFNSLIQHIDTNVLKNFIQSVIKKIVVWDGRIISIQFKNGIEHDFLY

SEQ ID NO: 9683 - protein, 519 aa, Unknown
  Description of Unknown: Integrase B9684 sequence
  cd00338,PF13408,IPR011109,IPR038109,PF07508, Coil,PS51736,G3DSA:3.40.50.1390,IPR006119,PTHR30461, IPR036162,PTHR30461:SF3,IPR025827,PS51737,PF00239, SM00857,G3DSA:1.10.10.2600,SSF53041
MKKAAVPSCSPRTAVAYARYSSAGQRDVSIDQQLADIRAFAKREGFTIVHEYADHARSGFKNTSARTAFQTMMSAAESGAFDTLIVWKVDRFGRNREESAVFKGRLRRHGVKVLYAMEPIPEGSAGVLLEGMLEATAEWYSRTLSENVTRGMTDNAMRCLYNGTRILGYTRGADGRYAIQPEEAAVVRNIFDLYRSGYSAARICRQLNDQGLRTSHGKPFSEEGLLRIISNERYTGVYIWGSIRVPDGMPAIVEKSAFEEAQRMKKKTARHVEQGAVDYLLTGKAFCGHCGAAMIGDSGTSKDGTRHYYYTCQARKARKGCAKKSVTKDYLESTVISFVLDHVLSDDHIESLADAVMALQEEEMKSSPLAAMEAEYAETKKKIDNINDAIAAGIWNSSTSARLKVLEDAAETLRVSVETLRYSQSQLLSRDRVLFFLRRFTKGNRNDPLLRRSIIETFINAVYVFDDHLDLVINNCEGNQRFPLESLPDPGPSCSDILASGVPAVTHPNTQVTIFRIAV

SEQ ID NO: 9684 - protein, 575 aa, Unknown
  Description of Unknown: Integrase B9685 sequence
  cd00338,PF13408,IPR011109,IPR038109,PF07508, Coil,PS51736,IPR036162,PTHR30461,IPR006119, G3DSA:3.40.50.1390,PTHR30461:SF3,PS51737,IPR025827,PF00239, SM00857,G3DSA:1.10.10.2600,SSF53041
MFNIQGKKAVALYRVSTERQTSKEDKDIPAQRELVHKFIEQEELILIKEFVEGGVSGFKTKISERDAIIEIKNMADNKEFDVLVVYKSDRIGRTTDESPLVVRYLNNKGVRIFTTEGSELKTETQLDKLMTYLSFWQNETESIKISQRATDYHIISTEKGKYRGGGEKALPFGYTVIPEGDVNLKGKKIGKVVIKEDEAEIVKLIYKLSIENNMGGRAIAAYLNENGYRKYARNGNGWNYTTINRILNNVFYKGYMHMHSKLKNQDFLSEKIEELVIIPEEIWEKNQQVLASRKKESSKETKGSSKSRVLLSGLVYCGHCGSKMHVWANYKYKKDEYGQTIAKVEDYYRCKSKYVKNLNKCDGQTSYFSNRIDRIVERETLDFMNELSKRKLTEKFKQDLLDDVQTLTKQKKDIQKSIEEKQKDLLELKKNIPKAMRNEYILSLSELKEAKDLIENELTELFNQDNIVDKKLKEAKAALKEYAIIDESMISFVDRYNKADFITKKAILNSVIDRVTIYKTNIDIKYKVAIIVYKENSIENSGGEMYTDGSPYEYKTQPQNFIINVTRNVKFSIAS

SEQ ID NO: 9685 - protein, 574 aa, Unknown
  Description of Unknown: Integrase B9686 sequence
  cd00338,PF13408,IPR011109,PF07508,Coil, PS51736,G3DSA:3.40.50.1390,PTHR30461,IPR006119,IPR036162, PS51737,IPR025827,PF00239,SM00857,SSF53041
MPSVQKTGKGNTPRPWVIYTRVSTDDQAQTGTSLETQEAGCRSLAKAYGHPIAEVICDDGYSAATLKGGRRKGLEALNKRPGAKRLLAMIEAGSIGGVIIHKLNRLVRNARQLLELIELMEERGVAFASVNDRIDTGSAMGRMFLTLLAAIDQLESEQISERVVAVLQYMRSQGRWAGGNVPAGMMVEVRGKDRYLVPDPTWGPIVGKAWPMVIAGASLRKVADWFTTQEVPLKSGKRWSMPAVSRVLSRRLYIGALVDQETFDRAQAALASRISPEKRKREADEAGETEERTKAVLVSGRVWRLQDIARCARCGSAMIGVTARGHGGEYAYLRCLGKVRRGREHCGGRDLPAQPWEDAVVERLVQYVTGSNDLADRIAAIVAQHQAEAAPLRATRDAASLERDRLREQLGKAMDMILAGGSVARAFAPKVQELQDAIEALDRRIATADGRLMAAELQADHVAAIAEALREEITHLPEQPLEVQKRNLAQVVEHVELASGMPGRIVLVLPDLLGEPPPIPGHQGSEAAAAAGGAQVRSKLAKWLRRGNAERTKESISIPLVVEEFRQPRKGGGI

SEQ ID NO: 9686 - protein, 574 aa, Unknown
  Description of Unknown: Integrase B9687 sequence
  cd00338,PF13408,IPR011109,IPR038109, PF07508,Coil,PS51736,G3DSA:3.40.50.1390, IPR006119,PTHR30461,IPR036162,PTHR30461:SF3, PS51737,IPR025827,PF00239,SM00857,G3DSA:1.10.10.2600,SSF53041
MNVYRTREILKTCSIFDLKLKVAFYARVSTESEDQQVSIHHQDEYYRNFIAQNKNWVFVGAYIDNGISGIRTEKRDEFQRMMADAKTGKIDMIVTKEITRFARNTLDSIKYTRELLMYGVCVWFQNDNINTIDEDSELRLTIMSGIAQDESRKLSNRIKFGHAQSIKNGVVLGARIYGYIKKDGKLTIDPKTAPMVKEIFEKYSTGEWSTSTIEKYLYKKGYRNYKGGKLSRDNIKKIIKNPKYKGYYCGGKVKVVDMFTKKQEFLPEDEWTMYKDDGNHVPQIVDESVWNKANVIMQTRSDAIKSHRTSFKQNNLFTGYIFCGDDGAPYWMKQRTTRGREDVRWVCSYRIKNGAQSCNSFGIHEKELKIMLADLINKSGDIQAAIERYISLVEKNIDFSNDGAEINRLKNMILQLEKKKDKLLDLNLDGIITNSEYLEKNEKFKNEIQDISNKLSELESKEEANKDSHLKLKEIGKILNDLQGIGPEDITKAVLGEFLDKIIVNPKRPQECEILFFLKTGDVKKKSIIERDEQSCSEYFFLNKFSERHAVFYRKINYVDGCEKEFNYTYAFAI

SEQ ID NO: 9687 - protein, 574 aa, Unknown
  Description of Unknown: Integrase B9688 sequence
  PF13408,IPR011109,IPR038109,PF07508,Coil, PS51736,IPR036162,G3DSA:3.40.50.1390,PTHR30461,IPR006119, PTHR30461:SF3,IPR025827,PS51737,PF00239,SM00857, cd03768,G3DSA:1.10.10.2600,SSF53041
MKDNKAGFDGRITALYTRVSTGYQIDKDSLPFQRKELKNYCVHVLHLSPDEIEVFEDAGKSGKNTDRPAFQRMMKKVKAGKVARVVVYKIDRISRNLVDFSLMYDDFKENDATFISLNEQFDTSSAIGEAVLKIILVFAELERKLTSERVTGVMIGRAQECKWNGARVPFGWAWDSESEKPVHDEVESQIVRLMYNMYEETKSTSKIRDYLNENGIETKRGGLWTTKTVGDILHNPINRGDYRYNYRHSARGKKKPDEEVVYIPDVFPPIVSGEQFDRVAAQMKKNYESRHLNGFSHSKKHIHVFAGLLRCVECGAYFQVSNYDKPRLNGFRPTGYRCYTRTQNRKCDARGASDVVVGAFVFNLISNIVAVSKDRKKYAAGGIEEIEARLLTGKAFSDVARIDGGSLNDIYDALRGVSSSSSSYIPAPLPQSSSNGASIEKKQKEAAKITRALDRLKKAYLFDDDAMDEREYMTTRAELEENLTRLNNEIADAQDEAFVNVSELSFVTSASEFLLSYKVQSGEEIIYSDFAPVVGDEALRKFVTLLIARIDIKQARVACVAFQNGLEIRFIYKA

SEQ ID NO: 9688 - protein, 574 aa, Unknown
  Description of Unknown: Integrase B9689 sequence
  cd00338,PF13408,IPR011109,IPR038109,PF07508, Coil,PS51736,G3DSA:3.40.50.1390,IPR006119,IPR036162, PTHR30461,PTHR30461:SF3,IPR025827,PS51737,PF00239, SM00857,G3DSA:1.10.10.2600,SSF53041
MGKKQKTNGGDAVIYARYSSHNQRDVSIEQQVEACRKHAAELGLTVTATYEDRAISGKTDKRPSFQRMMRDAEQHKFAYVLAWKSNRIGRNMMQALVNESRLVDCGVKVFYAEEDFDDNAAGRFALRSMMNVNQFYIENMAEDVKRGLYDNAKKGLVNGSLPLGYKRGADGKPEIDEPKAAIVREIYTRVAAGELFASIAADLNARGIRTARGREWNKGSFHVLCHNDRYRGIYMYGDIRIPGGMPRIISDELFYDAQEAYGMKKDNRYGRARHGAENYLLTGKLYCGHCGSYMVGISGTSKTGEMHYYYACQKHRLEHTCEKKAIRRDVIENAVARVIMMYCLDDETIDFIVDSTIAYFKQKDHELHIEAMENELAAVQQAISNLMKAIEAGIITPTTRTRLLDLEEQQAKLSAKINTAKAERVEIDRDDLIAGLQLFRTGDIKNKKFLAKLFNTFLLAVYLYDDNRLKIVFSFTGNHNNIEIPLELDNDCPDSESGPYETEVRMSHLECRKNSGTPPSSGGAEKGDGCSGGRFVRTAPLPPHSKCTVRTLGSNVTIQMVGSVFVLYCEIPTR

SEQ ID NO: 9689 - protein, 574 aa, Unknown
  Description of Unknown: Integrase B9690 sequence
  IPR038109,PS00397,IPR006119,PS51737,PF00239,G3DSA:3.40.50.1390 ,PTHR30461,IPR025827,SM00857,G3DSA:1.10.10.2600, SSF53041,IPR011109,PF07508,PS51736,IPR006118, cd00338,PF13408,Coil,IPR036162,PTHR30461:SF3
MASLYKEEAGTPLLKVAIYIRVSTSHQIDRDSIPMQRKDLAAYSELILGTSNYVYFEDAGYSGKNTERPAYKEMMERVRKHEFSHVLVWKIDRISRNLLDFSEMYLELQKLRVVFVSKSEQFDTSTAVGEAMLKIILVFAELERKMTSERVRATMISKASSGEWNGGKIPYGYSYDKETATFSIVEEEAAVCRILRDDYLKFHSIIHSTKLLNDSGYKSRSGKPWSTTTCWKILSSPFYAGIYRYNRYRGTEHRTINPSGEWVLVPDHHPAIFTVEEHEKMAAFLADNSRRMNTLDTYNYKRNTYVFSGLLFCDSCGSRMLPQTGRKHKDGYNPATYYCAKTKKTRSCDNRGVSDSVVGEFVLNYILNMLNAKKSFSFIKSPEALEERLLSGSSFSEIVRLEESGLHEFYNLLSNYSSDDSFVFSMKKPKKRKASVDPEVSSLRKERERQERALKRLESLYLYSDNPLSEREFILRSAEINDKIEAVNKKLGLISTEASSVLSDEDFVRQASHILVSSLLRDKEYVFYRNIATNTSPEVLHDYFASIIDSVRVYKGRVMSIVFKNGLTHKFLYE

SEQ ID NO: 9690 - protein, 573 aa, Unknown
  Description of Unknown: Integrase B9691 sequence
  cd00338,PF13408,IPR011109,IPR038109,PF07508, Coil,PS51736,IPR036162,IPR006119,PTHR30461, G3DSA:3.40.50.1390,PTHR30461:SF3,IPR025827,PS51737,PF00239, SM00857,G3DSA:1.10.10.2600,SSF53041
MAKVKLPDKPRVAIYTRVSTLHQIDKDSLPMQRQDLINYARLILNTEDYVVYEDAGYSGKNTDRPKFQEMMQQVRLGMFTHILVWKIDRISRNLLDFATMYSELKQLGVVFVSKNEQFDTSSAMGEAMLKIILIFAELERNMTSERVTAAMLSRAANGQWNGGRVPLGYDYDPETKTFTINESEAAVVKIIHDKYEQERSLVSLARYLNGHGYRTRTGCTYSPSTLLIILRNVFYCGDYRYNVLKDGDRQKRKKESEWITVKDHHPAIISREQKDEIARILKENRRLECERRGIYSKKKNVHVFGGLVICGNCGHAMTSTIRPADQDGIRWSVYVCPTKRRSEYLCKGRATSEVVLGEFVFNYILNMLNVQKNFDSINSVEDMEKMLLSGSTFRDVDGIERAGLDDLYNMLASGLTEKAPFDSSVEVRKKPVVSDIELENLNTEKTKIERAAERLQSLYLYSDDSISQKDYIIQREKLMSQLAEVNEQIGMVMSNADEKDVSDEEFVHAASKFILTQKLEGRTYIYYKRLATTVSREVLRSFVMSIIENITIYDGRVQTIVFKNGLSHTFILK

SEQ ID NO: 9691 - protein, 573 aa, Unknown
  Description of Unknown: Integrase B9692 sequence
  IPR038109,PS00397,IPR006119,PS51737,PF00239, cd03768,G3DSA:3.40.50.1390,PTHR30461,IPR025827,SM00857, G3DSA:1.10.10.2600,SSF53041,IPR011109,PF07508,PS51736, IPR006118,PF13408,Coil,IPR036162,PTHR30461:SF3
MAYNAQNKTGARVAIYVRVSTLHQIDRDSLPMQKQDLLAYAKLMLNTDDCVIFEDAGYSGKNTDRPKFQEMMSQMRAGAFTHLLVWKIDRISRNLLDFATMYNELKALGVTFVSKNEQFDTSTAMGEAMLKIILVFAELERNMTSERVTATMISRANNGLWNGGRIPYGYDYDYETHEFSVNEEESKVVILMHDMYEQERSLVRVVRELNERGYRSRAGNLWSPVSLLIILRNVFYCGDYRYNMLKEGDRQKVKDESEWVTVENHHVAIIPKDQKERIMATLDSNSKLCKQRNIYKSSKHTHVFGGLIYCGSCGKPLGSTPGNLTRDGWHYSKYTCPTRRKSVTLCTGKSTSDPIIGEFVFNYILNMLNVQNDFDKISSPEELEKLLLIGDTFAYIDHIESNGLNDLFNVLSSGTVKGAVFGKGASLPTKKATVEPEVARLRNEKQKTERALDRLRSLYLYADEAMSEAEYMIQKNKLEETLEDINDQIGMMNTDSWQQSVSDEEFIQRASEFIIAQKLSGRKYVNYKRLAMSVDSEVLKNFVVSIIDSITIQDGLVSNIVFKNGLCHTFIFR

SEQ ID NO: 9692 - protein, 573 aa, Unknown
  Description of Unknown: Integrase B9693 sequence
  cd00338,IPR011109,IPR038109,PF07508,Coil, PS51736,IPR036162,PTHR30461,IPR006119,G3DSA:3.40.50.1390, PTHR30461:SF3,PS51737,PF00239,SM00857,G3DSA:1.10.10.2600, SSF53041
MTQRAALYARFSSDLQKDRSIDDQLALCRVHAQREKLKVVATFADRAKSGATLFDRQQLWELMQAAKRKEFDVLVVEALDRLSRDQEDLPGIYKRLEFAGVKIRTCNEGETTKLHIGIRGLVSSLFLSDLGAKVRRGHAGRVREGKFPGAVTYGYRAITGKPGEREIDPEQAKVVIRIFTEYADGRSPRKIAADLTRNGIPTPADAAAWNHQTFIGGRYKRGIIGNPLYVGKIAWNTHTTIINPDTGKKAKRAAPAEDHITVDAPQLRIIPQELWDAANAVRKNRGAAKFGPGGKLAGRVTSNKEHMLSGLLRCECGSHMRIANTSRSGGSRVACAAAHQHQTCDHSKTYDLNTLQTEILACMREQLTDPKRIQIAVRAFHDEWATQKRKVTGNVTTMKKRLADIGTATNRLVDALEKGTMSTDTIVERLNNLETERVALAERLRVVEAQNGDNVIELHPRTLQAYCEAIDKLHLSFANDQDHAANRSAFRNIIDSIIVHQTAKRAPYEFTTYHRVEALMGMELFPKTRTAQEVLKDQGVVCSELGNPENPGLPLSQQQKGRIIAFGRWRAAA

SEQ ID NO: 9693 - protein, 573 aa, Unknown
  Description of Unknown: Integrase B9694 sequence
  cd00338,PF13408,IPR011109,IPR038109,PF07508, Coil,PS51736,G3DSA:3.40.50.1390,IPR006119,IPR036162, PTHR30461,PTHR30461:SF3,IPR025827,PS51737,PF00239, SM00857,G3DSA:1.10.10.2600,SSF53041
MANGLIKNHNQNLQLKRVAALYRVSTKKQLDENDIPMQERACRNFVAQRSDWKLVKEYYERGVSGFKVSANKRDAIQQAKEDAEKKIFDVLLVFMFDRLGRRDDETPFVVEWFINQGIEVWSVIEGQQKIEQHTDRLINYLRFWQSSGESRKTSERVNEKHRQMVEDGIFRGGGIPYGYKTVESGKVNKRKKPLLKLVIDEEEAEVVKLIYSLALNEGYGQLRIAKYLNEQGILTRNEKKWGAPTINVILKNPIYKGVMKYEQGEKSVYSKPIPELQIINETSWDKVQDLRKHKNPNNKEKHNSTPISTKGKLLFIGMARCGVCGSRLTSTYFTNKYKSKTTGEVVTYSYSASYRCSGKLQGKEKCTGQATFSAKKIEGIVLKQLDIYLDRLAQVDLTSEIQRLKQKHANKDEQQLKEIHRKLEVLYEELAVLNNEVPKAIMGKSAFNPELLSNLIKQKEVEISENNQKLEELQERVKSKNIRETELIELQQHIPIWKDVFNSASVERKKVMLSYLIDEIYVSKKEVNVKLKIDIEDFIKSTCETSYSGRAPYTTFTGIKSLIEEQLIFALGS

SEQ ID NO: 9694 - protein, 572 aa, Unknown
  Description of Unknown: Integrase B9695 sequence
  cd00338,PF13408,IPR011109,IPR038109,PF07508, Coil,IPR036162,PTHR30461,IPR006119,G3DSA:3.40.50.1390, PS51737,IPR025827,PF00239,SM00857,G3DSA:1.10.10.2600, SSF53041
MAYRKITDIKDTIGMRAVFYARVSTAEEEQLNAIELQIEENRGCIKDHGWKLVGEYIDRSKSGTMVKGRDDYQRLYEDLYEDLFDIVVIKDQERLQRNTLDWYLFINRVVQTGKLLFMYMDGKFYSPDDALITGVRAIIAEEFSRNLSKKLHNYHDHRIEKARQGQEIALQGSGNVYGWDKKDGKYYINPEQAKVRRLMCEGIMARKGSTLIAKELNEAGYRNTVGKLWKPMDIPKFVYDCKNVGTMIINKERHDFESKQTIKLPKEEWVYVENALPPIVTQEEWDLICKIHEERVIATGSDRRGKKTSGYSFSGKLVCGICGAPYWRKQRVSKDEYWVCSTKQTKGRRTRKRDSTMGKAGEINPLGCDNENISYNSLMEIMGVVSERLQANTDTIKHDMINWLTKLRKQLLEANGGHTEADLQRELSRKSKLLDAYLDGILNKQEYQKKAEELDERIIQLKAETEKNKANSGDIAEIDKVLANIDEEVSRYVDGNEKLKVEYLLEHLEQVQIFPDKVIVIVPILSEGIVVEKAQYVSREKCSKIHTESMIHYLEDYMYCTRKLGLYVQLVA

SEQ ID NO: 9695 - protein, 572 aa, Unknown
  Description of Unknown: Integrase B9696 sequence
  cd00338,PF13408,IPR011109,IPR038109,PF07508, Coil,IPR036162,IPR006119,PTHR30461,G3DSA:3.40.50.1390, IPR025827,PS51737,PF00239,SM00857,G3DSA:1.10.10.2600, SSF53041
MAYRKITDIRDTIGMRAVFYARVSTAEEEQLNAIELQIEENRGCIKDHGWKLVGEYIDRSKSGTMVKGRDDYQRLYEDLYEDLFDIVVIKDQERLQRNTLDWYLFINRVVQTGKLLFMYMDGKFYSPDDALITGVRAIIAEEFSRNLSKKLHNYHDHRIEKARQGQEIALQGSGNVYGWDKKDGKYYINPEQAKVRRLMCEGIMARKGSTLIAKELNDAGYRNTVGKPWKPMDIPKFVYDCKNVGTMIINKERHDFESKQTIKLPKEEWVYVENALPPIVTQEEWDLICKIHEERVIATGSDRRGKKTSGYSFSGKLVCGICGAPYWRKQRVSKDEYWVCSTKQTKGRRTRKRDSTMGKAGEINPLGCDNENISYNSLMEIMEVVSERLQANTDTIKQDMINWLTKLRKQLLEANGGHTEADLQRELSRKSKLLDAYLDGILNKQEYQTKAEELDERIIQLKAETEKNKANSGDIAEIDKVLANIDEEVSRYVDGNEKLKVEYLLEHLEQVQIFPDKVIVIVPILSEGIVVEKTQYVSREKCSEIHTESMIHYLEDYMYCTRKLGLYVQLVA

SEQ ID NO: 9696 - protein, 572 aa, Unknown
  Description of Unknown: Integrase B9697 sequence
  cd00338,IPR011109,IPR038109,PF07508,Coil, PS51736,IPR036162,IPR006119,G3DSA:3.40.50.1390,PTHR30461, PTHR30461:SF3,PS51737,PF00239,SM00857,G3DSA:1.10.10.2600, SSF53041
MNNYIASLDRNRPRNIAFYGRVSTEHEAQLSALQNQMQWYDDQLKFHPNWNLVEKYIDEGITGTQAKKRPGFLRMIEDSKKGRFDLIVTREVCRFARNTVDTLVYTRELKSKYNIEVYFVDDNIWTMDGDGELRLTLMATLAQEESRKTSDRVKAGQKISRENGSLYGNGNILGYDRVGNTYVINEEQAETVRMIYDMYLDGLGSMKIAKSLSVQQRKNASGDIKWSAERVMRILKKSTYTGVLAYGQSHSNNYLEQKRINNLDRDSYMYQKVNIPVIIPQNKWDDVQKIIARRTKSVGDKLSGKKDVKEFWSKKLLCNCGSSFRRNKWRTNKTGEAVYGYQCQRQLNYGSKQFREKNGLDTDGYCGIRMVADWKLDMMAKMVIEHIWKNKGESVILALKMISENYEEDVKPNKKNIKETELKIEKLQKRLQNLIEMRADGEISKEEFAESKNTITEQISILNSELTIDEVESDEPESIEKKIEVIKQAMNEVIDFSQPKLPKYIIDKFISKVLVLDNNKFRWYINLGNDYDKNSDIYLDTQVEGRKNNYSAQILSNDDSLSSVHSSTGSYR

SEQ ID NO: 9697 - protein, 572 aa, Unknown
  Description of Unknown: Integrase B9698 sequence
  cd00338,PF13408,IPR011109,IPR038109,PF07508, Coil,IPR036162,IPR006119,G3DSA:3.40.50.1390,PTHR30461, IPR025827,PS51737,PF00239,SM00857,G3DSA:1.10.10.2600, SSF53041
MAYRKITDIKDTIGMRAVFYARVSTAEEEQLNAIELQIEENRGCIKDHGWKLVGEYIDRSKSGTMVKGRDDYQRLYEDLYEDLFDIVVIKDQERLQRNTLDWYLFINRVVQTGKLLFMYMDGKFYSPDDALITGVRAIIAEEFSRNLSKKLHNYHDHRIEKARQGQEIALQGSGNVYGWDKKDGKYYINPEQAKVRRLMCEGIMARKGSTLIAKELNDAGYRNTVGKPWKPMDIPKFVYDCKNVGTMIINKERHDFESKQTIKLPKEEWVYVENALPPIVTQEEWDLICKIHEERVIATGSDRRGKKTSGYSFSGKLVCGICGAPYWRKQRVSKDEYWVCSTKQTKGRRTRKRDSTMGKAGEINPLGCDNENISYNSLMEIMGVVSERLQANTDTIKHDMINWLTKLRKQLLEANGGHTEADLQRELSRKSKLLDAYLDGILNKQEYQKKAEELDERIIQLKAETEKNKANSGDIAEIDKVLANIDEEVSRYVDGNEKLKVEYLLEHLEQVQIFPDKVIVIVPILSEGIVVEKTQYVSREKCSKIHTESMIHYLEDYMYCTRKLGLYVQLVA

SEQ ID NO: 9698 - protein, 572 aa, Unknown
  Description of Unknown: Integrase B9699 sequence
  cd00338,PF13408,IPR011109,IPR038109,PF07508, Coil,G3DSA:3.40.50.1390,IPR036162,PTHR30461,IPR006119, IPR025827,PS51737,PF00239,SM00857,G3DSA:1.10.10.2600, SSF53041
MAYRKITDIKDTIGMRAVFYARVSTAEEEQLNAIELQIEENRGCIKDHGWKLVGEYIDRSKSGTMVKGRDDYQRLYEDLYEDLFDIVVIKDQERLQRNTLDWYLFINRVVQTGKLLFMYMDGKFYSPDDALITGVRAIIAEEFSRNLSKKLHNYHDHRIEKARQGQEIALQGSGNVYGWDKKDGKYYINPEQAKVRRLMCEGIMARKGSTLIAKELNDAGYRNTVGKPWKPMDIPKFVYDCKNVGTMIINKERHDFESKQTIKLPKEEWVYVENALPPIVTQEEWDLICKIHEERVIATGSDRRGKKTSGYSFSGKLVCGICGAPYWRKQRVSKDEYWVCSTKQTKGRRTRKRDSTMGKAGEINPLGCDNENISYNSLMEIMGVVSERLQANTDTIKQDMINWLTKLRKQLLEANGGHTKADLQREISRKSKLLDAYLDGILNKQEYQKKAEELDERIIQLKAETEKNKANSGDIAEIDKVLANIDEEVARYIDGNEKLKVEYLLEHLEQVQIFPDKVIVIVPILSEGIVVEKTQYVSREKCSKIHTESMIHYLEDYMYCTRKLGLYVQLVA

SEQ ID NO: 9699 - protein, 572 aa, Unknown
  Description of Unknown: Integrase B9700 sequence
  IPR038109,IPR006119,PS51737,PF00239,G3DSA:3.40.50.1390, PTHR30461,IPR025827,SM00857,G3DSA:1.10.10.2600,SSF53041, IPR011109,PF07508,PS51736,mobidb-lite,cd00338, PF13408,Coil,IPR036162,PTHR30461:SF3
MARKTTPTAKGLAATYSRVSDPNDRKEASLETQEAAQVALLESRGYVVPPEYRFREKFTGMESIYDRPVLGRLRDLIEAGTIRAMASYDTDRLARDSRHLITVVAENEKCGAETLFVKCDHAAKGRIGELILYMKGFASALEWDAILDRTTRGRQRILDRGQFVGGGVVKYGYVWCKEERRRTANPETAGHVRRIFAAVADGMSLQALAAALDREGIPTPYAYAGRAGADSAWWPTCLRRLIRDRTYLGIATSGKDEPSPRGGRTAGGRARRRPRPESERTVLADGRTEALVDRETFDRANRAMAAGNTRRGKPAVEERHLLSGVVYCGACGARMTPTSFLDRRPGATHKRRRSYRCFSYRLKDAPRCNRVCGADKLEAAAWAEIRVKVLEPGWLEREAARVAADDGADRYRADLAAAEARRARIGEDVRRLLDAQLANTSRLMGEALEDKLRTLDAQAEDLDRHVEDLRGRIAAAGGRGRLIEGFMAAVGRVRDLAREGRLDAAQRRMIVDLLGARVIAPATPGDRVRVELPFDTRSATRAHSSCRMSPSGTTRDGVIVLESQAEASMAAV

SEQ ID NO: 9700 - protein, 572 aa, Unknown
  Description of Unknown: Integrase B9701 sequence
  PS00397,IPR038109,IPR006119,PS51737,PF00239,G3DSA:3.40.50.1390 ,PTHR30461,IPR025827,SM00857,G3DSA:1.10.10.2600, SSF53041,IPR011109,PF07508,PS51736,IPR006118, cd00338,PF13408,Coil,IPR036162,PTHR30461:SF3
MASRIAEKLAAKKAAIYIRVSTHWQVDKDSLKVQRRELIAYVTLVLGITDYVVFEDPGYSAKNTDRPEYQAMMDRIRTGEFTHLVVWKIDRISRNLIDFAAMHDELQSLGVTFVSKNEQFDTSSAIGEAMMRIILIFAELERKTTAERVTAVMLSRASDGQWNGGRVPFGYSWSKETKTFSIVPEEAKAIRRMAELYEQYQSLLYVAKYLNDAGIVTKTGGQWTPTTVRTILTNPWYIGQYVYNVHSDGKGIEKRDSDEWITVENHHEPILNEDVFCRMRFLLTRNKRGGVPSHKTYVRKNIHIFAGLLRCGQCGSNMTANLDRRRANGFRPSQYACGRRRRKGTSCTNKYISDTTLGPFVLNYVANIIRASKNSSEATTPEVLERKLLRGEAFEDVASVSTDALGQLLDAFRSAGDAVEYRPQIAFSGDDNSIHEIDTLRARRRKLDNALARLNALYLYDDEAMPEKDFVMQRGQITKQLEEVNARIEELQNQESSEELGDDFIGKASYYIMANKLIEDRYIDYEKYIRAIDPSIPRSFLQQIIDHIVVNDGRVTSITFKNGATHTFTYKT

SEQ ID NO: 9701 - protein, 438 aa, Unknown
  Description of Unknown: Integrase B9702 sequence
  IPR038109,IPR006119,PS51737,PF00239,G3DSA:3.40.50.1390, PTHR30461,IPR025827,SM00857,G3DSA:1.10.10.2600,SSF53041, IPR011109,PF07508,PS51736,mobidb-lite,cd00338, PF13408,Coil,IPR036162,PTHR30461:SF3
MERIITRVPVQNSQALRLTKVAGYARVSSDKDAMLHSLAAQVEYYQKLILENSEWMYAGMYADEALTGTKRNRPAFQRMLCDCREGKIDRIITKSISRFARNTLDLLDAVRELRAMDVDVYFEEQNIHTTDGDGELLLTILSSFAQEESLSASENQKWRIQKNYREGKPVTTIWIYGYRCHKEIYTVIPEEADVVQMIFTDYLSGLGKNAIMRKLTALNIPTRTGGRWTETSVMQMLRNEKYAGHLLLQKVFITDHITKQTKQNRGVLPKYMVKDHHEAIIDADIFEAVQREIAIRSSRTKGKQGNNASVFTGMIRCLRCGSHFHRKVANGGSKYARQTWACPTYINRGKHFCNAKRIPEDILIVQCCEVLGLPAFDEDAFRKTVAEILVPADGQLLFKLRNGTEKHTIWQHPSRSESWTDEKKAEARVAAGKRNAHA

SEQ ID NO: 9702 - protein, 572 aa, Unknown
  Description of Unknown: Integrase B9703 sequence
  cd00338,IPR011109,PF07508,Coil,G3DSA:3.40.50.1390, IPR006119,IPR036162,PTHR30461,PTHR30461:SF3,PS51737, PF00239,SM00857,SSF53041
MSVIGVLIRNSTAKQVGNYRSEAQYDLGPRIEQRGHTIRYYDEQGTSGSDLTKRKVAMQMLDDMKAGVIQGIAAFDFKRLTRDEFGVDGGTIARRIVEAHGQFHTWDREYNLRLDDDLMQFQFQCFIAGLDWRNIRNTLWSGTFKKLEREPHYMKTPLGYVNVADDRDKKHVAKNPEHQHVIDALARLFDECDSLGEICRRLNAEGPARPAFRGRGGESTRWMVYGLRYILRNTIYTGTFRFGVHTRQRSTVWDKFALDASGAPRDFEQFRPDLAYWEPARVRRWRRKFDKPANTRTMKSGNKQALPGVLECETCGSRMIGFGAGTYACSAKGVGRGTDGRPCRRPQKLREFVALRLLREELPNVLADAQGLAESARANLLEHSAPSAAKQRLAFLEERVAYISQQMLERAELQQATALLDRITQAQLEIATLKDQVLDEDEARLNDEEVAAVCDLLLSNPIALIDGMSPDRQGRVYSMLFANVRIETRGFGGGRQWRLRSYTARLVDEPRVTPEAPWARCPHPRTKYPDGERPVLIFSVGVPGRGATDISARGYVDYLPSLVELAGALSLG

SEQ ID NO: 9703 - protein, 570 aa, Unknown
  Description of Unknown: Integrase B9704 sequence
  cd00338,PF13408,IPR011109,IPR038109, PF07508,Coil,PS51736,G3DSA:3.40.50.1390, PTHR30461,IPR006119,IPR036162,PTHR30461:SF3, IPR025827,PS51737,PF00239,SM00857,G3DSA:1.10.10.2600,SSF53041
MNIYYVREKLRNCSIYDIELNVAYYARVSTEKVEQQASIKHQEEHFEDLIHSNNRWKFAGSYIDDGISGIHADKREEFQRMLRDAKLGKIDMIITKEISRFARNTLDSIQYTRELLSYGVCVWFQNDGINTIDDDSEFRLTIMAGVAQDEIRKLSSRVKFGHAQSIKNGVVLGHRMYGYSNNQGKLELVPEEADMVRMIFQDYASGISTPRIEKKLWDMGYRSFKGGKINRDVIKNIIRNPKYKGYYCGGKVKVVDMFTKKQEFLPQSEWIMFKDDGSRVPQIIDETTWEKANAYLRERGEAIKSRRTSFKNENIFTGKLFCANDGAPYWMKQHYIRGKEDVRWVCSYKIKNGAASCDSFGLAESELKEIIAELINKSSENIDSILEEYFEILQSSIKNIPDNKNEISRLEKQIDLLKQKREKILEYNLDGKISDDEFISRNKEYVKQIKQIESHILEIQNAKSPEPVEIQLSAIKEQLEKFKGVNPKDINRQIVNELFEKITVEPLAVTCATLTFQLRSGSLEKWGFPLRCSDDMIFTLHSEQHKIFSRKTCIKTQDMVFFKYKYLLAL

SEQ ID NO: 9704 - protein, 570 aa, Unknown
  Description of Unknown: Integrase B9705 sequence
  cd00338,PF13408,IPR011109,IPR038109,PF07508, Coil,PS51736,G3DSA:3.40.50.1390,IPR036162,IPR006119, PTHR30461,PTHR30461:SF3,PS51737,IPR025827,PF00239, SM00857,G3DSA:1.10.10.2600,SSF53041
MNIYYVREKLRNCSIYDIELNVAYYARVSTEKVEQQASIKHQEEHFEDLIHSNNRWKFAGSYIDDGISGIHADKREEFQRMLRDAKLGKIDMIITKEISRFARNTLDSIQYTRELLSYGVCVWFQNDGINTIDDDSEFRLTIMAGVAQDEIRKLSSRVKFGHAQSIKNGVVLGHRMYGYSNNQGKLELIPEEADMVRMVFRDYASGMSTPRIEKKLWNMGYRSFKGGKISRDVIKNIIRNPKYKGYYCGGKVKVVDMFTKKQEFLPQSEWIMFKDDGSRVPQIIDETTWKKANAYLRERGEAIKSRRTSFKNENIFTGKLFCANDGAPYWMKQHYIRGKEDVRWVCSYKIKNGAASCDSFGLAESELKEIIAELINKSSENIDSILEEYFEILQSSIKNIPDNKNEISRLEKQIDLLKQKREKILEYNLDGKISDDEFISRNKEYVKQIKQIESHILEIQNTKSPEPVEIQLSAIKEQLEKFKGVTPQDINRQIVNELFEKITVEPLAVTCATLTFQLRSGSLEKWGFPLRRSDDMILTLHPEQHKIFSRKTCIKTQDMVFFKYKYLLAL

SEQ ID NO: 9705 - protein, 570 aa, Unknown
  Description of Unknown: Integrase B9706 sequence
  cd00338,IPR011109,PF07508,Coil,PS51736, G3DSA:3.40.50.1390,IPR036162,IPR006119,PTHR30461,PF00239, SM00857,SSF53041
MKLQPFVISYARYSSTAQREGTSLERQAEYAQRWADAHGMTLNTTLRDQGISAFKGKHADKGELGGFLRDVEDGKVPRGSVLVVEGLDRLSREKALKAMGQFAAIIDKGITIVTAKDGMTYNEQTIRANPGNLFMSLGVMIRANEESETKADRGRSAIRLRAKAWIAGDRTLRTIKGGFPPAWLRRKGDTFELHPDHAHATRTAIDLYLAGAGMVGVAAALTERGLMLTPRGSHVAQVERLLRNQALIGEHVVEVREPDKPVERYVLEGYYPPLLKVAQWHELQDAIKARALPTFSTKGTIPHVLTGFGATVCGYCGCAVIGQVLTRRPGTQIHDEAGRLRDPYRRLRCAHVSRSDVTCLVGGHSVTAAPFERAVMEFCSDLMNLRGLHGGSGDAAARVALDAAKERAAKLTQQLDKLTDLILEADDKRTVATFAKRAAALEADKAVAVEAVDAAQRALARVSRSDLNSVEAKFRKLTKGVIAQEVEARQQARQLIADNFEQIVLFSKGIRPSETPAGVAHLVLRARGGVERILQIDAEGKWDAMSETYLPSGKAAAKQAPKRARKTTAA

SEQ ID NO: 9706 - protein, 541 aa, Unknown
  Description of Unknown: Integrase B9707 sequence
  cd00338,PF13408,IPR011109,IPR038109, Coil,IPR036162,PTHR30461,IPR006119, G3DSA:3.40.50.1390,PTHR30461:SF3,IPR025827,PS51737, PF00239,SM00857,G3DSA:1.10.10.2600,SSF53041
MKDHYSSPPPGLPERSRVWAYLRDSGGPSQEQSVDQQDQEIIAYCKRHNLVLARSPFRDVARSGGSVVGRDEFMSMIDLSEDESTRPQAILIWNFARFARDYNDFVYYKATLNKRGIIVHSLTDQIPVDDFAGRIVETVISLANEEKRRQTSRDVRRGLKSLVSKGYAPGVPPRGYMAIKVTIGEKRDGTPRIVSKWEPDLVLSEYVKIAWQMRTRGKSYREITTATKGKLYTSLNSWHSFFRNKAYLGIGKSGDLEIPDHHEPLITWDVWEAVQKLQGAHPLHGKKGQLNHPRRVGNPTIFSGFTYCLECGAMMTHSTGNKKHPWNHYICGRKDRHGVAACKSRRVGAVNAEKQILANVLTHVLTPEYLSEVIAETKKQFDSTAELERQIKSSIRRIEDLDLAIQRTLNAIEKTGSAAAQERLKQREAEKQQTKSELDRLNLQLATAQTEITPEAMLVVLAAWRSQFERLQESGNVREIKAWLMQFVSRIELGYNKARIFYTYPMIDLLSAADNSRNAFPLCGGTYIIRGNKSIMVEWSK

SEQ ID NO: 9707 - protein, 569 aa, Unknown
  Description of Unknown: Integrase B9708 sequence
  PS00397,IPR038109,IPR006119,PS51737,PF00239, cd03768,G3DSA:3.40.50.1390,PTHR30461,IPR025827,SM00857, G3DSA:1.10.10.2600,SSF53041,IPR011109,PF07508,PS51736, IPR006118,PF13408,Coil,IPR036162,PTHR30461:SF3
MIDNINSRKTALYVRVSTVYQVDKDSLPHQKKELTAYCSHVLHVPDDLIEIYEDAGVSGKNTDRPGFQRMIADIRAGRVENVVVHKIDRISRNLVDFSLMYDEFKKYRVTFISLNEQFDTSTAIGEAILKIILVFAELERKMTSERVTGVMIGRAEAGLWNGARVPYGWKWNAEAKLPEHDEAEAPVVRKIFELYLQTGSTSKVRDYLNGNNIKTKRGGWWTTKTVADILRNPINCGDYRYNYRESSHGALKDPKDVVYIRDTFPAIVPRETQEEAVALLESHKLAVNQPGFVHQKDIFHAFAGHLVCGSCGSHMTVVKKDKTRNSGFRPSTYVCAAKRNKRTCTAPGTSDVTVGPFVFNYISALARAAAMREEIRSADELERILLSDETFRDVAGLGSEGLTELYALLTGEHPDGYEYRPDQLTGSAADRMDEARQLREQIERSTRALDRLKKLYLFGDDSIPEKEYLETRAELEGERVKAENALRALNVSMATTVPESAFIRSAASFLIAHEIQKGGHIDYPTFAAAVGDKGIRDFVDLTVDKVTVSGKRVDAIRMKNGITHKFIYK

SEQ ID NO: 9708 - protein, 569 aa, Unknown
  Description of Unknown: Integrase B9709 sequence
  cd00338,PF13408,IPR011109,IPR038109,PF07508, PS51736,IPR036162,IPR006119,PTHR30461,G3DSA:3.40.50.1390, mobidb-lite,PTHR30461:SF3,IPR025827,PS51737,PF00239, SM00857,G3DSA:1.10.10.2600,SSF53041
MRAAIYARRSTDEHQAASLDVQLDEARRYIARKGWTQDPEHVFVDDAISRAEFKKRPALIAMLVAAEAQAFDVVVVRDETRLGGDTNRTCLLIQDLLDADVRLFYYYSDEEVRLDNAVAKFLVTARNFASELEREKISQRTHEHLKSKARSGFVAGSRVFGYDHERVVSGGVPHVEYRINEREAEVVRTIFRLTADGMGLRMIARELNDRGLPSPRAGKRGTGSWSVGSIWGMLRNERYIGRLTWGRREKTYRKGTKVRIARAESEHTHVDAPQLRIVSQDLWDAVATLLAQRQHLQGPRGPRASRIPDNLLTGLARCAECGGPISSRNGKLGQGTVKYYHCKYHHDRGNKVCSNKTRRPAASVDAVVIRWLQESVLSERLIVDVVAEVKARLRAQSSDETSEVPGLEANAKRLRAEVGRLAAALAVSDTPPAAIVSLIGEKEGQLRAIDQRLAVLRAGPASITRQLDGIEAAARTRLGDLRGLLGRHPREGRQVLEQLLDGKIKVSAVETTDGPRYLLEGAAMLAPLLGVEGGTPPLFASSAGSEQQGTAKTPGESEGRMVVPLAEVA

SEQ ID NO: 9709 - protein, 568 aa, Unknown
  Description of Unknown: Integrase B9710 sequence
  cd00338,IPR011109,IPR038109,PF07508,Coil, PS51736,G3DSA:3.40.50.1390,IPR006119,IPR036162,PTHR30461, PTHR30461:SF3,PS51737,PF00239,SM00857,G3DSA:1.10.10.2600, SSF53041
MMPRVVLRRRSSNSSRQWPCAMPGRTMQPKGPGTVKRAAIYARYSSDKQNELSCRDQVDLCRAWAEHQGLSIVEVYTDEAVSGASTVNRFGLSTLMRDARSRRFDVVLCEAMDRLARHQADTHAIRRDLAFQEIEIMTVQDGTVTALHAGVKGLLSELYLADLAQKTRRGQSARVRAGAAGGGRSYGYVPAAKAGDMAISPAEAAVVNRIFAEYVAGATPREICAGLNRDRLAGPRGGRWSASTINGSRSRQNGILSNRLYIGEIVWNRQRFIKDPATGKRISRLNPESEWIMASVPHLAIVAPDVFAAAGQLKASKGGVRPHYARRPPFALSGLLQCGCCGGTVGSRGGDLLGCVGNKERGDCSNGRTLKRQELERRVLTALANHLAAPALISSYVKRYHQEQLRVRRSERASEGDYRRRHTAVRAEIERLVDAIVSGTPAAAINDRLAILEAERLSLEQRLAAIDRDAAVVEFHPRLAEKYGRLVAELQNGLTGSDANKETIEKVRQLIDRIVIRPTPRKTPVEIEVHGLLAKLLSISSGGNPRLLGGMLVAGTRISQSPQFLIVA

SEQ ID NO: 9710 - protein, 568 aa, Unknown
  Description of Unknown: Integrase B9711 sequence
  cd00338,PF13408,IPR011109,IPR038109,PF07508, Coil,PS51736,G3DSA:3.40.50.1390,PTHR30461,IPR006119, IPR036162,PTHR30461:SF3,IPR025827,PS51737,PF00239, SM00857,G3DSA:1.10.10.2600,SSF53041
VDASRSLSKKKAAIYTRVSTQWQIDKDSLQVQRRELIAFADLVLGITDYEVFVDPGYSAKNTDRPDYQRMMERLRTGEFSHLLVWKIDRISRNLLDFANMHAELKSLGVAFVSKNEQFDTSTAMGEAMVKIILVFAELERQVTAERVTAIMLSRADSGKWNGGRVPYGYNYDTEEKCFTLNQYEHRIYLSMCDKYEETNSLLATAKWLNSNGYRTRQGLEWSPVAINKILRNVWYIGSYKYNVHSDGKGVAKRDEAEWIVIENHHLPALSEARFERIQLSLTRNRRGGIKVGTARMNKNIHIFAGLITCGECGHNMSATLDRRRADGWRPSIYSCYKRRLDKSCGNKYISDIIIGPFVFNFIANIMQCREKINPKTPLPVLAKKVLKGSPFLGVAICDEDLVKLKKMILSTVSGVEFKPEDVFAGTEKQENKLDILEERRRKTEIALNRLKSIFLFGEDAMSEAEYIIERKKLLDELEETNKGISELKQNDEEAALSEDDFLRKASYFVMAEKLLNERFVDYEKYIRGIDPQIPRMFIRSVIKNIEATGGKITSLQFSNDVTIRFVYS

SEQ ID NO: 9711 - protein, 568 aa, Unknown
  Description of Unknown: Integrase B9712 sequence
  cd00338,PF13408,IPR011109,PF07508,Coil, IPR036162,PTHR30461,IPR006119,G3DSA:3.40.50.1390,PTHR30461:SF3, PS51737,IPR025827,PF00239,SM00857,SSF53041
MSNAAETGYAIVYVRCSKDEQTKGDSIPRQNALAEQRAAELGLTIQARYADEGVPSFRGQNFRTGKLGELFEAARLGKFPENAYLLVESEDRLSRKGTNSFFKIWFALLGFGLKICLTAKGEVATPDDDDPTGVIMRAIGSSKGHIESRDKSGRILTAMQAKRDAARSGTAKFSGNAPGWFIPVYDNPPGTKHRKVISFDLHTERVAIVQRIFKMSASGVGEHSIARLLNDDQILSFGATPWHRQSVRNILESRAVLGEYQPGIWRTEITATGKERGFSEPEGEPILDYFPRVISDAEWQAVKTIKARNKNSGGKKGKLFTNLFSGLLRCGECGGVVSYHKYRLRCMRAYRHAGCQNHEPIWYKTVEAALLDKIIDLLVSAKDAIEISSERQEIVNQIALLERQIDDKRRLLAGYVKRFESDPEAFPAVLLKGMTDAENVVDSLNATLSEAQQRLAIETGKVGPGEALAGIAALRDRAKSLDPSVAYLARAEIAGSLKDVLRLAIYQNDGSIYLQAGENENLRINIASDGRITVIGTGWQKLDQKMLQNVTKLSGSKWLGKFDLRKSE

SEQ ID NO: 9712 - protein, 568 aa, Unknown
  Description of Unknown: Integrase B9713 sequence
  IPR038109,PS00397,IPR006119,PS51737, PF00239,cd03768,G3DSA:3.40.50.1390,PTHR30461, IPR025827,SM00857,G3DSA:1.10.10.2600,SSF53041,IPR011109 ,PF07508,PS51736,IPR006118,PF13408,Coil,IPR036162,PTHR30461:SF3
MAYLKDFTARKVAIYIRVSTIWQVDKESLSVQRRELTAYAQMILGINDVVVFEDAGYSAKNTDRPDYQQMMSRLRMGEFSHLLVWKIDRISRNLLDFAEMYQELKELGVTFVSKNEQFDTSSAIGEAMLKIILVFAELERNMTSERVTAVMLSRAENGQWNGGRVPYGYSYDKTKKQLSVDPFQAQVVQRMYAAYEQNQSLIKVCSMLNDEGIVSSSGKNWSPVTVSTILKNPFYLGIYVYNVHSDGRGSKKKPESEWITFEEHHPAIVDKRLYDRVNFLLSRNRRGSVDKPKTYSKVNTHIFAGLVVCGSCGASFSATLDRRRADGWRPSIYGCSQRRRSKTVCQNKWISDVTIGPFVFGFVSNILRAQSKSITDPDILGKKLLLGKAFDLVDHIDSESLHQLSDLLKSNSNGIEYRPATVYAKSEKSDSQYEALTVRKTKLENALKRLKAAYLYGDDAMSEAEFLSDRNRLLRQLSDIEAKLAEVQQQEPDEMLVSSEFQTKASYFLMLQNLMGDKPFDYEKYIKDADPEIPKAFINTVAYKIEATDGRITAITFKNGITYKFHYK

SEQ ID NO: 9713 - protein, 568 aa, Unknown
  Description of Unknown: Integrase B9714 sequence
  cd00338,PF13408,IPR011109,IPR038109,PF07508, PS51736,G3DSA:3.40.50.1390,IPR006119,IPR036162,PTHR30461, PTHR30461:SF3,IPR025827,PS51737,PF00239,SM00857, G3DSA:1.10.10.2600,SSF53041
MRAALYGRFSTDHQRLESIADQFRVAERLVAEHGFSVVARFSDAAISGGTARRPGYQQLLAAARAGEFDAIVVEDVSRLWRNSAEQQQRLAELHDLGICVVGRDLDTRAEGSHFVGAIFGATNEHYRREIGRKTYRGQEGNAIARKPTGGKCYGYVAARDSVTGHIEVNEQEAAVVRRIFAWYSEGISPRAIAAKLNEESVPSPGSTWKRKSRRTAGWLASAIYGDQKRGVGILNNPRYAGRVIWGRMKWHRSYRDSARRRPVVLGKAAHEYQDERLRIVSQDLWDAVRARQALRSHILGTKVKNGLRKRAPGGGRPARYILSGLLRCGVCEAAFVLSNGDRYQCSSHVNGGACKNRISVRRDLVETRVIDAVKGDLADPEFIAEFERALRRAAGTPKAAPNHLERIHELHQEVTSLADAIAQGLLRSSTTLASRLVAAEAELEGLKAAAQAPKVRRLAPNVRERCRGILRRLQQTLDSDPERARAALVDAIGTRITLDPDHSGRFLWADVGLEPAPLLAVAGGSEIMVAGAGFNLKFPSACRSEKRPKTPALPRPGTLRCRAFSLQN

SEQ ID NO: 9714 - protein, 567 aa, Unknown
  Description of Unknown: Integrase B9715 sequence
  IPR011109,IPR038109,PF07508,Coil,PS51736, IPR036162,PTHR30461,IPR006119,G3DSA:3.40.50.1390,PS51737, PF00239,SM00857,cd03768,G3DSA:1.10.10.2600,SSF53041
MNEKKKIVALYTRVSTGYQIDKDSLPFQKKELTAYCKHILHAENTELFQDAGKSGKNTDRPAFLRMMKKIRAGEVSHVVVYKIDRISRNLIDFSMMYDEFKKYRVTFISLNEQFDTSTAIGEAVLKIILVFAELERKLTSERVTGVMIDRAMSGKWNGARMPYGWKWNTETEFPEHDPVESEKARTLYRVYDETHSTAKVRDYCYEHDIQTKRGGKWTTSTILNFLKNPMNKGDYRYNYRGSARGQKKPDNEVVYVPGVFPPLVDPDLWERVNAVIKENGKAIAHNPHVKKRVHIFTNGLLTCEKCGASFQVSTLDKKRLNGFQPSLYVCTNRRVYRSCDAAYCSDVLIGAFVFNYVRNLVQATKSRALIKSPADVERILLSGEEFDRIRNIDPADLDVVYQAIRGTIAPSKGLSYIPTPPDRGQKDETELSGLRAEASRLSRALDRLKKAYLFDDNALPESEYLSTRQDLTEQLTAVNNKIADALTDESYSEAAELSFVNSASSFLLSYRLQGSDHIVYSDFAAAVEKSVLKNFVNLIIDHIVIRESYPVEIVFKNGLRNRFVLKD

SEQ ID NO: 9715 - protein, 566 aa, Unknown
  Description of Unknown: Integrase B9716 sequence
  cd00338,PF13408,IPR011109,IPR038109, PF07508,Coil,PS51736,G3DSA:3.40.50.1390, PTHR30461,IPR006119,IPR036162,PTHR30461:SF3, PS51737,IPR025827,PF00239,SM00857,G3DSA:1.10.10.2600,SSF53041
MKRSNSTHKNTDPVNPARTKAVIYARYSSHGQTEQSIEGQLHDNHAWAKQQGVMVIGEYIDRAITGTKDARPDFQRMIEDAAKKQFELVIVWKLDRFARNRYDSAIYKARLKKYGVRVVSVKENITDAPEGIILEGLLESMAEYYSANLSQNVKRGLRESADKGNFCGGLIPYGYKVVDKKLVPDEKTAPVIRYVFEQYAKGVPKKEIIDELNRRGVRNRAGNPLTYTSFQHAMHMTTYIGEHVFRGKVLEGCATPIVTRDVFDKVQEILATHAKAPAAAKARIPYLLQGKIYCGICGAPMFGECGKSHTGAVHSYYSCYTRKRKHECRKKNERREGIEAFIIRQTMEYILTPSRMKEIARAVVKEYNKEFSSSRVEEIEKALSKIEKEQDKLVDALIDAPKVAHKKIYARMELLEAQKSEYEIDAAKLRVAMNLRLTEQEVIAWLQTFCEGNPEEEEFCRRLVDVFINSVYCYEDKIIVFYNIRGGQPVKYKALEEALKTPKTQEKSDPLKGSDLELQSGAGNYKSEPPAAPAFVFVSGTFGCVFPRVMTHETRKPYISLGTTIY

SEQ ID NO: 9716 - protein, 566 aa, Unknown
  Description of Unknown: Integrase B9717 sequence
  cd00338,IPR011109,IPR038109,Coil,PS51736, IPR036162,IPR006119,G3DSA:3.40.50.1390,PTHR30461,PS51737, PF00239,SM00857,G3DSA:1.10.10.2600,SSF53041
LTRKTVICWNISSRPLLHPYYNDCDSSKLDATIHNNYASYPLYGKTIIYKGMSNKCLIWVRASTDKQETESQLKETIEYATSLGFDEFEVIDKAGASAYKVNKLYLEMIDEMKSKILADPDIKAVVCWHLNRLARNESMAMDIKDFLVEHKVQLYVNEPTIKLFNNDGTINEGAELIFSLFATMSKQQVSELRLKVKRAKKRDKALHKYIGGNTVAYGYRINEDNYLEPDPETSKIVQDIFDLYGSGNYSYMTLAKEINERYGTDMNWHYMYSVLHNTKFYDGTMYPPIITELQYRKAEKQRNDTASRPMQSKRHTFANRIIKCPVCGKGLTANRRDYRCRIECKTGNRIGIPNMDGLLWTIASHLESDRLLNASAKDDYVEKQAVLASKIKSAEQSLAKGEKKAERGKKMALEGLIEIEEYKDILMQVENDQKDVKRKVDEWKSEIVEIDRLISEDGKDIQRILELSDRISYMDEEQMKEIVRRWVKKVTYTSDWVFTIETITRTYKARYVRYDRQYNRWFTLNNNPIATRALYRDKDGCSLGDVRISPVDIPITLAWLSGSEVV

SEQ ID NO: 9717 - protein, 566 aa, Unknown
  Description of Unknown: Integrase B9718 sequence
  PS00397,IPR038109,IPR006119,PS51737,PF00239 ,G3DSA:3.40.50.1390,PTHR30461,IPR025827,SM00857 ,G3DSA:1.10.10.2600,SSF53041,IPR011109,PF07508,PS51736 ,IPR006118,cd00338,PF13408,Coil,IPR036162,PTHR30461:SF3
MPRAKKAAIYCRVSTIHQVDKDSLPMQRSDMINYAKYALNIEDYEVFEDAGYSGKNTDRPAYQEMMERIKEGEFTHVLVWKIDRVSRNLLDFASMYAECKNLGVTFVSKNEQFDTSTAMGEAMLKIVLVFAELERNMTSERVMSTMNARATEGKWNGGRVPFGYSYDKETDSFSIREDEAKVVHEMKNIYLRLHSITGTAHELNAIGRRTRRGYGWTPQTVAIILRSPFYRGTYRYNYRNETKGTFTFKDQKDWVMCSKHHEALFTQEEYDNIDYWLTKNRRLQGKATHSQRKNVHIFAGLIKCGNCGDNYFASLSRTLASGYRPSMYQCSGRRQKALCDNKYVTDITIGNFVFNYISNMIRLKKAFSPRWQMRRICSTLLRGDTFREIKAISPATLASIRTTLIDNLTCTTEYQPIKNRHGPEAAKRKDENLQAELDKNTRALDRLKHLFLYADDAMGQAEFLQQKKALEDNITRIKGELDAIRKSSIFATNLSEEIFVQKAAQFFMNTALQKGRIDFEQLATQTEATILKDFVNAIVSRISVRNGKIIELEFTNGQIHRFEYSL

SEQ ID NO: 9718 - protein, 565 aa, Unknown
  Description of Unknown: Integrase B9719 sequence
  PF13408,IPR011109,PF07508,Coil,PS51736, IPR036162,IPR006119,PTHR30461,G3DSA:3.40.50.1390,PTHR30461:SF3, IPR025827,PS51737,PF00239,SM00857,cd03768, SSF53041
VLPTPGDLFFLAEAVNSTNKFYSVSDKSARVYFLYSFLGGETMRFFSYGRKSVFSDKSDSIDNQFRMNREYCESKFSGQVDSWQQFSDEDFTGANTSRPDLQRMLSFIKGGFCDVLVVYQLDRLSRDVRDFANIYALLEEHGVMFISIKENIDTTTPIGRAMMYVTVVFAQMERETIAARVTDNMLGLAKKGYWTGGNPPVGYVRKHIVVDGKKHCSIEVDPDGARYVTQIFDTFLAYNCSLQGMETRFKNQGIRTQSGKFFSTTQLHKMLTMPYCVEATPEVYDFYAAKGCIMDPGSPREMWDGSVGVIIYGRSTEKNKKHQAQPPEKWTVCLGKHKPFMPAEKWLAVQSRFTQNKCIKDAKWPVPLLKGVIRCKCGNLMQVSRKKKVDGTCSSWYYCRKRMRQGVDACDMSQIKCDLLDEKVLELFRGIAADPGLIQKFVKTKAPTDISDLKAAQARVSACERKIGRLAASLALAEDSTASKYIIAEMERLDVELGALKREASLAEMENHRATANAKDAKATAAEIAKLIHGLEGFDDKEKNAIARAVIQECTWDGERLFITL

SEQ ID NO: 9719 - protein, 565 aa, Unknown
  Description of Unknown: Integrase B9720 sequence
  PS00397,IPR038109,IPR006119,PS51737,PF00239, cd03768,G3DSA:3.40.50.1390,PTHR30461,IPR025827,SM00857, G3DSA:1.10.10.2600,SSF53041,IPR011109,PF07508,PS51736, IPR006118,PF13408,Coil,IPR036162,PTHR30461:SF3
MQNSSDKNINRVAIYIRVSTNHQIDRDSLPMQRQDLISYAKLLLNTEQYVIFEDAGYSGKNTDRPKFQEMMKQLRNGLFTHLLVWKIDRISRNLLDFATMYQELKELGVTFISKNEQFDTSTAIGEAMLKIILIFAELERNMTSERVTATMISRASNGLWNGGRVPYGYNYDPDKKEFKINPAEAEVVKLIHDKYEELHSLIRESRMLNERGIITRSGNLWNPTTLQIILHNTFYCGDYQYNVCKEGNRQKQKNKSEWVKIHNHHEAIISHEQKERIIALLDCNRRLNKKVVKSEKYVHIFSGLLYCGNCNKPMGASPSSKINGYQYSRYTCPTKRQLQCDSKSVSDQTVGEFVFNYILNLINSQRDFKSISSKNELQKHLLKGSSFNDIKSIDSDGLNDLYNVLLSGNINQDIYSNDVSFKKEDSSNLSRTKLLSEKQKLERALDRLTNLYLYSEQTLSEQNFLSHKMQIDDKLNEINDQLSFMESDDWQQSISDAEFIVKTSSFIISKKLDGRNYINYKRLATSIDKEVLKSFVNSVIDSIIISNGSIETITFKNGLSHTFIR

SEQ ID NO: 9720 - protein, 551 aa, Unknown
  Description of Unknown: Integrase B9721 sequence
  cd00338,IPR011109,IPR038109,PF07508,Coil, PS51736,G3DSA:3.40.50.1390,PTHR30461,IPR006119,IPR036162, PS51737,PF00239,SM00857,G3DSA:1.10.10.2600,SSF53041
MRDIKVIESKQSKGSKHIIKRVAAYARVSTKQEMQESSLDLQVRHYAKEIIFNPDYIFAGIYYDHGKSGTSMKKRDGLQALLKKVYAGHIDLVLVKSLSRFARNTIDALNVIRETRKLGVEFFFEKENLSSLDSTIDMILTMMAGLAEAESQQISSNITWGHRSRAKSGKVRISPLLGYDITKDRKYIINEMQAKTVKAIFQMYLEGKKISDILQHLQEHDFRKSKEDKYLNSQQIRNILSNEKYIGRMIFGKTFTKVDGREKKVVINHGEQPKYIINNHHEGIVDLETFNKIQEMIKEQKEKKKYKPRMDYSNYEKFAYSVPHEAYVLRKQKGTIKDADEQTTPYLHKSKVSGFYVKHVSKVLFRSLNALSRKFGRMEALFDAQVDDILSKQKQIKKLNQQEKLLENYMRQYYILERKTLKDKKDRMLLYELETLIIQESMNYTVLEDEYNYIEEHFNHALTIKKQIKELRYPTEELTPDIVNDIFEGFLIEDYDRYVAFINISNKPLTSETMKNAAANPPLHTGAYQTTGAYKTTGRHDAEIKWSIILM

SEQ ID NO: 9721 - protein, 565 aa, Unknown
  Description of Unknown: Integrase B9722 sequence
  cd00338,PF13408,IPR011109,IPR038109, PF07508,Coil,PS51736,IPR036162, G3DSA:3.40.50.1390,IPR006119,PTHR30461,PTHR30461:SF3, IPR025827,PS51737,PF00239,SM00857,G3DSA:1.10.10.2600,SSF53041
MNRAAIYARFSTDQQNEKSTEDQIKLCMEFAQREGLQVVATYEDKAKSGGSIFGRDGLFKMMQDAQERKFDVILVEAVDRLSRDMEDLAGLYKRMTFLGISIRAVHEGVVNTVLVGLRGLVGQLYREDNVHKTKRGMASLVDKGLSAGGRAYGYRPDPNQKGKLIIVEEEAEIIRRIFEEYASGKPPRKIAHDLNEEGVPPPRGTKWNASTINGNASRGHGILRNHIYAGKLVWNRVRMIRDPDTGKRLSRPNPPDQWRFKDVPELQIVPTELWEKVQELKRATANVPLHAQARKPKRLLSGLLRCGSCGAGMSIQGADKTNRKRIRCSAAVESGTCPDPKTFYLDTVENLVLDALAEELTNPEATAVYLKEYIEERKRLAKEIADNRAYYERQLAKVVGEMDRLLTLYQKSVVELDMLEAKMPQLRAERDRLRGLLAAQPEVPKTIDLHPMAVKKFEEQLKSLKKAVEAGVTEGDGESIKALREVIETVTVYRDDSKVGGVRVEIRGYLNPLVAIGDATKKAEKEVSDVTGKTVGSGDDLSGSGGLTHSESSLKVIRFCISRAA

SEQ ID NO: 9722 - protein, 564 aa, Unknown
  Description of Unknown: Integrase B9723 sequence
  cd00338,PF13408,IPR011109,Coil,G3DSA:3.40.50.1390, IPR006119,IPR036162,PTHR30461,PTHR30461:SF3,PS51737, IPR025827,PF00239,SM00857,SSF53041
MNNHSFPPGSLAAAYFRDSGGDTQELSVPQQESAFRAWCAQNGLIPGAIFKDVARPGSSVIGRAGFHDMIHHFRSGQAQEAGLVIWSYSRFAREFDDSQFYRADLRRRGFIFFSLNDAIPEGSIGRLFEAVIDWKNENFLEDLSRDTRRGLHDLVQTHGAIPGTPPRGFKREKIVIGKRRSGQDRIAHRWAPNPDELPRVRQAFAMRADGYSLAEIHAVTHLYGSINSYKTFYTNKLYIGILEFGDLVIKDYCVPIIDRPTWEAVQLVIDAFARHKNLSGQDGNPQHPRRHKSSYLLSGLVYCARCSSPLFGAPSKQHYKPDGTRNADYERYACARAYRRRDCNQGQFPKKILEDAVLSTLENYILLPDVLAEMQSREKEDRENLLSKLEEKRTEYKNILRGIRRRIANLTEAIAESGHTRALLEKLSGLEAEETALRSQMAEIERQANAPALDLGSSSQIDQTLQSLHAILDSGEHQAIQEMLRGFIARITVDRDENKIIGSITYYLPTIDNPGPSLPYETVSIPLTSLGAPLHRHSFTVSFTATMRRYNKKALLTGCFLLLI

SEQ ID NO: 9723 - protein, 564 aa, Unknown
  Description of Unknown: Integrase B9724 sequence
  cd00338,PF13408,IPR011109,IPR038109, PF07508,Coil,G3DSA:3.40.50.1390,IPR036162, IPR006119,PTHR30461,PTHR30461:SF3,PS51737, IPR025827,PF00239,SM00857,G3DSA:1.10.10.2600,SSF53041
MKNAYSYVRWSTLSQGETGRASQTRQTKTAKEWIRDYGKGEYVLSDEMFLDAGKSAFKGKNIAKDEYGKAKGELAKFIELVEENKISRDSILLVDSYDRFSRLPASKSLTLFMDVINSGIGLVFTGSFEKRIINSTMIDREPYILQFIVGELIRSTSQSEETSRKVKLAKQFLFANIKKGIVQRNNLPKYFTFIPNEPINPRCNIGKYVHNELTPIVKDIVDMLLNGKSLYAIADHYNEKKIKTFKGYEWSGNGISHILRNRLLFGEYKGVKNFVPPIIDLDTFDKIQNVLNQNQFTKGQRGKINIFRGICFCADCGHTMSVMASSHKGSSYRYLRCSHGAIGKHNECKNRLAFRLNDMEAEFFVNFLFKNPKQVITETDNRELKELNKTIATKQSRLNQINSEIDKLIGLLETLPMPELKTKLAKLNTERDTIKTELDSLNSKVSNIQDSPQMFDKLKKLLGKDSDYKPKFKADKDGVPIFERDELDTAIESVIESLKDEFTREGIRIMLPSLIGKITVDTNEGQFYVFNRMGKQIYESFHYESNRNCTTEWRRSLLKHKKAS

SEQ ID NO: 9724 - protein, 564 aa, Unknown
  Description of Unknown: Integrase B9725 sequence
  cd00338,PF13408,IPR011109,IPR038109,PF07508, Coil,PS51736,IPR036162,PTHR30461,IPR006119, G3DSA:3.40.50.1390,PTHR30461:SF3,IPR025827,PS51737,PF00239, SM00857,G3DSA:1.10.10.2600,SSF53041
MKRAALYARFSSDLQKDRSIDDQLHACQSVAKRENLKVVASFVDRAKSGASMFERDGLRELMNAAKAKQFDVVVVEALDRLSRDQEDMAGIFKRLTFWDIDILTLNEGLATEIHVGVRSIVSSLFLKDLGNKVRRGIDGVARDGKIPGSLAFGYRLVAGKPGEREIDPDQANTVRRIFKEFAAGVSPRAIAADLTRDKIASPNGTSVWNMQTIVNKANGIKRGIIGNQLYIGQLVWNTQRVSKDPETGKHIAKRGPEANVIRTAVPHLRIIDQPLWDAAQKIRDQRSAPTKAHERKVVARTQTMLTGLLRCESCGGLMHLSGRDDAGPRVKCSAAAANNTCQNTRSFNLAQLEQTVISGLHAMLADPERLARFEKGFMSQIEKRKPDDSELRETEKRLTHVSAQIDRVVNAIATMDTPVKQLTDKLDQLEADRAGLAERVRLLHAESAVIKLHPTAVKAYRQKLVQLLRSMTGTVATPEASAAFRMLFDSIVVHRTPKRMPYEVTPYARVGGALDANLSPPKRTSAQMLEEAGVSYCDNANKAKPLLAVQQYKVVCLGRWRQAA

SEQ ID NO: 9725 - protein, 564 aa, Unknown
  Description of Unknown: Integrase B9726 sequence
  cd00338,IPR011109,IPR038109,PF07508,Coil, PS51736,IPR036162,PTHR30461,G3DSA:3.40.50.1390,IPR006119, PS51737,PF00239,SM00857,G3DSA:1.10.10.2600,SSF53041
MADHIEMFKQIKKVAGFLRISTEKTDFEGKKINAEETLKNHTETMTTFFKQWGIELVLYSEVLSGGTDFKERKALQDILNDLKDEKQNFDAMAIIELERLSRDTYVSSIIKKALEESNAKLIVLEPFQILDMNNSSDSLMFGLASVIAEHNRKIASNRVKLNKLAMARQGLNSSGSVPYGYVRNPKTKKLEIETIETIDEKGNKIRVESDKPKVVRRIFQWHVQGMGQRSICDKLNEMGIPNRQGNKWVPQSLRYLLTCETYIGTLTAKSNQKIKGKIVPAEIVTIEHNHEPIIDDDIWEKSQRLRNAKRERSGVDQRSNDWNSKKNTSILDGLIYCGCESCNRKSTIKWYSSKNKFYIVKCTRFDAQHGKDCNNGGIAVGEVEQVIFQKILEYKQEVENKISSFESNDFASRNTELEEMKELLEKQLNQLKVSARSIRQQEIAYFQKRDETGIVDEFEEEMIAEDKQINHTKRMTVQQKIDEIILKLSQVPNVNEEIQHLNKKMDIIKELENRKDLTNKQVNSLLKQIILKVNYRRILPDNYVNLSFKEREKYSAELEIEYLD

SEQ ID NO: 9726 - protein, 564 aa, Unknown
  Description of Unknown: Integrase B9727 sequence
  PF13408,IPR011109,IPR038109,PF07508, Coil,PS51736,G3DSA:3.40.50.1390,PTHR30461, IPR006119,IPR036162,PTHR30461:SF3,PS51737, IPR025827,PF00239,SM00857,cd03768,G3DSA:1.10.10.2600,SSF53041
MNEQKTIAIYTRVSTGYQVDKDSLPFQKKELTAYCRHVLHAEKTELFEDAGKSGKNTDRPAYQRMMKKIRAGEISHVVVYKIDRISRNLVDFSLMYDEFKKYRVTFISLNEQFDTSSAIGEAVLKIILVFAELERKLTSERVTDVMIGRAMSGKWNGARMPYGWKWNEEKAFPEHDPIEAPNARRLYEIYEKTRSTAKVRDYCYDNGIQTKRGGKWNTSTICSYLRNPMNKGDYRYNYRNSARGQKKPEGEVVYLPGVFPPLVDPDLWDRVNAILDDNAIKSTTSDNPHIKKHVHVFAGGILRCADCGAAFQVSRLDKTRANGFKPSLYVCTSRRTYRACDAPGASDVVIGPFVFNYIANMVRATKSRAKIKDLDDLQDILLSGPEYESIDRMNREDLSIIFQAIKGSRSGPGATFVPSLPGSEKDVPEISGLRAEADKLSRAMDRLKKAFLFDDGGIPESEYLSTRADLQERLTAVNNKIADALTGDSYSEAAELSFVNSASSFLLSYRLQSGDHIDYSDFAATVDKTVLKDFVNLVIDRIIIKDSKVVEIVFKNGLRNRFEY

SEQ ID NO: 9727 - protein, 563 aa, Unknown
  Description of Unknown: Integrase B9728 sequence
  cd00338,PF13408,IPR011109,IPR038109,PF07508, Coil,PS51736,IPR036162,PTHR30461,IPR006119, G3DSA:3.40.50.1390,IPR025827,PS51737,PF00239,SM00857, G3DSA:1.10.10.2600,SSF53041
MKRAALLLRCSTNIQDYNRQKLELEKVASKFGLEVAKVFGEHVTGKDDIRKGNRKSVDELINACENDEIDVVLISEVSRLTRNFLYGVTLVDKFNRDYSIPIYFRDKRKWTIDVETGEVNLEFEKELRKAFEQAEEELASIRFRMASGKRDSAGLGQWFAGIPPFGYTRQKNGYLVKNEYAQIVKEMFDKYLEEGQALITTTRYIYGKYPDIKKLKSIGNTKFILNNRAYTGRAEANIYDEIDKVTDTFYFDIPAIIDEETYNKVQKKLANNRTTTPYPRATKYLLQKLVKCSICGAFYTRLHSNKRDTVHFKCTSDKNSLTGCKSQVYLNERIVNPIIWNFVKEQLFYVGKMNAEQRLEAIAGENDNKSKAIEEQEALKISYKEQENKLTRLEDLYLDNDIDKNRYKERKSKIEKELSSIKAQMDRLTDRIRLSDFNIKRFNSTDFTEQYFKEVEADLEKQMKVLREYVKGIYPLYIDKVYCFLKVDTIEGMFNIFYEPRKAQQKCAYFIKDALAQYHPDIRNFYTPNNTLLTDSDEVDAYYTLEEMKEICSRNGFEVRYRE

SEQ ID NO: 9728 - protein, 563 aa, Unknown
  Description of Unknown: Integrase B9729 sequence
  cd00338,PF13408,IPR011109,IPR038109,PF07508, Coil,PS51736,G3DSA:3.40.50.1390,IPR036162,IPR006119, PTHR30461,PTHR30461:SF3,IPR025827,PS51737,PF00239, SM00857,G3DSA:1.10.10.2600,SSF53041
MKTAVIYARYSSDLQKDRSIDDQILFCREIALRNGYSVADVFTDRAKSGASMFERDGLLALMSAAKKRDFNGVICESLSRLSRDQEDTAAIYKRLKFNDIEIVDASGVVSDVHVGVGGIVNSMFLKNLAVSVKRSQDALAREGLVPGRIAFGLRATGKKCEREIDPTNAAIVLRCFEEYANGKSIENINFELRQCEKIEMPRVNSEMLRNQIYIGKIIRNVTNSVKDPDTGRRLFRRGSVDNRIVVDAPQLRIIPQELWERVQHSLAASNKAHGWHGPRQHKFVNKDHLLLGLLTCATCGGAMYIGANNPDGAPRVKCSFGHRREGCDHRKSYSLKTLQDIVLSGIQAKLTDRKALLEMTRAYHDRWAERQKSVRGDLAKAKAELSRTEIQIDRIVTAISDSDSPVKALVSKLDALEIQRASLAQKVELIEADGNVVTLHPAAIDKFAASMETIHTALTGDLSVEQLSPFRAAFRNVFERIVVHPTTKQGQYEVTPYARLSAIIGLELFPKMRSTTEMLAEQGVTEIALSDGSRTRTVQKCKPEMITSPDNVIINLGIWKKAA

SEQ ID NO: 9729 - protein, 563 aa, Unknown
  Description of Unknown: Integrase B9730 sequence
  IPR011109,IPR038109,PF07508,Coil,PS51736, G3DSA:3.40.50.1390,IPR006119,IPR036162,PTHR30461,PS51737, PF00239,SM00857,cd03768,G3DSA:1.10.10.2600,SSF53041
MNENKTVAIYTRVSTGYQVDKDSLPFQEKELKAYCKHILHAEKTELFEDAGKSGKNTDRPAFLRMMKKIRAGEISHVVVYKIDRISRNLVDFSLMYDEFKKYRVTFISLNEQFDTSSAIGEAVLKIILVFAELERKLTSERVTDVMIGRAVSGKWNGARMPYGWKWNPEKEFPEHDPVEAPNARKLYEIYEKTRSTAKVRDYCYDNGIQTKRGGKWNTTTICNYLRNPMNKGDYRYNYRNSARGQKKPEGEVVYLPGVFPPLVDPDLWDRVNAILDDNSIKSTTSDNPHIKKHVHVFAGGILRCADCGAGFQVSRLDKVRLNGFQPSLYVCTSRRTYRACDAPGASDVTIGPFVFNYIANIVRATKSRAKISGPDDLERILLSGPEFKDIKYINRDDLDIIVQAIRGSVKGGATFVPSPPGSEKDAPEIEGLRAEADKLSRALDRLKKAFLFDDSGIPESEYLSTRSDLQERLTAVNNKIADALTGDSYSEAAELSFVNSASSFLLSYRLQSGDHIDYSDFASTVDKQVLKDFVSLVIDRIILKDSKIQEIVFKNGLRNRFIY

SEQ ID NO: 9730 - protein, 563 aa, Unknown
  Description of Unknown: Integrase B9731 sequence
  IPR011109,IPR038109,PF07508,Coil,PS51736,G3DSA:3.40.50.1390, IPR036162,IPR006119,PTHR30461,PS51737,PF00239,SM00857, cd03768,G3DSA:1.10.10.2600,SSF53041
MNENKTVAIYTRVSTGYQVDKDSLPFQEKELKAYCKHILHAEKAELFEDAGKSGKNTDRPAFLRMMKKIRAGEISHVVVYKIDRISRNLVDFSLMYDEFKKYRVTFISLNEQFDTSSAIGEAVLKIILVFAELERKLTSERVTDVMIGRAVSGKWNGARMPYGWKWNPEKEFPEHDPVEAPNARKLYEIYEKTRSTAKVRDYCYDNGIQTKRGGKWNTTTICNYLRNPMNKGDYRYNYRNSARGQKKPEGEVVYLPGVFPPLVDPDLWDRVNAILDDNSIKSTTSDNPHIKKHVHVFAGGILRCADCGAGFQVSRLDKVRLNGFQPSLYVCTSRRTYRACDAPGASDVTIGPFVFNYIANIVRATKSRAKISGPDDLERILLSGPEFKDIKYINRDDLDIIVQAIRGSAKGGATFVPSPPGSEKDAPEIEGLRAEADKLSRALDRLKKAFLFDDSGIPESEYLSTRSDLQERLTAVNNKIADALTGDSYSEAAELSFVNSASSFLLSYRLQSGDHIDYSDFASTVDKQVLKDFVSLVIDRIILKDSKIQEIVFKNGLRNRFIY

SEQ ID NO: 9731 - protein, 563 aa, Unknown
  Description of Unknown: Integrase B9732 sequence
  IPR038109,PS00397,IPR006119,PS51737,PF00239, cd03768,G3DSA:3.40.50.1390,PTHR30461,IPR025827,SM00857, G3DSA:1.10.10.2600,SSF53041,IPR011109,PF07508,PS51736, IPR006118,PF13408,Coil,IPR036162,PTHR30461:SF3
LPDIERTPLQNRAAIYIRVSTQLQIDKDSLHVQRRELAAYAELVLGIHEYEVFEDPGYSGKDTSRPAYQQMMTRIRMGEFSHLLVWKIDRISRNLLDFAAMYAELKHIGVTFVSKNEQFDTSTAIGEAMLKIILVFAELERKMTAERVTAVMLSRANNGQWNGGRVPFGYDWDSENKQFLINEKEADQYRYMCSLYEEKHSITKVCAEMNRRGIPTKTGGKWNTVGIHKILTSVFYLGTYRYNVHSDGKGIRKRDASEWIDIEGHHPALITQDRFRHIGYILKKNAKLSPRNRTTYQDKAVHIFAGLLTCGVCGKNMTATQGRRRASGYRPSIYGCASRRRNASSCTNKYTTDLYIAPDVFAVISGVLTVRDRLGTKAGALDIEKEILSRIPSACSIEGLSGLADSIQNGVTGMEYTPPTATAAKPPDDMQDLIARKKKCEASLKRLQTLFIYGEEGIAEKDYIIERKRIQDEISRIDDLLEETGDTEETLSEQEFRTKASYFLMINQLLGDKPKDTEEMLRLIDPKIPKDFVNTVIDNITVTDGTVETIRFKSGVSVRIHRR

SEQ ID NO: 9732 - protein, 563 aa, Unknown
  Description of Unknown: Integrase B9733 sequence
  cd00338,PF13408,IPR011109,IPR038109,PF07508, Coil,PS51736,IPR036162,G3DSA:3.40.50.1390,PTHR30461, IPR006119,PTHR30461:SF3,PS51737,IPR025827,PF00239, SM00857,G3DSA:1.10.10.2600,SSF53041
MTPAIYARYSTDLQREESIEDQVRACQRAADAAGLGPARVFADAGVSGASMARRPGLADLLDAVESGRVGAVIVESLDRLSRDQADLALIWRALKTANVRLITASEGEIRDDAAGIMQVGLRSIVGTLYLKDLADKTRRGIEGVVTAGRHAGPPPFGYRLKAGGQPGELEANPEQAALVLRIFTDYAAGLSPRAIAKALNAEGRPGPRGAAWRNTTIYGDPKKGTGILWNALYRGERVWNRQRKVKNPATGTARMVLNPQSAWVRIAAPDLALIDTTLAAAVEARREGASAPGQGNSASARACRPGRPLSGLMACGACGANMTLAGGEPRRYGCSAAKETGACGGVGYIRADIAEARLFAALKHQLLSAPAIKLAVDTYRAERARLKAEARAGQATLEARIARLARTEARLVDAFAEGRSPASVLDKAKAAETERLALEAELAEIAAQDTHAGRRGQVEELHPNAGAAYAARVERLQETLAGHPDTSETAPISARHRAEAIEAVRRLITRITVTRHKKSGETNLNVEGDLAALFNVSQASEKTVGAGARTGRVLTPVPWSFAA

SEQ ID NO: 9733 - protein, 563 aa, Unknown
  Description of Unknown: Integrase B9734 sequence
  cd00338,PF13408,IPR011109,IPR038109,PF07508, Coil,G3DSA:3.40.50.1390,IPR006119,PTHR30461,IPR036162, PTHR30461:SF3,IPR025827,PS51737,PF00239,SM00857, G3DSA:1.10.10.2600,SSF53041
MSDKLKVVAYARVSTSSKDQENSFENQKAYFEREIAKNPEWEFVGIYADKGLTGTSTNKRKQFLQMIYDAGIDIKEHKGEQVYIVSDRKPKFDLILVKNTSRFARNINVIELLRKLRQKGVYVNFLDIGKSTQNEADFVFIEMLMVFDENESRDKSRKVRFGQMEGAIKGVIMTTSKMYGYRKIDKFTLEIIPEEAEIIKFIFEKYAEGFGIRRIAQLLEEKGYKTREGKNFNVGTIKKMLTNPIYVGHVIRNRYTTGTIFVNKSYPRLLPKENWIIHKNKVPPIISEELWEKCQKIRESRINEYNLGKNTGTSLFAGKLICGKCGSPYHHNVDRYNSFYNCSLKKKKGIQACDNPNISEKRLIELVEEQIKNMLLLLNEKKEKIKELVSEIIDILQEKINSNNLKDRFDNEEFDFLELEELKNEKNKEKLLLELENITLKEEKLLDLYLDGGISKEVFEDKKKELENERKITEAKLNEHEYLKRMYENRINVLKKYIEWLDENLPNNIENINIKDYLEFIQRIIIYDKNNIDVKFSWELNFDTQTLLEFANNMGYNSIELGL

SEQ ID NO: 9734 - protein, 562 aa, Unknown
  Description of Unknown: Integrase B9735 sequence
  cd00338,PF13408,IPR011109,IPR038109,PF07508, Coil,PS51736,G3DSA:3.40.50.1390,IPR006119,IPR036162, PTHR30461,PTHR30461:SF3,IPR025827,PS51737,PF00239, SM00857,G3DSA:1.10.10.2600,SSF53041
MRAFIYCRFSSHKQQELSIEGQRDICQEYADKHNITVAGQYADRARSGKTENRADFRRLMRDAATGVVDCVLVWRYDRFFRNRAESALYRKQLEAAGVHLISVTEYIPEGSAGIITQGMIETVAEYFSAKLSEDVSRGMNKAAQHCQIVGRAPLGYRAGPNKRWQIDPVGAELVRRIFEWYASGRAMGQLAAQLNEEGHRTTNGTLYTRSSFNSILRNEKYIGVYSYGGEVRIEGGCPRIIEDELFFTVQRRLSANRHRPGAYKAEVPYLLSGKLFCGLCGAPMTGTAGTSHTGARHYYYICNNRRAKTCKKKNARLDLIEEAVLQSALDILTDENIAYISTEVERRCAENSDSAALLASLNAQLEEVQRRLKNIGNAIAQGIITETTKELLEEAEADRTALRQQIDRAKVQAALVVKAEAVACWLDGFRRGDRTDPDFRRQVFGALVHSVFVYDDYLKIIFNVDSAGAAVVPYEAAQAATPSEAPPGSYLDTLGAPKIALRKRKAIFIMIGALCECFRFAADFNPSQRLFLFCRRNSRTFSVRETVAYMQLPIKVSSKIIS

SEQ ID NO: 9735 - protein, 562 aa, Unknown
  Description of Unknown: Integrase B9736 sequence
  cd00338,PF13408,IPR011109,IPR038109,PF07508, Coil,PS51736,IPR036162,IPR006119,PTHR30461, G3DSA:3.40.50.1390,PTHR30461:SF3,IPR025827,PS51737,PF00239, SM00857,G3DSA:1.10.10.2600,SSF53041
MNPEYKPAVIYARYSSSSQTEQSIEGQLHDAYDFAQREGYTILREYIDRAQTGTNDNRPSFQKMIKDAERSDFQYILVWKLDRFARNRYDSAVHKHRLAQFGVRVVSVKENISDTPEGVILEGLLEAMAEYYSADLSQKIRRGRQESVRKGLFPGGPVPIGYTVENKRLVPDPRTAPVVTEIFTRYADGERIIDIVHDLNNRGFRAKRGAKFMRSTIVHILENKSYTGDYYFNGTIVRGAVDPLIDLETFERAQANKEKNRKAPAKNRTPESPCILLHKLYCGECGHKMTGACGKTKAGVQFRYYGCDGRTRFHTQCGMHVVQRKELHYAVCRIVSDLILYKNRRTLEALADSIMEVYLADLDTSELDVLETQYRQTERDLDKLVDSLITMPESVRPRIAQRMEELEAQKKDLEIKLAKKRAECSTTFSHEDFVKYLQVTFTDIESMDNQKFIIDRFVNSVYLYNDGRIVVYLNQIRGLPFLPPDDSIPGKGDVNRATPITPPPGIRKLAPFSRYSSLYTYAPTYVCKEEYSSPLLFFLHGRVGVIAWRYRLTKSDRQDPDE

SEQ ID NO: 9736 - protein, 562 aa, Unknown
  Description of Unknown: Integrase B9737 sequence
  cd00338,IPR011109,PF07508,Coil,PS51736, IPR036162,PTHR30461,IPR006119,G3DSA:3.40.50.1390,PS51737, PF00239,SM00857,SSF53041
MRYSKWDGSASKSSRIFEVLSKGTTSRVYGDAWSNCSGRRVRVKKVIELIRVSTLGQAADDRASIPAQRAVNRRTAQTFGLTITKTIEMTDVSGAAVLRTPEMQELLRLISAEEIHGVVVREFSRVMRPDNFSDYILFQAFQDTGTLLYLPDGPLDLNTKTGKLVAGLRAIIAGNELSEIRERIWVAKESNRRAGKHSQSPICLPFGVGYSREQGFFYKPEAERVREAYRLLLSGQHSYVDLAKLLGFTGQGARITLTNPIYMGWRVYDKKRDMRPGARRCSADGRQGDRKKIARDPDEVIRVKVIDPPLVSESDWKRAQEIIATKIRRHWRHRSGVTPQFTYNGFLICSDCEGSVYGMNCRRFYYVCSRRIRDRERCSAGYMGRDRLEQKLDGMFAEKFTDRTFITDLLRDVEAKSETTNARERIARLELEIRKLREKRTRVLDSFFEGLLSRAERDQRLADVDTRMRATEEALLREAPVPRVTARSLMTAFAPLFDWQYLNRESKRRILAVTVPEIHVANYSVRGVSVTSPSFFSDNESRIHAGSLIAEKPDRIFIPLNL

SEQ ID NO: 9737 - protein, 562 aa, Unknown
  Description of Unknown: Integrase B9738 sequence
  cd00338,IPR011109,IPR038109,PF07508, G3DSA:3.40.50.1390,PTHR30461,IPR006119,IPR036162, PTHR30461:SF3,PS51737,PF00239,SM00857, G3DSA:1.10.10.2600,SSF53041
MPPVDTPLRRPARCKRAIIYVRVSKAREVMYSPEQQIMRCEQYAKQHNIQIVDIVRDLNLSGRTFEKRKVIEIIERIQNGEAEIVLVWKYSRFGRSKLKNAVHIVLVEKAGGQVISATEGGNEKTNVGRLNRNIIMSVDEFYSGVMGDTWKDTHERRRNSGLPHTGKPRLGYMRCPKCERDEENPTKYKPCECGGVFVPDPERAWAVKEVYTRFTEGEGLRKVIADVASRGVTTTVDGAPLTWGHWTTALDSGFAAGWLRAKSEEAKEENPNGRRIDDYDVWVKGKHDALISEEIWQKYRKRRMARERLPPKAREPKHSLSGFIRCGGRNSDGELCLRVMTAARGGRKGEKYVVFRCPVHADTGACTGSSIGLITTEKIVRRWIRDNAKDDGRRQRALDEMLTSEQNAGELRHARARVAQLDEKRTKLASGWASGLLKDDLYRTLSEELDVELDVAHATVAKLERATTRIELGPEVFLPIAEQWDGLPPAAKNEALQHVVDHIISIPMPGRARTMARVVGLGEAYDYALPSRGVSRVRARRNASLAKTHQNASQSGVTPGEE

SEQ ID NO: 9738 - protein, 561 aa, Unknown
  Description of Unknown: Integrase B9739 sequence
  cd00338,PF13408,IPR011109,IPR038109,PF07508, PS51736,G3DSA:3.40.50.1390,IPR006119,IPR036162,PTHR30461, PTHR30461:SF3,IPR025827,PS51737,PF00239,SM00857, G3DSA:1.10.10.2600,SSF53041
MKQAGALIRVSTSRQLEGTSPEKQLEGVRALAVSQGFAIADVHAWTMAESGNLRERAGFRLALDAIGAGEIGRLYVFSIDRLGRNLLELLLFLRDLEDRDVECWEAQGGRRLRWDDFLVQIEGAVASKERQEIVRRSQDGLRRAISAGKFSGGIIAYGYRLNPVSKQLEIDPEESAVVRLIFDGTVGERLSTVEIADRLNGLGIPTRYAKDGRQIRRGKRAPEHTAGIWRAGRVRNMLKNPAYTGTWEWGKRSSKRPPSDRIVGACPAIVSVETFEAAARVLAVNRWRRERPADRPYLLRGLIRCGDCGLTYVGSASHVAGGKEKRYYRCNGATQWHKLGRAKCPSKSLVAGELEAVVWADIQAFVQRPEVALEQLRAVRAPLDATLGERLAEIDREIRELHRRERNVIRLAAESTQADPRALDDVLGEIRGSLASLEAYQSQLRARLQAGEALERELFGVAERLSRLQQAIDQADFSQRRRAVEELVKGIEVATRVEDGRKTPVVTITYRFDDLGGPPVPTSGLFSGELDRTSELAHVLTGAMEITREWGPGWRDRAIGP

SEQ ID NO: 9739 - protein, 561 aa, Unknown
  Description of Unknown: Integrase B9740 sequence
  cd00338,IPR011109,IPR038109,PF07508,Coil, G3DSA:3.40.50.1390,IPR006119,IPR036162,PTHR30461,PS51737, PF00239,SM00857,G3DSA:1.10.10.2600,SSF53041
MSNAKKTLSPYAISYLRFSSAIQGKGDSSTRQNASRDRWLKAHPEIPLKREMNDLGLSAFSGKHVATGDLGDFLALCESKEFRAETARRDVYLLVENLDRLSRERILKALAQLEGILASGVKVVTLCDGKTYDSKSLDNMSEVMMAICTMARAHEESANKSRLNSSAWAKKRKEAAEGKKGSAVNNPGWIRESKDGSLEVVPEAAKAIRRVFELACEGKSISAIRSTMNAEKHPTLGFFKTGKKSFWSFVTVKSLFTNRKVLGEFQFHKFEKDENGRYLQCSNGRRIRKAVGEPIKDYLPAIIDPATFAKARKILVDRPSQRGRKSPACLNLFTKVAFDRKTGETIQIHTGGGLTKAAIARGLKNAWTYMPAGIRVGARKGPNWVGWHLEELFFASITQALKVEGSVAGAEADLALAEEQLEEVKKTIKGLEKFLLDSIGKEDFDPSGMRDHLEAQQKVLKFKKEEIEKLKDEIHAGAGAIRLDPKQKDRKKLMEVIRANVQRIDLDCEKQEFRCVLMNGIEYEVKKVEGGWRIKSDHFDPGEKEVFDSIKQLRKIQKKAA

SEQ ID NO: 9740 - protein, 560 aa, Unknown
  Description of Unknown: Integrase B9741 sequence
  cd00338,G3DSA:3.40.50.1390,PTHR30461,IPR036162,IPR006119, PF00239,SM00857,SSF53041
MSAAKSSSPRLDAIGIVRVSDAGQEDAWGIPRQKTAIAAAVKAHNLNLVRTVVITDVSGRHAEADPDFQKIFADLKKGMHVVLAEQSRLFRPGTFRDYGILEHFRIPGALIFTPTARIDVRTREGRQSVLLNGMMSGEELHTLHDRCCGAKQEIREAGLHPGGNQILPRGVKFIRVRDENGKITEELWKHDGVDSERMRIAYRLLIQEDLPYTHIAEKIGGGWWSGSVKASFMNPIWKGYRLYKYEAKGEEFIPKNAKPDKNGKIKPRRKMTLKPAPELVKIDLPGIVTDEEWARAQEIIAQRETKHRKLKVKNYKRPRHLANGIGYCVCGQALYGRYGSRGPHLDVYACKTQFKGGAGCGMKKVKRTEMDAAIETMITVNLLTANYVIETVELVAEPAAADPGRAQREAALAAVRKARANLLDLRLTGDITKERFVARDRELETEERSLQTLLPMPKPKAKPVDLGAQIAQVFAEFAFLSFPKKRSLLHRAVKEIMLDGRTIPSVTLRGGFLDGVNSSLRSTTQSPIDSLSDVVIRFPKPIEIQRTYVDGRSAGKRWSA

SEQ ID NO: 9741 - protein, 560 aa, Unknown
  Description of Unknown: Integrase B9742 sequence
  cd00338,PF13408,IPR011109,IPR038109,PF07508, Coil,PS51736,G3DSA:3.40.50.1390,PTHR30461,IPR036162, IPR006119,IPR025827,PS51737,PF00239,SM00857, G3DSA:1.10.10.2600,SSF53041
MAYRRVKDLIDTIGLRAVFYARVSTAEEEQLNAIELQIEENRNVILKNKWKKVDEYIDRSKSGTMVKGRDEYQRLYEDMLEDTFDIIVIKDQERLQRNTKDWYLFIDRLVQTGKLLYMYLDGKFYSPDDALITGIRAIIAEEFSRNLSKKLHNYHANRIEKARQGLEIDLQGSGNVFGWDKKDGKYILNPEQAKVRRLMCEGIMARKGSTQIAKELNEAGYRNTVGNPWKPMDIPKFVYDCKNVGTMIINKEKHDFESKQVVKLPEEEWVYVKGALPPIVTEEEWDLICKIHDERVIATGSDHRGKGKKISGYSFSGKLVCGECGAPYWRKTKTSKEEYWVCSTKQTKGRKTRKRDAVGGKAGELNELGCDNENISYGALMDVMRIISERLQANTDVIKADMVNWLTSLKKQLQRGNAGFTEADLKREELRKERLLDALLDGVLTKEEYSKKALTIDLKITEIKKEMLSNQNSLEDIAEIDRVLANIDAEVATYLDENNQLKVDFILEHLQQVEIYPDRVVVMIPLFSEGMVVYKTQYVSGSKWCRKDYSYEGYSRNIKN

SEQ ID NO: 9742 - protein, 560 aa, Unknown
  Description of Unknown: Integrase B9743 sequence
  cd00338,PF13408,IPR011109,IPR038109,PF07508, Coil,PS51736,G3DSA:3.40.50.1390,IPR036162,PTHR30461, IPR006119,PTHR30461:SF3,PS51737,IPR025827,PF00239, SM00857,G3DSA:1.10.10.2600,SSF53041
VKRAAIYARFSSDLQSDRSIEDQVTLCQAKAARDGFKIVATFSDRARSGASIHGRAGIAELLAAAKAGQFDVLIVEELDRLSRSQADLASIYDRLTFVGIDILTVHGGAGRTDQIQVGIRGIVGALFLTDLAHKVRRGAAGNIRLGKHAGGLAYGYDTTPGQPGAWTINEEQAAIVRRIFTAYLAGERTPAIARSLNADGIKPPRGSYWQPGALTGSNNRHNGIMGNEIYCGRLVWNRVRMIKDPETGKRVSRPNPETEWQRAEVPHLMIVPPEVFDQAAALKASRGNLAPTHRRAPKALLSGLLKCGSCGGGMSIKGRDRGGVRIVCTTFHNAKLCANNRTYYLHHVEETVLSGLRRHLVDPRAIKHFLKCYHDERKRLVVEASRERPDLERRLGEATRKLARLTEAMLDSDAPVASFTTRIAELEREKAEIEARLAQMSEPVRVIALHPAAQEHYLKVVNDLAAAVRDRADRSAMAAPVRDLVDSVIVHRTLPGEPIRLTVNGRLAALIGQPVFPQGSLSGVKLVAGARYGIEPRVDVPVFAMEFFGARKMGRTAPHP

SEQ ID NO: 9743 - protein, 560 aa, Unknown
  Description of Unknown: Integrase B9744 sequence
  cd00338,IPR011109,IPR038109,PF07508,IPR036162,PTHR30461 ,IPR006119,G3DSA:3.40.50.1390,mobidb-lite,PTHR30461:SF3, PS51737,PF00239,SM00857,G3DSA:1.10.10.2600,SSF53041
MQLAAPPKDVTTAGSKAAQYVRMSTDAQKYSLENQMAAIAAHAARRHMSIVRTYADAGRSGLRIQGREGLQDLIRDVQLGRADFDCVLVYDITRWGRFQDVDESAYYEFICKRAGVRVHYCADEFENDGSLASIVLKNIKRVAAADYSKQLSKKVFLGQCNVVSLGYWRGGPAGYGLRRMLLDDRGKRRGILEYGEQKSLKSQRTILVPGPASEQKVVRRIFSAFVNEKKSRTQIAGDLNADGILNARGKLWTSLTISNTLKNEAYAGHLVYNRRSQKLGERQVTNPPDMWVRRNNAFKPLVAPRLFAKAQRRLAEVEHGRVLTDDQMLDRLRALLRREGRLSLKLMMTTKGIPHSKTYAQRFGSLAEAFRRVGYEPKSRYCFKETAAKADRLIASVARNIIAEVEKRRRSISFLQELHLLTISSSVTVSLTLARVVSDGERYAPPGPRWEVQRLKYKKSDLVLVIRLEPSQGGIKDFFLLPAANLPKTRDGRVRISTRVFGEFRCPTFAAVISALHQRLDGPQWSWPTIDPHMHPRPKKGVSARNKSPARGASRTGPEV

SEQ ID NO: 9744 - protein, 560 aa, Unknown
  Description of Unknown: Integrase B9745 sequence
  IPR038109,PS00397,IPR006119,PS51737, PF00239,G3DSA:3.40.50.1390,PTHR30461,IPR025827, SM00857,G3DSA:1.10.10.2600,SSF53041,IPR011109, PF07508,PS51736,IPR006118,cd00338,PF13408,IPR036162,PTHR30461:SF3
MKIAVVYIRVSTEEQSKHGFSVETQTNTCFEFAERQGYIIKRIFVEEGLSAGSLKRPEAQKLLKYCNESKNGINAIIVWRLDRLSRFCVDYHGTIRPILINKNIKLLSATEFNSDTIEGEYMRNIMMCNAEYELSLIRFRTKENMKTIARSGRRPAKAPIGYLNVDDEFTLHKKIIVDEVTAPFIKRAFELYSTGMYSFKSLGEQLYLEGFRHPKTGEKFPPRKFDWLLHNPFYIGRFEWSGEWYEGTHTPIVSKELFYRVQARFADVDRTKKHDVKFAYTGLIKCSECGCYLTAEFKRGKNKKGHYIYYHCANSKGVHKSLKCHREEKFDNTFANILETIHLEEKHIQHLKLLASDYLKEFMEYEERVVADLKQRIDVITKRIKNSYIDKLEGRIPAGMSEEEFNSLHKEWQEEKDLLLIRLNEANISSKHVYQKIEKVLTFANHLPELFLKAEPEEKKLIVTTMTKSVKFDGENLIVNLKDTFKALQNVKKCVLETCENDNLRTLKTLANTKKDPHSEGLIKNGARNGLLLEPLQLLYNITKSEECQEIIDNLLQLVA

SEQ ID NO: 9745 - protein, 560 aa, Unknown
  Description of Unknown: Integrase B9746 sequence
  IPR011109,IPR038109,PF07508,PS51736,IPR036162, PTHR30461,IPR006119,G3DSA:3.40.50.1390,PS51737,PF00239, SM00857,cd03768,G3DSA:1.10.10.2600,SSF53041
VKRGSFACAIYTRKSSEEGLEQGFNSLDAQREACEAYVLSQQHEGWHALATHYDDGGFSGGTMKRPALQRLLADVQARRLRIVVVYKVDRLTRSLADFAKIVEQFDACGVSFVSVTQQFNTTSSMGRLTLNVLLSFAQFEREVTGERIRDKIAASKQKGMWMGGMVPIGYRANGRTLEVDAADAALVGRLYSRYLALGSVRALKDELDRDGMVTPGRVSNGGRAYGGRPFSRGQLYRILASPVYLGKIQHKDQVHAGQHPAIIDMELWEAVQAKLLENRQGHRERQTSPSTSLLAGRLVDHQGRRLIPSHSQKRAKRYRYYVSEPLVTKNRDHAPDGLRLPAQELETVVVDALRHWLVDADAVLEALAGIPPARVQSVLAESHRLAKDLDEAAKQYAAIHRLVQQVVVESQSVQVIVQPMALLTHDATNHASGHQPTVTLAMPVQIRRCGLAMRLLVTGARPQRREPDTRLVALQAKAQRWLEQLTSGRATSIAAIAEAEDVTCSFATRVIYRAFLAPDIVRAILDGTQPPNLTSDALRQRVPLPIDWATQRQLLGFIPA

SEQ ID NO: 9746 - protein, 522 aa, Unknown
  Description of Unknown: Integrase B9747 sequence
  cd00338,PF13408,IPR011109,IPR038109, PF07508,Coil,PS51736,G3DSA:3.40.50.1390, IPR006119,IPR036162,PTHR30461,PTHR30461:SF3, IPR025827,PS51737,PF00239,SM00857,G3DSA:1.10.10.2600,SSF53041
VAKTVRTIPATISRYTAAPINSRKKRRVAGYARVSTDHDDQVTSYAAQVDYYTNYIKERNDWEFVGIYTDEGISATNTRHRDGFKRMVRDAMDGKIDLIVTKSVSRFARNTVDSLTTVRKLKDKGIEIYFEKENIWTLDAKGELLITIMSSLAQEESRSISENVTWGHRKRFADGKVCVPFGHFLGYDRGPDGNLVVNREQAKTVKLIYRLFLDGYTFHSIARELTSRGLETPARKKRWYPGTVESILTNEKYKGDALLQKRFTVNFLTKETKANEGEVPQYYVENNHEAIISPQVFDWVQEEIKRRREGRGRYSGVSIFSSKIKCGQCGGWYGAKVWHSTDKYRRTIYRCNDKFKSHCKTPHLTEDDIKEAFVRAVNQLIENKADVLDSITLLKERLTDTEDLEEERDRISTDLNLLADKIQQLIAENARVAQNQDDYDRNYNELVSRYEAAKTQYDKTCEAIQYRKARSRQMDSFIKELRNQDLIKEFDARLWGSLVDFITVYSKDDIRVTFKDGTEIRA

SEQ ID NO: 9747 - protein, 559 aa, Unknown
  Description of Unknown: Integrase B9748 sequence
  cd00338,PF13408,Coil,G3DSA:3.40.50.1390,PTHR30461, IPR006119,IPR036162,mobidb-lite,PTHR30461:SF3,IPR025827, PF00239,SM00857,SSF53041
MDLILSYLPPPSTLPPGSIVDSYRRDSGGMRQDKSTDQQLTELEAYCKEHNLVHRHCFVDEAKSGKSTAGRDDFNRMIETYEIPSNRPVGLLLWNYARFARDIDDAQFNKIRLRQWGITVHSLNDQIPEGDYGRVIEFLIDVSNEEKRKQTSIDAKRGLWDLVQKYGCVPGIPPRGFKREPVNLGPRRDKTEHIAHRWVPDPEWTPRIKRAFQMKAEGATLLQIHKETHIYNALNSYRTFFSNELYIGILHFGGHVVQHYCDPIVDLPTWDAIQKIQSLHANRQHVTAKNSLHPRRKSEAATYLLSGIGYCARCGSPLWGMSSKQRSGSYYYRYACTKAKRQRDCDLQPIPARALEALVISELTHWFEHPDNLRDLLEASQQFDAQFATRQKAAAKEIQKDLGAVRRSIVNVTDAISQLKNKKSKALLAKLESLESEETDLETRLEKVKTQTPVVPPPLTEEQILFLSKRLVTELNTKDPATQRRVLLATIHAVTVDRTGSYGYCHIDLKHRPRETQAPEEPGGQWYTVSISRAPVGAHLYRRSIEFEFTIATKKSHSV

SEQ ID NO: 9748 - protein, 559 aa, Unknown
  Description of Unknown: Integrase B9749 sequence
  PS00397,IPR038109,IPR006119,PS51737,PF00239 ,G3DSA:3.40.50.1390,PTHR30461,IPR025827,SM00857 ,G3DSA:1.10.10.2600,SSF53041,IPR011109,PF07508,PS51736 ,IPR006118,cd00338,PF13408,Coil,IPR036162,PTHR30461:SF3
LLILKGDQKLSTDNIMHLIGKINALIYARVSTTDQANKGFSIESQIERCKERAISKFGYKESEIIALVEPGGMGDDPNRPALNHALYLLEKGLGKKFIVLHPDRLTRDNTLQGVVSRRIWGMGVDIEFIEFEVNPHDPESMLMYNIQGSIAQYNKAKIHANSKRGRLAKAKKGEFPSFKRLYGYKFNTVTDLPEYNEEEKEILLEMKDMLLNKKMSSNEIAKELSRRGVAAPNGKTWYQATVSRMLQNEDYTGDFYYGKSKVVQINGKKKQVPTNKDEWILIKIPPMWDKATREQIIERLKSNFKGRSRATKDYLLKNKAKCGRCGGACGSGITSKTKSGVYKYYSCRAKTAKGYQNGKKVVSCEGKNWRVDIVDEVFWNWFIKLLKNPEKFLESFLEEASDQKKIDELKAKASRLEKQLGEIDEEIANYVILFGKGKIKESMFDQLSQPLEQNKEHIENEIKIINSQLAANKQTEDKKQKMIEYIGSFSKMIKNEITIEEKRQFLDFFIEKVTLFDDDHMEVVWKSSSLNNENSHVDFLNGEQGGEFINSHKRLNHIQ

SEQ ID NO: 9749 - protein, 559 aa, Unknown
  Description of Unknown: Integrase B9750 sequence
  cd00338,PF13408,Coil,IPR036162,IPR006119, G3DSA:3.40.50.1390,PTHR30461,IPR025827,PF00239,SM00857, SSF53041
AHPSDTIPIRGRFSIVSVMRCSLTGLVYSYMRFSDPRQASGHSSDRQAAYAAKWAAEHALILDESLSMRDEGLSAYHQRHVKSGALGVFLAAVEEGRIPQGSVLVVEGLDRLSRAEPIQAQAQLAHIVNAGITVVTASDGKEYSRERLKANPMDLVYSLLVMIRAHEESDTKSKRVLASIRRQCEGWLAGTYRGLIRNGKDPVWLRLVDGKWEEIPERVAAAREGLRLYLMGYGATKIIERLTEQNLSLTGRGPQALQIYRLIKQRALIGDKELTLGSESYQLPGYYPALLTKAEWDGLQLANSGRGRRKAKGPVPHILTGIGITVCGYCGRALVGQNIGTRNRDELGRIQNGHRRLHCTSYSHGGCSVGGSVSVYPFERALMEYCSDIVNLQALYGADRSAGPLAKLTKARQDLVDVDNKLEKLTDAMLASAEDGVPLTFAKRARELEAEQQRLQALVQEAERDLAATARTDIQGTDAAWKRLAAGVEAQDYDARLQTRQLVADTFERIVIYQRGVRPTEDKGPMDMMLLAKGGTARLLRIGRDGQLILAESLEQPTS

SEQ ID NO: 9750 - protein, 558 aa, Unknown
  Description of Unknown: Integrase B9751 sequence
  cd00338,PF13408,IPR011109,PS00397, PF07508,Coil,IPR038109,PS51736, G3DSA:3.40.50.1390,IPR006119,IPR036162,PTHR30461, IPR025827,PF00239,SM00857,G3DSA:1.10.10.2600,IPR006118,SSF53041
MKRVIGYIRVSTDNQDLERQRVLIRKYCENKGYSLLRIEEDYAISGTVSNRNGLNSILNITNSVADMVVVSELSRLSRQDDIFETLTQIHTIIRNVDLVILDEPDKVYEAGKTIILSDFLMLAIKAYGAADERKKIVSRMTTGKDSKVQAFPLMLTDSNIPTGFKAVPNPNYIKGATPKMLLVEDEERMQLVRDIFNYVANGLSLGKTAEKLNMLGYRTARNKPFYEQSIRTIINDSIYNGVRYWKGMKLELPVKFISDEIWNLAHKKVQENKNYSGEAQKHYNPLKGIIKCPCGQTSMYGRTSSCITYRCLDRIKMGIKSPCTNVGIKAETLIYAVWKDVRLRTLDETYQAKSNEKIAEIEAENIKLTQSIKEKDSETAKLQSDLKTVIDNVMASTNIAIVKALNGKADSIDSQIKSIETEKKAIDEEIASNNRRIADEIKSLSRKELDSLSLEGKGEMFRELLSKVVYYSVSLNSGFIVITYKNDLETIIAYHNRNKPFLWALPTTFRFNKVKRTVIVPTLPEQPKMTSFVLERITEKEYTFKQLQESFNLEEWKI

SEQ ID NO: 9751 - protein, 558 aa, Unknown
  Description of Unknown: Integrase B9752 sequence
  cd00338,PF13408,IPR011109,IPR038109,PF07508, Coil,PS51736,G3DSA:3.40.50.1390,PTHR30461,IPR036162, IPR006119,PTHR30461:SF3,IPR025827,PS51737,PF00239, SM00857,G3DSA:1.10.10.2600,SSF53041
MRKKFNIDLSMLTPEEQQQFHDDPTTLTKGEVDVALYLRFSSERQTEQSIEGQLRDCIAYCKRKSFRIVAIYVDRATTARKDVEKRVHFQEMISDSAHHLWNFVVVWKLDRFARNREDSAVFKMRLRKNGVRVKSATETISENPEGIILESVLEGIAEYYSADLSQKITRGLRESAMKGHSVGGHVPLGYKIEDHKLVINPATAHIVQEAFQLYANGESMAEICRIFNSKGYRTAKNSEFNRSSFKSMFKNVRYIGTYIYKDIKKENAIPAIIDKDLFETVQRRLSLAADAPARGKAKVDYLLSGKLFCGHCGATMNGESGTSKTGAIHNYYTCYSRKRRKGCDKKPLKKDFIERIVAQDAMALLTNDVIEELADMAMSQADRDLKENTCIPELSTRLTEIEQGINNITKAIEKGIASDTLLNRLTELEKEKKDLTSQLREEEKYICRIDRDQIIFWLTKFQGGNIEDEDCRRRIIDLLVNSVTVWDEPDGYKITTAYNLTSCKTKTFRVSNTGSPSSEGFGFGELSSTKSKIRTFVRRDRGSDFSCLQLVLSRNEFK

SEQ ID NO: 9752 - protein, 558 aa, Unknown
  Description of Unknown: Integrase B9753 sequence
  cd00338,IPR011109,PF07508,Coil,IPR036162,PTHR30461 ,IPR006119,G3DSA:3.40.50.1390,mobidb-lite,PTHR30461:SF3, PF00239,SM00857,SSF53041
MKSPVTAYSYERVSQPQQAKGRGLGRQSDAAAAWAVSHGLTLDTSLQLSDAGRSASKGHHLTKGALGRFLQLAQGGKLGGSPILLVEAIDRLSRQEPLDAIETILTGLVGSGVRIITLEDGAEYSRETLRSDPTKLLVLVVKMQAAYEYSARLGMRIRDSWDKAREQIRNGTIARPRQFCPAWCDWEPKQGYSLNAKAETARLIMQMLQDQGSYVVAQHLNGIGVPTFKGKRWTHANVREVATSPAIYGALRLNTKPGNGSPVEIYEGLLPAVVTKAEALAIRQQLAQRARSGAAGPITNTRWIGQRLTHCACGKRMGCTIGGSPGKRVYYLRCRHRENERQGCARPGMLLQAATAHLLTRLERPQLEQLIASCQQSDQHYNRQAMVDAAQQRCDELQLQHNNTLKAYKAAARSGVDLTAALQVQGEVEAELREAQQALRDAQQLLAQLEGVQGATEALEPVLELQRAFALGLDTSEQRRAVNLALRKMGLSITVDTSTAEIGLAIGDAPPQWQPIRQLDRSALYWGDKVQEKAGLVVAGREADFAAELSRCAGLEIT

SEQ ID NO: 9753 - protein, 557 aa, Unknown
  Description of Unknown: Integrase B9754 sequence
  cd00338,PF13408,IPR011109,IPR038109, PF07508,Coil,PS51736,G3DSA:3.40.50.1390, IPR036162,PTHR30461,IPR006119,PTHR30461:SF3, IPR025827,PS51737,PF00239,SM00857,G3DSA:1.10.10.2600,SSF53041
MEKKLERIKIACYIRVSTDKEEQIASLSKQHEFFEDIAKQHDYELVKIYADEGISGKQLKNRVEFQQMIVDARLGKFSLILVKDISRLARNTLDFLQVIRKLKKYNCDINFVNQGMKLQETSEVYLTILASLAQEESSKLSERVKFGKDITAKKGRVPNFVFGYDKVDNYTLTINEEEKIIVEKIFDLFVNEGYGSGKIAGVLNDLKVITKRTKKSQWHQVVVCQILRNRLYVGKVVNKQSQVVDFITGTRESIPLENQIIIDRPQFRIIDDIMFNRAQDILEGRRDTFHMMNKKESTKYPLSNLIRCSECGYAFRRMQRKYSTDGKTYKRWVDSLRNSMGKDACCNKVIIDEEELEDYIKLLIQQMFKNKTKIIKGVSARLKEIIKEKNKGTINNQKDIQVELDSLMKQKQKYMEMFQNEIIEMEELKDYTKGINDQISIHKISIHAVNNANEITLNIESIVKKYFDNMSNIIEEGEYTNEALKTLIKSIMIYPDGTIEVSLVISNEHNLNLILPLEQIDIPLENTVPNTNDNTHCTYKKERFKVVFQVEGISDKG

SEQ ID NO: 9754 - protein, 440 aa, Unknown
  Description of Unknown: Integrase B9755 sequence
  cd00338,PF13408,IPR011109,IPR038109,PF07508, PS51736,IPR036162,IPR006119,G3DSA:3.40.50.1390,PTHR30461, mobidb-lite,PTHR30461:SF3,PS51737,IPR025827,PF00239, SM00857,G3DSA:1.10.10.2600,SSF53041
MYATKGVRTMKNVFDITPQQTKPQRKKRVAAYARVSTGKDAMLHSLKAQIDYYHDYINQNPEWEFAGIYADEAKTGTKDSREQFQLLLKDCRAGKIDLVVTKAISRFARNTVTLLETVRELQCLGIDVYFEEQNIYTLSADGELMLTLLASFAQEESLSASENQKWRIRKGFEQGKASTCQMLGYRLVDGEITIVPEEAETVRRIFELYHQGYGMQKISNIINEEGHRTVKGREWRVSKVRSVLKNEKYTGDLLLQKCFVRDHVSKACVPNRGELPQYYVEEDHEAIVDKDIFGSVQALMAQRRAEYTHSKGHESAFSRKIRCSICGKNYRRKTTAYNVVWCCSTFNTKGKKYCASKVIPEATLQAAAAEVMGLHHFDEANFESQIDHIEACPDNLLRFVFVSGTVREYRWKDRSRRESWTDEMRETARKKALERSSANG

SEQ ID NO: 9755 - protein, 556 aa, Unknown
  Description of Unknown: Integrase B9756 sequence
  IPR011109,IPR038109,PF07508,Coil,PS51736, IPR036162,IPR006119,PTHR30461,G3DSA:3.40.50.1390,PTHR30461:SF3, PS51737,PF00239,SM00857,cd03768,G3DSA:1.10.10.2600, SSF53041
MPTKKRPAAAAGHRYCIYARVSPKGSSWAAQETSIGVQLQECRQYILDRVDPLAQFTEVADEFRSGKDLNRPGMQQILGDIESGRPSFDTLVVWQLDRLSRNLADAAPLFERLRDAGLGFVSIRQSYLSATGAMARFNLTQTIAIAQLEREMTSERISAKMHWIAQNGKVPWGIVPFGYRRRTDVKNTVEVVPEEAEVVRKIFAAYLSGVDRGDLSTLRRLQEEHRDRISDVKHVYRLLRNRFYVGEISYNGEVFRGEHEPIIERDVFDAVQSRLPGKKYHPARPGRRKYPYLLSGLVRCCCDPARHMRPASVKKKDKRYFYYKCTDSGCGCAINAEKLDAAVLEALRRVATDPEYIRECYDVCQRRIAEARRKQQPRITAALEERDTAEAELKHIDGMFMSGVISPANMDYWNEKLVAARERVEKAKREYADLVAALEPLEDQLKVSAVIKSLSAWATALDDAADDVALKRNLIEAMVFRVRCVKHGEFEIDLALDTISGKNKIGITSDVEVMPNGGEWWFSRHLNITLIVAIAVNKHYRKKEPRNGESLGTVAV

SEQ ID NO: 9756 - protein, 556 aa, Unknown
  Description of Unknown: Integrase B9757 sequence
  cd00338,PF13408,IPR011109,IPR038109,PF07508, Coil,PS51736,IPR036162,IPR006119,PTHR30461, G3DSA:3.40.50.1390,PTHR30461:SF3,IPR025827,PS51737,PF00239, SM00857,G3DSA:1.10.10.2600,SSF53041
MEKDAMKITKFPIDLSMLTEEEIDQFRQDPSTLFEGDTDVCLYLRFSSERQREQSIEGQLRDCRTFCKLNSYRITAIYVDRATTARKDVEKRVHFQEMIRDSEKKPWEYVVVWKLDRFARNRTDSALFKFRLRKNGVKVISATENISEKPEGIILEAVLEGMAEFYSADLSQKITRGMRESALKCHSIGGHVPLGYKIEDHKLVINPATAHIVQEAFELYANGETVADICRIFNTKGYRTAKGVEFNRNSFKSMFRNKRYIGVYTYKDIEVEGGVPAIIDKELFETVGHRLSKNAEAPARGKAKVDYLLAGKLFCGHCGGSMNGESGTSKTGAIHNYYTCYTRKRKHACDKKPLKKDWIEYIVAQDAMELLTDDTIQELADMAISQTEQDLRENTRIPELTDRMKETESGITNITKAIEKGIASDALMNRLVELEKEKKNLLRLLAEEEKYVCKIERSQIVYWLTEFKGGRIEDERYRRIIIDLMINSVTVWDEPDGFRITTAYNLTSCKSKTFRIAPSGEKGFGFEGSECTIERISEPYIVWGKIFVQTKRHPLP

SEQ ID NO: 9757 - protein, 556 aa, Unknown
  Description of Unknown: Integrase B9758 sequence
  cd00338,PF13408,IPR011109,IPR038109,PF07508, Coil,PS51736,IPR036162,PTHR30461,IPR006119, G3DSA:3.40.50.1390,mobidb-lite,PS51737,IPR025827,PF00239, SM00857,G3DSA:1.10.10.2600,SSF53041
MDEFAARPVADILARYSTDNQNPVTIDVQVEKCREWCERNGYQVGKIFSDEAVSGMKETRAGYEACMMHLGMGGAQLVVVYDQSRMFREFTEWFQFRKDVDMLGARVASVTQPMVGGDLKDPAVFINEAATAMLNHAQVLITRQKTIDALKHNAREGKSSGGKPPLGYDLDKDKKYVVNEHEAEAVRLVFQLFARGFSYGEIIDELNSRGYLTKRGQPFGKNSIFDLLKNEKYIGRLVYGATKAQADGRWNSHAKSKEDAIVVENGVPAIIEQELWEQVQSRIRTRKGAGGRYSAKREYLLTGRVFCGDCGASMVVMGSKASGYQYYECNNKRRTHTCKMKNVRTEWLEQTVAASIKQMLTEPANIEMLVDVARDQERQITTEYDTRRAELASRYTRVCHQLENGVNALLEGVVSSELKEKVRHLEEEKAEIEAETAELNQYKGYVGLDDATIRRCVENVAKVDINTSEGLKLILAVVSRVNIRTDTIEIKTLISMDGTDPDPTKSRPQHLELFPSESASGEKYHTTPENGSGHHCQQTRTCFCMRAGSGLFFVWT

SEQ ID NO: 9758 - protein, 556 aa, Unknown
  Description of Unknown: Integrase B9759 sequence
  cd00338,PF13408,IPR011109,IPR038109,PF07508, Coil,PS51736,G3DSA:3.40.50.1390,IPR006119,IPR036162, PTHR30461,PTHR30461:SF3,PS51737,IPR025827,PF00239, SM00857,G3DSA:1.10.10.2600,SSF53041
MVKIKYNGTAWQQSYGPGELAVVYARFSSHKQGEQSIEGQLAAAHAYAAARGYQIIHEYIDRAMTGRNDNRDEFQQMLSDCTKKQFSVIIVWKVDRFGRNREEITFNKYHCKKHGVRVEYVAENMGEGPESVILESVLEGMAEYYSLQLSQNIRRGNRENAKKCRFTGGRVPLGYKLDKDHQFVIDPDTAPLVRRIYAMYAEGQTITEIIDQLNAEGLRTGQGNRYTKNSLRTILKNEKYIGIYDFKNGEIRIEDGVPAIVDKEIFYKVQKLLAINQRAPAAKWNRADYLLTNKLFCGSCGAQMVGESGTSKTGAKYNYYLCINHKRGNTCARKAIRQDWLEPFVLTKTQELIMDDEVIQYITNNVWEYYLRQDQQRDKVTSLKAQIAEVEKAINNLMRAIEAGMPLTEMTKNRLTELDGQQQALNAAIAQTQLDGGFRLQKDHIQFFLEQFREMDFTDRKCQQRLIDVFVNSIFITDDELTINFNFGGDKSVIKFTDFKALSGENEFGCRALVSTINLSPPFCVNVQKTLLQKGGLNYLLKNDKNVLFSSILLPS

SEQ ID NO: 9759 - protein, 556 aa, Unknown
  Description of Unknown: Integrase B9760 sequence
  cd00338,PF13408,IPR011109,IPR038109,PF07508, Coil,G3DSA:3.40.50.1390,IPR036162,IPR006119,PTHR30461, PTHR30461:SF3,IPR025827,PS51737,PF00239,SM00857, G3DSA:1.10.10.2600,SSF53041
MCSFMSPTFVGRSKVHPTTLRDKEAMTAARVTRQQKYDQQALDQLKSRLPDGATFNGSIITLPVPPGTPKESLAAASLRVSKGRDTMISPEIQFDEIARHSKSKGLVLYRLFLDMHKTGREFEKRAVKQIVEEVKSGEYMNVVLWKWSRWGRNVRWSTVYLAMVEDAGGQVRSASEDIDPKTAIGKFTRTQLLAIAELESDLKSEDWRATHENRRTRGLPHSSAPRFGYNYEPDEGYTIKEDEAVVLKELYERFVSGVPMAVLTKEMNGRGILTRSGNAWTPTSLGRMLDTGFAAGFIRERSNPPAAINNKSTLKDFDIWRVGVHPTIVDPALFERYKAIRVSNASKPRRLVGGKHALSGMLLCGECGGTMVSIYNGRTNKHSWICGKRQRARRTGADGHIPVTISNRRALKLARAWVETNKKGETDMAGRVKKAATTPAPITNVDNLKARVDALKGERTELSRMKMKKQISQEDYDAFWAENNASLNQAEIDLDAARAAAPRVRTQGAVWETLSAVWDGAEPGELGRMLSSVLAAGVIRPGPYSEDKAVFVPAWD

SEQ ID NO: 9760 - protein, 555 aa, Unknown
  Description of Unknown: Integrase B9761 sequence
  cd00338,IPR011109,PF07508,Coil,IPR036162, PTHR30461,IPR006119,G3DSA:3.40.50.1390,PS51737,PF00239, SM00857,SSF53041
VANLATLLPEIKSLGDTPLERSIRDHAMARVKTAHAVAIGQPLFIFIETTWPTRPGMPQNAIILGRISDADDDETAGVEDQIEDQLDQCRRNGWGVGAIAIENDTSAYKTKKFHLPNGRIELRTDRPKFRAIVDRLYNRQNDGLIAHDLDRSVRDMRDLMDLIDVVQMSSPRIKVSSVTGSLRLENDADIAMAQVLTAMNNKSSKDTARRVSRAARRRAQEGKFHGGSRRFGFGLPTGEVDETKEPIIDQTKLVPEEAREIKTWAKAILSGASLASVVRDLNDRGVRPIRSDKWTSRTVKEILLRPSIAGLRDYRGQVLEGVKAEWPEIVTRETWEALVAKLGDSRRNSSPTNQPVWLVSCIAMCGHVNCKGQHHKMVVSGSVSARNNYRSYRCAFGKHNKIRADSLEKFVRDLIVERMARPDAGALIRPVATIDVEALAMQANELRVKLRKIRDLYEEETDMSIGEYRERRDSIKGRLDVVERHLVDASSIDPLSVLVGQEDVGARWDGLDIGRRRAIVERMMSITILSSERRGGRQPDGTYFDKSRVVIRWHV

SEQ ID NO: 9761 - protein, 555 aa, Unknown
  Description of Unknown: Integrase B9762 sequence
  cd00338,IPR011109,PS00397,IPR038109, Coil,PF07508,PS51736,IPR036162, IPR006119,PTHR30461,G3DSA:3.40.50.1390,PS51737, PF00239,SM00857,G3DSA:1.10.10.2600,IPR006118,SSF53041
MSKTVAIYVRVSTGKQADRDSIPFQIQECSNYVKHFLKTENFEVFKDAGRSGKNTHRPEYQRMIEKVKSGMISHVVVYKIDRISRNLVDFSIMYNDFKEHKVAFISLNEQFDTSSAIGEAVLKIILVFAELERKLTGERVRDIMMNRALEGKWNGARVPYGWDWDTKKQCPVHSDTEAEYARMMYRLYDECHSTCVVRDYCNAHDIPTKRGGEWTSKTVADFLRNPMNVGDYRYNYRKSARGKRNDPSEVIYVKDVFPPLIDRELYERVTHQMDLNTFGLGKDGRKVVSKKTHVFGGLVVCGLCGAFYHSDADVVRADGFRPSNYRCGAHNKKIHCKAKGTSDVKLGPFIFNYISNLVKASKSKKLLHSVSDLEQILLTGPEFEQVAGIADIGLDVTFDTIMHGFKPKRYTAAPYTVIRSGDSDALTAKRDKTIRALERLKKLFLFEDDAMSEKEYLMSKRELEGTLSDIENELSALEADTADTKYDDMSFISTASGFLIAHQIASGEHINYRELACAVDAKVLKDFVKRIVLLDGRVASIEFKNGLVHEFLYRE

SEQ ID NO: 9762 - protein, 555 aa, Unknown
  Description of Unknown: Integrase B9763 sequence
  cd00338,PF13408,IPR011109,IPR038109,PF07508, Coil,PS51736,IPR036162,IPR006119,G3DSA:3.40.50.1390, PTHR30461,PTHR30461:SF3,IPR025827,PS51737,PF00239, SM00857,G3DSA:1.10.10.2600,SSF53041
MDRIPGAFINARYSTDNQNPDSIEVQVEKCTEWCHRNNIPILGIFSDEATSGMKDSRPQYENMMMQLRQGIADTVVIYDQSRMFRKMTAWFAFRDELSALGVKVVSVTQPMIGKDLRDPTNFLTEGSMALFNQIWALQSRQKTVEKMRFMARNGQHTGGKPALGYMVENGRLVVCEAEAAIVRRIFQEYAGGYSYRQIIEGLNRDCLKTKRGSAFGANSLHDLLRNEKYIGVLTYGASPYREDGSRNTHKKDGANVIRIEDAIPPIVSKELFQKVQEKMAANKRQQGGRPAQKRDYPLKGKVFCAECKSAMIISTSKMKYDYYKCSGKKRKHTCISSPISANELESVVVDSVRQVLTPPENRKNLIRILQEERARIHAGAATTLQAIIVERRDVEKKLENATDAILAGLSSPTLLSKVRELENKKTALDAQAKSLKSSVDGSMIPDELLGGIIDHIVSSNEDASALLSIVSRVEVGINEITIWTIFDTDPSGEIDYTATGVSISPLIYPLAATGTDSPVTNTVGTASGVPYVHANFDRVGVDFFYYYTGIYPKYG

SEQ ID NO: 9763 - protein, 555 aa, Unknown
  Description of Unknown: Integrase B9764 sequence
  cd00338,PF13408,IPR011109,IPR038109,PF07508, Coil,PS51736,G3DSA:3.40.50.1390,IPR036162,PTHR30461, IPR006119,PTHR30461:SF3,IPR025827,PS51737,PF00239, SM00857,G3DSA:1.10.10.2600,SSF53041
MTTAAIYARFSSSNQRDASIADQVRNCQKWADRHGAKIIATYEDQAVSGVRQDRAGYNAIMDAAIVGAFNVLLVDDLSRLGRDMPEREKAIRRLEINGVRLIGISDGYDSSQGEMARRLQRGAKGLMDELYLVDLAAKTHRGLAGQVLQGNSAGGRAYGYISKPIEHATKLDAYGRPLVVGARKVINQDQAEWVQWIFEQYAAGRSCMWIASTLNEKGIKTLRGGTWSRSTLYGDKKRPGIGLLNNKLYIGLYVWNQSKWIRDPDTGKRRRIERPQDEWETQEMPDLRIIDQALWDAVKDRQIKSYIPHTVKRGGRPNQAKYLFSGMLKCDQCGSSYVMISKYSYGCSGARNRGKAHCTNKTAIPRKTIENTLLAGIKKDLSNKESLDLFIKETRLAITEMQAQDGRGALETELVAVNKKLENLTAAIMDGLRTETTLTALEKLESHKTEIQESISELEDLPSVSAMLPRAADIYRKKVADLGNNLNDIPAAQQAIRDLVGDEIRLKNSENGLVALISSAPFSALPLAGKTGGKTLVVAGARFGQRLHRPIKLAG

SEQ ID NO: 9764 - protein, 554 aa, Unknown
  Description of Unknown: Integrase B9765 sequence
  cd00338,PF13408,IPR011109,IPR038109,PF07508, Coil,PS51736,G3DSA:3.40.50.1390,IPR006119,IPR036162, PTHR30461,PTHR30461:SF3,PS51737,IPR025827,PF00239, SM00857,G3DSA:1.10.10.2600,SSF53041
MTKPSSTFPAGTRVVLYLRRSTDAHQEESLETQRTNGLAYCAARSWIVVDEFVDDAKSRAEFKKRPGLIRLLNHAKAREFALVVLRDESRLGGDMTRTGIVMQDLDDAGVGIVYYYTDELVSLDGAVDKFLIAARNFASELEREKISSRTYENLLNKAKAGRPAGGISYGYAIVNKSYVVKEPEAAIVRRIFAAYAAGAGQRTIARELNDERIPSPRAGRRGTGSWASSAVRAILMNPRYIGEARYNQTRKLYRGGTKIREKRAAGEHLTYACPAIVDRETFQRVSTRFRTNESFGSLPGASGAKPRYMLSGMSRCGECGGPITVARRKYGQTNTNVYVCGWRKDRGKSVCSNAIVERVDLVDARVAAALRALLTPDIITSAVRKVRSILAEQRAAAPAEGDRLRAEVDKLRREIDRLTAAIASTDAPPGALLQAVADRDSRLRQAELDLARVKAVGEPASRMLDELEFEARRRLHELREALADAGAGRRVLAALLAGERLRFESVDSRFAVRGMLDVSSLLRPDTSVPDCVASPAGFDTVRNALGPLQVPLAA

SEQ ID NO: 9765 - protein, 554 aa, Unknown
  Description of Unknown: Integrase B9766 sequence
  cd00338,PF13408,IPR011109,IPR038109,PF07508, Coil,PS51736,IPR036162,IPR006119,PTHR30461, G3DSA:3.40.50.1390,PTHR30461:SF3,IPR025827,PS51737,PF00239, SM00857,G3DSA:1.10.10.2600,SSF53041
MTRAAIYARFSSELQSDRSIDDQVVLCREYAARHGWTVTEAYADYAVSGSSVHGRFAFERLVADARAGRFDIILAEDLDRLSRNQADIAGLYERMQFAGVKLWTVGDGEISEMHIGLKGTMSALFLKALVLKIHRGMAGRVRAGKNPGGIAYGYRAVRMIDDRGEPVRGERSIDEQEAAVVRRIFADTLSGKTPREIAAALNSDGVPSPRGGHWNASTIHGSRKRGTGILRQELYAGRMVWNRQRFVKNPDTGRRVTRTNTAAQHQAADVPQLRIVDDGDWLKVQALLVARGGPHASHARKSPHIFSGLMRCGVCCGKYVSAGGSKYPRFICSRRKESGTCTNTRIVSARIIEDRTLAALERDLLDERLVAEVVREYTIERQRLKSSRRQHERRAANRLGEIDRAVRGLVALVEAGADPASVMPRLRELEGERAAIKAERPHPGREVIELHPGIGDRYRAIVRDLRASLGTRTADRKIDVIASVRSLVDRIVVYPHDDPAGRDLELVGQLAGLLGTAEQVVSGMMAVVAGEGFGRPHTSGRFQPVIIPFRSVAA

SEQ ID NO: 9766 - protein, 554 aa, Unknown
  Description of Unknown: Integrase B9767 sequence
  cd00338,PF13408,IPR011109,IPR038109,PF07508, Coil,PS51736,G3DSA:3.40.50.1390,IPR006119,IPR036162, PTHR30461,mobidb-lite,IPR025827,PS51737,PF00239, SM00857,G3DSA:1.10.10.2600,SSF53041
VEELDTRPVADILARYSTDNQNPVTIDVQVEKCREWCERNGYQVGKIFSDEAVSGMKETRAGYEACMMHLGMGGAQLVVVYDQSRMFREFTEWFQFRKDVDMLGARVASVTQPMVGGDLKDPAVFINEAATAMLNHAQVLITRQKTIDALKHNAREGKSSGGKPPLGYDLDKDKKYVVNEHEAEAVRLVFQLFARGFSYGEIIDELNSRGYLTKRGQPFGKNSIFDLLKNEKYIGRLVYGATKAQADGRWNSHAKSKEDAIVVENGVPAIIEQELWEQVQSRIRTRKGAGGRYSAKREYLLTGRVFCGDCGASMVVMGSKASGYQYYECNNKRRTHTCKMKNVRTEWLEQTVAASIKQMLTEPANIEMLVDVARDQERQITTEYDTRRAGLASRYTRVCRQLENGVNALLEGVVSAELKEKVRRLEEEKAEIEAETAELNQYKGYVGLDDATIRRCVENVAKVDIDTPEGLKLILSVVSRVNIHTDTIEIKTLISTDGTDPDPTNSRPQNLELFPSEGLSGEKYHTTPENGSGHHYQQTRTWSCMRAGSGLFFV

SEQ ID NO: 9767 - protein, 554 aa, Unknown
  Description of Unknown: Integrase B9768 sequence
  cd00338,PF13408,IPR011109,IPR038109,PF07508, Coil,PS51736,IPR036162,PTHR30461,IPR006119, G3DSA:3.40.50.1390,IPR025827,PS51737,PF00239,SM00857, G3DSA:1.10.10.2600,SSF53041
MATRRIHTNSETCVRVAVYARFSCDKQRDESIEDQLYEAERYCEKHGYMIVSVYTDYAISGRSDDRPQFLSMIEDAKAGAFDVVLVWKMDRFARNMQDQFFHEKILNDCGVRLESVKENISGNGIEASMSKGMHAIFAQIRSQQSAEDTMRGMVGKARKCQYLGYQWLGYTHDGDTITLDPATEGIAKAIHDRYLAGEAIKDIVQWLNTQGVTNRNGDPVGYQFVTGILKNWAYAGVYTWGKQKDDSGKPILDAYGLPIPLVRVENGIPAIVSQDVKERCLNRLGFRKHTNAKADYALSGKLFCSKCGHAMHGEMCRNKYGVECFRYVCRNKRRACTGVYWKDDVEHAIASSIRHALEDPALVELIAETFAEYQKSKRPTVSIEAAQADIKSLKRQRANLVKAVEDGMPFEHVKDRLEKIDAQQAGIERKIADLERTRNEITKADVLMMLSAIVDGARTDAEILGAFVYQARIYGDSAVAVLNLTDHETTPYEIDCAIRKLETAGKPTVSSIVSLVPPINRKTNPYAPVIYTDEGVPVILLENGIGFLVSLKAA

SEQ ID NO: 9768 - protein, 553 aa, Unknown
  Description of Unknown: Integrase B9769 sequence
  IPR011109,IPR038109,PF07508,PS51736,IPR036162, IPR006119,G3DSA:3.40.50.1390,PTHR30461,PTHR30461:SF3,PS51737, PF00239,SM00857,cd03768,G3DSA:1.10.10.2600,SSF53041
MKKVRCAIYTRKSSEEGLEQDFNSLHAQREACAAYILSQASEGWTLHPDEYDDGGLSGGTLERPALQRLMKDIEAGRIDIVVVYKVDRLSRSLLDFAKLVEAFDKANVSFVSVTQSFNTTNSMGRLTLNMLLSFAQFEREVTAERIRDKIAASKARGMWMGGNPPLGYQPNGRTLAIVEEHAGIVRRIFAYYLDLGNVRLVVGELSREGIIAPERTATTGRMTGGRPFTRGQIYKLLSNPIYIGEIHHKGQAHVGKHEPIIDRATWDSVQQMLAANLQGERSGSRAQSPSLLAGRIFDQHGEPLVAAHACKGKVRYRYYVNRSLQHDPDARSTDGLRIPALEIEAAVSRLLTEALDDPLSLLARAGIPLESNRLRMILNKAEQLAASVRSKQRAAIRDLIAKVTVQPHEISVELSVTALRAALAVGHPADTQTSIPLTSPVCLTRTGRAIRLVQRDGRPVSQGRPDPGLIDLLHKGRSWWQQLQTGTIDIATIARDEQVNDSWVSRLVRLNFLAPAIVEAILVGTQPASVTATSLRTANLPIDWDDQIALFGM

SEQ ID NO: 9769 - protein, 553 aa, Unknown
  Description of Unknown: Integrase B9770 sequence
  IPR038109,IPR006119,PS51737,PF00239, G3DSA:3.40.50.1390,PTHR30461,IPR025827,cd18688, SM00857,G3DSA:1.10.10.2600,SSF53041,IPR011109, PF07508,PS51736,cd00338,PF13408,Coil,IPR036162,PTHR30461:SF3
MQTIPIDLSALTPEERQQFADNPSVLSSDCEAVCCLYMRYSSDRQTEQSIEGQLRELIAYCKHHSYRVAAIYVDRAISAHASMDKRPAFQQMLADSARSSWKTVLVYKLDRFARNREDSAIARMRLRKNGCNVESAKEGISKNPEGVILEALLEGMAEYYSLELSQKVRRGMSETARKGNSTGGTTPLGYTVVDKRLQIDPMTAHLVEEAFRRYADGDTVAAICDDFNARGYRTTRGTKFNKSSFKNVFRNEKYIGVYKFDDVRTDNAVPRIISDELWRAVQSRLKASEQAPARGKAKVPYLLSGKIFCGHCGAPMVGECGRGKGGKTYNYYSCANRKKARLCDKKPVPKDWLEDVVAQDALDVLTDEIIEFVAEVAAQQSEEDIQKNTQIPVIRKKISEIENKIRNLTKALECASVAPDAIVERLAELEAQKKGLSTQLSDEERGVIPLTKESVVVYLKAVRENAVPLETQKAMLIEMLVNSVTVYDDEPGFLKFVTAYRLTQIPSKTYRVPTPAVSPCSDIGRVGSPLDANPNTITVVGMVFIQTRRHALP

SEQ ID NO: 9770 - protein, 553 aa, Unknown
  Description of Unknown: Integrase B9771 sequence
  cd00338,PF13408,IPR011109,IPR038109,PF07508, Coil,PS51736,IPR036162,IPR006119,PTHR30461, G3DSA:3.40.50.1390,PS51737,IPR025827,PF00239,SM00857, G3DSA:1.10.10.2600,SSF53041
MVQEKLRAVFYARVSTEEERQLNALEKQVAECKDAVLQKGWKLVDQYVDEGKSGTQIKRRDEYRRLFEDLENDKFDIVVIKSQDRLQRNTLDWYIWIDRLTTHGKRLYMYLEDTFYSPDNALISGIKAILAEEYSRELSKKINNSYKRRIEAAKNGEKISIVNNSRSLGYDKVNGELVINEKEADVVRMIFNMYASGEGLRAISNTLYDMGYRNRSGNEIDPTTISRMLSSEKYKGVYVINQRHYDFDTKKTVLNPKSEWVHIPGAVPAIVEPELWDRVQEIKGSKVQSIKNEKRGRNCGKSIFSGKIYCAKCGAKYWRSLENGYVKFKCSSYSKYGKIPGKGCDNKSFSENALYSILQSLSEQIVEVNTAEVRKSLLNWLESLRERLRASQGDDTIKEEIRKQTARKEKLTDAYMDGIISKEDYSKRYKELEKTLEDLKDKLLTLEVNEDLQSIEEVIQNIDKEMEEYLQTQSFNESRVEFLNQHLTKVTVNKDSFLLEFDLIGGAILTGKDFYLFVDNPRRDGQCRGDLYCTLWCGRKQCEPDGTGKAGKR

SEQ ID NO: 9771 - protein, 553 aa, Unknown
  Description of Unknown: Integrase B9772 sequence
  cd00338,PF13408,IPR011109,IPR038109,PF07508, Coil,PS51736,IPR036162,PTHR30461,IPR006119, G3DSA:3.40.50.1390,PTHR30461:SF3,IPR025827,PS51737,PF00239, SM00857,G3DSA:1.10.10.2600,SSF53041
MKKFPIDLSCLTEEEISQFQEDPYTLYNGDQNVAIYLRYSSTGQSDQSIEGQLRDCRTFCKANHYRIVAIYVDRATTARKDMEKRVHLMEMISDSAKQNWEYVIVWKLDRFARNRNDSAIMKMRLRKNGVKVLSATEHLTDSPESIILESVLEGMAEFFSAELSQKVTRGMRESALKCHSVGGHIPLGYKVENHKLVVDPDTAHIVQEAFSLYANGESVAAICRKFNSAGYKTAKNTEFNRSSFKAMFRNTRYIGTYTYKDIVIENGIPAIIDKELFETVQRRLSKTATAPARGKAKVDYLLSGKLFCGHCGASMNGESGAGRHGKVYHYYSCYTKKRKLGCDKRPLKKDYIEGIVARDALNLLTDQLIDEIADMAIRQSEQDLINDTHIPQLTAQLSEVEKSITNITAAIEKGIASETLMNRLVQLEHEKKTINKEIKAEEKFVYRIDRDQIVFWLSQFKYGNIEDENFRRRLIDLLVNSVTVWDEPDGYKITTAYNLTSCKTKTFRVEKNPAAEEATGFDFGESECTIERISEPYIVWGTVFVQTKRHSLP

SEQ ID NO: 9772 - protein, 553 aa, Unknown
  Description of Unknown: Integrase B9773 sequence
  cd00338,PF13408,IPR011109,Coil,G3DSA:3.40.50.1390, IPR006119,IPR036162,PTHR30461,PTHR30461:SF3,PS51737, IPR025827,PF00239,SM00857,SSF53041
MTIPPFPPGDRVAGYFRDSGGDEQDLSIERQVAEFRRWLAENDLHEGELFTDAAQPGSSTVGRAGFQSMLRHFRSGDIPETGLVIWRSNRFGRNTNESQFYKADIRRRGYIIYSLTDKIPTDRYGQVIEYLLDWKDQEFLETLSEDVASGLRHIVEAYGAMPGTPPRGFLRQPITVGARRSGQPHILHRWVPDETMIPLVRRAYQMLLDGASLIKIQTVTGLYPSLNSWATFFRNPLYKGVLHFKDLVIENYCEPVVDPLTWERAQRILDLRGGRRHLNADDPSLGAAEQARRIAQHPRRMASPWLLSGLARCARCSAPLNGHVILDHTYYECSRSVRRKDCNARKIPSAPLEAAVLDQIRKLLASPETLQAYQSDHLADYERAVSEFPARRQELVARLANLRRQISRLAAAVADHGHSPALLDKLTVLETQEYELKDELAQLDILLQARPEPLGPRRIQHLSERFEAILSTGSPEEQRKALAGWIPKLLVERQDKHSILVYMEVYVPPLPGPDPPGGRRKLTQHPPSAWGHLLVTLEITIPILRKQSVRLTS

SEQ ID NO: 9773 - protein, 553 aa, Unknown
  Description of Unknown: Integrase B9774 sequence
  cd00338,PF13408,IPR038109,Coil, IPR036162,PTHR30461,IPR006119,G3DSA:3.40.50.1390, IPR025827,PF00239,SM00857,G3DSA:1.10.10.2600, SSF53041
MYLPPPSTLPPGSIVDSYRRDSGGMRQDKSTDQQLTELEAYCKQYNLIHRHQFVDEAKSGKSTAGRDDFNRMIAEYEIPANRPAGLLLWNYARFARDIDDAQFNKIRLRQWGITVHSLNDQIPEGDYGRVIEFLIDVSNEEKRKQTSIDAKRGLWDLVNTYKCVPGTPPRGFKREPVNLGTRRDKTEHIAHRWVPDPDWIPRIKRAFQMKAEGATLQQIQNETHIYSSQNSYRTFFSNELYIGILHFGENTVKDYCNPIIDLSTWTAVQKLQSLHADRQNVTAKNNLHPRRKSESAPYLLSGIAFCTRCGSPLWGMTSGQRDGSYYRRYACTRARRRRDCDLQPIPARALENEVIKSLTHFFENPNNLQDLLEVSQQFDAEFVTRQKTIAKEIQKELTTVRRSIANVTDAIAKLKNKQSKALLAKLESLEGEETDLETRVQKVNSQTPVATPPLTEEQILLMSQTLVANFHTQDLTTIRGNILATVHQVRVDRTKSHGYCQITLKHRPRSSKTPEESGAIITASTVLPSVGAQSKDMLFSMSFYFIPASPLRG

SEQ ID NO: 9774 - protein, 553 aa, Unknown
  Description of Unknown: Integrase B9775 sequence
  cd00338,PF13408,Coil,G3DSA:3.40.50.1390,IPR036162, IPR006119,PTHR30461,mobidb-lite,PTHR30461:SF3,IPR025827, PF00239,SM00857,SSF53041
MNAHPFPAGSLVAAYFRDSGGDTQELSVPQQESAFRAWCAQNGLIPGAIFKDVARPGSSVISRMGFHDMIHHFRSGQAKEIGLVIWSYSRFARDFSDSQFYRADLRRRGYIFYSLNDDIPEGSMGKLFEAVIDWKNENFLEDLSRDTRRGLHDLVKNHGAVPGTPPRGFKREPITIGKRRNGQDRIAHRWTPNPDELPRIRQAFAMRAAGKTLAEIHVTTHLYGSLNSYQTFFTNKLYIGILEFGDLVIENYCEPVIDRITWETVQIFIKIFAKRLNLKAKSDNPGNPHHPRRINSRYLLSGLLYCARCGSPMFGATAPQRSGKICDRYACTRAYRRRDCNLMAVPQKAVEGAVLTTIREYILQPEVMQQHQQLLQNEHGRALEELDQKRAEINGLLGGVRRRIANVTNAIAESGHSRAMLDKLAALEAEETSFLAQLAGLERQAASPVPNLTSEQIIDMISNLSNTLETADLETAQRILRGFVNKIVVDRYETQVTGMIFYHYPLEDSSNKSPPDESSSVSLHPFPLGAPSHRHSFTAPFTAVIRSYKRKRP

SEQ ID NO: 9775 - protein, 553 aa, Unknown
  Description of Unknown: Integrase B9776 sequence
  cd00338,PF13408,IPR011109,IPR038109, PF07508,Coil,PS51736,IPR036162, IPR006119,PTHR30461,G3DSA:3.40.50.1390,PTHR30461:SF3, PS51737,IPR025827,PF00239,SM00857,G3DSA:1.10.10.2600,SSF53041
MKKFPIDLSCLTEEEISQFQEDPYTLYNGDQDVALYLRYSSTGQSDQSIEGQLRDCRTFCKANHYRIVAIYVDRATTARKDVEKRVHLMEMVADSAKQNWEYVIVWKLDRFARNRNDSAIMKMRLRKNGVKVLSATEHLTDSPESIILESVLEGMAEFFSAELSQKVTRGMRESALKCHSVGGHIPLGYKVENHKLVVDPDTAHIVQEAFSLYANGESVADICRKFNSAGYKTAKNTEFNRSSFKAMFRNTRYIGTYTYKDIVIENGIPAIIDKELFETVQRRLSKTATAPARGKAKVDYLLSGKLFCGHCGASMNGESGAGRHGKVYHYYSCYTKKRKLGCDKRPLKKDYIEGIVARDALNLLTDQLIDEIADMAIRQSEQDLINDTHIPQLTAQLSEVEKSITNITAAIEKGIASETLMNRLVQLEHEKKTLNKEIKAEEKFVYRIDRDQIVFWLSQFKYGNIEDEDFRRRLIDLLVNSVTVWDEPDGYKITTAYNLTSCKTKTFRVEKNPAAEEATGFDFGESECTIERISEPYIMWGTVFVQTKRHSLP

SEQ ID NO: 9776 - protein, 524 aa, Unknown
  Description of Unknown: Integrase B9777 sequence
  cd00338,PF13408,IPR011109,IPR038109,PF07508, PS51736,IPR036162,IPR006119,G3DSA:3.40.50.1390,PTHR30461, PTHR30461:SF3,IPR025827,PS51737,PF00239,SM00857, G3DSA:1.10.10.2600,SSF53041
VTANVTIIPPRKILGNTADKHKEKSKLRVAAYCRVSTEREEQATSYDTQVQHYTEYISRNPRWTFAGIYADDGISGTSTKKRIGFNEMIQDCMNGKVDMIITKSISRFARNTIDCLRFVRQLKDKKIPIIFEKENINTMEASGELLLTIMASLAQQESESLSQNVKLGLKFRYQEGKVQVNHTRFLGYTKNEEGKLIIVEKEAKVVRRIFREYLEGLSLRDIVNVLEKDGIKNGAGNLKWHTSNIKGILKNEKYIGDALLQKTITIDFINRVRIKNDGTEPQYYVKDDHAPIIPRDIFIQVQEEMIRRANLVSGENGKRKRVYSSKYALSGLCICSKCKDIYRRIIWNNRGVHSVVWRCCTRIKQGAKGCDASTVRETELQSVTVKAINMILQTPDDILEKLMKNIKQVLAFENTIEIDPIEKKIADRQVILMDRIKSKKDYTKIAAEIDELKDKEHKLLIVKAEQEDVKRRIKEMESFLKSEPKELIEYDASLVRKYIKRIEIYEDRFNVTFKSGISVNVNRI

SEQ ID NO: 9777 - protein, 552 aa, Unknown
  Description of Unknown: Integrase B9778 sequence
  cd00338,IPR011109,PF07508,Coil,G3DSA:3.40.50.1390, PTHR30461,IPR036162,IPR006119,PS51737,PF00239, SM00857,SSF53041
MPRLSSRVSGRTLTAADVQRRPRLRVLEEVQKPKKATLCVRISDARDYMDETGQRITDTEGVNLQITNGLEYADRIGWIIDKIRTENDVSEFKRKKVLQPNGRYALRTVRPDWQAVLDDLASGAQDGLLVIALDRSMRDPRDLEDLIDVVESRMPRIPVESVSGSLKLSSDAEVTMARNMVNYANLASRDTRRRVILRRIDQAEKGYWGGGRRPFGFGVPTGLKTPRGFPEFDVTRQVPAEVAEIKHAAESLLAGVSLRELAADLRRRNVATVTGGTWTSSSLRDVLLRPRNAGLSVYDGLILEGVLIEGVDEDHPPILERATWEAVAAILTNPQRRVGPGPAPRWLGSGLYLCGHPNCVGSNPRQTLIAGRSSGGGTRAYVCTGGKVHLARVAEATDEYVEGAIVLRLMDPDAVELCTPQPGVDTAALAAEANAIREVVADLGDLHQRRKITKAERERRTDELETELEGINRMLRGTAGTDPLAAIAGNPNAKELWADLPLATKRAIIRRVLRVTILPCKPGQPPGYKRGSRKNHVRPESIKMEWIVPDTR

SEQ ID NO: 9778 - protein, 552 aa, Unknown
  Description of Unknown: Integrase B9779 sequence
  cd00338,PF13408,IPR011109,IPR038109, PF07508,Coil,PS51736,G3DSA:3.40.50.1390, IPR036162,IPR006119,PTHR30461,PTHR30461:SF3, PS51737,IPR025827,PF00239,SM00857,G3DSA:1.10.10.2600,SSF53041
MPVRCVVYSRVSTDAQERDGTSLDSQERASIELAASRGWSVVRSIRDVASGFHLDREGIETLRGLLQRGEVDVVVAYAVDRLSRNQNHIGVLFDEIEQAGARLEFVTERFEDTAVGRFILAARAFIAEVEREKIAERTMRGKTERARGGRIPQGTGRGIYGYRYDSESGKRSVEPDQGATVRRLFEAFAEGRSCNRLADDLNAESVPAFGGGRWYPLTIRRILMNETYTGRTIYRRTQVQKVRDVARSRWVRRVTERDQEEWIEVEGATPAIISVELFERVRARLEDPARKERGHPSFDYPLRGRLRCEACGSAMVGQTLLKGRYHYYRCRRSYAGPRADRCQSPYVRKELLEEAVRAALVSVIADPARVLAEGKAEVGSDPTAGDRDRLDREIADVEAKQRRLVRLFTAGSLPEAMLAEESRALADRRARLEAERTDLVPLDAGRMTFEQVAARLPEALDAIRRWVEQADGGQLELLLDALNARITASRQQALIRGEVPLLESAHYRDLVTIERTSASPFRNDQIPTVPSLATNKSLLPPPLVSFQGVTSV

SEQ ID NO: 9779 - protein, 552 aa, Unknown
  Description of Unknown: Integrase B9780 sequence
  cd00338,PF13408,IPR011109,IPR038109,PF07508, Coil,PS51736,IPR036162,PTHR30461,G3DSA:3.40.50.1390, IPR006119,PTHR30461:SF3,PS51737,IPR025827,PF00239, SM00857,G3DSA:1.10.10.2600,SSF53041
MKLPIDLSCLTEEEISQFQEDPYTLYNGDQDVALYLRYSSTGQSDQSIEGQLRDCRTFCKANHYRIVAIYVDRATTARKDVEKRVHLMEMVADSAKQNWEYVIVWKLDRFARNRNDSAIMKMRLRKNGVKVLSATEHLTDSPESIILESVLEGMAEFFSAELSQKVTRGMRESALKCHSVGGHIPLGYKVENHKLVVDPDTAHIVQEAFSLYANGESVADICRKFNSAGYKTAKNTEFNRSSFKAMFRNTRYIGTYTYKDIVIENGIPAIIDKELFETVQRRLSKTATAPARGKAKVDYLLSGKLFCGHCGASMNGESGAGRHGKVYHYYSCYTKKRKLGCDKRPLKKDYIEGIVARDALNLLTDQLIDEIADMAIRQSEQDLINDTHIPQLTAQLTEVEKSITNITAAIEKGIASETLMNRLVQLEHEKKTINKEIKAEEKFVYRIDRDQIVFWLSQFKYGNIEDEDFRRRLIDLLVNSVTVWDEPDGYKITTAYNLTSCKTKTFRVEKNPAAEEATGFDFGESECTIERIFEPYIVWGTVFVQTKRHSLP

SEQ ID NO: 9780 - protein, 551 aa, Unknown
  Description of Unknown: Integrase B9781 sequence
  cd00338,PF13408,IPR011109,Coil,G3DSA:3.40.50.1390, PTHR30461,IPR006119,IPR036162,mobidb-lite,PTHR30461:SF3, IPR025827,PS51737,PF00239,SM00857,SSF53041
MTTPPFPPGDQVAGYFRDSGGDEQDLSVERQVAEFRRWLGENGLHEGQLFTDAARPGSTVVGRAGFQAMLRHFRAGDAAESGLIVWRSNRFGRNTNESQFYKADIRRRGYIIYSLTDKIPPDRYGQVIEYLLDWKDQEFLETLSEDVASGLRHIVETYGAMPGTPPRGFLRQPITVGTRRSGQPHVLHRWVPDETLLPLVRRAYQMLLDGASLIKIQTVTGLYGSLNSWATFFRNPLYKGVLHFKDLVIENYCEPVVDPVTWEQAQRILDLRAGRRHLNADDPSLDAAEQARRIAQHPRRMASPWLLSGLARCARCGAPLNGHVILDHTYYECSRSVRRKDCSATKIPSVPLEAAVLEQIRKLLASPEVLQAYETDHLADYERTIGEFPARRQELAARLGNLRRQISRLTNAIMDHGHSPALLDKLTALETQEYELNDELAQLDILLRAKPEPLSPRRIQRLAEHFEVILYKGSPEEQRKALAGWILKLLVERQDKHSILVYMEVYVPPLPGPDPPGGHRKLTQHPPSAWGHLLVALEFSIPIIRKQSNRR

SEQ ID NO: 9781 - protein, 551 aa, Unknown
  Description of Unknown: Integrase B9782 sequence
  cd00338,IPR011109,PF07508,PS51736, IPR036162,IPR006119,G3DSA:3.40.50.1390,PTHR30461, PTHR30461:SF3,PF00239,SM00857,SSF53041
MPPPLPVAQLLRVSTEGQADRLGLPAQETANGETCRRYGLEIVDTVRIVMSGADVATSPGMEQLLSLVESGRAKGIVVAAYDRLFRPERWSDLIVLQRLHDAGAGIWTPTGQIDLTTETGHIQATLYNLFAAMERRRIRERMAAGREEKRKRGDHCGFKHSIPLGLDWTEETGWSYTPEIARVAECFRLFLSGERSPEAIGARVGLGRTTVRYVLQNEAYTGWRVYDEKRGAEKLPCGDRRKVKRAEGEVLRVRLRDASGTPLPPVVSEEDFAAIQHHLEQGRLRSARANAETEGHFVYRGVLYCAVPGPEGDPCGCAFYHSAGARYTSGPRRGERKRFYHCRTINPRYGPPCGNPYLSEHLLDPVLDAALAGSLTDRALLRRALERFQTRAGAEAVSTPAFDAAALLARLEERRGRVLDAFVDGALTREERDARLARLDGERDRLLALGPVAPSPVPAARLSASDVLAVVRVFRRFHRRSYEAKRAALEAVRPRLFVDRYAVRGVWLDGRLFGATEASAGRNSGNLLQTVDAFATAPGLPRGGLYIPLAA

SEQ ID NO: 9782 - protein, 517 aa, Unknown
  Description of Unknown: Integrase B9783 sequence
  cd00338,PF13408,IPR011109,IPR038109,PF07508, Coil,PS51736,IPR036162,IPR006119,PTHR30461, G3DSA:3.40.50.1390,IPR025827,PS51737,PF00239,SM00857, G3DSA:1.10.10.2600,SSF53041
MLAEKKVQILKGRRSSANDVLRVAAYCRVSTDSEDQVNSFMAQMHYYYSFIQQAENMELVDVYADEGITGTSVAKRDDFNRMIKDCKLGKIDRIYVKSVSRFARNALECLEHIRILKDCGVSVFFENDGIDTQTLNSELILYIKSAFAQAEAVSGSKRVQTANRMRAENGEYVFMAAPYGYRIENNVLVPVPEQIAVVERIYKEYLAGNGVGKIVSLFNADPDIPDKPWRRERVRYILSNEKYVGDSLFQKSFTPSVLPFRNKRNHGEVDQYYISNTHTAIIDRELFDAVQEMVRRNKEEDAKKAKPKRYNFTGKIYCGYCGWAYKKRVQNGIVYWVCSHDGSAGQRCATKPISEEVFHKTFINFYNRLRFHENLILRSAVTRLTEVKRIITSMDSEIGEIDKQIGFLTERHKIYITLASENQIDEASFAEQCAMVEREINKYRNRRKKLLNEDEDERCIDEIRKLRDILSNAPAAIVEFDMNLFNAVVDKVIVEDESRLSFVLRCGLKLREAIAWN

SEQ ID NO: 9783 - protein, 551 aa, Unknown
  Description of Unknown: Integrase B9784 sequence
  cd00338,PF13408,IPR011109,IPR038109,PF07508, Coil,PS51736,IPR036162,IPR006119,PTHR30461, G3DSA:3.40.50.1390,PS51737,IPR025827,PF00239,SM00857, G3DSA:1.10.10.2600,SSF53041
LIIALPRQRIKGNAMARKQKPALRNRIAVIYARYSSSAQNDASIEQQVDKCQEYAKQKGFTITGTYADRAMSGRTDKRPEFQRMMKDAEQQQFSYVISWKSSRMGRNMMEAMMNDAQLRDCGVRCLYVEEDFDDTAAGRLALRTMMNVNQFHSENMAEDIMRGLEDNAKRCRVNGSIPMGYRKGEDGKFALDDSSAEIIREIFQRIAQGEIQANIAADLNARGITTKTGGRWGKNSFHNILNNERYTGVYIYGDIRIEGGIPAIINRDLYDRAQERVETMKTLVKSRRKRDNAEYILTGKLFCGHCKAAMVGASGTGKLGVMYYYYRCNNQAVAHTCTKRPVRKEKIELLVAASVREALLQDETVQWLADTFMRVKARLEAESDIGILQDKLKDVNATLGNVMKAIEAGIITETTKARLQELEAEKQTLTGQIDHERRLIPTFTRNQVVGWLESFREGDIEAPRTQKRLIKQFVRAVYLYDDHLHLVFDYNEDGEGIDIAIPDDIDTSSADLEGESVLIMPDLVYQTVLIRTPTIRLYGRVFLLSFFFEEQ

SEQ ID NO: 9784 - protein, 551 aa, Unknown
  Description of Unknown: Integrase B9785 sequence
  cd00338,PF13408,IPR011109,IPR038109,PF07508, Coil,PS51736,G3DSA:3.40.50.1390,IPR006119,PTHR30461, IPR036162,PTHR30461:SF3,PS51737,IPR025827,PF00239, SM00857,G3DSA:1.10.10.2600,SSF53041
MQRAVIYARYSPGPNQTEQSIEGQVRECTKYAELHDLRIVGTYVDRKISGKTDNRREFQRMIDDSEKHIFDVIILYHTDRFARNRYDSTIYKHKLKENGVELRYATTDIPKGPEGIILESIMEGWAEYYSAELSRKIKRGMRESALKCHSTGAGRCLGYRTAEDKSLVIEPEGAKAVQTVFDMYIKGKSHADICRYLNDCGFRTAQGKLFNKNSVTHIIRNKRYIGVYTYDDITIEDGIPAIISKDTFHLAQLEAARRKTAKRPKEPKAEYLLSGKAFCGHCQKPLVGVSGTGKSGNKWYYYYCQESRAKRGCTKRPVKRDWLEREVVERTVAEVLRPEVIQHIAKKCYDLQMEYRQDNSDVLFYELKLKDVRKAIKNTMHAIESGVKTKTLPARLQELENEEEALEAELAIAKASDFVITTDQIEFLLTQFAEPWACESEEEYHRRIIKCFVHKVFLFDDKLLIYYNVSRDGKTREQSEVELLEEALGEGFDKRSSGSTIKLHQKRCRCEKPRSFNDFRVFLRPFFEVGKKDIKNGFGKFDGPVPLPKAF

SEQ ID NO: 9785 - protein, 551 aa, Unknown
  Description of Unknown: Integrase B9786 sequence
  cd00338,PF13408,IPR011109,IPR038109,PF07508, Coil,PS51736,G3DSA:3.40.50.1390,IPR006119,IPR036162, PTHR30461,PTHR30461:SF3,PS51737,IPR025827,PF00239, SM00857,G3DSA:1.10.10.2600,SSF53041
MQTIPIDLSALTLEERQQFADNPSVLSSDCEAVCCLYMRYSSDRQTEQSIEGQLRELIAYCKHHSYRVAAIYVDRAISAHASMDKRPAFQQMLSDSARSSWKTVLVYKLDRFARNREDSAIARMRLRKNGCSVESAKEGISKNPEGVILEALLEGMAEYYSLELSQKVRRGMSETARKGNSTGGTTPLGYTVVDKRLQIDPITSHLVEEAFRRYADGDTVAAICDDFNARGYRTTRGTKFNKSSFKNVFRNEKYIGVYKFDDVRTDNAVPRIISDELWRAVQSRLKTSEQAPARGKAKVPYLLSGKIFCGHCGAPMVGECGRGKGGKTYNYYSCANRKKTRLCDKKPVPKDWLEDVVAQDALDVLTDEIIEFVAEVAAQQSEEDIQKNTQIPVIRKKISEIDNKIRNLTKALECASVAPDAIVERLAELEAQKKGLSTQLSDEERGVIPLTKESVVVYLKAVREKAVPLETQKAMLIEMLVNSVTVYDDEPGFLKFVTAYRLTQIPSKTYRVPTPAASSCSDIGRVGSPLDANPNTITVFGMVFVQTRKHA

SEQ ID NO: 9786 - protein, 551 aa, Unknown
  Description of Unknown: Integrase B9787 sequence
  cd00338,IPR011109,IPR038109,PF07508,PS51736, IPR036162,IPR006119,PTHR30461,G3DSA:3.40.50.1390,mobidb-lite, PS51737,PF00239,SM00857,G3DSA:1.10.10.2600,SSF53041
MPYCLYVRKSRADAEAEARGEGETLARHINTLLDLARRRHYEIGTIHREIVSGETIAARPIMQQLLSEVEEGLWEGVLVMEVERLARGDTIDQGIVAQTFKYSNTKIITPIKDYDPNDEFDEEYFEFGLFMSRREYKTINRRLQRGRIASANEGKYAGNIAPYGYERVKLEKEKGFTLRPIEEEAKAVQMMFDLYVNGEKQSDGSVRTLGVVLISKKLNELKIPPRKNKLWTGSTIRDILSNPVYIGKIRWNCRKSEKKMIDGKISVTRPKSDPSTWILTDGLHPAIIDEDLFSAAQQITQSNKMLPMPPDKTVQNPLAGLVECGKCGRQMVRRSYPNGSPDSLMCPYSTCSNVSSTLSTVEKHVLNFLQQWVDEYKLQWKEEKKIRNIKGLFDAKSKAITKLDEEIALLHKQLDNVYDLLEQGVYDTTIFSQRSGALKERIKSSEEEKCKLQTELEKEKKREEERKTIIPKVEHLLSVYDTLPTPKAKNDILKEVVEKIVYTKEQKAKKVKQPRKSRSKKAANEERKTEWIVSPDDFELVVFPALPTEKL

SEQ ID NO: 9787 - protein, 551 aa, Unknown
  Description of Unknown: Integrase B9788 sequence
  IPR038109,PS00397,IPR006119,PS51737, PF00239,cd03768,G3DSA:3.40.50.1390,PTHR30461, IPR025827,SM00857,G3DSA:1.10.10.2600,SSF53041,IPR011109 ,PF07508,PS51736,IPR006118,PF13408,Coil,IPR036162,PTHR30461:SF3
MANKVAIYVRVSTQYQVDRESLPVQRRELSAYSEYVLGINDYEIFEDAGYSAKNTDRPSFQQMMSRVRQHEFSHMLVWKIDRISRNLLDFAEMYAELKKLGVTFVSKHEQFDTSTAIGEAMLKIILVFAELERKMIGERVAAVMLSRASEGKYNGGTPPFGYTRDGTTIVVNEEERPTVERIYKLYLSGESTHSISKMLNNEGVSKRGATWCAQTVRAILRSPTYIGTMRYNVSDLEKSKIKPKEQWIIIEDHHEPIVSPETFNAVQEMLDNNRRGAHKLGDTYTSKYVNIFAGLIRCYYCGDNASAHTDHVRRKTGIRPCAYICARRRNAVGSCQNKSIMDSTLVPFIFTLVGNALRLRSSIPKNATIAYVKTKLLYDSFHEVMIADDIPDEDVVAISKMLKANLKKREYSPSILTGVHDERNALVEQKRKQETALERLHSLYLYGSSAMPEAQYIIEREAIQKEIEKIESQLKHIKEPPTNERLAESLSAMSDMLSNGIDYVKFVKTINPTIPKDFVNAIIDHIVAKDGKVESVVFKNSLTLHFIYKAP

SEQ ID NO: 9788 - protein, 551 aa, Unknown; identical to SEQ ID NO: 9720
  Description of Unknown: Integrase B9789 sequence
  cd00338,IPR011109,IPR038109,PF07508,Coil, PS51736,G3DSA:3.40.50.1390,PTHR30461,IPR006119,IPR036162, PS51737,PF00239,SM00857,G3DSA:1.10.10.2600,SSF53041

SEQ ID NO: 9789 - protein, 551 aa, Unknown
  Description of Unknown: Integrase B9790 sequence
  cd00338,PF13408,IPR011109,IPR038109, PF07508,PS51736,G3DSA:3.40.50.1390,IPR006119, IPR036162,PTHR30461,PTHR30461:SF3,PS51737, IPR025827,PF00239,SM00857,G3DSA:1.10.10.2600,SSF53041
MTSVPERPSIGGPPVYDIYKRVSGGGQEKHGASLDDQERDARALVADRGGVVRHVFEDVFTGLELWDRPDLQRMRDTWRRDPPDGVIVDVLDRLAREPDHQVVLLSEAEYYGVEVEFTHESYDDTPEGKLLRSIKGYVAKVEHTKIKERTQRGLRTRVAKGLPLPGVRVLDGYAWNEDRTAYVLDGPRATVVRRIYREFLAGSTLRRIAADLTASGIPTATGKAVWVYTTVSKILQNPRYSGYAVANRYKSERVAGSTSGRRAKRRVTLRPTEEHVPLPEGTIPPLVTSEEYAAVASRLQTNKAHAARNNPEPERYLLRAGHVRCGYCGGVMSGLRLSNGNYLYRCARASETRCYHGISAHLLDQAIWTRLERVLADPERIADELERAASEDPSEPDLAAIDREAGAIGPQLENLTRGLGLAGGDADVAAAIVGQMRLLSERKRTLAEERSRVLGRHAAAVAARERILALGAWCRRVGRRLEEFGYAERRLAVVAFGVEVTVWRADHEPRWEMRAGVPDGEEIVYPTPARSVHNTNLTLRWSADSALARVG

SEQ ID NO: 9790 - protein, 551 aa, Unknown
  Description of Unknown: Integrase B9791 sequence
  IPR038109,PS00397,IPR006119,PS51737,PF00239,G3DSA:3.40.50.1390 ,PTHR30461,IPR025827,SM00857,G3DSA:1.10.10.2600, SSF53041,IPR011109,PF07508,PS51736,IPR006118, cd00338,PF13408,Coil,IPR036162,PTHR30461:SF3
MNLCIVYVRVSTIEQKKGYSIPEQIESGKRKAYELGAKSDDEIFVFVDSESGEFLNRTEFTKALDLVENEEISYFICYDPDRFSRKTVNALIAHEMIEKHGTEIIYVNSSYEKTPEGRLFLQMKMIIAEYEKEKIKTRTMVGKLGKAKRKLLTHNPNLYGYDYDPITDTLSINEEEKKIILLMVDWIFEDKNVGYHTIARRLNNMPNVLPPRGKLVNKKENNGNAYNREEGIWYKATVKRILCNYTYTGTLFIQTVDAQGVKHNKFRSPDEKVKRTMKPREEWIGIQVPILIPIEVWEQLQGKLIERRNLKPGLAIENYLLRGLLRCGKCGNTLHGNRVKKKNGEGYHKYYVCTAKSPGIKGQLKCELPAINADKLEESVWNKIKGWILNPQTLEDIITNDKNNELLFKEKNHLEIKIKELNEEKDRLDLLFMKGKITEEKYDKLEGENKNTKIELLSRLKEIELELNNKDLNLQDIVQLRETLKEYQNDIDDLKYEVKQKLINGYVKTITIHSKNNKDNIITGKIPKKDWTKVTSLWKDDTTVQTFTVEI

SEQ ID NO: 9791 - protein, 454 aa, Unknown
  Description of Unknown: Integrase B9792 sequence
  cd00338,PF13408,IPR011109,IPR038109,PF07508, PS51736,G3DSA:3.40.50.1390,PTHR30461,IPR006119,IPR036162, IPR025827,PS51737,PF00239,SM00857,G3DSA:1.10.10.2600, SSF53041
MPDVRIIPSRQKKTAKKRMAAYCRVSSSSEEQLHSYAAQVKYYTETLTADKSCELIGIYADEGISGTSAKKRPRFMEMIEDCRAGKIDAVITKSVSRFGRNTVDTLIYTRELKGLGIDVYFEKEAIHSSSPDGELMLTLMAAFAESEAESLSENVAWGFRKKFASGNTRSLAVHNLYGIDRNEDSGEIVICEDEAAIVRRIYNDFLAGLSAQTIANNLDKENVPTRFEGSNWYNKTVINILKNEKYCGDVLFQKTYSPGALSRVKQNRGELPQYYVRDALPAIIDRKTWEITQMEYARRVKQSSGQPSPEYPFEGRIFCGVCGRTVVYCRFRARGGYIPWWRCSTKVTRLKRSDDMTHDDCRIPIDRPTQVFVQAWNLVVSKRLQYEPRLWRIAEKDNNELTRYHASVMLRLIDEIGKLDNFDYMLSLRTLDHMELQLDGKLTVVFLGGIRITI

SEQ ID NO: 9792 - protein, 550 aa, Unknown
  Description of Unknown: Integrase B9793 sequence
  cd00338,PF13408,IPR011109,IPR038109,PF07508, Coil,PS51736,G3DSA:3.40.50.1390,IPR006119,IPR036162, PTHR30461,PTHR30461:SF3,IPR025827,PS51737,PF00239, SM00857,G3DSA:1.10.10.2600,SSF53041
VTRAAIYARYSSDRQSEFSAEDQARLCRQLADREGWTIVGEFLDRAISGATRDRPELMAMMARAADFDVVLCESLDRLSRDQEDIAAIHKRLRFAGVDIVTLADGAVGEIHIGLKGTMAALFLKDLGEKTRRGQIGRVAAGRIPGGLSYGYEKVVALDARGEPERGLRRICETEAAIVRRIFREYAAGIGPRDIAKQLNADGVKPPRGDVWRANTIIGHRQRRNGIINNELYAGRIVFNRQRFIRDPETRKRVSRVNPPEEWLIQEVPALRIVDEATWEGVSRSSHRGPRMRAARRPKRLLSGLLRCGECAGPVTIIQANYWGCSHHREAGLCGNGRLLRNDRLEARVMAGLTERMLEPDLFDAYFETYYERAHQVLREHQRNLGQQKAELRELETKIKRLVDAIANGAAVDAVKEALNEAVARRDRIKADATAIDPSNVIPMQPKLAETYRERVRDLANSLTGEGVERAEARAMLRGMIEKIVLVAPATGEPKRDGSDIAIDIYGRLAEILTIADATKAPDQRSEAFVTFQLVAGARSRLCSALTTVRV

SEQ ID NO: 9793 - protein, 550 aa, Unknown
  Description of Unknown: Integrase B9794 sequence
  cd00338,IPR011109,IPR038109,PF07508,Coil, G3DSA:3.40.50.1390,PTHR30461,IPR006119,IPR036162,PTHR30461:SF3, PS51737,PF00239,SM00857,G3DSA:1.10.10.2600,SSF53041
MYKQFEINFTPEEVIDYLRKSRSDDPSLTVEEVLAKHEAILDEWAENNLGGKVPEENKYREVVSGETLKERPEINKVIKRIESPKIKAIKIVEPQRLTRGDLEDIGRIMKLLKHTNTLVITPNRIYNLQDEYDWDALERELKRGNEFLEYTKKILNRGRLLSVSQGNYIGNTPPYGYDKTFITEGKRKCPILVPNKEEADVVRMMFDLYVNQDMGCQSICNKFDEMGIKPPKGEHWSPAAMTKMLENIHYIGKVKWNHRKTLTIVEDGEFIQTRPVSKVGEYLIYDGKHEAIISEELFNAAQAKKGRNTRQKPNTKVRNPLAGLLWCKCGRAMSMRTYSQHNAEPRLLCDGQTHCKTGSCLYTDMIERVEEILEQCIKDFEVRLQSDEGNSLKLHANLVKNLEKRMKELQEKELSQWEAQSHPDPAQRMPAEVFKMLNERLLKEKEEVQQALCKAYESMPEPVDYEEKIVRFQDALAALRNPEADAATKNRLLKACIDRIEYHREKPVRIKSQQTRYYDSTTKKTRYKSPLKTGGNWTSPPIELDVKLKV

SEQ ID NO: 9794 - protein, 550 aa, Unknown
  Description of Unknown: Integrase B9795 sequence
  cd00338,PF13408,IPR011109,IPR038109, PF07508,Coil,IPR036162,IPR006119, G3DSA:3.40.50.1390,PTHR30461,PTHR30461:SF3,IPR025827, PS51737,PF00239,SM00857,G3DSA:1.10.10.2600,SSF53041
MKRVLCLYRVSTKGQVDPKDDIPVQRRECMDFIERHKDWVYLGERLEKGVSGYKVSVNKRDVLQEIRQMAERHEFEVLLVFMFDRLGRREDETPFFVEWLINHGIEVWSVNEGQQTIANRGDKLMNYIRYWMAGGESEKTSLRVKAAQTQMTADGIWRGGNKPYGYKLVHKGRIGKKNRQLYDLEIDEIEGPIIQELFHLVTVEGYGTLRAANFLNDKYPNPLKVWTAQTVRSILKNPVYTGRLHMNDTLSEPIESLRLVSDETMAFAQHCVTKRIPRKYQEIRQAENDAMPLGAKTKASVYGASMLSGLLYCAHCGHKLVGTYTQENRNGVMRHRAIYRDYYGAVKAKNCIGQQTYSAKKIEDAVLQIVRQYFQSMKQSVDEAWEERTRQKMRSSSTAKLKAAQARVDELEKRQELLKQEVFKSLNGQSAFSKDMLQTMIDEAAAATATAKEQLQACKSDTANEDLQMKQLKAKYQEIIDWADAFEHLRGDNQKMILARIIERITVDRNYNLTITFFITRDEFEAAMSQNEGLRIEQALSAPTLSFVAS

SEQ ID NO: 9795 - protein, 550 aa, Unknown
  Description of Unknown: Integrase B9796 sequence
  cd00338,PF13408,IPR011109,IPR038109,PF07508, Coil,PS51736,G3DSA:3.40.50.1390,IPR006119,PTHR30461, IPR036162,PTHR30461:SF3,IPR025827,PS51737,PF00239, SM00857,G3DSA:1.10.10.2600,SSF53041
MRAFIYCRFSSHKQQELSIEGQRDICQEYADKHNITVVGQYADRARSGKTENRADFRRLMRDAATGVVDCVLVWRYDRFFRNRAESALYRKQLEAAGVHLISVTEYIPEGSAGIITQGMIETVAEYFSAKLSEDVSRGMNKAAQHCQIVGRAPLGYRAGPDKRWQIDPVGAELVRRIFEWYASGKAMGQLAAQLNEEGHRTTNGTLYTRSSFNSILRNEKYIGVYSYGGEVRIEGGCPRIVEDELFFTVQRRLSANRHRPGAYKAEVPYLLSGKLFCGLCGAPMTGTAGTSHTGARHYYYICNNRRAKTCKKKNVRLDLIEEAVLQSALDILTDENIAYISTEVERRCAENSDSAALLASLNAQLEEVQRRLKNIGNAIAQGIITETTKELLEEAEADRTALRQQIDRAKVQAALVVKAEAVACWLDGFRRGDRADPDFRRQVFGALVHSVFVYDDYLKIIFNVDSAGAAVVPYEAAQAATPSEAPPGSYLDTLGAPKKALRKRKAFFIMIAALCECFRFAADFNPSQRLFLFCRRNARTFIVRETVAYM

SEQ ID NO: 9796 - protein, 549 aa, Unknown
  Description of Unknown: Integrase B9797 sequence
  cd00338,PF13408,IPR011109,IPR038109,PF07508, PS51736,IPR036162,IPR006119,PTHR30461,G3DSA:3.40.50.1390, PTHR30461:SF3,PS51737,IPR025827,PF00239,SM00857, G3DSA:1.10.10.2600,SSF53041
MIAAIYARYSSDLQSERSIDDQIAACMTFAAQRGLPAPTMNFADAAISGASMATRPQLLALLDLVRARRISIIIAEAIDRLSRDQADLHLIRRACDANNVKLYTISDGEVSGMVAGLQGIMAEAFLKNLAQKTRRGMMGVAREGRIAGGLSFGYRAIDGRPGERTIDEAEAGIVRRIYASYLAGRSPYAIARSLNAEGVAGPRGRAWKVNTIAGDARIGDGILCNELYRGRIVFNRRRYQKNPETGRRSSFLNPPAEWLIVEKPELRILDDDTFEAAMAMRRGLGSTPLQNRRKRPQRLLSGILRCAACGGAFTIINRDRMACSNAIAGTGSCDVRQRLPAAVAERRVIEGLKRNLLSPDAIAAGVRGYQEQRKAMRGEENARRHEATRGIEEARRRASRIADQLIDTPSPTLRTKLAEAEAQVTAFEAELAAIPPASIVELHPNAADAYKAVVATLETALSADAAPEIRQAVRGLLERIEAAPDAGAPDGWSLVIYGQLATLLALANEKTPGVSAGGLPLISSAIPSTVGLGAGAYTGRYSATVRLVA

SEQ ID NO: 9797 - protein, 549 aa, Unknown
  Description of Unknown: Integrase B9798 sequence
  cd00338,PF13408,IPR011109,IPR038109,PF07508, Coil,PS51736,IPR036162,IPR006119,PTHR30461, G3DSA:3.40.50.1390,PTHR30461:SF3,PS51737,IPR025827,PF00239, SM00857,G3DSA:1.10.10.2600,SSF53041
MNIQKTAPTPKLVTMIPADPQMTERDLRKKHLRVAPYCRVSTDKEEQLSSYEAQIEYYTEKIDANPDWTMVRLYADEGITGTSAKKRKAFLQMIRDCERGKIDLVITKSVSRFCRNTLDGLNYVRRLKRHGVGVYFEKENVNTLFMDNEMILTFMMSQAQAESESLSGNVRWGHQKNFKDGKVYYHCKTFLGYRWGADGQPEIDPEQAAIVRRIFSRFLLGHSVRQITTDLMADGIKTATGKTVWHDSVVQKMLCNEKYIGDALLQKTYIADLFTREKRVNNGELPKYYVHDCHPAIIDRKTFQKVQEELARRSSLKKTSSKAKTQLGKYCGKYVLSELLVCGECGSPYRRVIWTQKGVKRVVWRCQNRLEHGRKICKQSPTLDEGDIHDAVISAMNELFRIQAAKDAVKAGIAAVLAGEEQTMSLPAVELQIRNLQERQLELFQLIVSAGADCTDYDEELQQVNMAKTRLMAQKAELEKEQRGAAAFESRLEELDMALEQASGALTDFDELTVRQLVSNIKVLDKDSLLICFKDGTEITQAMQRRISA

SEQ ID NO: 9798 - protein, 549 aa, Unknown
  Description of Unknown: Integrase B9799 sequence
  IPR038109,PS00397,IPR006119,PS51737,PF00239,G3DSA:3.40.50.1390 ,PTHR30461,IPR025827,SM00857,G3DSA:1.10.10.2600, SSF53041,IPR013087,IPR011109,PF07508,PS51736, IPR006118,cd00338,PF13408,PS00028,Coil,IPR036162,PTHR30461:SF3
MRLKKIKVAIYIRVSTHHQVDKESLPFQRQELENYAKYVLNCEDYVTFEDAGYSAKNTDRPDYQNMMARIRSGEFTHLLVWKLDRISRNLRDFTVMWDELKEYGVTFVSKMEQFDTSSAMGEAMLRIILVFAELERKLTAERVLSMMLSRAEKGGWNGSRVPLGYDWNYEKKVIVINKEEAVLVQKIFNLYEKTGSSTLVAKLLKEQGEKTKRGGDWMGTTVLQILRNPIYIGIYRWNYREGGRGTKKDPGEVVINEDVIPAILEREQWERVQMQIDSNRKGEWSNRKKYTHLLVGLLKCGYCGKNYVGSRSTRAHKNGIHPTYYRCSMYARNRSCQNKGVSGFQVEPFIFDYLRALVKAEKAGDVLKEFGHPEVEYIDIPGPAGVYKGVDILASSQAATAAEEDPLKGLNVRKKKIETAIARLDDAYYFSEGVNAISKADYLVKRADFQQKLNQVDAEIAAASAKAPATNTKKMDIENFSRFLLLHDLYLAGDIKEVLYKLDKRVVRDFLDGVIKYIEVADQRVTKIAFYPPEGDEEVVHRFVYKDNP

SEQ ID NO: 9799 - protein, 548 aa, Unknown
  Description of Unknown: Integrase B9800 sequence
  cd00338,IPR011109,PF07508,Coil,IPR036162,IPR006119 ,PTHR30461,G3DSA:3.40.50.1390,mobidb-lite,PTHR30461:SF3, PS51737,PF00239,SM00857,SSF53041
MPYAPEYLHLVIPGPRFEAWLYGRNSENEFAGVAGVRDSVDDQLDTGRELCHRHDWLIVGEFKDSDLSASRHAKKIRGNYEDLIAAILNDPAPPGVRRIVVAYEASRYYRDLDAYLRLRKACMARDVLLCYNGQVYDLSRRDDRKATAQHAIDAEDEADAIQDRNLRTAVRQASAGKPHGRLPFGYAREYAHVGGRQRCIRQYEHPVQGPIILKAFQHIDSGKSVRSLLLWMNATPEAARPDGAAWSFSTIRALLTNRAYLGERAHQGSYTKATWDPILGLETPQGRAMFNRVSAKMTDPNRRTNRGTEVSHLLTYLALCGECGDHAMLCAQSRPDRVHVNLACEPLRHISMAEPVMNAFVEEALLAWFADKPVARAALFPTAENVTEKVDVAQRLVSAYEEQLAEARMLARTVNPATGRMRLSATSLADLEEQVQPLLEAERKKLRDITGVSPLVAQMLESQDPEAMWNGRPATDTEPELPGLTLEQKREIIRKVVTVRLYRAPKLGRNRADVSRIRLAFVGEPGFRDRPHRVRVPAPASVPGEGTG

SEQ ID NO: 9800 - protein, 548 aa, Unknown
  Description of Unknown: Integrase B9801 sequence
  cd00338,PF13408,IPR011109,IPR038109, PF07508,Coil,PS51736,IPR036162, PTHR30461,IPR006119,G3DSA:3.40.50.1390,PTHR30461:SF3, PS51737,IPR025827,PF00239,SM00857,G3DSA:1.10.10.2600,SSF53041
MKKFPIDLSCLTEEEISQFQEDPYTLYNGDQDVALYLRYSSTGQSDQSIEGQLRDCRTFCKANHYRIVAIYVDRATTARKDVEKRVHLMEMVADSAKQNWEYVIVWKLDRFARNRNDSAIMKMRLRKNGVKVLSATEHLTDSPESIILESVLEGMAEFFSAELSQKVTRGMRESALKCHSVGGHIPLGYKVENHKLVVDPDTAHIVQEAFSLYANGESVADICRKFNSAGYKTAKNTEFNRSSFKAMFRNTRYIGTYTYKDIVIENGIPAIIDKELFEMVQRRLSKTATAPARGKAKVDYLLSGKLFCGHCGASMNGESGAGRHGKVYHYYSCYTKKRKLGCDKRPLKKDYIEGIVARDALNLLTDQLIDEIADMAIRQSEQDLINDTHIPQLTAQLSEVEKSITNITAAIEKGIASETLMNRLVQLEHEKKTLNKEIKAEEKFVYRIDRDQIVFWLSQFKYGNIEDEDFRRRLIDLLVNSVTVWDEPDGYKITTAYNLTSCKTKTFRVEKNPAAEEATGFDFGESECRIVHKFYGTIYANKENGKLE

SEQ ID NO: 9801 - protein, 548 aa, Unknown
  Description of Unknown: Integrase B9802 sequence
  cd00338,PF13408,IPR011109,IPR038109,PF07508, Coil,PS51736,G3DSA:3.40.50.1390,PTHR30461,IPR036162, IPR006119,PTHR30461:SF3,PS51737,IPR025827,PF00239, SM00857,G3DSA:1.10.10.2600,SSF53041
MKKFPIDLSCLTEEEISQFQEDPYTLYNGDQNVAIYLRYSSTGQSDQSIEGQLRDCRTFCKANHYRIVAIYVDRATTARKDVEKRVHLMEMISDSAKQNWEYVIVWKLDRFARNRNDSAIMKMRLRKNGVKVLSATEHLTDSPESIILESVLEGMAEFFSAELSQKVTRGMRESALKCHSVGGHIPLGYKVENHKLVVDPDTAHIVQEAFSLYANGESVADICRKFNSAGYKTAKNTEFNRSSFKAMFRNTRYIGTYTYKDIVIENGIPAIIDKELFETVQRRLSKTATAPARGKAKVDYLLSGKLFCGHCGASMNGESGAGRHGKVYHYYSCYTKKRKLGCDKRPLKKDYIEGIVARDALNLLTDQLIDEIADMAIRQSEQDLINDTHIPQLTAQLSEVEKSITNITAAIEKGIASETLMNRLVQLEHEKKTLNKEIKAEEKFVYRIDRDQIVFWLSQFKYGNIEDEDFRRRLIDLLVNSVTVWDEPDGYKITTAYNLTSCKTKTFRVEKNPAAEEATGFDFGESECTKSPRNRLISMTFAFHKFRF

SEQ ID NO: 9802 - protein, 548 aa, Unknown
  Description of Unknown: Integrase B9803 sequence
  cd00338,PF13408,IPR038109,Coil,G3DSA:3.40.50.1390, IPR006119,IPR036162,PTHR30461,mobidb-lite,IPR025827, PF00239,SM00857,G3DSA:1.10.10.2600,SSF53041
MPADCPLPAGSTVAGYGRDSGGRDQDRSVLQQRAEIEAYCRDRGLALVRWFADEARPGSSVIGRDAFLEMIAWLRRLAPEPERRRSRRGDGRDPDAPDGVLFWSLARSAREQDDRAYFWADLRRRGYTVFSVTDGIPGGDLAPVVESLFAWQAEQYLQQLSREVTRGMRDMVTRRGPDGEYLNCWNNHPPPGFRAEPRTIGARRDGRPHVVRCLVPDRDGLWEPVRRAFALRAAGLSVRQIEAELGLGWSRQRYGHLFRNPIYAGRLEYGDLVIDGWIEPAVDPATWAAVQDICRNHDAFQRRARSRPRSAYPLSGLLRCPVDGAAMTGSSCRGPVPGAPPYRYYRCSHYGDGGACAHSRGLRADYLEPAVYGALARDVLTPEALRAALEGGGPAELNGARAELAAAEKRVADLERATGRLLEAIEGLGGEGQPVAVLAERLAARQAERLEAEAELRAARARLSGGCEPVPPEVLADFCRDAARVLEEGEPGAVRDLLEVIVVRIVARTDGTGEIHYRPLGELPGRAPAAVAPFHWFPGGRGFKRPAV

SEQ ID NO: 9803 - protein, 548 aa, Unknown
  Description of Unknown: Integrase B9804 sequence
  cd00338,PF13408,IPR011109,IPR038109, PF07508,Coil,IPR036162,IPR006119, PTHR30461,G3DSA:3.40.50.1390,PTHR30461:SF3,IPR025827, PS51737,PF00239,SM00857,G3DSA:1.10.10.2600,SSF53041
METKLIKVACYCRVSTKSEEQEQSFEAQQAYFKEKLSEKNNFELVEIYADRGTSGTDFHKREAFNRMLEDCGIIKKEVKVRETEIRKKYISIDYVVDADITPKFNLIYVKDSSRFARNTEVSRIITRLRDKGVYVYFEDLNKSTENQSEKMLLDFMFSMAEQESISRSDKVRFGNMQSAKEGTVRSMKLYGYTYIKEENSLRIIPEEAEIVKLIFDLRLQGYGGRAIATELDQRGIKNRKGNGWRGNTINSMLQNLVYCGKVVRNKWYSSRMYGKDIVELNTRDKWIVEDSEKVDKIIDEENFEKVQIMIEDNRQKVGRVQGKYHGRSEFAEKIKCEKCGKYYVRNTDRGRVFYNCSTKKQHGTKNCNNRNVQEYEIEALIDPYLISGEYKKITKKYIDMMIEKEKEKKATLYMSTNIEEVNQINMEIAEYKKKLSKLTEAFLDDDSEGANDIFKSKKTELSEKIKALEIKRNKLSATDEEKKDMLQSMDIFINYLQEQYNKCPEDITREEFINEYLYEIRVSENGALKLITQSENGYYKIIELMNED

SEQ ID NO: 9804 - protein, 548 aa, Unknown
  Description of Unknown: Integrase B9805 sequence
  cd00338,PF13408,IPR011109,IPR038109,PF07508, PS51736,IPR036162,IPR006119,PTHR30461,G3DSA:3.40.50.1390, PTHR30461:SF3,IPR025827,PS51737,PF00239,SM00857, G3DSA:1.10.10.2600,SSF53041
MRVALYARYSSERQNERSIEDQLGVCRRHAEARGWTVVTTFSDAAISGSTMANRPGLQALLAVAGGGAFDLVLVEDEDRLARNLEHQANIFNRLKHAGVGIATLSSDAIGILEVGLKGVMAELYLVNLGQKTRRGMRANAEKGLATGSRLYGYATASGGDMRIIEAEACVIRRILEYFAAGDSTREIAARLNTEGVPGPRGGPWNASSIHGSRQRANGILHTELYAGAKVWNRMEVRKDPVTGRRLPIMRPPAEWRRTDVPHLRIVPADLWDAVQGRLAAAGDSHPRALANARRGSLFGGLIRCGMCGASYTADGGGRLMCAGRRERGPAVCANTRTLSRAAIETRVLDGLRDRLVGREQAAIYVRAYHAARAAEARARVDERGPLERRRAELLRAIDRVVDAVAAGAATPRMMERMAAQEVERADIETRIAALEPVASAPVTLHPGAAQTYADIVGRLREHLADAGADQSSTESRQLVEAVRALVLKIVVTPRSLEPRAAVDIELHGDLARFLTPPGPAPRWGGQMVAGGGYNHAPPAVPVLIRLGA

SEQ ID NO: 9805 - protein, 547 aa, Unknown
  Description of Unknown: Integrase B9806 sequence
  PF13408,IPR011109,IPR038109,PF07508,Coil, PS51736,IPR036162,PTHR30461,IPR006119,G3DSA:3.40.50.1390, mobidb-lite,IPR025827,PS51737,PF00239,SM00857, cd03768,G3DSA:1.10.10.2600,SSF53041
MIAPVQDKKRKRFIIYTRCSTDDQAQGDYTTLDAQAHHCKNMMDAFGYELASFGDNGVVNDDGYSGKDLNRPGIQAILKDIHKTRSFDGIIFFRLDRLTRNPRDLYSMIDIFKAKEVDFLSVRENLDSSTAIGRVVIGIIGLLSAFERELTGERVKASAIARARQGKWVAGKPPFGYKQVKDGEPLPNGRQPHKNEIDETIAPHIRRIFELAADNKTLSEIGHTLIQNEVPTAKKQLWRKQTVAKILKNPFYKGTISYSGELHKGTHQAIVDDELWDKANRVITANLPGHRFKKIVKDYNQRLKGLLRCGKCGSSLVCTIAHSHNGNIFYYYECSRARQRLGCDTKRISATAFDEAVIAFFRRASKDQEIIVKAMGSAIKDNATKLDIYEKEIKTIQKKLDKAKKAAAKLLNLAIDKVISKGVTYSEKMDTYEKEVTVLEDQLSKALARRRAADMSIHSSEYLYSNLRFAMAHLDKAPAEAQITLLKALIKAIDVHDDHVIMRMHIGEPFEELTCQIDPKKQETLPVAVTSTEQGSPERQQWRRGRD

SEQ ID NO: 9806 - protein, 547 aa, Unknown
  Description of Unknown: Integrase B9807 sequence
  cd00338,PF13408,IPR011109,IPR038109,PF07508, Coil,IPR036162,IPR006119,G3DSA:3.40.50.1390,PTHR30461, mobidb-lite,PTHR30461:SF3,IPR025827,PS51737,PF00239, SM00857,G3DSA:1.10.10.2600,SSF53041
MRVALYARYSNDRQNERSIEDQFAVCRRHAEARGWTVVAGFSDAAISGAAMANRPGILSLLACAAAGEFDRVLVEDTDRLARDREHDAHIFKRLTYAHVIISTLTSDHVTAIESTFKGLMNELYLVNLSQKTRRGMRANAEQGLATGSRLYGYRSAPGGATAIVEAEAQVVREIFARFAAGETGRAIAGDLNARAIPSTRGGAWTGVQIVGNRKRGNGVLYTELYAGVKVWNRMTVVKDPDTGKRLPRMHPPSEWKRTPAEPLRIVPQALWDAVQGRKAVEGELHPGQISARRRGVLSGLLKCGCCAASYTSYSKTRLVCAANREKGAAVCDNSHMADRAAIEDRVLTGLRAQLASPEAAALYVRAYHAAYAEAAAAERRERAPIEKRIAELHRIENRYCDDVEAGRATQKGYERAIAAEQERATLEAKLAAIDAAEGAGSPAIALHPSAPARYAQLIDQLHATLATAGTDPDARPLIDAVQGLIIRIDLHPDAGAPNGFRINLVGDLAKFLDARAEQARRAVGGKLVAGGGNRHTPSPRMPVDIAA

SEQ ID NO: 9807 - protein, 547 aa, Unknown
  Description of Unknown: Integrase B9808 sequence
  cd00338,PF13408,IPR011109,IPR038109,PF07508, Coil,PS51736,G3DSA:3.40.50.1390,IPR006119,IPR036162, PTHR30461,PTHR30461:SF3,IPR025827,PS51737,PF00239, SM00857,G3DSA:1.10.10.2600,SSF53041
MPKKNEIPTEQSEGGIKAVIYARYSSSGQREESIEGQLRDCREYASKNNLLIVGEYIDKALTGRSDKRPDFQRMLKDSERGIFQVVICWKMDRFARNRYDSATYKYRLKKNGVRVVYAMEAIPEGPEGIILESVMEGYAEYYSENLSQNVKRGYYDSALELKTLGQRLLGYRKGADGRFEIDPATAPIVRRIFEEYAMGKRPKDICEDLNREGFRTLRGGLFNKCSLPRIIANEKYTGLYEYKDIHVENGIPQIISKDLFLKCNKILEGHRQAPAARREVGERFLLTGKLFCGKCGQPMTGDGGTSKTGKVHSYYICNGRRAHVCDRERIRKDDIEQNVISELIMLIHSDEFIDEVADLVIRYQERTKDTSVLNSLEAHLKDIEKRLENLTLAIEAGIDAATIKSRILALESEKADVEKGIAKELIKDPELDKDQIVFFLEQFRKGNIDSEEWKLSLVDTFLQAVYVYDDKFVITLNYSGSRNTITKKMVDKLAGGDFSGDVVSSSLSASSALNEDNLNPPRRFMFLSRKVFGISVPHILCIKNIKR

SEQ ID NO: 9808 - protein, 547 aa, Unknown
  Description of Unknown: Integrase B9809 sequence
  cd00338,IPR011109,PS00397,PF07508,Coil, IPR038109,PS51736,IPR036162,IPR006119,PTHR30461, G3DSA:3.40.50.1390,PS51737,PF00239,SM00857,G3DSA:1.10.10.2600, IPR006118,SSF53041
MKLITYLRVSTDSQDSGLEMQRAMTADFAMRFDHDIIEVFEDRAISGGIASREGFDRLKDYITKNGSKEFMVLIYDISRIARDVSIGEEFIKLCWKTQTKIITSGGDSYDFAQHSDRMRARMMFVFATADKEKKNEDSFNGMRRALESGRYIFQPKPGSIKGYRYEKIDKIKQLVPFEPEASIIKEALELYANDQLNTLVELKQWFEDRGLHFNKARNESIKFILTSPLYCGYVEYLPWGISKRKAVHEPLISEDLWDKIQSKVNGRNSRKLKHGTHDDVFFFRKFGMCPKCKNHLTAHTIYNRQGNAYKSYYCSTRNCELFKKHINGEKLENLFLELIKTTKFSKSQLETIRDTLICWINNQAEIKQNTAKTLNKELKNLDTQIKTELEQLKRVSNAFVFKSLENSIQNLENERNRKIKELKECEVDTETSRAVYLTQLDRSLIYLENLDKFWSLGDLAIKKLVYKTIFEGGLTVEIGDKGSLHLTPHFSCFYAFCRDLLNENSEWWSSVALKPNFNILSFYTISVEFCQNVSYIDQAKFDQILAL

SEQ ID NO: 9809 - protein, 547 aa, Unknown
  Description of Unknown: Integrase B9810 sequence
  cd00338,PF13408,Coil,IPR036162,IPR006119, PTHR30461,G3DSA:3.40.50.1390,PTHR30461:SF3,IPR025827,PF00239, SM00857,SSF53041
MSEAPFPLNSRVVAYLRDSGGEDQDLSVAQQQVFIQDWCIQNNLVLTTIFADVATPGSSTIGRDQFRKLIDHFHNPDCHDAGVILWKFSRFSRDIDDAQFYRADLRRRGYTVHSIQDNIPDTTDGRIYEALIDWMNNKFLEDLSMDVKRGLHHLVTTYGALPGTPPRGFMREPVAIGSRRDGSPHTACRWSPDPEKWDLCLQAWTMRARGISIRQIHKELHLFSSTSSYTSFYTNPLYLGELHYGDLVIKDYTTPMVTREIWDIVQELNQANSAGHSPLHRRTNDRHPRRENSTFVLSGLLHCPRCGSLMNGMSVRSRKSGLFEYYHCSNANSRLECDAKRIPKATVENAIIEKILEYVLDPRVIHERDKELALSQTDNVETVKKEIERVITRIKNNDRKRANLANRIAEANSPPASLMDLLGDLEKEKIELQQQLARMRSIQNKETVFIREPADIEKLSRQFQRILTSDDLEKRRSAVRQIVNRVAAERDGKFVRGIVSFYNPTDKKGGFMPMERSTVEAPYHRHKTYTFEFCVKIKQKSRSSAAL

SEQ ID NO: 9810 - protein, 546 aa, Unknown
  Description of Unknown: Integrase B9811 sequence
  cd00338,PF13408,IPR038109,Coil, IPR036162,IPR006119,PTHR30461,G3DSA:3.40.50.1390, PTHR30461:SF3,IPR025827,PF00239,SM00857, G3DSA:1.10.10.2600,SSF53041
MRLEPPPSTLPPGSTVWAYLRDSGGPTQDRSVEQQRQMVEEYCQQFGLVLVLPPFEDVHRSGTTTRNRNEFDYMMSLSASEHLRPMGLLIWNHARFSRGDPNEAQFFKSTLRARKIVIHSLTDKIPDGPFAPIVESIIEVANKQKAEEAAFGAWRGLRYIVKQGAVPGTPPRGLRRVPILVTSEQGVQRTAHRWEPDPRFERRIQHAFELRAAGKSLAQIHRAVHLFTSLNSYTTFFQNPIYIGTLKYGEMIIEKYCPAIVSKKTWNKVQALLTTNAGRKHLTSTADHPRRVNASYLLSGLIHCARCGAAMNGLTSRQKSGSDYRRYRCGNSKQRLDCAAKPIPAALAEKLVLTHIKKFFEDETNLVNLLSQFAENQAGHHAEANAAIASHRAELGTVRKKMTNTSNAIAELSGSVTLLKQLRALEAQETELIAKIRELENQKNTVIHIPTTAEARTLSEKIIDDLNDTDPVHVRQILLGLVYQILADRQGKSLVLQVILTFDKKKAPPSKSTVSINRVPVGAPIYRHSLIITYTIQNQGNPIPVK

SEQ ID NO: 9811 - protein, 546 aa, Unknown
  Description of Unknown: Integrase B9812 sequence
  cd00338,PF13408,IPR011109,PF07508,Coil, IPR036162,PTHR30461,G3DSA:3.40.50.1390,IPR006119,PTHR30461:SF3, IPR025827,PS51737,PF00239,SM00857,SSF53041
MTTMANVYSYLRFSSLKQAAGTSIDRQLDYAQRWAAENGLPLDESLTMRDEGLSAYHQRHIKTGALGVFLEAINEGRIPPGSVLVVEGLDRLSRAEPILAQAQLAQIINAEITVVTASDGKRYNREQLKANPMDLVYSLLVMIRAHEESETKSKRVKAAIRKHCEAWQTGGTMTMGRMGRPPSWLQWIDDKWSIIEERAEGIRIALDLFARGWGHFKITEALIERKLNLGQGSPNSNQLYRIIRNPALKGVKTLELDGETYELADYYPALVSATQWATLQEAMGRRSRACSSGPGKIVGMLTGTGIAICGYCGSAMVANNVTTRARADGSLSDGNRRLICSSSATRKPCPLPSSSSAAAIERAIMDYCSDRLNLRALLINSGDQSDTLRGRLAQLRSEGAKIGAQIDRLTDLLLATDETDTPAALIRKMRDLEAAQKESEKATRHLEQQLLALDSTPTPAAAEAWEALRHDVEAMNYDARIKARQLIADTFERIVVFSRGMSLDPQSQSIDVLLVAKGGGSRSLCLDRKTGRLLDGLRIGEAVTAG

SEQ ID NO: 9812 - protein, 546 aa, Unknown
  Description of Unknown: Integrase B9813 sequence
  cd00338,IPR011109,IPR038109,PF07508, PS51736,IPR036162,IPR006119,PTHR30461, G3DSA:3.40.50.1390,mobidb-lite,PS51737,PF00239, SM00857,G3DSA:1.10.10.2600,SSF53041
MTPLKRRQTRRDQDKRAQAAAQQAELTAVRPLVPLTEANPKRRTAMYLRISMDSDLLGEGIDRQHFESWEKAEAEGLDVVALFIDNDTSASTGEYRPGFEDMKALVAAGGVDFILSWSQDRLLRKPRQIEDFIDIATDHPIKIYQAIEEATDLTTASGRKAARDRAVQASFETERKAERQRAQSRQRARKGVTPVTECFGYDIIRDEKGQPQAVINADEAKVVREVFEWYVSGLGTHTIAQMLNERGLVNLWNNPWNPTSVRTMLRNPRYIGERWLQNYRRRTDGTKIKEVTYYAEGTWEPIFTGDDVETLFREANRQMKARRKSTGTNGTSRKWLGTGLYMCVQCGGTVSAGHRPRKNGNEVTYDCRPHTHVTRPAANVDLHVRRVVAAYVARYGVGELIADKASADQSAALKEAEAKIVRKLSRVESDYDDEILTGPEYRRKKDDLKAELETVRADIAALGHSSVLSMLNGSADPAALFLEAPLALQAAIIRDLGTVTLTKGKRGHRPANYWLRPGHKFSDTILFHWRSGREMDMTEFDIPLDE

SEQ ID NO: 9813 - protein, 546 aa, Unknown
  Description of Unknown: Integrase B9814 sequence
  cd00338,PF13408,IPR011109,IPR038109,PF07508, Coil,PS51736,G3DSA:3.40.50.1390,IPR036162,IPR006119, PTHR30461,PTHR30461:SF3,PS51737,IPR025827,PF00239, SM00857,G3DSA:1.10.10.2600,SSF53041
MQIRRAGIYARFSTDLQNDRSVDDQIALCRDFAARNGLTVVKDYFDKARSGASVFGRDGLLSLLDDARAGRFQTIIVEALDRLSRDQEDLAGIHKRLTFAGVEIIAVHDGRADAIQVGIRGLVSTLFLADLKNKIRRGQAGVIRDGRHAGGKAYGYKPTPGQPGVLRIDDEEAAVVRRIFEEIAAGKRPREVAYGLNEDGIAPPRGRAWGASAIYGSSSRGYGILRNPIYHGVLVWNRVTMVRDPETGKRVSRINPESEHKTAEAPHLAIVSRELAEKAIAIASRGPSKAADGKVQIKRPKRILSGMLRCSHCGGGMSIHDRYKNGIGIRVKCTRHIESRSCTNDKKYRLDKIEDAVISGLRQQLSNPALLVEYVKAFREEMREDAAKLERDRSKIERRVADLSGRLERLIQGMARGILPIEAIEAQYKPIEEERDRLKAKLAQQPAPAVIELHPQAVAHYRKSVQHLAQRLNDLDDRADAETVAAFRELVDRVIVHDRPGKMVEVEVVGHLSSLLGRPAEILGGRVVAGERPNDTPQVSMFMAVA

SEQ ID NO: 9814 - protein, 545 aa, Unknown
  Description of Unknown: Integrase B9815 sequence
  cd00338,PF13408,IPR011109,IPR038109,PF07508, PS51736,G3DSA:3.40.50.1390,PTHR30461,IPR006119,IPR036162, PTHR30461:SF3,PS51737,IPR025827,PF00239,SM00857, G3DSA:1.10.10.2600,SSF53041
MKRAATYSRFSTDKQTEASIEDQRRCCADYAKQNGLQVLHEFSDLAISGASFGNRPGVNALQKAAFAGELDVILIADLTRLSRNSADLPKFLERMRFRKIRVIGVLDHFDSDQRHSRMQAGLSGIMSDEYRLAIGERVHLALDTLAKSGKPTGSKAYGYTSKQVVIPEQAKIVKEIFERIAAGETMLAIASDLNGRQVRSPGASWKGRVTNRGDGRWIVPALNNMLQNETYMGRVVWNRSQWVKDPETGKRTRRERPESEWIIDERPELAIVDRKTWDTVSALMTRRKLSYGKKGGGRTKYPLSGLLVCGRCDARFIISGGGKNSRGYGSGLPRYYTCSTFHQGGPAACSNSIRVPRDLCETRLLEPALNDLLSDAAVDKAVIRIRKALKERPPEPVADVAEVDTKVAKIRALVASGALDGDMAETLFAKLEAERLAIVRQSHSAARPPLVSGPWGLEAEYREHAQKLRADLTGEDADVARAALASIYGQRIRLLPDRHGLHLIAEVHFQANAVLHAVGGSVGRISLSSGGLQSAHIPLIRKGQK

SEQ ID NO: 9815 - protein, 545 aa, Unknown
  Description of Unknown: Integrase B9816 sequence
  cd00338,Coil,PS51736,IPR036162,IPR006119, PTHR30461,G3DSA:3.40.50.1390,PF00239,SM00857,SSF53041
MVTKKTGKTAVVYCRVSGKGQKDADTIEAQRTTCKQYVEQYGVTLIPYGPKGDGWIMDDGISGSLLEGRSFKKFVEDLWARKIHVDYLIVSNMNRLSRHDKTSKDRDKVRQSARDQADIMACLNVNKVQIIDHSGINDPASVVTEIKQTLAGEEYADIRRKTMNGKARVLANGAYATGGPVPYGYKRVPINGVNNKQGTTLAIDPVNGDRFIQIMRWYVEGGLAHAARQATKAGWPGPKGGPEWFPSALQHTLNKIKVYLGEATLTVQGTPYTVQYPALLDTKLYSAIVRRQKERTLKHRTTLLSTGYVDCMCGHHVHGHRGAATDQMPMKIICGNLEGGRCGSIPDTVFSKALWELVVARLIQIKEHERIASNGKDPYGPQLTAAKARLTKVQDSLERLVSLYAEGEIDKAALTKSNEKLRNEKAAAQVEVDRLESARAQHAQRLSGERSVQSKVQETLARLREGHVPLEGKRQILSDLLQGERAVIQFHGPKGAYWVTITLPAFGSLAPVTIKSNQDICTQMHGVSRQTLEAIYSVDDEVSLG

SEQ ID NO: 9816 - protein, 545 aa, Unknown
  Description of Unknown: Integrase B9817 sequence
  cd00338,IPR011109,IPR038109,PF07508, Coil,PS51736,IPR036162,IPR006119, PTHR30461,G3DSA:3.40.50.1390,PTHR30461:SF3,PS51737, PF00239,SM00857,G3DSA:1.10.10.2600,SSF53041
MFKEYPVFYNYKTKEYGRKSRLDDPLLSDIEVLEKHSKMLEEYAIKHLGGPIPEENKYMEIGSGESLKDRPEITRLLKDIEDPEVQAILVVDVQRLSRGDLEDAGRLIRLLRYTNTHVITPMKTYDLRDEYDRDAFERELKRGNDYLEYFKKIQARGRLASVKDGNYIGSVAPFGFDRHIIEDGKKIYHTLKERKDQADVVRMVFNWYCNDDIGVTAICRRLEELNIKTKTGGKYWHPYQIFAMLENVHYIGCVRWNWRKTVKIIEDQEIRKLRPKAKIDEYLVFEGKHDGIVSEELFNKAREIKGKRHRTKRDLTLKNPFSGIMFCKCGAKIGYNTYRNKGVEFAPPKLVCNNQVHCKTGSALFDEIYEEVCDAIRECITDFEIRIKTDRDDSFKLHRDLVKRLESKLEELEKKEVEQWEAQYDPDESKRLPPHIFKVLNEKVLKEKDEVNKALSKAKDSMPQPIDYKDELLKFRDALKYLEDDELDAKTKNQYLRNIIDRIEYERGPTVRITKANAPIYNVDTSKGTQWYTPPYKIKLKLKYN

SEQ ID NO: 9817 - protein, 545 aa, Unknown
  Description of Unknown: Integrase B9818 sequence
  cd00338,IPR011109,IPR038109,PF07508,Coil, PS51736,IPR036162,IPR006119,G3DSA:3.40.50.1390,PTHR30461, PTHR30461:SF3,PS51737,PF00239,SM00857,G3DSA:1.10.10.2600, SSF53041
MLKTDYLISLGIEHIINYLRKSRADEEHERKTGEDVLKSQKELMDRVLEPLGIPYDQRPEVGSGDKISTRPVFQGVIKDLEAGKFQAIAVKEISRMGRGSYTDMGIIYDLIVERRIFIITPYRLYDPRNAADLRMIRFELFMSREEFETTRERLFGGRVTNAMAGRWVAGAAPFGFNYNPDTKMLEINEEEAAVVRQIFDFYVNGVPDKNGKLRDVSFRALATYIMRKTLLRTPRGSRNWSPVVLKRLITSERYIGTMQFRTTQRVDGKQVPRPEDEHIVVPNAIPAIVDFELFMRAQEKVASSAHKPRTKMDFSPCELAGLCICLKCGRRMVRQSSTQHYKAVGGDVRIYEKEFLWCTTPGCTFVKYRTVEENLLGLLQHFRDLDELQVEQQIAAVIEADKQERPREDMTEYIEQRTKELKNRMRFIYEKYETGRYTDDMFDERKAEVDRELKELEDMRAESAQEPAEKRDGVIDTSVVKKNLTAVLDAYNAAEDKTDRNTIMRAVFSHVHVELIERGRGRIPAKFNLYPELKKDLTRSGFLVL

SEQ ID NO: 9818 - protein, 478 aa, Unknown
  Description of Unknown: Integrase B9819 sequence
  cd00338,IPR011109,IPR038109,PF07508,Coil, PS51736,G3DSA:3.40.50.1390,IPR006119,IPR036162,PTHR30461, PS51737,PF00239,SM00857,G3DSA:1.10.10.2600,SSF53041
MNENFKHQTALIYVRLSSKKQEDGMSKEVQEEKCRAFCEKEEMSVKAVYYENKSALHGSKRPVFEEILALQKTKDRVDVIMVYTLNRLTRNHPDFYFIRELVDKYNTKIVFVKENMVIQKPFKSYEKYFFNILVANAEFEIEHMKEIRKIGLLARAKTGKRPCLAPYGYKTYKNKLVVVPNDANFVKKAYELYATGSYSINSLCEELYEQGFYYSKQPNKKIPRASLSSMLKNLFYTGYYTFPDCEGEIKGAHKPIIERELYDKVQEMLSISGYEKIKKHQFLYSQLLTLQETGKLMTGEIKKGQYIYYKAYDNEKKYHCINETHVTEAILEYFKEIRLNLIPKEIVKSVLKEELKDLKQEYSTLKRNVSRKYHRKLRLNDFIKKDKIDDTDFIFDELEDIENTYENLNERIKESEEQIRQITSKCEDIMKKRLYDIYIQLNFENQRKILELVKSKLELQDKKVKLTFKSAFRKIRQR

SEQ ID NO: 9819 - protein, 545 aa, Unknown
  Description of Unknown: Integrase B9820 sequence
  cd00338,IPR011109,IPR038109,PF07508,Coil,IPR036162,G3DSA:3.40.50 .1390,IPR006119,PTHR30461,PTHR30461:SF3,PS51737,PF00239,SM00857, G3DSA:1.10.10.2600,SSF53041
MYKEYPRFYNYEVLDYGRKSRTDDPLLSVEEVLDKHDKIIEEYAEKHLGGPIPEENKYREVGSAESLDSRPEILRLLKTIENPAIKAVAVVEVQRLSRGDLEDAGRLIRILRYTNTYVITPMKIYDLRDEYDRDAFERELKRGNEYLEYFKKIQARGKLASVKEGNYVGSVAPYGFDRIEKTDGKKSYHTLIERKDQADVVRMVFNWYCNEDIGVTAICRRLEELGVKTKTGGKYWRTYQIFSMLENVHYIGCVRWNWRKTIKIIEDQEIRKLRPKAKVDEYLVFEGKHDGIISEELFYKAREIKGKRHRTKRDLTLKNPFSGIMYCKCGAKMGYNTYRKNGIEYAPPKLVCNNQIHCKTGSVVFDEIFTDVCSAIKDCIQDFVIRIENNKDDSFKLHKDLVARLEKKLKELEEKEVLQWEAQYDPDPNMRLPQEVFKRLNEKLLLEKEEIKKSLAKAKGSMPKPIDYREEKKKFEDAITALEDPNVDAKVKNQFLKNIIDRIEYERGETIRITKANAKEYKVDTSKGMQWHTPPYKLKMKLKYK

SEQ ID NO: 9820 - protein, 545 aa, Unknown
  Description of Unknown: Integrase B9821 sequence
  cd00338,PF13408,IPR011109,IPR038109,PF07508, IPR036162,PTHR30461,IPR006119,G3DSA:3.40.50.1390,PTHR30461:SF3, IPR025827,PS51737,PF00239,SM00857,G3DSA:1.10.10.2600, SSF53041
MPTSKNTARKYAAGGSSDNSCGVEPLRAVIYARYSSSGQREESIEGQLRDCYEFAKKHGIIVIGEYIDKAMTGRVDRRPDFQRMMKDSEKGRFNCVLLWKMDRFARNRYDSAMYKYKLKKNGIRIFYAKETIPDGPEGIILESVMEGYAEYYSENLAQNVKRGNYDSALELKTLGKTCLGLKTGPDGRYMIDQAEAAIVRRIFEEYAEGERAKDIYERLNSEGYRTSRGGKFNKNSLRRILSNKKYIGVYEYEDIYVENGIPAIITDRDLFERVQKMLKINHDAPARGKAQNFLLTTKLFCGLCGSPMIGDGGTSHTGKAYAYYSCTKRKRGRSCKKESVPKDWIEDLVVGELVKIVHNDELIEQIADRVMEYQKREKDQSGLHALETRQKENEKAISNMLAAIEAGIITPSTKTRLMELEADRADIEKGIAHELLAEPEFERDQIIYFLERFRSGDINDEAYRIVLVDTFLNSVYLYDDDHLVLVMNYSGENCKVDLKLVEGAVSGDGCKGSAFAPSSALNGAKPNPVYFFKKVFAVVVNFTRK

SEQ ID NO: 9821 - protein, 545 aa, Unknown
  Description of Unknown: Integrase B9822 sequence
  cd00338,IPR011109,IPR038109,PF07508,Coil, G3DSA:3.40.50.1390,IPR036162,IPR006119,PTHR30461,PTHR30461:SF3, PS51737,PF00239,SM00857,G3DSA:1.10.10.2600,SSF53041
MYLPPKIDFAPEEVLDYLRKSQADDPDLSVEEVLARHETILDEWAEKNLGAVVPPENKFREVASGETIAGRPEMQRLLRAIESPKYKAVLTVEVQRLSRGDLEDAGKLIRILRYTDTIVITPVKIYDLRDEYDRDAFERELKRGNEFLEYQKKIMRRGRELSVSQGNYIGSRELYGYERTVVMDGKRKCPTLTEKKEEADVVRLIFDMYVNQDMGRHNICKHLDSIGIKPPRGEHWSPPSVRDLLMNVHYIGKVKWNASKTVLTIEDGEVKKTRPRAKVGEYLIYDGKHEAIVDEDLFNRAQEKIGRNARTKAKTKVRNPLAGLVQCSCGRAMSLRTYKLKDGSERCAPRLLCDGQTHCGSGSCLYSEIEDRVIKILEDQIDAFQVRIKSQAGDSVKLHEQMIKNYKVKLKALEAKELAQWEAQSSPDPEERMPAAIFKQLNAKLLQEKEEVKHALCELYDTMPNPVDYTEKMRTFQEALEALRDPAISAEVKNSLLKECIEVIDYKRERPQRVKRAPGEKRGTTLTRGGQWTDPPIELDVKLKI

SEQ ID NO: 9822 - protein, 545 aa, Unknown
  Description of Unknown: Integrase B9823 sequence
  cd00338,IPR011109,IPR038109,PF07508, Coil,IPR036162,PTHR30461,IPR006119, G3DSA:3.40.50.1390,PTHR30461:SF3,PS51737,PF00239, SM00857,G3DSA:1.10.10.2600,SSF53041
MYKEYPKFYNYETLDYGRKSRSDDPLLSIEEVLETHDKIIEEYATKHLGGPIPDKNKYREIGSGESLDSRPEMLRLLKAIESPSIKAIIVVDVQRLSRGDLEDAGRLIKILRYTNTYVITPYKIYDLRDEYDRDAFERELKRGNEYLEYFKKIQARGKLASVKAGNYVGSVAPYGFDRIAIVEDKQTRYTLIEKKNEADVVRMVFNWYCTEDIGVTAICRRLEELGIKTKSGNTNWRPFNIFSMLENVHYIGCVRWNWRKTIKIIEDQEIRVLRPKAKIDEYLIFEGKHDGIISEELFYKAAEIRGKRHRTKRNLSLKNPLSGIMYCKCGAKIGYNTYRRDGVEYAPPKLVCNNQFHCKTGSVEFHEIYNNVCNIIKECISDFELRIDKDQDDSFKLHKDLVERLEKKLKELEAKEISQWEGQYNPDPNVRLPAHVFKILNEKLLSEKEEVKKALSKAKGSMPKQIDYKEEIVKFKDALEALENPDIDAKIKNQFLKNIIDRIEYERGPTVRITKENSEKYNIDTSKGMQYYTPQYKIQVKLKYN

SEQ ID NO: 9823 - protein, 545 aa, Unknown
  Description of Unknown: Integrase B9824 sequence
  cd00338,PF13408,IPR011109,IPR038109,PF07508, Coil,G3DSA:3.40.50.1390,PTHR30461,IPR006119,IPR036162, PTHR30461:SF3,PS51737,IPR025827,PF00239,SM00857, G3DSA:1.10.10.2600,SSF53041
MYKEYPVFYNYETLEYDRKSRFDDPYLSVEEVLEKHERMIKEYAERHLSGPIPEENKYKEVGSGESIDDRPEMIRLLKAIESPKIKAIIVVDVQRLSRGDLEDAGRLIKLLRYTNTFVITPGKIYDLRDEYDRDAFERELKRGNEYLNYFKKISLRGKLDSIREGNYIGSVAPYGYRRITKQNGKKICHTLEERKDQADIVRLVFEWYCNDNIGVTAICRRLEAMKVKTPGGTNIWRTPTIFTMLENVHYIGCVRWNWRKTIKIIKDQEVKELRPKAKIGEYLVFNGKHEGIISEEMFNRAKEIRGNRHRARTDTTLKNPLSGILICKNCGSKMGYNTYRRKGVEYAKPRVMCNNQVRCKTGSAIYDEVMERVCDSLRDIIDDFEVRVENQQDDSIKLHKSLVERLEKQLEDLEIKEKMQWEAKHHPDPEERMPSHIFKSLNSKLLKEKEEINEALCKAKESIPEPIDYKELSVKFTETLNILQDPTIDASIKNIHLKDIIEKIEYDRPPNIKITNENKKELGYDELSKGKMFHSEPFEISITIR

SEQ ID NO: 9824 - protein, 545 aa, Unknown
  Description of Unknown: Integrase B9825 sequence
  IPR038109,IPR006119,PS51737,PF00239,G3DSA:3.40.50.1390, PTHR30461,IPR025827,SM00857,G3DSA:1.10.10.2600,SSF53041, IPR011109,PF07508,PS51736,cd06503,cd00338, PF13408,Coil,IPR036162,PTHR30461:SF3
MPKARAAKQDTGFTAAIYARYSSSVQNDASIEQQVAECQEYARQHGLMIVATFEDRAISGRSDNRPGFQKMLRAAERHEFQVLLAYKSNRISRNMRNALVYEERLFQAGVKVVYCKEEFGDNATGRFMLRMMMNMNQFYSENMAEDIRRGMVDSAAKGKVVGVIPYGYKKGEDGRFAIDDQTAPVVQEIFRRFLNDESYADIARELNARSILTKRKQPWGKNSFHSILVNERYTGVYIYGEVRTEGGMPQIIERSVYEMAQKKLGEHKETRARHRDNEDYLLTGKLFCGHCLAPMVGLSGRGRWGNDYFYYACQTRRIQKTCQKKNVRKDFIEEEVTRCVLESVLEDETVEWIADTIIEASKRRSAQSQLADYEKRLADTKKQIRNIVRAVEMGIISDEFKERMAELEETKKELTGLIALEKAQIKHYDREDIIVYLESIRNGNPKDKKFQRKIIHDFVRAVYLFDDHFKLVVDFTGEHTVYDRSFMTSVSEDPEGGLAENNANGVCLSTAEVYQYILIQTPNSRNRIEAVDSGFVITWYFETNP

SEQ ID NO: 9825 - protein, 545 aa, Unknown
  Description of Unknown: Integrase B9826 sequence
  cd00338,PF13408,IPR011109,IPR038109,PF07508, PS51736,IPR036162,IPR006119,G3DSA:3.40.50.1390,PTHR30461, PTHR30461:SF3,IPR025827,PS51737,PF00239,SM00857, G3DSA:1.10.10.2600,SSF53041
MKRAATYARFSTDKQTEASIDDQRRCCADYAKQNGLQVLHEFSDLAISGASFGNRPGVNALQKAAFAGELDVILIADLTRLSRNSADLPKFLERMRFRKIRVIGVLDHFDSDQRHSRMQAGLSGIMSDEYRLAIGERVHLALDTLAKSGKPTGSKAYGYTSKQVVIPEQAKIVKEIFERIAAGETMLAIASDLNGRQVRSPGASWKGRVTNRGDGRWIVPALNNMLQNETYMGRVVWNRSQWVKDPETGKRTRRERPESEWIIDERPELALVDRKTWDTVSALMTRRKLSYGKKGGGRTKYPLSGLLVCGRCDARFIISGGGKNSRGYGSGLPRYYTCSTFHQGGPAACSNSIRVPRDLCETRLLEPALNDLLSDEAVDKAVIRIRKALKERPPEPVIDLSAIDTKIHKVQALVASGALDADMAEPIYKKLEAERLAIVRQSHSAARPPLVSGPWGLEAEYREHAQKLRADLTGEDADVARAALASIYGQRIRLLPDKHGLHLVAEVHFQANAVLHAVGGSVGRISLSSGGLQSAHIPLIRKGQK

SEQ ID NO: 9826 - protein, 545 aa, Unknown
  Description of Unknown: Integrase B9827 sequence
  cd00338,IPR011109,IPR038109,PF07508,Coil, IPR036162,G3DSA:3.40.50.1390,IPR006119,PTHR30461,mobidb-lite, PTHR30461:SF3,PS51737,PF00239,SM00857,G3DSA:1.10.10.2600, SSF53041
MYRYEKIEFRPEEILDYLRKSQSDDPLLTVEEVLEKHEAILDEWDERHLDAKVPEENRFREIVSGETIKERPEINKLLRLIESPKYKAVKVVEPQRLTRGDLEDIGRIMKLFKHTNTYVITPERIYDLRDEYDWNAIESELKRGNDYLNYYKKIQNRGRLLSVSQGNYLGSVAPYGFDKTYVMDGKRKCPTLKENKEEADVVRLIFDLYVNKDMGCAKICNYLDNMGIKAPKSKHWSQAALKDKLSNIHYIGKVKWNWRKTIDVVEEGEFIKTRPRAKIGEYLIYEGRHEGIVPEDLFNAAQEKRGRNHRAKPTTKIRNPLASILWCKCGRSMSYRTFKNKDGSEKTAPRLSCEGQKYCKNGSCTYEEIINRIVEVLEQCIEDFELRIKNDEGDSIKLHASLIKNLEKKMKDLEARELAQWEAQSHPDPSQRMPVEIFRKLNENLLKEKEEIQQALCKAHASMPEPVDYEEKMKKFKDALEALKNPEADAATQNKLLKECIDRIEYQREKPERMKKEPGEPKGTRFEVGGDWTKPPIHLDIKLKV

SEQ ID NO: 9827 - protein, 545 aa, Unknown
  Description of Unknown: Integrase B9828 sequence
  cd00338,PF13408,IPR011109,IPR038109,PF07508, Coil,IPR036162,PTHR30461,G3DSA:3.40.50.1390,IPR006119, PS51737,IPR025827,PF00239,SM00857,G3DSA:1.10.10.2600, SSF53041
MTPHEDDAVIRRPRRTLRPKAKIELPDLPAHWHAYPCDCEPCVIYLRVSAAGGRDRIISPMIQFASILEECHRNNRRIVGIYFDLKTGKTLDGRKIHTVVKEITDGKYRTVAVHKWDRWGRNTLESLQMCDMVDKAGGQVVSSTEAFNTKTPAGNFIRTVLLGVAELQSKLIGENWKGTQQHRKTSGLPHSGRDRIGYAYINRRYVIDKVEAETVRQTYEQYVSGVGFKSLARQWNTADIVTTTGAKWTPQALCRTLDTGFAAGYIRERSDPGNDPANTIAAYDIWRQGDHQPIISEGLWQQYRARREAQAGLPSRLRTGTHALSGLIFCGTCGRRANTKYMGRNGAHHWVCNFSQTYHPGKANSMTNAIAEAEVRRWVEERAGAGDAEKVTKKARELADAQRQPGPVDGIMTKLGGIAGEKFRARDMYQQGDCTRQEMKQRVAKLDVEEQELRVELARAKAAEQSANGHTDFIPMFTKLAKEWENFAAEERSIILKKIIGMVQFFPQSTVGRDPSVRIRVVPVWEMSEWGDAWLSARRRWQELR

SEQ ID NO: 9828 - protein, 545 aa, Unknown
  Description of Unknown: Integrase B9829 sequence
  PS00397,IPR038109,IPR006119,PS51737,PF00239, cd03768,G3DSA:3.40.50.1390,PTHR30461,IPR025827,SM00857, G3DSA:1.10.10.2600,SSF53041,IPR011109,PF07508,PS51736, IPR006118,PF13408,Coil,IPR036162
MGKKSEVVQKIRRACGLYLRVSTEMQAIIKEGSLDTQQSTLTKYTEIKSSNGDEEWCVAEVYREEGRSGKNTDRPEYQRMLKDIKNRKIDVLLCTKIDRVHRSLVDFYKLHELLEAHEVTFVSLSENWDTSTPMGRFGLKLTLAVAELEREQTSQRTKEKMRWRAEQGLRNGGQVFGYDIDPENRGVLKVNSEEAKLIRLIFETYRELRSFRRTAQKLNEMGYRTKSYQSRRGHIHGNKKFTKCAVIHILQNPVYIGKVTHYDSLFDGKHDAIIDERLWQDVNDQMRANRVVRAKPREQKMHTFLLEGLIRCGWCGGYLTPTYSGGRNGTYFYYQCTKVHNGGDECKMKRVSAEDIEEVIARRLIEMSKDQNLLTEILDEADTASRKERKILEERRNIQKRALAPIEQEIANIVKFIAQGKGSAALSTEIERLEIQKQEIEGELERIELEARELKNRTISAEVVSEGLGFFEQAWQVATPKQRKDLMRLHVHRIIWTPEKIKMGLYARPTSEMYIKPTAVNHLGDFAVDSMNWLPKFPVLLTAVR

SEQ ID NO: 9829 - protein, 544 aa, Unknown
  Description of Unknown: Integrase B9830 sequence
  PS00397,IPR038109,IPR006119,PS51737,PF00239,G3DSA:3.40.50.1390 ,PTHR30461,IPR025827,SM00857,G3DSA:1.10.10.2600, SSF53041,IPR011109,PF07508,PS51736,IPR006118, cd00338,PF13408,Coil,IPR036162,PTHR30461:SF3
MKAALYARVSSQGQADKDLSIPAQLKALREYALKKGGSVAVEYIDEAESARSADRPKFQEMIFAAKQKVCLFDTILVWKFSRFARNREDSILYKKLLKKHGIDVISINEPIDDTPSGHLMEAMLEAVDEFYSLNLSSDTIRGMKENAARGFQNGGVAPYGYKRVKSVINGNERVKLELEPSEASVVRRMFEMAAKGLGTKEVVKTLTKEGLKTRAGFPWSKTVLHYMLTNETYTGTIVFNRFKQSEEVRKRNEPEKLIRVENAHPAIIDKETFTKVGELMKSRAPKIMHPREVSSDYLLSGMVFCGKCGAKMVGSSAKSGKFFYYACQNYLKRGKDICDCKFIPQAKLEDAVIAKIRERVITKENIGKLVRDINEELLASKGSLLDRVHEQDLKVVEANKRLQKLYNALETGQLELADLAPRIKDLRTQIDALEGVKAALNAELAKETINVSDSELKAYEDELCGFLQRSTITETKSFLAQWVKRIELDTPGGGHIIYKLPLAPGAKGAEVLSLRIGSSPDRTGNRFWDSSTCSSTCTDIADQH

SEQ ID NO: 9830 - protein, 544 aa, Unknown
  Description of Unknown: Integrase B9831 sequence
  cd00338,IPR011109,PF07508,Coil,PS51736, G3DSA:3.40.50.1390,IPR006119,IPR036162,PTHR30461,PTHR30461:SF3, PF00239,SM00857,SSF53041
MSFAYSYIRFSTKKQGKEGRDSFRRQTELRNRWLLKTGHELSNIAFHDLGKSAFHSTNLIPTSALSKFLSLVESGQIEKGSFLVIEKLDRLTRAKLSTAYNLFQRIIEKGIKIQTLEPEKTYDETSLDNVFTLMEPLMSFQLANDESQKKSDRAKSFWDNQRKTGTINARKPAWIDKNGKLNIGAKAIQFIFDESIARIGQRQILQKLVANFPPIGNSKKWNLSYINKILSEITVTGRFQPMSTQNGVRIKINKEIPNHYPRVISDKIFKEVQLLRRRTKRVRGIVNSTNIFSGLLVCANDTSPYHLQTTKTQGIRKWLVSYFHTQKQQNSCRMMVPYHYFEKQVLLFITDTVGDLNETRKTTDTTELETELHNIELRLEEIEKEMITMENPIALLAKVANKLTTRKKQIEVEIEKQTIPIDELKLSLSQLLSVLNSGDEVARFKLKGLIGEVVNSIHIMPEKHNGKIFVLFQIEYKNGEIRQCGYFRDKVLYLSMVNNKTELTIDLTDNKSITGQFFPPLIESNKLTMNLGKSIAAKLANIPA

SEQ ID NO: 9831 - protein, 544 aa, Unknown
  Description of Unknown: Integrase B9832 sequence
  cd00338,PF13408,IPR011109,IPR038109, PF07508,Coil,PS51736,G3DSA:3.40.50.1390, PTHR30461,IPR006119,IPR036162,PTHR30461:SF3, IPR025827,PS51737,PF00239,SM00857,G3DSA:1.10.10.2600,SSF53041
MAKKKEKPQPVQTAAIYARYSSNAQNDASIEQQIAECELYAKANNLTIVDRFEDRAISGRSDKRPGFQKMIRAAERREFQVLLTYKSNRMARNMYDALRYETRLEDAGVKVVYCKENFGDNAAGRMMLRMMMSINEFYSDNMAEDIRRGLMDSASQGKVVGALPYGYKKGEDGKVIIDEELGPIVQEIFSRVMNDETYADIARDLNARGYRTQHGKQFGKSSFRAILENERYTGVYLYGDIRIDGGMPKLIEKEVYDAVNHIVKHRQTLHARQRENGEYLLTGKIFCGKCLGPMVGISGKGRWGKDFFYYSCNTKRLQKKCDKKNVRRDQIEEEVTRAVLECVLDDDTVEWIANTAMEMSREMEEQSQLGYYESRLKEAKKQIANILRAVEMGIISDEFKERMTELRMEKQELEGLIATEKLGILQVDRDHVIKYLLLLRTEDYRDKKFQKRIIRDFVKAVYVYDDHFKLVVDFTGENKTYTRPLKIKLAKAEGPVNEGEGVCISSGVAHHISLIQTPDPRNCIDVSDAGFVITWYFSDNTVKQ

SEQ ID NO: 9832 - protein, 544 aa, Unknown
  Description of Unknown: Integrase B9833 sequence
  PF13408,IPR011109,PF07508,Coil,PS51736, IPR036162,IPR006119,G3DSA:3.40.50.1390,PTHR30461,PTHR30461:SF3, IPR025827,PS51737,PF00239,SM00857,cd03768, SSF53041
MPSPAASPVVAGVYARKSKYAEASESVSTQVALCRDLAQRQYPGCTFVVYDEDEGFSGKNTNRPGFLRMMEDVRSQRINVLYVYRLDRMGRSVRDICATLETLQRHAVSFVSVRENFDTSTPMGRAMLYVASVFAQLERETLAERVRDAVHAMARQGRWLGGNTPTGFVSRKDSKGWFYLKPVPDDLDKVRHLYEQFVSLGSVSALVTYCLRNGIRSRTGVEYSRTTLRSLLVNPVYCTADLDAFRFFSSHDYALAAELSEFDGFLGLQPFGRTSRNENTVILNPTSQWIIAVGNHPGAVPGAVWVRAQNILEQNKELGASFRGRRTENALLSGVIRCGSCGSAMRPKTYGTPLPDGSRRVAYICTRKVDSRGDLCTIKNAPANDVDAIVLDHLRQLSQQFDSLNQSSVSLLAASSAHAAEEGIRALQLEVQKAQQQMDNLTDTLAEGVPAAARQQIYQRMEDLSQLISEKEDAIAELTASQLDSQQQLSFAEQACALFASFGDGFSSLTHDERRRLIRSVVSSVIWDGENITINPAGVPASLG

SEQ ID NO: 9833 - protein, 544 aa, Unknown
  Description of Unknown: Integrase B9834 sequence
  cd00338,PF13408,IPR011109,IPR038109,PF07508, Coil,PS51736,IPR036162,PTHR30461,IPR006119, G3DSA:3.40.50.1390,PS51737,IPR025827,PF00239,SM00857, G3DSA:1.10.10.2600,SSF53041
MAYRKITDIKDTIGMRAVFYARVSTAEEEQLNAIELQIEENRGCIKDHGWKLVGEYIDRSKSGTMVKGRDDYQRLYEDLYEDLFDIVVIKDQERLQRNTLDWYLFINRIVQTGKLLFMYMDGKFYSPDDALITGVRAIIAEEFSRNLSKKLHNYHDHRIEKARQGQEIALQGSGNVYGWDKKDGKYYINPEQAKVRRLMCEGIMARKGSTLIAKELNEAGYRNTVGKLWKPMDIPKFVYDCKNVGTMIINKERHDFESKQTIKLPKEEWVYVENALPPIVTQEEWDLICKIHEERVIATGSDRRGKKTSGYSFSGKLVCGICGAPYWRKQRVSKDEYWVCSTKQTKGRRTRKRDSTMGKAGEINPLGCDNENISYNSLMEIMGVVSERLQANTNTIKQDMINWLTKLRKQLLEANGGHTEADLQRELSRKSKLLDAYLDGILNKQEYQKKAEELDERIIQLKTETEKNKANSGDIAEIDKVLANIDEEVARYVDGNEKLKVEYLLEHLEQVQIFPDKVIVIVPILSEGIVVEKTQYVSREKWRW

SEQ ID NO: 9834 - protein, 544 aa, Unknown
  Description of Unknown: Integrase B9835 sequence
  cd00338,PF13408,IPR011109,IPR038109,PF07508, Coil,PS51736,IPR036162,IPR006119,PTHR30461, G3DSA:3.40.50.1390,PTHR30461:SF3,IPR025827,PS51737,PF00239, SM00857,G3DSA:1.10.10.2600,SSF53041
MPVSITFSADLKKAKGEPILAAIYARYSSHSQTEQSIEGQLAAGHAYAEKHGYTVIKEYCDRAQTGRNDNRDAFQQMLSDTDKKQFDVIITWKVDRIGRNREDIAFNKHRCKKNGVRIEYVAENLPDSAESVILESVLEGMAEYYSLQLATNIRRGQLESARKLHCIGGTRPLGYSVDPETKRFVINPDTAPIVKQIFELYAEGSTETEIITWLNEQGIRTTRKQPFSKSSLARLLHNEKYIGLYIFKDLVRVEDGVPAIIDKDLFDRVQELMKVNRRAPSHTWTHQDYILTDKIFCGKCGSPMIGESGISHTGAKHSYYSCVGHRKKKICDKRPVRQDWIEKRVLEATRKLLEDDELLDWIADKTYEYYTATNGNVDQKDMLEKELATVNTSIDRLISAIEAGAFNDRIKSRLDELNAQKAQITASMAELELASGFRLTRDHIAFFLRAFRDADINDRACQKRLIQTFVNAVFVYDDHIKIVYNYTSDSNTVTLDTVENLDIEDSDGFVHSTQCSTIAIRHEPKGITIFGTVFMIIIETGQDA

SEQ ID NO: 9835 - protein, 544 aa, Unknown
  Description of Unknown: Integrase B9836 sequence
  IPR038109,IPR006119,PS51737,PF00239,G3DSA:3.40.50.1390, PTHR30461,IPR025827,SM00857,G3DSA:1.10.10.2600,SSF53041, IPR011109,PF07508,PS51736,mobidb-lite,cd00338, PF13408,Coil,IPR036162,PTHR30461:SF3
VPKKNAGQPVKPKRGQKLDAPGVIYARYSSHAQKDLSVEQQIEQCTALAKEYGIHVIEIYPDRAVSGRTDKRTNFQRMMKDAASGRFKYVIAWKSNRIGRNMLEALVNEARLQEQGVRIIYVEEDFDDTAAGRFAARSMMNVNQFYSENMAEDIKRGLYANAQKCLVTNGHLPYGYKPDETRHFAIDEPKAAVIREIFTRVATGEPFVDIFESLNARGITTSYGRPWGRTSFSNILSNERYRGIYIYGDVRIENGIPRIISDELFYKVQEVITTKRHPRGRHRINGDYLLTGKLFCGKCGSPMTGYSGTSRAGDMHYYYVCNKHRYEKNCDKKNVRRDSIELQVAQAIKDYALQDDVIEWIADQTIAYNKRKEAENHIGMLEDQLKTAKRGIKNIISAIEQGIITSSTKDRLQELEREQSKIEGQIAAARADIVTVSRDDIISGLSMFRDGDINDKKFQAQLFDTFLIAVYVYDDRLKIVFSFSGAKNTAEIPLNNPPDSSESDEPECSSKLQLDPPSWSQTNTTVIYMIGGMFVLALPLKETQ

SEQ ID NO: 9836 - protein, 543 aa, Unknown
  Description of Unknown: Integrase B9837 sequence
  IPR038109,IPR006119,PS51737,PF00239,G3DSA:3.40.50.1390, PTHR30461,IPR025827,SM00857,G3DSA:1.10.10.2600,SSF53041, IPR011109,PF07508,PS51736,mobidb-lite,cd00338, PF13408,Coil,IPR036162,PTHR30461:SF3
MAHGILPENAAVLYLRMSSAKQDKSIDAQRDELLKLALRKGYTIRREYVDPAISGDDTERRTGFLRLREDCENGPDFSIVLVWHEDRFSRNDPLEYGYWLKPIRDSGVVLETPTGRVDWESLGGRLLSLIGQEMRHDYLRQLSRNVARGQLAAAKDGRGGTGGRAPGGYKHKDGKVLVERDKAAVVLHAFQEYDKASASLRSVVDLLNREGLRTARGNKWSITTLRGTLTNRKYAGDFVRLKYRAGKYHAIKDGEIVTRRKGEGVEEVEPIVVEDHHKAIVPRRLFDRVQRKLAGQRKRTAHRTGHQYIFSGLLRCGDCGGRMGGAPAMDGSKYKKYFTYICRTYHSHGPAACHCNSMSEDKLLDVVTRKLQAEVLSETAISRLLDAYRKRLAARRRGVPADDGGRLRKQIDKLDRQIDQGLDRLVLVPEKLVGTLSAKIEKLREELDRLKDQLNAAGQPETCSVVEDDRKVEEAARVLRDMREAFADAEPAAVRDLISPLVSKIELQFDHVQEGKKRRHLCKGGTILVRPVDPALSLLFGIS

SEQ ID NO: 9837 - protein, 543 aa, Unknown
  Description of Unknown: Integrase B9838 sequence
  cd00338,IPR011109,IPR038109,PF07508,Coil, G3DSA:3.40.50.1390,IPR036162,IPR006119,PTHR30461,PTHR30461:SF3, PS51737,PF00239,SM00857,G3DSA:1.10.10.2600,SSF53041
LTPEEILDYLRKSRSDDPLLTVEEVLQKHESILDEWAVKNLGGEVPEDNKYREVVSGETIKDRPEINLLLRRIESPKIKAVAVVEPQRLTRGDLEDIGRLMKLLKHSNTWVITPQHIYDLRNEYDWDAFERELKRGNDYLEYTKKILNRGRLLSVSQGNYIGSIAPYGYTKATVNEGNKKCPTLAINEEQADVVRMIFDMYVNKDMGRTNICHKLDDMGIKPPKGKLWSPFALKDMLENVHYIGKVKWNWRKTIKIVEDSEILATRPKSKIGEYLIYDGKHEAIISEELFQRARDKQGKNHRAKPKTKIRNPLAGLLICQCGRAMSLRTYRKNGEERADARLLCDDQVHCGTGSVVYDEMIEHISGILRECIEDFEVRLENDEGNSVKLHNNLIKSLEKKKKELESKELAQWEAQASPDPAQRMPAHIFKTLNEKLLKEKEEIQQALCKAYESMPEPVDYEEKIVSFKEALDALENPNVSAIQKNTLLKKVIERIDYRRDKPERVRSTAKRVTINGKRIRPNGLKTGATWTNPPFEVDVKLKV

SEQ ID NO: 9838 - protein, 543 aa, Unknown
  Description of Unknown: Integrase B9839 sequence
  cd00338,PF13408,IPR011109,IPR038109, PF07508,Coil,PS51736,IPR036162, PTHR30461,IPR006119,G3DSA:3.40.50.1390,PTHR30461:SF3, PS51737,IPR025827,PF00239,SM00857,G3DSA:1.10.10.2600,SSF53041
LTTPKHPPKPKRGKKIEAEAIGVIYARYSSHSQRDISIEQQIAKDQELAAEYGIKIVAIYADRAVSGRTDKRKEFQKMMRELPKHKAKYVIAWKSNRMGRNMLESMVNETRLQDMGVRVLYVEEDFDDTAAGRFAARSMMNVNQFYSDAMSEDIRRGLMDNAEKCMVNGSVPFGYRRGADGYYEVDPEKAAIVREIFKRFLDSESFAEIGRDLNSRGIRTKRGNPWNKNSFHRLLSNETYIGVYKYSGIRKEGGVPAIITKEVFDAAQERLRTKPNPVGRHRMNSDYLLTGKLFCGHCGSPMVGISGTSKTGDKHYYYSCQKHRLEKTCDKKNVKRDYIEARVLEKIRECLMDDHVIQWLVDGYEEFVIKVRSESLLATYEQDLEEVKKSLKNIMRAIEQGIFTDTTKERLEELEEERRVLEGNIAAEKAMLVDTPKEQVQFWLESWRQGDVTDQKTAERMIDTFVKAVYLYDTDGGLRGKIVCNYTGKNSTLEFSLDDLEDLPEAASRSVRISSRQVHQKSQYELNTVIYVLRDVFVLVTDL

SEQ ID NO: 9839 - protein, 543 aa, Unknown
  Description of Unknown: Integrase B9840 sequence
  cd00338,PF13408,IPR011109,IPR038109,PF07508, Coil,PS51736,G3DSA:3.40.50.1390,PTHR30461,IPR006119, IPR036162,PTHR30461:SF3,IPR025827,PS51737,PF00239, SM00857,G3DSA:1.10.10.2600,SSF53041
MRVVLYMRYSSDRQTEQSIEGQNRVCTAFCEQQGYEIVDRYIDRATSAFKDTDKRTEFQRMIRDSEKQLWEGIVVYKLDRFARNRYDSATYKARLKKNGVRVISATENISDNPEGVILEAVLEGMAEFYSKELSQKITRGMFESANKCHSIGGHIPLGYKIENKKLVIDEAGAAIVREAFDLYANGATVAEICETFNTKGYRTAKNAEFNKNSFRSMFKNERYIGIYKYKDLRIEGGVPAIVDKDTFAIVQKKLSKNAEAPSRGKAKIDYLLSQKLFCGHCGSLMTGESGTGKGGTTYFYYTCGKRKREHTCDKKPLKKDFIERAVVEDALTLLTPETIDELADIAVNESIREMEENSIIPALKDQLHDTERSINNLVKMVEKGVESDTIADRLKELEKEKRAIEKRLVVAQDDYVLLEKDHIVWWLSEFCNGDIEDEEFRRHIIDLLVNSVTVWDEPDGWYKITSVYNLTSNKTKTFRCSDLSGQAPPKLEIAAVKTAVIFHLTTEIPQTGNLPHPREFLFWLSQPVPCFPELPPLRLDLRF

SEQ ID NO: 9840 - protein, 543 aa, Unknown
  Description of Unknown: Integrase B9841 sequence
  cd00338,PF13408,IPR011109,IPR038109,PF07508, Coil,PS51736,IPR036162,IPR006119,G3DSA:3.40.50.1390, PTHR30461,PTHR30461:SF3,IPR025827,PS51737,PF00239, SM00857,G3DSA:1.10.10.2600,SSF53041
MEVAKIPKKIVTVIEPKRSMTVDKEKYRQKKVAAYCRVSTDSEEQLVSYANQKKVYTEMIASRKDWCFAGLFADEGKSGTRADKRPEFNKMINDCLAGKIDYIITKSVSRFARNTVDCLDYVRMLKSKGIGAYFEEQQIDTLKTDSELYLVIYAGFAQSESESISKNITWSVRKKFEEGTPVFIYKRFLGYKKGADGEPEIVPSEAAIVERIFNLYLAGETVDNISKMMQAENYDIPGKTISFSKGMIMNMLSNERYCGDAILQKSVTVDCIEKKRKKNTGEAPMYYVQNNHPAIIDRVTFNKVQEELARRKTKTPGSAKSSITSTGKYSRYALTDVLICGNCGTRYRRVTWSRNGTKRIVWRCISRLDYGKKYCSDSPTIMEDKLQEAIVRAVNKFNKQDNATYKALMRATISEALGLNGDPEEVDMLERKIEALNNKMLALVNESVSSGDGIEAHESEFMTLSQEAELLKQRIAAIQESTAKDNGEQNRLEQIQAIIAERESKCMEYDDSIVRQMVECIKVYPGGKLEIIFGGGYLVEESV

SEQ ID NO: 9841 - protein, 513 aa, Unknown
  Description of Unknown: Integrase B9842 sequence
  cd00338,PF13408,IPR011109,IPR038109,PF07508, PS51736,G3DSA:3.40.50.1390,PTHR30461,IPR006119,IPR036162, PTHR30461:SF3,IPR025827,PS51737,PF00239,SM00857, G3DSA:1.10.10.2600,SSF53041
MPKAVLISPITKQGIQKIRVAAYCRVSSNSADQLNSYATQIRVYTKLINSKKEWTMVEIFADEGLSGMKVDSRPEFLRMIRMCELHQIDLIITKSVARFARNVKEALEYVRKLKLLGVGVQFEKEGINTLAMGDEMLLNTFTAIAQEESKAISQNQRLSIVKRMELGEYIDSNAPYGFRLENKVLVVYEPEAEIVRWIYNSYLNGWSTSEIARHMNEQGIPTKMGKDKWTSSKIKYILCNERYIGDCNYQKTYRDTTVPFKQYKNRGQEDMYYAKGTHTGLLDKDVFTKVQDLLAKRQQQFGKSEVLNTYPLTSRIRCLECGSIYRRKIRNGTVKWVCGKHQEDSTACPASYYSEERIYDSLAAMFNTLRFGEEDILGQVIAKLDSAATTYKRNNKAAGQISQSIAEINAKILMLDQLRSKGYLAPEVHQAQTIELRNQLSRLKTERNDLFETRILGMLEAVKKLKDLVEEIEEPLEVFDERLLMEAVEDITINRHDEMTVTLLGGLKFKELL

SEQ ID NO: 9842 - protein, 543 aa, Unknown
  Description of Unknown: Integrase B9843 sequence
  cd00338,PF13408,IPR011109,IPR038109,PF07508, Coil,PS51736,G3DSA:3.40.50.1390,IPR006119,PTHR30461, IPR036162,PTHR30461:SF3,PS51737,IPR025827,PF00239, SM00857,G3DSA:1.10.10.2600,SSF53041
MKKQPEILNAVIYARYSSHSQTEQSIEGQLHDGYAFAEKCGYKVVGEYIDRALTGTKDDRPEFQRMIKDAEKKQFQIVIVWKLDRFARNRYDSAIYKRTLKKFDIRVVSVMENITDSPEGIILEGLLEAMAEYYSANLAENIRRGQQESVKKGWYCGGSIPLGYRLQDHRLVEDERTAPLVRELYQRYGSGESLASIAADFNARGFRTNRGRPFKTSTFDRIIPNATYIGQYTYAGQVVPDLAAPLIDQETYDRAVQRRTANRRAPAANRTPVKFILQGKLFCGYCGTAMCGDYGTSKSGERHNYYSCSARKHRKNDCRKKSEKKDFLEWYVCEQTVKYVLDPDRMDQIAETVADLYNSEIDDSKVAALERTVQRLDDELNALVDKLILVPKESAGRIADRMKQLELQRIEAETDLSKLRIQQNIRITKKEVAAWLQTFASGDLFDPDTRIRIIDTFINSIYLWDDKIVIFYNIKEGKQTIGIDQIGDLDEKIEKAGQVDCSTLTGDGGAMPSKVEHSAHAFIFIHGMLGLVVFRQLKTTENN

SEQ ID NO: 9843 - protein, 543 aa, Unknown
  Description of Unknown: Integrase B9844 sequence
  cd00338,PF13408,Coil,G3DSA:3.40.50.1390,IPR006119, IPR036162,PTHR30461,PTHR30461:SF3,IPR025827,PF00239, SM00857,SSF53041
MPSDAPFPLNSRVVAYLRDSGGEDQDLSVAQQEAFVRGWCQQNNLVLTAIFADVATPGSSTIGRDQFRKLIDHFHNPDCPDAGVILWKFSRFSRSMDDAQFYRADLRRRGFIVHSIQDNIPDTTDGRIYEALIDWMNNKFLEDLSMDVKRGLHHLVTTYGALPGTPPRGFMREPVAIGSRRDGSPHTACRWSPDPEKWDLCLQAWTMRAQGIPVRRIHKELHLFGSINSYSTFFKNPLYLGELHYGDLVIKDYTTPMVTREIWDIVQELNQANSAGHSPLHRRTNDRHPRRENSTFVLSGLLHCPRCGSLMNGMSVRSTKSGLFEYYLCSNANSKGDCDARRVPKATIETLVIEKILEYVLDPEAVKERDKEMALAQADNPKRIKKALEGCNARLANNARRIENVTNRLAEEKKPPQSLLAKLHELELEHLTLSAEKERLKSMQNHETVFVRNPEQIQKMVDGFNYSMTHGTLEEKRDAVRSLVVRVAAERDGDFIRGIVRFFNPTDEKRGFMSMAGGTVEAPEYRHKIFTFEFCVKIKQKSQ

SEQ ID NO: 9844 - protein, 543 aa, Unknown
  Description of Unknown: Integrase B9845 sequence
  cd00338,PF13408,IPR011109,IPR038109, PF07508,Coil,PS51736,IPR036162, PTHR30461,IPR006119,G3DSA:3.40.50.1390,PTHR30461:SF3, PS51737,IPR025827,PF00239,SM00857,G3DSA:1.10.10.2600,SSF53041
MAVSITYNADLKKAKGEPILAVIYARYSSHSQTEQSIEGQLAAAHAYARGHGYTVVREYCDRAQTGRNDNRDAFQQMLSDTDKHQFDVIITWKVDRIGRNREDIAFNKHRCKKNGVRIEYVAENLPDSAESVILESVLEGMAEYYSLQLSTNIRRGQLESARKLQCVGGTRPLGYDVDKETKRYIIDEKTAPVVRQIFEKYAKGATEVEIIRWLNDQGIRTTKKKPFTKSSLATLLHNEKYIGVYTYGDLVRVEDGMPAIVDRETFDKVQELMKVNRRAPSHTWTHQEYILTDKLFCGKCGSPMVGESGFSKTGAKHCYYSCTGKRKKKTCDKRPVRQDWIEGEVLKATREMLKDEELLDWIADQTYNYYLSVNGREEEKTILQKELAGVDTSIDRLVSAIEAGAFNDRIKSRLDALNEQKAQITASIADLELASGFRLTRDHIAFFLRQFRDADLEDRACQKRLIQTFVNSVFVFDDKIEIVYNYTEGNNTVTLDILTSETDGGEFVHSTECSTIPIRYEPRGIIIFGTTFMITVQIENRGG

SEQ ID NO: 9845 - protein, 542 aa, Unknown
  Description of Unknown: Integrase B9846 sequence
  cd00338,PF13408,IPR011109,IPR038109,PF07508, Coil,PS51736,G3DSA:3.40.50.1390,PTHR30461,IPR006119, IPR036162,PS51737,IPR025827,PF00239,SM00857, G3DSA:1.10.10.2600,SSF53041
MVQEKLRAVFYARVSTEEERQLNALEKQVAECKDAVLQKGWKLVDQYVDEGKSGTQIKRRDEYRRLFEDLENDKFDIVVIKSQDRLQRNTLDWYIWIDRLTTHGKRLYMYLEDTFYSPDNALISGIKAILAEEYSRELSKKINNSYKRRIEAAKNGEKISIVNNSRSLGYDKVNGELVINEKEAEIVRMIFNMYASGEGLRAISNTLYDMGYRNRSGNEIDPSTISRMLSSEKYKGVYVINQRHYDFDTKKTVLNPKSEWVHIPGAVPAIVEPELWDRVQEIKGSKVQSIKNEKRGRNCGKSIFSGKIYCAKCGAKYWRSLENGYVKFKCSSYSKYGKIPGKGCDNKSFSENALYSILQSLSEQIVEVNTAEVRKSLLSWLESLRERLRASQGDDTIKEEIRKQTARKEKLTDAYMDGIISKEDYSKRYKELEKTLEDLKDKLLTLEVNEDLQSIEEVIQNIDKEMEEYLQTQSFNESRVDFLNQHLTKVTVNKDSFLLEFDLIGGAILTGKDFYLFVDNPRWYSIQTDKRNSVDVGIKIAA

SEQ ID NO: 9846 - protein, 542 aa, Unknown
  Description of Unknown: Integrase B9847 sequence
  cd00338,PF13408,IPR011109,Coil,G3DSA:3.40.50.1390, IPR036162,IPR006119,PTHR30461,IPR025827,PS51737, PF00239,SM00857,SSF53041
VSRPSVYSYLRFSDPRQAAGHSAERQAQYAARWAAEHDLPLDESLSMRDEGLSAYHQQHVRSGALGVFLAAIDAGRIVPGSVLIIEGLDRLSRAEPLEAQAQLTRIINAGISVVTASDGRVYTREGLRSQPMDLVYSLLVMIRAHEESDTKSRRVRAALHRLCQRWAAGSYRGPVRAGKDPAWVTWDGTRFVLDPDRSEAVRQALALFRAGHGASRIVLQLAHAGLSTTGRAMAASHLYKLLRLRALMGEKEVAVGGQTYRLAGYYPALMSADEWDALQLLADDRGRRRVKGDLPHTITGLGITRCGYCGQTMSGQNLAGKPRLPDGRIRDSYRRLLCSGRSRGGEPCPVPGSCSIAPIERALLAYCSDQIRLDALRTGADPATGPAAEAARHRTRAAELTRQIDRLAEALASDDGPAPAAIMRRVRELEQQLDTEQTALDAAERTLATLNSGRMTHDIAARWAELKAGVEAQDFDTRLRARQMIADTFEALVVYHASRQPGQCDAIDLLIRARGGAPRWLRIDRVTGALIDGLDVSAPEVM

SEQ ID NO: 9847 - protein, 542 aa, Unknown
  Description of Unknown: Integrase B9848 sequence
  cd00338,IPR011109,IPR038109,PF07508, Coil,IPR036162,IPR006119,G3DSA:3.40.50.1390, PTHR30461,PTHR30461:SF3,PS51737,PF00239, SM00857,G3DSA:1.10.10.2600,SSF53041
MKAIAYVRWSSKDQKKGDSERRQTSLAAEMCQTRGWTLVETVIEHGKSAYHGRNRSKIGELGKLEKRAANGELAGMALIVENVDRLSRQEPIEGLLLLQSLTKAGVTVAESASNSVLDVNTVKENWQSLLVPFLRWGLSYEESLKKGLRISEAYQSTLDRGFRTKDGLADLRFSPSWIGRDEAGDYQIIEDRADIVRLIYKRCVDGHGLRAICAELNKDLSKTRWQKGDWNQANIREILRNRQSLGEYELTERTEDNYTRRTGQWVKGNFPSVIDAELWHRAQSALDARRSTGGKRRGMVNLLQGFTYCGAINDGERCGSRMIITQNSKTEPRKARLRCARNHRAAGCKSRASFHYQHLVNGILDQLLEVALPVPKKESDASSSLAVAQVELEGAEKRLDNLVDAFAESGSPALKRGIARAEADIEEQRQKLEELRIALEKERCKRPAKKAIDEIQALRDQLQDDEDARRKVHSALQEMITSIFLYPDTREAHVLVAGIHALRFDGLGNLIDSQVATSAVLEGAHNDNPIGLQRYLDYTKNG

SEQ ID NO: 9848 - protein, 542 aa, Unknown
  Description of Unknown: Integrase B9849 sequence
  cd00338,PF13408,IPR011109,IPR038109,PF07508, Coil,PS51736,IPR036162,IPR006119,PTHR30461, G3DSA:3.40.50.1390,PTHR30461:SF3,IPR025827,PS51737,PF00239, SM00857,G3DSA:1.10.10.2600,SSF53041
MKITAPARSARAVSLEAFVDNLNLANVVIYARYSSAGQNDQSIDGQLAKCREYAQQRGYCVVGEYCDRALSGRYAETRPEFQRMISDSAKHAFDFVLVWKLDRFSRDRYDSAIYKKKLRANGVRVLSVTEGVGDSSESVLLEAILEAMAEEYSRQLAQNVRRGMRQNAEKGLSLGGLAPLGYRVVNKQYEINEDEARIVRFIHEQYADGAGQKQIVADCARLGYRNQRGNPLTLAAVKRILANERYIGRYDYLGEIVIEDAFPAIVSKDLKKRVRDRLNANAKAPGHAKAKVEYLLHGKLFCGECGAPMIGECGRGRHGATYYYYTCAARKKQHTCKKRNERKDELEASVVDYIGSCVLTDSWIDGAAERVVAEYQKSYDASGIKPLEKQIRDADKEIDQLVDALISATAEAARRRINERIETAEARKQALEADLASLRIASRVQIKKEDIVVWLNQFRTGDRSDLEYRKKVIDLFVNSIYLYDDTFKLFLNVTDSTQITYSDSLALAPPSVSDFGASGVPDMHLSEHIIFVNGVIGMIVQR

SEQ ID NO: 9849 - protein, 485 aa, Unknown
  Description of Unknown: Integrase B9850 sequence
  cd00338,IPR011109,IPR038109,PF07508,Coil, PS51736,IPR036162,IPR006119,PTHR30461,G3DSA:3.40.50.1390, PS51737,PF00239,SM00857,G3DSA:1.10.10.2600,SSF53041
MSKVILLSRVSTAHQDLTQQTEKVLDEIKKDGYKPANIITIEDKESAVLLSEEERNGLNKLKHYIETEKIDAVYTYEVSRISRQPSILYSIRDYLIRHKVQLVILNPYMKMLKDDGTLSETANIFFGIFSSMAENEGFIRKARMRRGVEKKRAAGLHWGGSIAVGYSTDKQDRYIIDPHGAEYVRRIFNEYVSGKSVRQIARDLQNEGWRTNTAYLTVVQSVLNILHREYYTGNDGIHPAIISQELYDQAQTKCEKARVYAVPKDEVMLLKGLIYDRKSGFLLSGNKANGVYYSKRVKGPTVSWLVIDPIIWIFVEREHRYRFVYERESWLKDVDKEIKRNNKIIDTMTQKGADEMEIIERIEERYIEGKITKQKANELEEKHHRLIFEYTQIMKKAEEDIKRLESDRTSSSDKLDYDKMSIAERIQLVRNCIDKIIIERQTRFIVSLEIHMKWYDVWDFEINTREKIVLKESKRPRMTLHGPIN

SEQ ID NO: 9850 - protein, 542 aa, Unknown
  Description of Unknown: Integrase B9851 sequence
  cd00338,PF13408,IPR011109,IPR038109, PF07508,Coil,IPR036162,PTHR30461, G3DSA:3.40.50.1390,IPR006119,IPR025827,PS51737, PF00239,SM00857,G3DSA:1.10.10.2600,SSF53041
MAYRKITDIRDTIGMRAVFYARVSTAEEEQLNAIELQIEENRGCIKDHGWKLVGEYIDRSKSGTMVKGRDDYQRLYEDLYEDLFDIVVIKDQERLQRNTLDWYLFINRVVQTGKLLFMYMDGKFYSPDDALITGVRAIIAEEFSRNLSKKLHNYHDHRIEKARQGQEIALQGSGNVYGWDKKDGKYYINPEQAKVRRLMCEGIMARKGSTLIAKELNDAGYRNTVGKPWKPMDIPKFVYDCKNVGTMIINKERHDFESKQTIKLPKEEWVYVENALPPIVTQEEWDLICKIHEERVIATGSDRRGKKTSGYSFSGKLVCGICGAPYWRKQRVSKDEYWVCSTKQTKGRRTRKRDSTMGKAGEINPLGCDNENISYNSLMEIMGVVSERLQANTDTIKQDMINWLTKLRKQLIEANGGHTEADLQRELSRKSKLLDAYLDGILNKQEYQTKAEELDERIIQLKAETEKNKANSGDIAEIDKVLANIDEEVSRYVDGNEKLKVEYLLEHLEQVQIFPDKVIVIVPILSEGIVVEKTQYVSREKR

SEQ ID NO: 9851 - protein, 542 aa, Unknown
  Description of Unknown: Integrase B9852 sequence
  cd00338,PF13408,IPR011109,IPR038109,PF07508, Coil,PS51736,G3DSA:3.40.50.1390,IPR036162,IPR006119, PTHR30461,PTHR30461:SF3,IPR025827,PS51737,PF00239, SM00857,G3DSA:1.10.10.2600,SSF53041
MPYCIYLRKSRADLEAESHGEGETLARHERTLLELARKQKLNVTEIYREIVSGDTIAARPVMQRLLSEVEQGIWTGVIVMEVERLARGDTIDQGIIAQTFKFTNTLIVTPLKTYDPRNEFDEEYFEFGLFMSRREYKTINRRLQRGRIAAVKEGKFAASVPPYGYERVKLRSEPGYTLSPVPDQADVVRLIFDLYVNGEKQPDGSTLRLGVSLIARKLNALGIPSATGGKWSPVSIRDMINNPAYVGRIRWNWRRTKKKMVDGEVVFSKPRNPRQECLEVKGLHPALVDEDTWDKAQIIMAEVPPAPVGAKSSVKNPLSGLVVCAKCKHKMVRRPYSGKHASQPPSLICSVSYCDNVSAPLHLVEEAVLDGLAAWAADFVIQWPNDEDDRSEVSGVKSRERMLSKQRSELSSLQKQLDAAHDYLEQGVYTVDTYLERSRTLSLRIAECRNSVSALEEEVEKLRANVGTCERLVPKINSLLEVYHSIDDPAARNKLLKEVLYKVEYLKTVNGRWHNDPADFTIVLYPRIPGAEGFVRGVNEPE

SEQ ID NO: 9852 - protein, 542 aa, Unknown
  Description of Unknown: Integrase B9853 sequence
  cd00338,PF13408,IPR011109,IPR038109,PF07508, Coil,PS51736,G3DSA:3.40.50.1390,IPR036162,PTHR30461, IPR006119,PTHR30461:SF3,PS51737,IPR025827,PF00239, SM00857,G3DSA:1.10.10.2600,SSF53041
VKKKKEVAAGSVPAVIYARYSSSGQREESIEGQLRDCREYAKKNGLLVVGEYIDKALTGRTDKRPDFQRMLRDSERGAFKVVICWKMDRFARNRYDSAMYKYKLKKSGVRLVYAMESIPEGPEGIILESVMEGYAEYYSENLSQNVKRGYYDSALELKTLGQTVLGYRKGADGRFEIDPATAPVVRRIFEEYAAGERAKDIYERLNEEGYRTTRGGKFNKNSIRRILQNEKYVGVYEFKDIRVENGIPAIVSRELFEECGKMVEKHHRAPAAKRDESFLLTAKIFCGECGEPMTGDAGTSKSGAVHYYYICNGRRRHTCKKERVRKNEIEEAVVSELVQLIHSDDFIEKVADLAMEYQEREKDTSALKALEARQKDIEKKIENVLRAIEDGIVTASTKTRLMELEAERADIEKGIAKELIATPELDRDQIVFFLERFRDGDAKDERYREFLVDTFLQAVFVYDDRLVITLNYSGQNNKVTKSLADKAASGEGSGCSCLAPSGALNGADLNTAPIRIFWIQKVIGVVAPYDRKIQEQKKRARV

SEQ ID NO: 9853 - protein, 542 aa, Unknown
  Description of Unknown: Integrase B9854 sequence
  cd00338,PF13408,IPR011109,IPR038109,PF07508, Coil,PS51736,IPR036162,PTHR30461,G3DSA:3.40.50.1390, IPR006119,PTHR30461:SF3,PS51737,IPR025827,PF00239, SM00857,G3DSA:1.10.10.2600,SSF53041
MKITAPARSARAVSLEAFVDNLNLANVVIYARYSSAGQNDQSIDGQLAKCREYAQQRGYRVVGEYCDRALSGRYAETRPEFQRLIADSAKRAFDFVLVWKLDRFSRDRYDSAIYKKKLRTNGVRVLSVTEGVGDSSESVLLEAILEAMAEEYSRQLAQNVRRGMRQNAEKGLSLGGLAPLGYRVVNKQYEINEDEARIVRFIHEQYADGAGQKQIVADCARLGYRNQRGNPLTLASVKRILANERYVGRYDYLGEIVIEDAFPAIVSKDLKKRVRDRLKANAKAPGHAKAKVEYLLHGKLFCGECGAPMIGECGRGRHGATYYYYTCAARKKQHTCKKRNERKDELEASIVDYIGSCVLTDSWIDGAAERVVAEYQKSYDASGIKPLEKQIRDADKEIDQLVDALISATAEAARRRINERIETAEARKQALEADLASLRIASRVQIKKEDIVVWLNQFRTGDRSDLEYHKKVIDLFVNAIYLYDDSFKLFLNVADSAQVTYADALALAPPSVSDFGASGVPDMHLSEHIIFINGVIGMIVQR

SEQ ID NO: 9854 - protein, 542 aa, Unknown
  Description of Unknown: Integrase B9855 sequence
  cd00338,PF13408,IPR011109,IPR038109,PF07508, Coil,PS51736,IPR036162,IPR006119,G3DSA:3.40.50.1390, PTHR30461,PTHR30461:SF3,PS51737,IPR025827,PF00239, SM00857,G3DSA:1.10.10.2600,SSF53041
VKKKKETAAGSVPAVIYARYSSSGQREESIEGQLRDCREYAKKNGLLVVGEYIDKALTGRTDKRPDFQRMLRDSDRGAFKVVICWKMDRFARNRYDSAMYKYKLKKSGVRLVYAMESIPEGPEGIILESVMEGYAEYYSENLSQNVKRGYYDSALELKTLGQTVLGYRKGADGRFEIDPATAPVVRRIFEEYAAGERAKDIYERLNEEGYRTTRGGKFNKNSIRRILQNEKYVGVYEFKDIRVENGIPAIVSRELFEECGKMVEKHHRAPAAKRDESFLLTTKIFCGECGEPMTGDAGTSKSGAVHYYYICNGRRRHTCKKERVRKNEIEEAVVSELVQLIHSDDFIEKVADLAMEYQEREKDTSALKALEARQKDIEKKIENVLRAIEDGIVTASTKTRLMELEAERADIEKGIAKELIATPELDRDQIVFFLERFRDGDAKDEQYREFLVDTFLQAVFVYDDRLVITLNYSGQNNKVTKSLADKAASGEGSGCSCLAPSGALNGADLNTAPIRIFWIQKVIGVVAPYDRKIQEQKKRARV

SEQ ID NO: 9855 - protein, 542 aa, Unknown
  Description of Unknown: Integrase B9856 sequence
  cd00338,PF13408,IPR011109,IPR038109,PF07508, Coil,PS51736,G3DSA:3.40.50.1390,PTHR30461,IPR006119, IPR036162,PTHR30461:SF3,PS51737,IPR025827,PF00239, SM00857,G3DSA:1.10.10.2600,SSF53041
MKITAPARSARAVSLEAFVDNLNLANVVIYARYSSAGQNDQSIDGQLAKCREYAQQRGYRVVGEYCDRALSGRYAETRPEFQRMISDSAKHAFDFVLVWKLDRFSRDRYDSAIYKKKLRANGVRVLSVTEGVGDSSESVLLEAILEAMAEEYSRQLAQNVRRGMRQNAEKGLSLGGLAPLGYRVVDKQYEINEDEARIVRFIHEQYADGAGQKQIVADCARLGYRNQRGNPLTLASVKRILANERYVGRYDYLGEIVIEDAFPAIVSKELKKRVRDRLNANAKAPGHAKAKVEYLLHGKLFCGECGAPMIGECGRGRHGATYYYYACAARKKQHTCKKRNERKDELEASIVDYIGSCVLTDSWIDGAAERVVAEYQKSYDASGIKPLEKQIRDADKEIDQLVDALISATAEAARRRINERIETAEARKRALEADLASLRIASRVQIRKEDIVVWLSQFRTGDRSDLEYRKKVIDLFVNAIYLYDDSFKLFLNVADSAQVTYADALSLAPPSVSDFGASGVPDMHLSEHIIFVNGVIGMIVQR

SEQ ID NO: 9856 - protein, 542 aa, Unknown
  Description of Unknown: Integrase B9857 sequence
  cd00338,PF13408,IPR011109,IPR038109,PF07508, Coil,PS51736,G3DSA:3.40.50.1390,IPR036162,IPR006119, PTHR30461,PTHR30461:SF3,PS51737,IPR025827,PF00239, SM00857,G3DSA:1.10.10.2600,SSF53041
VKKKKEVAAGSVPAVIYARYSSSGQREESIEGQLRDCREYAKKNGLLVVGEYIDKALTGRTDKRPDFQRMLRDSERGAFKVVICWKMDRFARNRYDSAMYKYKLKKSGVRLVYAMESIPEGPEGIILESVMEGYAEYYSENLSQNVKRGYYDSALELKTLGQTVLGYRKGTDGRFEIDPATAPVVRRIFEEYAAGERAKDIYERLNEEGYRTTRGGKFNKNSIRRILQNEKYVGVYEFKDIRVENGIPAIVSRELFEECGKMVEKHHRAPAAKRDEPFLLTTKIFCGECGEPMTGDAGTSKSGAVHYYYICNGRRRHTCKKERVRKNEIEEAVVSELVQLIHSGDFIEKVADLAMEYQEREKDTSALKALEARQKDIEKKIENVLRAIEDGIVTASTKTRLMELEAERADIEKGIAKELIATPELDRDQIVFFLERFRDGDAKDERYREFLVDTFLQAVFVYDDRLVITLNYSGQNNKVTKSLADKAASGEGSGCSCLAPSGALNGADLNTSPIRIFWIQKVIGVVAPYDRKIQEQKKKARV

SEQ ID NO: 9857 - protein, 542 aa, Unknown
  Description of Unknown: Integrase B9858 sequence
  PF13408,IPR011109,IPR038109,PF07508,Coil, PS51736,IPR036162,IPR006119,PTHR30461,G3DSA:3.40.50.1390, PTHR30461:SF3,IPR025827,PS51737,PF00239,SM00857, cd03768,G3DSA:1.10.10.2600,SSF53041
MPPVPRVALSGVALYCRVSGDEQRERQTIKTQVEFGQRMADLQGVSLVDVFADDGVRGVVPFGERPEGARLLREARAGRVTQVWLYKLDRLGRAIRVILAAVDQLEEAGCTVRSLTEPFDTSTPAGRFQLTMMAGAAELERDNIADRTREGIERAARNGVWLSSERLYGYQIAGKGRHATLVVDEVEAEVVRLIFRLYVEQDLSCESVADYLNAAGIPTMYAAGSRIERTSGRPTSGRWSEGRIHNMLKTRAYCGTHEWGKESKAPGREIIRRPVPALVDVEIWERAQEVMDKRRTYALRSSRHSYLLRGLVWCGCCGRPYYGSTLGGYRYYRCQAKQPGRCTEPTTLCPSKSLPGSVEEEIWSDIEGFLRNPAPVVEELRGILAAQGETQFDRTKELQQIETAVAANAGERARVLTIYRKGWINDDDLESQLAAIEKEENALAVQREHTRRQVEAVTEARERLLQAGGLLQTLGTRLGEEISFEEKRHLVERLVERIDVETHGTGRAAKALVRVRYCFQAAPETGASCFSDNSLVARSGSP

SEQ ID NO: 9858 - protein, 541 aa, Unknown
  Description of Unknown: Integrase B9859 sequence
  cd00338,PF13408,IPR011109,IPR038109,PF07508, Coil,G3DSA:3.40.50.1390,IPR036162,PTHR30461,IPR006119, PS51737,IPR025827,PF00239,SM00857,G3DSA:1.10.10.2600, SSF53041
MAYRKITDIKDTIGMRAVFYARVSTAEEEQLNAIELQIEENRGCIKDHGWKLVGEYIDRSKSGTMVKGRDDYQRLYEDLYEDLFDIVVIKDQERLQRNTLDWYLFINRVVQTGKLLFMYMDGKFYSPDDALITGVRAIIAEEFSRNLSKKLHNYHDHRIEKARQGQEIALQGSGNVYGWDKKDGKYYINPEQAKVRRLMCEGIMARKGSTLIAKELNDAGYRNTVGKPWKPMDIPKFVYDCKNVGTMIINKERHDFESKQTIKLPKEEWVYVENALPPIVTQEEWDLICKIHEERVIATGSDRRGKKTSGYSFSGKLVCGICGAPYWRKQRVSKDEYWVCSTKQTKGRRTRKRDSTMGKAGEINPLGCDNENISYNSLMEIMGVVSERLQANTDTIKHDMINWLTKLRKQLLEANGGHTEADLQRELSRKSKLLDAYLDGILNKQEYQKKAEELDERIIQLKAETEKNKANSGDIAEIDRVLANIDEEVARYVDGNEKLKVEYLLEHLEQVQIFPDKVIVIVPILSEGIVVEKTQYVSREK

SEQ ID NO: 9859 - protein, 541 aa, Unknown
  Description of Unknown: Integrase B9860 sequence
  cd00338,IPR011109,IPR038109,PF07508,Coil, G3DSA:3.40.50.1390,IPR036162,IPR006119,PTHR30461,mobidb-lite, PTHR30461:SF3,PS51737,PF00239,SM00857,G3DSA:1.10.10.2600, SSF53041
MYNSKIELLTIDGIYIYLRKSRSDDPSLTVEEVLEKHEMRLQEWAMQNFDAKIPEENILREVVSGETIDDRPEMLRLLSIIESPKAQAILIVEPQRLSRGDLEDAGRIIKMFRYSNTLICTPPKTYDLRDEYDRDNFERELKRGNEFLEYQKKIMNRGREQSVKQGNFIGSIAPFGYKKIVVMEGKKKCHTLEIVEEQAEVVRMIFDMYVNQDMGRVNIAKHLNDLNIKSAKGGLWKQDAIKDLLENEHYIGKVRWNWRKTVKVVEDGEIREKRPKTEIGEYLVYDGKHESIISEELFYAARDKQGRNHRAKPKTRVRNPLAGLVYCQCGRAMSLRTYKNKGVERCAPRLLCDNQAYCGTSSCLYDEILQRVCDVLEQCIEDFEIRIKNNDDDSIKHHATLVKRLKAKLDELHKKELSQWEKYTEEGMPKHVFDALNEKVLKEKEEVQEALCKAAASIPERIDYEEKILRFKDALEALQDPVVPAATKNKFLKACIERIDYKREKAQRLKRAPGQKKGTAFESSGGRWTNPPIELDIKLRL

SEQ ID NO: 9860 - protein, 541 aa, Unknown
  Description of Unknown: Integrase B9861 sequence
  PF13408,IPR011109,IPR038109,PF07508,Coil, PS51736,IPR036162,IPR006119,G3DSA:3.40.50.1390,PTHR30461, PTHR30461:SF3,IPR025827,PS51737,PF00239,SM00857, cd03768,G3DSA:1.10.10.2600,SSF53041
MRIAIYSRKSKFTGKGESIGNQVEMCRDYIATNYNGEEHSIQVFEDEGFSGKNLDRPQFKKMIEIENVIPFDLIVVYRLDRISRNVGDFASLIEKLNKKNTSFVCVKEHFDTGNSMGRAMMNIAAVFAQLERETIAERIKDNMYLLAKEGHWLGGTTPLGYKSIEGTNGKRTHFELIIDESQIDLVNIIFSKYKQLGSINGVETYLFVNGYKTQKNNYWHKSNVKRILTNPIYCIADIDSLNYFTELGCNVCFTLDDCNGKKGIYPYNRFSGQKREMQSYDRWIITISEHQGILAGKEWVAIQQQLKANSKDGFGGKANERRSTNNTSLLSGVLFCSCGAYMRPKKYPSGNTFYICENKMDKKITECNNSNINADELDKIVLNELFSFDIKDGVVDSQIQNLKEQIANVDSDLQKQIGRLKKQIETNKNTVNKFMNIVALSIENDTPEQVVEVYNQKINELLNQNKITQKRIDELQDTNIVQTKMTNRLNSLTDAIVYLKENFDKLTIVEKRGFVKEIVDRIVWDGKNINIFIKGISELSE

SEQ ID NO: 9861 - protein, 541 aa, Unknown
  Description of Unknown: Integrase B9862 sequence
  cd00338,Coil,PS51736,IPR036162,PTHR30461, IPR006119,G3DSA:3.40.50.1390,PTHR30461:SF3,PF00239,SM00857, cd03768,SSF53041
VSTREQAENGVSIETQVAKCAYYARAHSLMLSDKSNCGTPGVFVDAGESAWKKSSLAERPGGMALLENLQRGDHLIVTTPHRLFRNLTEMLIQIKVWEEAGIVFHFVDLNMRLDQPSGRLMFHMLGAIAEFKSALRSARLKESYLWRKSKGKRALEKIVIETPRGSGSPLELNGRRIAGVSHRETLPSPFADTADHGVAMIAADLIQKRICPESREVTGVIRAYIRVSTNDQTAASQRLLINRYIQNTPELAKLKIEWYDDTGFSAYRTNFDKRPSGGQVMRVLKPGDVLLTVRIDRVCRSISNLSYLVDSVEAKGATLAIIDNGIRTDTPMGRMMVKLLSFAAELESYELDISSNAAVRQNIMKTGKVCGKIIPGCLLYQNKYDLSRTSFAMTEDQWWEFWMGWYRGHKKMMHKATEGQLVRFAVEWNQEFAKKMGWPVPKPKWRRTFVDFGKVTDAIEEAERMQEEHHTIEREQFITAMRRRRQGACWAGVFCAKHASRAFRRISKWVAYFTPDAAIASHPMGTEILSASERLQALAAG

SEQ ID NO: 9862 - protein, 541 aa, Unknown
  Description of Unknown: Integrase B9863 sequence
  cd00338,PF13408,IPR011109,IPR038109, PF07508,Coil,PS51736,IPR036162, IPR006119,G3DSA:3.40.50.1390,PTHR30461,IPR025827, PS51737,PF00239,SM00857,G3DSA:1.10.10.2600,SSF53041
MKKQQQRTQEPPQDVAVIYARYSSSRQRDVSIDQQVSACRAYADQQGWKVLRVYADHAITGTTDQRPSFQQMIRDASALAWSKVIVYAFDRFARDRYDSAVYKHALKECGVRVLSVTEQVTDDPAGVLMESIFEGFAEYYSRELQRKIRRGLRYNAENCIASGSHTIPLGYDRGPDGRYRINPAEAALVQEAFRRYGAGETMAAIARDFNARGITTKRGKPWSRSSFHALLKNERYTGVFIWKDVRVEGGVPVIIDREDFDRVQRRIAAEAENRLDRRDRGHGLYVLTGRAVCGLCGCGLTGVSGTGRHGDRHAYYYCSGRRKGTGCELKPVPRDQLEGLVARAVLELVLTDDTIEWMAEYAAAHQRQEDTDAEISRTQDALKANKKAAGNILTAIEKGIYTDTTADRLRELEAEAHLLEARLCELQSTIADTFTAAEIKAALQLLREGELSDPDYQQALIDAIVRAVSYDGRTLLITLTYGKPGAAQLQLPVKLEDLEASTEDKIRVCLEGREWGCLPPNQTPVLYAVPGGFVLALRLAA

SEQ ID NO: 9863 - protein, 541 aa, Unknown
  Description of Unknown: Integrase B9864 sequence
  PF13408,IPR011109,IPR038109,PF07508,Coil, PS51736,IPR036162,PTHR30461,IPR006119,G3DSA:3.40.50.1390, PTHR30461:SF3,PS51737,IPR025827,PF00239,SM00857, cd03768,G3DSA:1.10.10.2600,SSF53041
MRIAIYSRKSKFTGKGESIGNQVEMCRDYIATNYNGEEHSIQVFEDEGFSGKNLDRPQFKKMIEIENVIPFDLIVVYRLDRISRNVGDFASLIEKLNKKNTSFVCVKEHFDTGNSMGRAMMNIAAVFAQLERETIAERIKDNMYLLAKEGHWLGGTTPLGYKSIEVTNGKRTHFELIIDESQIDLVNIIFSKYKQLGSINGVETYLFVNGYKTQKNNYWHKSNVKRILTNPIYCIADIDSLNYFTELGCNVCFTLDDCNGKKGIYPYNRFSGQKRETQSYDRWIITISEHQGILAGKEWVAIQQQLKANSKDGFGGKANERRSTSNTSLLSGVLFCSCGAYMRPKKYPSGNTFYICENKMDKKITECNNSNINADELDKIILNELFSFDIKDGVVDSQIQNLKEQVANIDNDLQKQIGRLKKQIETNKNTVNKFMNIVALSIENDTPKQVVEVYNQKINELLNQNKITQKRIDELQDTNIVQAKMNDRLNSLTDAMTYLKENFDKLTIVEKRGFVKEIVDRIVWDGKNINIFIKGISELSE

SEQ ID NO: 9864 - protein, 486 aa, Unknown
  Description of Unknown: Integrase B9865 sequence
  cd00338,PF13408,IPR011109,IPR038109,PF07508, Coil,PS51736,G3DSA:3.40.50.1390,IPR006119,IPR036162, PTHR30461,PS51737,IPR025827,PF00239,SM00857, G3DSA:1.10.10.2600,SSF53041
MKKRAVAYIRVSTASSAQLHSYEFQEQYWQDRFEGDPNIELTGIYADRGISGSSIHKRPQFLVMMEDARQHKFDVIYVKSVSRFARNTVQLLEAVRELRDIGIEVIFENENISTFQPTSEIFLTIAATVAENDLQVDSDRMRWSIRHRYENGWISIGSKIYGYRMTKDNTLEIVPEEAAVIRRIYEMYVGGAGCCAIADTLNDEGYRASGGNIWQHQVILAILTNEKYMGDAMMGKSVYHLGIKHNNMDGTYGKRYYMEDTHEGIVSKELWYKAQEVRVQRTNKKTVGVPRPIYALTSLIECGQCGTHFQHKVNNSGKKWASDIWVCGAKLRYGVKRCDCTSIKDSVLKEKFVEAYNEFVTKRPQGESAIILQRAIERLKREERELSELRMQRLIPESAFREEQKRIKAQIAGLNARYAEQRTKVVRESDFTLITEYSDEKVEKFITRIKIHKGVITFTFYNGVEISRKYSNGQPGNKVGWNKKEA

SEQ ID NO: 9865 - protein, 541 aa, Unknown
  Description of Unknown: Integrase B9866 sequence
  cd00338,IPR011109,IPR038109,PF07508,Coil, PS51736,G3DSA:3.40.50.1390,IPR006119,IPR036162,PTHR30461, PTHR30461:SF3,PS51737,PF00239,SM00857,G3DSA:1.10.10.2600, SSF53041
MEKAIIWVRVSTNQQDIEDQRRECYQMAYADGWTDDNIIELGAKGASARMHGKAMSAEYINQLNKLLNYIKNDPDVKALYIWELSRLARVYMYLINVVEYCKINGVQFVCKNPNIRLLDINGNVDNNADITITVVGKLAAQEMDIKIARMKRGKNANTEKGLATGNKRMYGYDIVNKQYVINEAEADIIRTVYRTYLESKGGYNDTVNELNRIGINLNRNQIVYILQKEAYTGSMKMKSGLTKPYPQIITKELFEKVRQKREGRDIIKDKSRKYYLCTFMLKCPHCGAMLKTMNGKSYQCCRCKKLYAPMYAADTILWDVATKTRANILAGDAKKIKADIEATNEELAMEIKGLELSKEKTNRKLKARQRLFLDGEITETEYDEGKLKIEAERATINTQIEAINDRIKANNKRMATITENDADTLKLYERLHISEEMDLTTTNWREMYNIIRTYIKVGNCSYVRLKKLNSDWLMVEGENERYRALRIDVETINDRKCTYYYLSPKGNQKDLRKPKYLYLSDDGLVKPMHFYIEIPKRMPIT

SEQ ID NO: 9866 - protein, 541 aa, Unknown
  Description of Unknown: Integrase B9867 sequence
  IPR038109,PS00397,IPR006119,PS51737,PF00239,G3DSA:3.40.50.1390 ,PTHR30461,IPR025827,SM00857,G3DSA:1.10.10.2600, SSF53041,IPR011109,PF07508,PS51736,IPR006118, cd00338,PF13408,Coil,IPR036162,PTHR30461:SF3
MTDKTAIIYARVSSAKQAEEELPISSQIEQCRKKAESLGANIIKVYSDEGISGSSDKRPAFQDAMLFCEIEPPTYLITWSSSRFARNKVDAGFYKKRLATANVKIMYVSMEVDTDTTGGWLLDGVMEIFDELYSRQVSADTRRSLIKNAKDGYWNGGRVPYGFIAANDVENPKRKRLAHNPDEVDVVRKIFDLKMNENMGGKSICIWLSENGYKYRGSTWKVSTVQSLLRNKLVIGKTTFGKRDSNRKIRPKEEWIIVDSHKPIIDSVTWDTVQKIMDSQTDPESNGSPKSLHTFTGLLTCGQCGSSMHTESAKGKLKRFYYYNCSAAAKYKKHKPRRINSDAMDKWLLQVICETIFSEENLTEIINSLFDIAGTWLYEKNKRLSSAESRLLSLKQKQNNLYDLLELHGLDAPNLGDLSERLKNNNEKAKIIEQEIAIIDAETPPVIEKASKSTIREVSKFLTELIITMENPKKVRALLGTFIESIVLKDTYITVNYNPNSLIDRTSAGVLSDVVWLPEQGLLGTLSVKFRLPSTFHKKAA

SEQ ID NO: 9867 - protein, 541 aa, Unknown
  Description of Unknown: Integrase B9868 sequence
  cd00338,PF13408,Coil,G3DSA:3.40.50.1390,PTHR30461, IPR006119,IPR036162,IPR025827,PF00239,SM00857, SSF53041
MSTSVGIVYSYLRFSDPRQAAGHSADRQAQYAKSWAAERGLALDESLSLRDEGLSAFHQKHVKQGALGVFLRAVDDGLIPVGSVLIVEGLDRLSRAEPIQAQAQLAQIINAGITVVTASDGREYNREKLKSQPMDLVYSLLVMIRAHEESDTKSKRVKASIKRQCEDWINGTYRGLIRNGADPHWVRLVEGKWELIADRAEVVQFAIDKYLAGYGADRTHSLLQANGYDTSLVGASPQQIYRLIKLVSLKGAKQISIDGEEFLLKDYYPRLIDEQQFDELQLLRGNRSRRRGKGAIPGVVTGIGITYCGYCGTSMTAQNLMHKLRDDGTLSDGRRRIMCTSYMSRGGCNVGGSCSVAPVERAVMSFCADQLNLSRLQEPAGPRGDLHVSLTESRKKVADLERQLSRITEALALGESDGVLPMTFLRKARDLEAMLDAARTDERRIEREIAGVAARQKPGDAKLWSDLASGVEAQQVEPRDKMRQLMLDTFERIVIYMRGVVPEGRGAKYIDVLLISKAGQRRWLRVEKKTGSWAAAIDRPL

SEQ ID NO: 9868 - protein, 541 aa, Unknown; identical to SEQ ID NO: 9706
  Description of Unknown: Integrase B9869 sequence
  cd00338,PF13408,IPR011109,IPR038109, Coil,IPR036162,PTHR30461,IPR006119, G3DSA:3.40.50.1390,PTHR30461:SF3,IPR025827,PS51737, PF00239,SM00857,G3DSA:1.10.10.2600,SSF53041

SEQ ID NO: 9869 - protein, 541 aa, Unknown
  Description of Unknown: Integrase B9870 sequence
  PF13408,IPR011109,IPR038109,PF07508,Coil, PS51736,IPR036162,IPR006119,G3DSA:3.40.50.1390,PTHR30461, PTHR30461:SF3,PS51737,IPR025827,PF00239,SM00857, cd03768,G3DSA:1.10.10.2600,SSF53041
LKIDAFYGRNSTDEQAEKGTIEAQVDYANKYFDLNETTGFEMYLDEGTSGTIALEKRENASRMLNDVKIGKIGAVYVYRLDRLARSVKHVLDTYEFLEAYNVRLISMTEAFDTGTPTGKFFMTLLASIAALERDTILERTQMGKDRNAKAGKWVSGAPPFGYRIGDDGKLVIYEPEAETVKLVFKLYSEEMTMFELAKYLNAKGVETPATSKGTKNASTGKWHAGHISIILKTEAYTGVYNYLQRSKRNRETIEVDVPALVDIQTFNAIQKKILANADNARGKRGRLYLLRGVIFCGHCGRSMIGNSGGTNRAYYRCTGTTDQGQGKRCTAKQIKATLIEDAVWSDILEIVKKPEQIKKYVDRSVAKGKESVAPVVNELSEVEEALIKKQKAKEKILSLINRGIISDEDAEKELKSISIEIRSLNSRKEQLFEQQEKSKSVEAEVINSQVLFDFILKQSEILDKKVKARVIRGLVKKVEVLTIEQENGKRGNRAVISYRLGRSLELGISGDAISQTTLYYIESTWEFQAFSRGDGLRVKWH

SEQ ID NO: 9870 - protein, 540 aa, Unknown
  Description of Unknown: Integrase B9871 sequence
  PF13408,IPR011109,IPR038109,PF07508,Coil, PS51736,G3DSA:3.40.50.1390,IPR006119,IPR036162,PTHR30461, PTHR30461:SF3,PS51737,IPR025827,PF00239,SM00857, cd03768,G3DSA:1.10.10.2600,SSF53041
MQRKDLIAYSELILGIPDYEIFEDAGYSGKNTDRPAFQDMMARVRQGEFSHVLVWKIDRISRNLLDFSQMYRELQSLRVTFVSKNEQFDTSTAMGEAMLKIILVFAELERNMTSERVTATMISRASQGQWNGGRVPFGYDYDPETSTFSIREDEAAVCRILKDDYLKYRSLVHTSRLLNERGFVTRAGAEWSPTAVWIIAQSPFYAGVYRYNKHKGTERRVLNPEDEWVLVYDHHPAIFTLEEHTRMNEIRDTNARSFNAVGKAKSTNMVYVFGGICYCGKCGSRMSAAPGKLHADGYRSANYLCPKRRKTSECDNATVSDIVVGEFVVNYILNIINAKRSFSGVGSPEELEHRLLRGSTFAEVERIEQDGLNELYNLLSRYGSDGSFSFATKKPKNRAAVSPEVEALRREKEKQERALKRLQELYLYSDRAMSEKDFIIRKKEITARIDEVGNRLGLISRSETGTLSDEDFIRQASHLLIVSKLKDKEYVYYRGLASNTSPEVLKEFIQSIVDSIYLSDGRVSRLVFKNGLTHSFLWRA

SEQ ID NO: 9871 - protein, 540 aa, Unknown
  Description of Unknown: Integrase B9872 sequence
  PF13408,IPR011109,IPR038109,PF07508,Coil, PS51736,IPR036162,IPR006119,PTHR30461,G3DSA:3.40.50.1390, PTHR30461:SF3,PS51737,IPR025827,PF00239,SM00857, cd03768,G3DSA:1.10.10.2600,SSF53041
MKEATAKRVALYVRVSGTEQAERGTVETQLEFLKNYARLHSWEIIETYRDEPVSGSSVVADRPDGGRLLRDAQRGRFEAVLVYKLDRLARSVYQLHEALQVLDAAGVAFLSATESFDTATPYGRVILNLMAAFAEWERDLISERSHEGRKRNAREGRWPGGPPPLGYRVEAGVLVVDQEPIAGQAYSEAALIERIFTDVAAGTLSVRKLAVQLNTERVPTGQACNYPRHKTGKHLPAGWLDTSLRRILRNPVYRGEMVYGKGKSGAIAAAAPAIVTPSLWYAAQAQLANNAKFSARNSKRVYLLRGLIHCEECGRVMSGFTPSRDAEQRRYYACRGRYDPLARAAHGQPCRTPYLAAEALEEQIWADIVCYAENPQKALAELARDLEARRGQQETLQAEVDHLTSLLKAVDDHRRRALSLFIRGQVDEREKDLLLAEIEAEATALEERATVKRALLSACGEQAAQFTMAEQLLARFKAIVHRPGLTPTERQQIVRGAVLSIEARTNGDAAVRYVFDRIEHTACSNRVSNWAGFEVIYQRK

SEQ ID NO: 9872 - protein, 540 aa, Unknown
  Description of Unknown: Integrase B9873 sequence
  cd00338,IPR011109,IPR038109,PF07508,PS51736, G3DSA:3.40.50.1390,IPR006119,IPR036162,PTHR30461,PTHR30461:SF3, PS51737,PF00239,SM00857,G3DSA:1.10.10.2600,SSF53041
MYNNKIEFEYSEIIIYLRKSRSDDPNLSVEEVLARHEAKLQEWAMQQFGKEIPEENILREIVSGETIDDRPEMKRLLAMIESPKIKAILIIEPQRLSRGDLEDAGRIIKLFRYSNTLICTPPKNYDLRDEYDRDNFERELKRGNEFLEYQKKIMRRGREQSVKEGNFIGSIPPYGYNKTTIMEGKKKCYTLEIREDEAEIVRMIFDMYVVQDMGRVSIARYLNDLGIKAKKGGLWAQDAIKDMLENEHYIGKVRWNWRKTVNIVEDGEVRKVRPKTEIGEYLVYDGKHEAIISEELFYAAREKQGRNHRAKPTTKIRNPLAGLLFCRCGRAMSLRTYKKEGVERSAPRLLCDNQAYCKTSSCLYDEIIDRVCIALEQCIEDFEIRIQNNNEDSTKHHATLIKRLKMKQEELNKKEIAQWEKYTEENMPKHIFDTLNEKVLSEKEEAQQALCKAYESMPDPVDYEEKMYKFKDALEALKDPEVDAAKKNKFLKACIERIDYSREKAERLKRPEGVKKGQHFESTGGRWSAPNIELNISLRL

SEQ ID NO: 9873 - protein, 494 aa, Unknown
  Description of Unknown: Integrase B9874 sequence
  cd00338,PF13408,IPR011109,IPR038109, PF07508,PS51736,G3DSA:3.40.50.1390,IPR006119, IPR036162,PTHR30461,PS51737,IPR025827, PF00239,SM00857,G3DSA:1.10.10.2600,SSF53041
MGKPKKRVVTYVRVSSSSKAQLHSYEFQEEYWRGRFEDDPEMELISIYADRGISGSSVYKRPQFLTMMQDARDGKFDVVYTKSVSRFARNTVQLLEAVRELRDLGIEVVFEKEQISTFQPTSELFLTIAATVAENDLQVDSERQKWSVRHRFENGWICIGCGMYGYTMTEDNNLVIVEDEAKVIRRIFDMYLKGVGLSTIAKTLNEKGIRNFVGHAWRPTSVSLILDNEKYMGDSMMGKSTTIDGIRYDNMDGKYGKRYYMEDTHEGIVSKEVFNQVQQMRLARRNYKLYRQKRPEYPFTGVVECGECGKHYQHKVNNSGKKWRTDVWVCATQLKTSVADCGCNRLKDTVLREKFMEAYNEFVINRPQGADVDMLQQVISTLWQEERELAGLYVQRLIPESAFRTEQRRIKMQIAENTAKIEELRGKTVRESDFGIIAEFDPDKVEKFITKVIVRKGTVTFVFYNGVEITKPFTNGPAGNQKGWMQKKEAAACQ

SEQ ID NO: 9874 - protein, 540 aa, Unknown
  Description of Unknown: Integrase B9875 sequence
  cd00338,PF13408,IPR011109,IPR038109,PF07508, PS51736,IPR036162,PTHR30461,IPR006119,G3DSA:3.40.50.1390, PTHR30461:SF3,IPR025827,PS51737,PF00239,SM00857, G3DSA:1.10.10.2600,SSF53041
MSSISRTIERSRTRKTAVAYARYSSNNQREESIDAQLRAIREYCEKENIELIEEFVDEALTGKNDDREDFQNMITKLLKGHIQADYVLVHKFNRFARNKFDSTLHKKKLRDIGVKVISVTQKIDDTPEGELLEGFLETIDQYYSANLATEVRKGLRENALKGKHAGGQVLFGYSLDDDGYYIPNENAKIVKRIFEEFALGIPKTEICERLNAEGYRNQRGKKFNTRTLYDLLRNEKYIGNYVYTIDKKETIRLDGIIKGHPINKELWNTVQRLCDESSETHGRQRSQKRYYYLTGKTFCSCCGEHICGNGSKRSGGKNGKLNYYYKCVGKTNHKNGCKNPSLNKDWFEPKVLKAVLDTVTNKEQVKEIAQMAYKEILEMRDEPVVSTAQLKKELAQIFKKQERLTDLYMDGDMSKEMLDNKNGELTRRRFQIEEELEKRKNILDADDIQVEDIENYIIQFIEDVKEDCESIDDEFMRIMLNVFVKRVDVSIEEVVVHIHTPFGRMDRGDSVCFGGVIQRLTPINLVQIFPRKTNVHGKNI

SEQ ID NO: 9875 - protein, 540 aa, Unknown
  Description of Unknown: Integrase B9876 sequence
  cd00338,PF13408,IPR011109,IPR038109,PF07508, Coil,PS51736,IPR036162,IPR006119,G3DSA:3.40.50.1390, PTHR30461,PTHR30461:SF3,IPR025827,PS51737,PF00239, SM00857,G3DSA:1.10.10.2600,SSF53041
MATKKKKIESGVGAIYARYSSHAQREESIEQQVEACMEKAKELGIEIIKTYSDKAISGKTDNRPQFQRMLRDAEKGKFQYLIAWKSNRLGRNMLNAMVNEERLNDSGVRCLYVEEDFDDTAAGRFALRSMMNVNQFYIENMAEDIQRGLRDSAKECKVISSIPFGYKKGEDKKFAINENEAPIVKEIFQRVANGEMFITIADDLNRRAIPTRRGGPWGKNSFQNMLHNEKYTGLYKYQDIEIPGGMPRIVSDTLFRTVQEVCTTKKNPSNNARRRTNNGMYLLTGKLFCGKCGAPMTGLSGTARNGALKFYYVCQNKRRKHTCDKDNVRRDVVEKAVAQAVREFILKDENLDWIADLAVEYSKTTVENSDLGLLYQELSSVEVSINNIMKAIEAGIFSETTASRLKELEAEQKKIKGKIVDAKETAIELSKDDILAGLMLFRDGDYEDQRFLMHLFDTFIKAVYVYDDNLKIVFSFTGDNTIVIPLDVENTKEDTTEEAQGVVRLSSLLVHSNRLKRTAKLLFYKGDFMLIVPFDEKVLD

SEQ ID NO: 9876 - protein, 540 aa, Unknown
  Description of Unknown: Integrase B9877 sequence
  cd00338,PF13408,IPR011109,IPR038109,PF07508, Coil,PS51736,G3DSA:3.40.50.1390,PTHR30461,IPR036162, IPR006119,PTHR30461:SF3,PS51737,IPR025827,PF00239, SM00857,G3DSA:1.10.10.2600,SSF53041
MSKNNAVIYARYSSSGQREESITGQLRECNAYAKRNGYTVINEYTDSALTGTSDKRPAFQRMIADAKTGNFSAVIVWKLDRFARNRYDAAMYRNELKKAGVRIVSAMENISESPEGIILEGLMESLAEYYSANLSENIKRGLYDSALERKMTFRTFGYRRGPDGRYEIDPVSGPIVRRCFEEYAAGKPMPAIIEDLNADGVRTAKGREFKRNSLRAMLRNEKYIGVYRYRDVYDEHGIPPIVTPELFEKVQKELAIRSKSYTKRKTKTGATYLLTGKLFCGHCLAPMAGDSARSRHGTVYHWYSCPNNRYKPKTCEKRRVPKDWIEAEVLRILNTEILTDEFIERAADAAVEYEKHFDNNSELESLRLELKQTEAKIKNVSAAIATGVITKTLPEMLADFERQREQIETAIAKKSAGVHEFSRDAVVAYLHELKALAHTDAGSQRQLLNACIKSIYVFDTDSPDELKLVINMNYFDNDAEISHSEIVRIVSAPLHLNVTTRTLVHGRRLLLIRTIKKPPAECTGGSSYPGGGLVPGFGKL

SEQ ID NO: 9877 - protein, 540 aa, Unknown
  Description of Unknown: Integrase B9878 sequence
  PS00397,IPR038109,IPR006119,PS51737,PF00239,G3DSA:3.40.50.1390 ,PTHR30461,IPR025827,SM00857,G3DSA:1.10.10.2600, SSF53041,IPR011109,PF07508,PS51736,IPR006118, cd00338,PF13408,Coil,IPR036162,PTHR30461:SF3
MKRAVIYARVSTERQADEGLSVESQIEACRRKAAELGAVVAHVYRDDGISGRTDARPGFRAAIHHCTAAGGIAYLVCWSSSRFARNQLDALTYKRELASAGVRLVYASNAIDLETTEGWLADSFSQIIDEAYSRQVATDTRRSMISAASEGYFMGGRVPFGYQAVPVEGTKRRRLQPHPDEAPVIREIFDHAARGIGAVAVAVMLNEQGRTLRGRPWGKSTVLHILKSEVYMGEVIYDRFDRKGKRQRPEAEWVRVKAHEPLVSAERWHEVQDGLAGREPKGGHVPGNNQHVFAGLLRCGLCGGGLKLTNGTGRNGTRYSYYACNSKVQGKGCQLRRLPADRFDSWALGELLDRVLTEENVQGVVDGLDKAAAAWVKDRAARRRALVAELRDAEGRRAKLYQVLEVEGPGAPGIHEIGPRLRELNEQIKRIDLALQALEDEQEPVVPQLATSPAEAAAVLRDLVLRCEDAKTLREFVASIVERVEVLEAEVRVDYHPECLIRSGGAVVHSTLNWLPVVGTLRTTCTLAIALPLEMLKRAA

SEQ ID NO: 9878 - protein, 540 aa, Unknown
  Description of Unknown: Integrase B9879 sequence
  cd00338,PF13408,IPR011109,IPR038109,PF07508, G3DSA:3.40.50.1390,IPR036162,PTHR30461,IPR006119,PTHR30461:SF3, IPR025827,PS51737,PF00239,SM00857,G3DSA:1.10.10.2600, SSF53041
MSEKTAVIYARVSDKKQVENDISIPGQIERGHEKALSLKSSVLQVFTDEGISGRSDNRPSFEAAIDFCEIYKVDYFICWSSSRFARNRFNAAIYKRRLDNCGTKLEYLTFSVDRDTDSGRLLDGFLEIMDEHKSVQTSKDTIRSLIRNAQLGYWNGGRPAFGFKVVPAEDNPKKKRLAVNNEESYVVKKIFELRCEGYGIRTIAQWLNENNHFNRSNTWKKNTIANLLNNMAVLGKTAFGKTSKTTGKKQPRENWIIADSHEAIITQELWDKAHSEMDNDNLNTRTSSSKSMYKFTGLLKCGECGAAMHTESAKGRTRRYWYYNCSASKLKKSHPPRRLPAVEIDDFLVECIVTNIFTRETLTGILTDLYDVSNRWLHDHSERRLSVLNSIKGIQKKLDNLYSTLELFGKDAPNLGDLTKRLRQHNTQIKVFEGKLNIIDKEEPPKVDVTDEDVTQLLEFLIKTIRESDDPKKVRMFFKTFIQNVVVESKSLKITYDPQRLVNRPEWTVPSTRIWLPERDLLGTKVIKLDLPEKLQKKAA

SEQ ID NO: 9879 - protein, 540 aa, Unknown
  Description of Unknown: Integrase B9880 sequence
  cd00338,PF13408,IPR011109,IPR038109,PF07508, Coil,PS51736,G3DSA:3.40.50.1390,IPR006119,IPR036162, PTHR30461,PTHR30461:SF3,IPR025827,PS51737,PF00239, SM00857,G3DSA:1.10.10.2600,SSF53041
LRAASYARYSTDKQRETSVEDQHRLNRQYAAREGWQLVAEYSDREIKGSTPVALRAGGKMLLADVLAGRIDVLLIECLDRLSRDSVEQEQVVRRCERRGLRIIGIADHYDSTAAGRKMTRKFRGIINEIYLDDLRAKVHRGLSGQIERGFYAGGLAYGYRSMPVDVDAQGNARGHRLEIVESEAAIVREIFARFASGESCQRIAAALNARGASGPRGGTWSVSAIYGTPRKGTGILNNELYTGRYVWNRSQWVTDPDTGRRQRLERPRAEWMIDERAELAIVEPALWERAKAAQVARSVPEGKRSKGRAPSTLLGGLMRCGLCGGALIAVNARAYGCGARKDRGPHVCAGLLVRRDLLEDRVIEAVTGLLLEPRWLAELQAMIAEELAESKREAKIGEGDRRRRRGEIEQEIANLVDALAKVGYSEAVHQRLVTLEAELERLQRAGSGKARIVVTDLAARYKREIDALAVLLRSDVQNARPALQEVLGEARLTPATPDKGFWAEIALRADRLLIAAAGDAYLGGGSGGPLSTPAIRVRII

SEQ ID NO: 9880 - protein, 540 aa, Unknown
  Description of Unknown: Integrase B9881 sequence
  cd00338,PF13408,IPR011109,IPR038109,PF07508, Coil,PS51736,IPR036162,IPR006119,PTHR30461, G3DSA:3.40.50.1390,PTHR30461:SF3,PS51737,IPR025827,PF00239, SM00857,G3DSA:1.10.10.2600,SSF53041
MAVSISYNADLKKAKGEPILAVIYARYSSHSQTEQSIEGQLAAAHAYARGHGYTVVREYCDRAQTGRNDNRDAFQRMLSDTDRHQFDVIITWKVDRIGRNREDIAFNKHRCKKNGVRIEYVAENLPDSAESVILESVLEGMAEYYSLQLSTNIRRGQLESAKKLQCVGGTRPLGYDVDRETKRYIKDEKTAPIVKQIFDRYAEGQTEKEIIDWLNEQGIRTTKKKPFSKSSLATLLHNEKYIGVYIYGDIRIEDGMPALVDRDTFDRVQELMKINRRAPSHTWTHAEYILTDKLFCGKCGSPMVGESGFSHTGAKHSYYSCVGKRKKKTCDKKPVRQDWIEGEVLKATREVLADEELLDWITDRTYAYYLATNGKEEERTILQKELAGVDTSIDRLVNAIEAGAFNDRIKSRLDDLNAQKAQITASIAEMELASGFRLTRDHIAFFLRQFRDADMEDRACQKRLIQTFVNAVFVFDDKIKIVYNYTEGNNTVTLDILPSELDGEGFVHSTECSTIPIRYEPGGIVIFGSTFMIIIENRAG

SEQ ID NO: 9881 - protein, 540 aa, Unknown
  Description of Unknown: Integrase B9882 sequence
  PF13408,IPR011109,IPR038109,PF07508,Coil, PS51736,IPR036162,PTHR30461,IPR006119,G3DSA:3.40.50.1390, PTHR30461:SF3,PS51737,IPR025827,PF00239,SM00857, cd03768,G3DSA:1.10.10.2600,SSF53041
MKAAIYTRVSTTHQIDKDSLRVQQRELLQYAELLLGTKECVVFEDAGFSAKNTDRPKFQEMMSRIRAGEFTHLLVWKIDRVSRNLLDFTNMYAELKALGVTFISKNEQFDTSSAIGEAMLKIILVFAELERNMTSERVTAVMQSRAKSGAWNGGRVPYGYSYDKETKEFSLNRQESLVVKKLFRTYEATKSIIATTRNLNEAGIRTRAGASWSTIGVHKILRNPFYIGTYRYNVHSPDGKHPEEEWTLIENHHVPLIEAAQFDRVQEILSRNQKLNPDDVNYFSPHIYIFHGLCFCGHCGSKMTPNSCKPTKYGHASATYGCAKRRSKASYCSNRYLNEEILADFVFTVIHNLLSVSAEPPSEGSLFALQSLLLKGVKEPKGIEERSLRAVYEATGGNSAPIEFSPRFDAYDREESEMLSTELKRTESTLKRTKRLYVNGGIDDEEYAALTEALDSQIDNLKRRQSEAAVEADEFREKASYYLLADMLTTEPFNPKKFNSVVSKKAREQFVQQVIKRLIISDGHVTVMEFRSGLTIEFKY

SEQ ID NO: 9882 - protein, 540 aa, Unknown
  Description of Unknown: Integrase B9883 sequence
  cd00338,IPR011109,IPR038109,PF07508,Coil, PS51736,G3DSA:3.40.50.1390,PTHR30461,IPR006119,IPR036162, PTHR30461:SF3,PS51737,PF00239,SM00857,G3DSA:1.10.10.2600, SSF53041
MTKSLPPLLRAASYSRYSSDNQRDTSIDDQERLTGARGTVEGWPIVARFSDCEISASTPMAVRDGGKAMLSAAARGEFEVLLIEGLDRCWRDIVDQEQTIRRLEHQGVRILGVSDGYDTRHEDRELSRGVRGLLNQQYLRDLAKKTHRGLTGQVFRGGHAGGLSYGYRSIDAGAVHRLEIDRDQAAWVRWIFEHYAAGWSCQKIAAELNNLGVKTGRGGTWAVSALYGCPNKGSGVLNNELYVGRYVWNRSQWKKDPDTGKRVRLIRPSEEWVIEDRQELRILDPELWQAVRDRMNGTRLANGGKGKGARPKTLLGGLMTCSKCGGAIIAVSGRDYGCAAHKDRGPAVCTGTRVRRKATDLRLLAVVREDLLSQSAVLELRDQVEALLDAHRQAAAGAAGSAKAALGEVTREIDRLVDAIGAMGHSDALAARLKDAEARLAKLASEAVRKPAAPIKIDDVMARYRRQLLALETALKAEPERARAALHEYFGDIVVEETGAQAWATFTADPGRLLLQAAGDSGYGCGGRISHPEPRRIRIR

SEQ ID NO: 9883 - protein, 539 aa, Unknown
  Description of Unknown: Integrase B9884 sequence
  cd00338,PF13408,IPR011109,IPR038109,PF07508, Coil,PS51736,IPR036162,IPR006119,G3DSA:3.40.50.1390, PTHR30461,PTHR30461:SF3,PS51737,IPR025827,PF00239, SM00857,G3DSA:1.10.10.2600,SSF53041
MPKRERQQPALTAAIYARYSSTAQNDASIEQQIAECLQYATEHKMAVVAQYEDRAISGRSDKRPGFQRLLRAADRHEFQIVITYKSNRISRNMQSALNYEKRLNDAGVRVVYCKESFSDDATGRFMLRMMMNMNQFYSENMSEDIRRGMMDSATKGKVVGSVPYGYKKGEDGLYAIDEPAAAVVREIFARYLKDESFADIRRDFNDRGLLTKQAKPWTKNSFHNILVNEKYAGVYTFGETRLEDGIPAIISKEVFHMAQKKVNSEKLVRKRHRGNEDYILTGKLFCGYCLAPMVGMSGRSHVGREHFYYACQTRRTKHTCDKQNVRKDDIEQKVVEIVQGTILDDKTVVWMADAIMDASRRFKEQTRLSEYESHLREVKKQIANVIHAIEMGVAGDEVKERMDELQEEKRKYEGLIAIEKVAVKDYDRVTVIGYIESIRHGDATDKEFQRMVIRDFIKAVYVYDDHLRIVVDFTGDENAIDVPFKGSDSPTESADGFAQGLMRCTISAIGEPLTGQNSVEFTGHWFVITWYFGDNSVKR

SEQ ID NO: 9884 - protein, 539 aa, Unknown
  Description of Unknown: Integrase B9885 sequence
  cd00338,PF13408,IPR011109,IPR038109,PF07508, Coil,PS51736,IPR036162,IPR006119,PTHR30461, G3DSA:3.40.50.1390,PTHR30461:SF3,IPR025827,PS51737,PF00239, SM00857,G3DSA:1.10.10.2600,SSF53041
MRKTKQEKKQSYIRAVIYIRYSSHRQDGSFTVEAQHDECMRYLERKGYKFIKQYIDTAKSGKKVAGRDAFDEMINDAHKGNFDRIVVFTFSRAFRNTRDALNYNAELKEKCGVVIESVVEPVDMDSPHGKFSATNLFAMHELQSDIIAGHVKAGMYYAAQEGYYLGGTLNYGYKLYGTGEYSRGKERKKYEIDENEAVNVREMFRLYADGFSIDYIQNEMKQRGVLGRRSGAAISVQTLARMLKAEFYIGTRIFDVDGYPPIHMKNAVPAIIDEETWLKVQARHAENKPDPRESKRTKRLYPLTGKIFCAKCGAHMHGQTKGMSKGYPYSYYSCANKKGNKTCDARNIRKDELEAYCVQEIKKHILNEEAMQQIAEHIVGIVSAAPDDVANEIKKLHRRRKELAEAVKKLAKKNALDLMPDDVFRELTADFNTEIADIDLQLVQLEAVERNAITVPIVINYLQEIFNDIDNTDPHIIKSIFDKLIDKIVVSDTHVELFLRVTPYAVIRDRGSQGQPQYKLSLKAHRDKISPAISGRGGN

SEQ ID NO: 9885 - protein, 539 aa, Unknown
  Description of Unknown: Integrase B9886 sequence
  cd00338,PF13408,IPR011109,IPR038109,PF07508, Coil,PS51736,G3DSA:3.40.50.1390,PTHR30461,IPR036162, IPR006119,PTHR30461:SF3,PS51737,IPR025827,PF00239, SM00857,G3DSA:1.10.10.2600,SSF53041
MVKIKYNGTAWQQSYGPGELAVVYARFSSHKQGEQSIEGQLAAAHAYAAARGYQIIHEYIDRAMTGRNDNRDEFQQMLSDCTKKQFSVIIVWKVDRFGRNREEITFNKYHCKKHGVRVEYVAENMGEGPESVILESVLEGMAEYYSLQLSQNIRRGNRENAKKCRFTGGRVPLGYKLDKDHQFVIDPDTAPLVRRIYAMYAEGQTITEIIDQLNAEGLRTGQGNRYTKNSLRTILKNEKYIGIYDFKNGEIRIEDGVPAIVDKEIFYKVQKLLAINQRAPAAKWNRADYLLTNKLFCGSCGAQMVGESGTSKTGAKYNYYLCINHKRGNTCARKAIRQDWLEPFVLTKTQELIMDDEVIQYITNNVWEYYLRQDQQRDKVTSLKAQIAEVEKAINNLMRAIEAGMPLTEMTKNRLTELDGQQQALNAAIAQTQLDGGFRLQKDHIQFFLEQFREMDFTDRKCQQRLIDVFVNSIFITDDELTINFNFGGDKSVIKFTDFKALSGENEFGCRALVSTIKRAYELVFYANVFALIVKMPER

SEQ ID NO: 9886 - protein, 539 aa, Unknown
  Description of Unknown: Integrase B9887 sequence
  cd00338,PF13408,IPR011109,IPR038109,PF07508, Coil,PS51736,G3DSA:3.40.50.1390,PTHR30461,IPR036162, IPR006119,PTHR30461:SF3,PS51737,IPR025827,PF00239, SM00857,G3DSA:1.10.10.2600,SSF53041
MKKQSSARNASQPLNAVIYARYSSHSQTEQSIEGQLHDGYAYAERCGYRVIGEYIDRALTGTKDDRPDFQRMIADAEKHQFQIVIVWKLDRFARNRYDSAIYKRQLKKHGVRVVSVMENINDSPEGIILEGLLEAMAEYYSANLAENIKRGQAESVKKGWYVGGPVPLGYQVIDHRLVRDDRTAPLVVELYQRYAAGESLADVAASFNARGYRTSRGRLFTCNSFHSMIPNSTYIGDYTFSGQIIPGVSDPLIDPDLYDRAVRRRDRMRRAPASGRGPVSFLLQGKLFCGLCGAPMFGDCGTARSGERKYYYSCSAKRHKRTGCRKKAEKQDFLEWYVCEQTVKYILDPARLDQIASTVTDLYNSEIDDDREKDLLRAIQRLKDEMNTLIDKLIIVPKEAAGPIGERMKQVELQRLDLEADLTKLRLQQKVKIEKSQVSAWLRTFSHGDLFDAAFRASLIDTFINSIYLWNEKIVIFYNISGAQETIGLDEISALDEMKEAGQDGSSLTGNGGAFPTKVEPNHAFVFLRGQLGLVIFRE

SEQ ID NO: 9887 - protein, 539 aa, Unknown
  Description of Unknown: Integrase B9888 sequence
  cd00338,PF13408,IPR011109,IPR038109,PF07508, Coil,PS51736,IPR036162,IPR006119,PTHR30461, G3DSA:3.40.50.1390,PTHR30461:SF3,IPR025827,PS51737,PF00239, SM00857,G3DSA:1.10.10.2600,SSF53041
VRTVIYARFSSQLQNSRSIDDQVAVCRERAEREGWSIVEIFTDYAISGAAGIGEMQRPGLHAMMARVERGGVDQVLAESTDRIARHQGDSFAIRDRLSFAGTRLFTLSDGEVTEIAGTFKGLMDAQFRKELGAKIKRGQRGTIASGRSPAGLAFGYRTANRIDAAGRPVRGLREVDADQSDIVRRIFEEFAAGRSARTIAAALNAEGIAGPRGSHWRASTINGDATRGNGILRNELYVGRLVHNRTSKVVEPVTRNVRIRPNPPSEWQTEEVPHLRIVPQALWDEVQGRREVFEGLKPVRCVRPRRMLSGLATCGVCGQGWIVIGTDRWGCTKHKADGSCTNNRQIITATFEDRVLSGLRERMLDPELVAMFVREYHSEHARRSIDARRSSAKLDRKVAEANAKIERLVAAISGGGAEFAEVKDALAQARADRDRAAAELLEIEALPVVALHPAIAADYRRQVEHLDQALVDPLARDAAIPALRELIDHIIITPHPTKRGVEIEVQGRLASMLALAGAMPAPERMTACGAFPSPAPRFR

SEQ ID NO: 9888 - protein, 539 aa, Unknown
  Description of Unknown: Integrase B9889 sequence
  cd00338,IPR011109,IPR038109,PF07508,Coil, PS51736,IPR036162,G3DSA:3.40.50.1390,IPR006119,PTHR30461, PS51737,PF00239,SM00857,G3DSA:1.10.10.2600,SSF53041
MRIEDLEGLPGILYLRKSRKDLEAEREAAQTGRPYDTLQKHREELFKMVRNYKLNVIDVLSELVSGEFIAEREEMQKVLDYLSEGTIRWVGVMDEDRLGRGDKIDQGRIERAFKESGAFIITPGKIVDLQDEADELYMDYKGMGARYEYKQTKKRLHGGRRRSAGRGNFVGGKPPYGYLKGIDLKTEYPHLIKEYVQKAAEMENLKLYPHPEESEVVKQIFEWMTSGAGIRTIAKRLTGAHLTPTGLINWNRTTITKILKNPVYTGIIRYGNKKWIKRENGTYMIKPVAEREKEIAKDAHHPLVSEEDFDKVQNILKANDTTPLNHNKVLTNIFAGLLKCGFCNLSMSFQPRYNVTRSPRFTCMNPHCKMNKSIILELFESRVLDRIEQYYQMLKSKPDMTKKNSDVSVLSTLEKRKSLLRNQLTELKGQINNIHDLLEKGVYTVEIFLERQKTLVDRQDATSREISEIDREIQREKEHIHNKEMVKPRFENVLNTYHMLETVEDKNKLLKSVIISMHYSKPKYLKSQDDFDLGIEWKT

SEQ ID NO: 9889 - protein, 539 aa, Unknown
  Description of Unknown: Integrase B9890 sequence
  IPR038109,IPR006119,PS51737,PF00239, G3DSA:3.40.50.1390,PTHR30461,IPR025827,SM00857, G3DSA:1.10.10.2600,SSF53041,IPR011109,PF07508, PS51736,mobidb-lite,cd00338,PF13408,Coil,IPR036162,PTHR30461:SF3
MNAVIYARYSSHNQNEQSIEGQLADCYEWAKKNDVTVIGEYIDRALSGTVDRRPDFQRMIADAAKRQFEIVLVWKLDRFSRNRYDSAIYKTRLKKYGVRVISVMEKITDSPEGIILEGLLESMAEYYSANLAENIRRGQRESVKNGTFLGGNIPYGYRSVNKKLVIDDRTAPVVRHIFAEYSKGVGKRELMDDLSARGFRNARGKPFSNSSVTRILSNTVYVGRYVYNGEVVEGLAERLIDDDTFEKVQSRLAVNKRMSGAATAKVDYLLSGKCFCGLCGASMVGDSGTSRRGEMYYYYTCGAKKKKSSACSKQREKKGFLEWYIVEQTVEYVLDPSRAEFIADAVVKEYEKEFSDDGIAVIEKALKRLDSELDKLIDVLVDTPKQARGRIAARMEQIEAEKTSYEGELAKLRIASHNKITKKEVLAWLSTFRNGDPLDADFCRRVIDTFVNSVQLYDDRIVVFYNIRGGREVLGIELIDALDLPPDDPAPLSSLIASSDTKKAEPSGSTFNPNGGPIGSKLEPRYIFIGGMFGCIFSR

SEQ ID NO: 9890 - protein, 539 aa, Unknown
  Description of Unknown: Integrase B9891 sequence
  cd00338,IPR011109,IPR038109,PF07508,Coil, G3DSA:3.40.50.1390,IPR036162,PTHR30461,IPR006119,PS51737, PF00239,SM00857,G3DSA:1.10.10.2600,SSF53041
MDKKRVWTLYRVSTKAQVNKDEDIPMQKNSCHRFVNNMPNWEITNELYERGVSGWKKTVSQRDELQLIKEGAINKEFDILLVYYSDRLGRNKDEIPVIISFLSKNGVSVYSAEEGELRSVEHVDSLLNYIRFWQSEGESIKTSLRVKEQIKQMNEAGSFTGGNIALGYDLVETELKHPKKDKYLNKLVINESQANIVRIIFDLSANKGYGRHKITAYLNERGYVNHFGNKFNDKFIHRLLNNPIYIGLKRYNTKGIDSLNIEYKTQPYDDSLRIIDDETFYKAQELMRKRKLYLQEENKHLHDSIPYSSKVLLSGLIRCTYCGQFMKTDYSYKDYKRKDGTINRMICYRYRCVNGLNKTVYHPKNQVGAKNIDIQLKDMVISAIRKIDLSGIEENVNKSKNVKLSKKNNELNNLQKELQKKQKNLFVLNNEIPKSLIGESAFSPEVLNKSIKQVETEINNILENIKLINEDIINISKNINEIEHHKNILYNWEDKFNNADIDAKKIYLSDVIDYVEWSKDNIHIEWKEFIKFLISNKNK

SEQ ID NO: 9891 - protein, 539 aa, Unknown
  Description of Unknown: Integrase B9892 sequence
  cd00338,PF13408,IPR011109,IPR038109, PF07508,Coil,PS51736,IPR036162, IPR006119,G3DSA:3.40.50.1390,PTHR30461,PTHR30461:SF3, IPR025827,PS51737,PF00239,SM00857,G3DSA:1.10.10.2600,SSF53041
MKNVNQSLIPAVIYARYSSSGQREESIEGQIRDCREYAEKNGLLVVGEYIDKALTGRTDKRPDFQRMIKDSEKGAFKVVICWKMDRFARDRYDSATYKYRLKKNGVRLVYAKEVIPEGPEGIILESVMEGYAEYYSKNLSQNIKRGNYDSALELKTLGQKLLGYKKGADGRFEIDPSTAPLVRRIFEEYASGERAKDIVDRLNQEGHRTAYGGMFNKNSIRRIIQNEKYTGVYTFKDIRVEGGIPPIISKKQFEDANKLQEVHHRAPAAKRDVSFLLTTKIFCGECGEPMTGDAGTSKSGVVHYYYICNGRRRHRCKKERVRKEHIEKAIVDELVDLIHSDEFIEAVADLVIEYQSREKDDSLLKSLDVRLKDIEKRIDNLVSAMEQGIVTATTKTRLMELESEKVDIEKGIAKELLKEPELERDQIVYFLQRFREGDIEDDEYKGYLIDTFLQSVYVYDDKLVLTLNYSGKNNKVTKSLIDKALDGEGSECSCLAPSGARNGANLNTAPIRVFLIRKVIGVVAPYEKKIQRQRKRAKT

SEQ ID NO: 9892 - protein, 539 aa, Unknown
  Description of Unknown: Integrase B9893 sequence
  cd00338,PF13408,IPR011109,IPR038109,PF07508, Coil,PS51736,IPR036162,PTHR30461,IPR006119, G3DSA:3.40.50.1390,IPR025827,PS51737,PF00239,SM00857, G3DSA:1.10.10.2600,SSF53041
MDKKRVWTLYRVSTKEQVNHDNDIPMQKTACYRFANNMPNWEITNELYERGVSGWKKSVSQRDELQQIKEGAINKEFDILLVYHSDRLGRNKDEIPVIISFLSKNKVIVYSTEEGELRSIEHVDSLLNYIRFWQSEGESLKISMRVKEQIKQMNEVGSFTGGNIALGYDLIETELKHPKKDKYLNKLVINESQANIVRIIFDLSANKGYGRHKIVAYLNERGYVNHLGNKFNDKLIHRLLNNPIYIGLKRYNTKGIDSLNIEYKTQPYDDNLRIIDDETFYKAQELMRKRKLYLQEENKHLHDSIPHSSKVLLSGLLRCSYCGQVMKTDYSYKDYKRKDGSINRMICYRYRCVNGLNKTVHHPKNQVGAKNIDAQLKDMVIDAIREIDLSNVENNVNKSKNIKLSTKNNELNNLQKELQKKQKSLFVLNNEIPKSLIGESAFSPEILNKSIKQIENEIDNILENIKLINENIISIGKNINEAEHHKNILYNWEDKFNNADIDGKKVYLSEIINYIEWSKEKLHIKWKVFIELLISNKNK

SEQ ID NO: 9893 - protein, 539 aa, Unknown
  Description of Unknown: Integrase B9894 sequence
  cd00338,PF13408,IPR011109,IPR038109,PF07508, Coil,PS51736,IPR036162,PTHR30461,G3DSA:3.40.50.1390, IPR006119,PTHR30461:SF3,PS51737,IPR025827,PF00239, SM00857,G3DSA:1.10.10.2600,SSF53041
VTGVMSVDIKWNVPQKGKEGDLAAVYARYSSHSQGEQSIEGQLAEAQKYAAAHGYTIVHEYVDRAKSGRTDNREEFQRMLKDTAKKQFNVIILWKVDRFGRNREEIAINKMKCRKNGVRVEYVAETIPNTPEGVILESVLEGFAEYYSLQLSQNIRRGIAESAEKCQVTGGNRPLGYKTGPDKKFEIDEDTAPTVRLIFKMYADGATVTEIVAELNELGLRTLRGGKFTHNSLHTILKNEKYIGIYNNHGKHIEGGVPRLIDDELFYKVQEMLKVNKRAPAKTWARADYLLADKAFCGKCGAPMFGESGTSKTGARHNYYICSHKKRFKTCDKKAVRQADVEDLVIKATCDLLADTELLDFIIENTWQYYLAQDNSQEELRNLTRQLEQTDLAIKNLIRAIEAGILTEETKSRMDELTTQKAELKASIADRELARGFHLRREHIAFYLYDLRNADHSDREVQKRLIQTFVNSVFVFDDCVKLTFNFSGNKSVVTLKMLQAAEAGEVFGRYASCSTITHRYELFWFQNVFCLTIEIPWKR

SEQ ID NO: 9894 - protein, 538 aa, Unknown
  Description of Unknown: Integrase B9895 sequence
  cd00338,PF13408,Coil,IPR036162,PTHR30461, IPR006119,G3DSA:3.40.50.1390,IPR025827,PF00239,SM00857, SSF53041
MDNPKVYSYLRFSDPKQAASSSADRQTAYAQRWAADRGMVLDEALSLRDEGLSAYHQRHITQGALGAFLRAVDAKLIAPGSVLVVEGLDRLSRAEPVLAQAQLAQVINAGITVVTASDGREYNRASLKAQPMDLVYSLLVMIRAHEESDTKSKRVRAAIRRQCLAWQAGTFRGVIRNGKDPKWVRWTGTGFELIPERAEPMRAAIALFLAGHGGYRVMRALREQGYQADQVPTTSGTLYKALKRPDLIGTKTLSIDGEEWALDGYYPALLSPAEYQQLQAANLGRVKRKGKGEYPGLITGLGLLHCGYCGAAVVGQTLLGRNRKADGTPQDGHRRLLCSGTRTRIGCEVGGSVSVAPIERALLAFCSDQLNLSSLQGSGDHLAAGRAAIAAARQRGSDLGDQLERVTAALIAGDGGATPISFVRAARDLEAQIVATQKEESLAEADLARRSRRDLPAIAEQWRHLVTGAMALDYDARMQIRDLVAETFSRIVIYHYGITIEAGSRHIDLVLMAKGGTPRMLRIDRKTGAWMAQEYGAG

SEQ ID NO: 9895 - protein, 538 aa, Unknown
  Description of Unknown: Integrase B9896 sequence
  cd00338,PF13408,IPR011109,IPR038109, PF07508,Coil,PS51736,G3DSA:3.40.50.1390, IPR006119,IPR036162,PTHR30461,IPR025827, PS51737,PF00239,SM00857,G3DSA:1.10.10.2600,SSF53041
MAAKKAPAGGEAMRAYIYGRYSSHSQKDTSIEQQFAEIRDFCDRSGIRIVGEYADRHLTGTNDRRPEFQKLMKDAAKGHVQLVVCWKVDRFARNRYDSAMYKARLKKYGVRVIYAKESIPEGPEGILLESVLEGSAEYYSANLAQNIKRGMHANALECKVNNGRLPLGLCKGPDGRYAIEPAGAALVREIFAMYIDGMSPTEICADLNSRGFRTSRGAAYNKNSLRTILRNERYVGVYKYADVRIEGGIPAIITRETFDMAQEIIAKNARTPAASWSHVDYLLTGRLFCGRCGSAMVGESGTSKTGAKYNYYTCVGRKRRRDCEKKPVKKDVIEELVVRETVQRVLVDSVIERIADAVVDLQRAEAEAGEGPILKKQLGEVERSIRNVMTAIEAGIITETTKARLEELEEQRRQLQDQIERIRFETPQLSREQVIYWLEKFRGGDVTDPAFQWKVIENFVNAVYLYDDRIRIVYNYTKQGAETVDLAFMDGLPDPSGDVFDVGASCSTIMHLSELGDEATIIVTPAVFVLTVPLPACV

SEQ ID NO: 9896 - protein, 538 aa, Unknown
  Description of Unknown: Integrase B9897 sequence
  IPR038109,IPR006119,PS51737,PF00239,G3DSA:3.40.50.1390, PTHR30461,IPR025827,SM00857,G3DSA:1.10.10.2600,SSF53041, IPR011109,PF07508,PS51736,mobidb-lite,cd00338, PF13408,Coil,IPR036162,PTHR30461:SF3
MKTVKTQSGATKAVIYARYSSHGQTEQSIEGQLHDNYAWAKQQGITVIGEYIDRALTGTKDARPDFQRMIEDAAKRQFEMVIVWKLDRFARNRYDSAIYKARLKKYGVKVVSVKENITDSPEGIILEGLLESMAEYYSANLSQNVKRGLRESVEKGYYCGGSIPYGYKAENHRLVPDEKTAPIIRYVFEEYAKGTSKKEIIDELNRRGVRNGKGNPLTYTSFQHALRMTTYIGEYVYQGKVVPCADPLVTREVFDKVQARLDRRAHAPAAAKARVPYLLQGKAWCGLCGAPMFGESGTSHTGALHTYYCCYNRKRKKGCKKKTERRDKLETFIVARTMDYILTPSRMNRIAKAVVQEYNKEFSGSRVEDMEKAIAQIDREMDKLVDALIDAPKAAHKKIYARMETLEAQKAEFETDAAKLRVAMGLRLTEKEVVSWLKTFRDGDPDDPDFRRRLVDIFINAVYVYDDRIIVFYNIRGGKQVSSKDLYEALESPKDKENSKPETGSDLESSGGAGNSKSEPEFVFVHGVFGCIFPWGEG

SEQ ID NO: 9897 - protein, 538 aa, Unknown
  Description of Unknown: Integrase B9898 sequence
  cd00338,PF13408,IPR011109,IPR038109,PF07508, Coil,PS51736,G3DSA:3.40.50.1390,IPR036162,IPR006119, PTHR30461,PTHR30461:SF3,PS51737,IPR025827,PF00239, SM00857,G3DSA:1.10.10.2600,SSF53041
MEVLNVAAYVRYSSENQRQESIDAQLRAIKDYCDKNSYNIVRIYQDEALSATTDQRDQFLQLIDDSKLGTFKYIVVHKLDRFARNRYDSAFYKRELRMNDVSLLSVMEQLDDSPESVILESVLEGMAEYFSKNLSREVKKGLNENALQARHNGGRPPLGYDVNKDLSYKINDTEAESVRIIFEMYANDYGYGMICDHLNLKGYKTKIGKTFGKNSIYEILRNEKYIGRYTYNKRQSKKNGNHKFKSDDQITRIDDAMPRIISDELWNNVQFKLNSNIKPRMNAQRVYLLTGKLECGKCGCAYVGSSYFRSRQGKKYYNYQCVSKSMHSGCDNKPLRADYIEQYVMDRIQDNILSDSAIDRLSRMIYDMIMEATSINRDLVNDLKRKRDGLKIQVDKLFDLYLEGMIDKSMIGEKTNRIKAEIESYEKRISELGDTSGDVIELEKIKLYMYDLRTKLDEADDNVKKAMIDVLVDRIIINADDIEVIFKVDPFNHSKSKSAASVKSEATQDKVGGDKAYLTIPFVFSRLDMYDYFKMYQA

SEQ ID NO: 9898 - protein, 538 aa, Unknown
  Description of Unknown: Integrase B9899 sequence
  IPR038109,IPR006119,PS51737,PF00239,G3DSA:3.40.50.1390, PTHR30461,IPR025827,SM00857,G3DSA:1.10.10.2600,SSF53041, IPR011109,PF07508,PS51736,mobidb-lite,cd00338, PF13408,Coil,IPR036162,PTHR30461:SF3
MKTVKTQSGATKAVIYARYSSHGQTEQSIEGQLHDNYAWAKQQGITVIGEYIDRALTGTKDARPDFQRMIEDAAKRQFEMVIVWKLDRFARNRYDSAIYKARLKKYGVKVVSVKENITDSPEGIILEGLLESMAEYYSANLSQNVKRGLRESVEKGYYCGGSIPYGYKAENHRLVPDEKTAPIIRYVFEEYAKGTSKKEIIDELNRRGARNGKGNPLTYTSFQHALRMTTYIGEYVYQGKVVPCADPLVTREVFDKVQARLDRRAHAPAAAKARVPYLLQGKAWCGLCGAPMFGESGTSHTGALHTYYCCYNRKRKKGCKKKTERRDKLETFIVARTMDYILTPSRMNRIAKAVVQEYNKEFSGSRVEDMEKAIAQIDREMDKLVDALIDAPKAAHKKIYARMETLEAQKAEFETDAAKLRVAMGLRLTEKEVVSWLKTFRDGDPDDPDFRRRLVDIFINAVYVYDDRIIVFYNIRGGKQVSSKDLYEALESPKDKENSKPETGSDLESSGGAGNSKSEPEFVFVHGVFGCIFPWGEG

SEQ ID NO: 9899 - protein, 538 aa, Unknown
  Description of Unknown: Integrase B9900 sequence
  cd00338,PF13408,IPR011109,IPR038109,PF07508, Coil,PS51736,G3DSA:3.40.50.1390,PTHR30461,IPR036162, IPR006119,PTHR30461:SF3,IPR025827,PS51737,PF00239, SM00857,G3DSA:1.10.10.2600,SSF53041
MAKRKKEVQQPAQIAAIYARYSSNAQNDASIEQQVAECTLYAQQNGLKVVATFEDRAISGRSDKRPGFQKMIRAAERREFQVLLTYKSNRIARNMYDALRYETRLEDAGVKVVYCKENFGDNAAGRMMLRMMMSINEFYSDNMAEDIRRGLMDSASQGKVVGALPYGYKKGEDGKVAIDEELGPIVQEIFSRVLNDESYAEIARDLNARGYRTQHGKQFGKSSFRAILENERYTGVYIYGDIRIEGGMPKLVEKEVYDAVNHIVKHRQTLHARQRENGEYLLTGKIFCGKCLGPMVGISGKGRWGKDFFYYTCNTKRLQKKCDKKNVRRDQIEEEVTRAVLECALDDDAVEWIADTAMQMSKEMEEQSQLGYYESRLKETKKQIANILRAVEMGIISDEFKERMTELRMEKQELDGLIATEKMGILTVGRDDVIKYLLMLRTEDYRDKKFQKRIIRDFVKAVYVYDDHFKLVVDFTGENKTYTRPLKIKLAKANGTMDCSGVCIRSDEGHHISLIQTPDPRNCIDVSDAGFVITWYFH

SEQ ID NO: 9900 - protein, 538 aa, Unknown
  Description of Unknown: Integrase B9901 sequence
  cd00338,PF13408,IPR011109,IPR038109,PF07508, Coil,PS51736,IPR036162,IPR006119,PTHR30461, G3DSA:3.40.50.1390,PTHR30461:SF3,IPR025827,PS51737,PF00239, SM00857,G3DSA:1.10.10.2600,SSF53041
MSQNAIIYARFSTAEQSKGYSLERQQRHGLEYATSRGWIVEKTITDEGRSAFHGANRLEGSALHEFELEARNGLHRGKALLVENVDRLSRQGAKAAAQLVWALNEQGVDVATWQDGYVYQAGNNGDLMELFSVIIKAQMAFEESDKKSKRTAATARRRDQRIEAGEVDVPIANMPNWIKVVDGTKVLDENRTAVLNLIYDLYIDGVGIHRIVTVLHERGVPSWTPKEQRRGNNGWFYSHIYRLLTRRAVLGEYVNGEGRTLNPGFFPQAITAEKWNRAQAALSMRKGNQTNVKVFGNRNLLSQMVVCEKCGGGAHFGHTTDTVQKYTKVSGEVVNYRRKTYRKLRCDRARRNHTCDNGTTLNYDVVEATILQEMLPQLARKPDANAEARKLREQIADLARLQNAEQVKLNHLIDALADGGSKAIVQRVAALEVELERLSVDIASAQKSLAIETAKPAGDNDVKLVESLRTELTSENDEVRIYARGRVNMSLRRLIKRIVITETGLFRVEPDDHSWWLFSEDGTMLQGAYTLGPTAEAS

SEQ ID NO: 9901 - protein, 538 aa, Unknown
  Description of Unknown: Integrase B9902 sequence
  PS00397,IPR038109,IPR006119,PS51737,PF00239,G3DSA:3.40.50.1390 ,PTHR30461,SM00857,G3DSA:1.10.10.2600,SSF53041, IPR011109,PF07508,PS51736,mobidb-lite,IPR006118, cd00338,Coil,IPR036162,PTHR30461:SF3
MPADRPTPTPPNNEVNPSLPGAPLRYACYARVSTDDQADRNLSIPAQLRECRAFVQKEGGLWTAEFSDPGFSGTTMDRPGLQEMLTAARQSAFDVLVIQKSDRLSREDLAPLLIKAELAKHGIRIRSVSEPFYGGAEPLDEMMETIARGFNKLYISNLKKEIKKGQAQMAVEGRQSGHAPFGYRFVNKDVPGSGWSVDEEAAVWVRRVFARVLEGATFAEICREMNAAGVTTPSLRHARHVKAYGFWTGNTLRNILKNRVYLGEIRAGGQWQPGSHPPVVDKETWARVEAVLSRRSRGRAENTRGLFTGQLLRCPRCGALLTLISYKDRAFTGERGGRLYRHRYACTAGRHREQKAGYGIPQDALDGLCTGYSIGEKRLIRLLQAYLIRMAGPEERGRKKPILPLPPVLSLPVPQGPARDIAAERLVLEKEIAGLPGLRAAYQAQQAAGYMTMEELGQALATLSARREALEAALAQLSRSVPPAPITLAPTEARSLLLLLDDPAATPRQTRDALKFAFSHFVPWPDKSGLDVYPALTV

SEQ ID NO: 9902 - protein, 538 aa, Unknown
  Description of Unknown: Integrase B9903 sequence
  IPR038109,IPR006119,PS51737,PF00239,G3DSA:3.40.50.1390, PTHR30461,IPR025827,SM00857,G3DSA:1.10.10.2600,SSF53041, IPR011109,PF07508,PS51736,mobidb-lite,cd00338, PF13408,Coil,IPR036162,PTHR30461:SF3
MKTVKTQSGATKAVIYARYSSHGQTEQSIEGQLHDNYAWAKQQGITVIGEYIDRALTGTKDARPDFQRMIEDAAKRQFEMVIVWKLDRFARNRYDSAIYKARLKKYGVKVVSVKENITDSPEGIILEGLLESMAEYYSANLSQNVKRGLRESVEKGYYCGGSIPYGYKAENHRLVPDEKTAPIIRYVFEEYAKGTSKKEIIDELNRRGVRNGKGNPLTYTSFQHALRMTTYIGEYVYQGKVVPCADPLVTREVFDKVQARLDRRAHAPAAAKARVPYLLQGKAWCGLCGAPMFGESGTSHTGALHTYYCCYNRKRKKGCKKKTERRDKLETFIVARTMDYILTPSRMNRIAKAVVQEYNKEFSGSRVEDMEKAIAQIDREMDKLVDALIDAPKAAHKKIYARMETLEVQKAEFETDAAKLRVAMGLRLTEKEVVSWLKTFRDGDPDDPDFRRRLVDIFINAVYVYDDRIIVFYNIRGGKQVSSKDLYEALESPKDKENSKPETGSDLESSGGAGNSKSEPEFVFVHGVFGCIFPWGEG

SEQ ID NO: 9903 - protein, 538 aa, Unknown
  Description of Unknown: Integrase B9904 sequence
  cd00338,PF13408,IPR011109,IPR038109,Coil, IPR036162,IPR006119,G3DSA:3.40.50.1390,PTHR30461,PTHR30461:SF3, IPR025827,PS51737,PF00239,SM00857,G3DSA:1.10.10.2600, SSF53041
MPNSPFPPGAHVAAYLRDSGHEDQELSTSHQEANLRAFCTQNGLILAEIYRDEARPGSTTVGREAFHRMIHDFRTGAHLAGLIVWKFARFARNIDDAQFYKADLRRRGFRIYSLNDTIPDGPEGRFFETAIDWMNERYLEDLSIDIKDGLKYNFTHYGAVPGTPPAGFRRGPEIVIGHHRDGRPRTIHRWEPDPLTAPLARRAWEMRAAGASLKQIADATGLFKSLNGWTTFFANRLYLGIMVYAGETAPNYCDPIIDQATWDTVQSIIQANAANQNLRTNNHPRRNSETSPWLLSGLAVCAVCGSPLNGGGHKQINGKIVTSYECSRKRRRRDCASKAIPKDLLETGVLQDIRNYILTPGVLASCQAVIAAENQTQAQNIQQEKKRIKAKLTGVRKRLDNITEALSMRPKSRSLLKKHDTLEAEEAKLLASLSETEKASTPITLTPDEIDNIAPILQAQLSGTPQEVKQFLRGWIKNIIVERDGRNVLGLINYYLPPTDLTPPSTPTDDNNVSMPRTPPGALYHRHIFTHPFRYTLK

SEQ ID NO: 9904 - protein, 537 aa, Unknown
  Description of Unknown: Integrase B9905 sequence
  cd00338,PF13408,IPR011109,IPR038109,PF07508, Coil,PS51736,IPR036162,IPR006119,PTHR30461, G3DSA:3.40.50.1390,IPR025827,PS51737,PF00239,SM00857, G3DSA:1.10.10.2600,SSF53041
MKAAEPLRTAVIYARYSSAQQRDASIEQQVKVCQKYAADNGLTVLRVYDDHAMTGTNDNRPMFQQMIRDSASGAFSFVIVYSLDRFSRDRYDSAIHKHTLKERGVKVLSAVENIQDNPTGVLMESILEGFAEYYSKELAQKVRRGIRSNAEKAMVVAQLPLGYRRGADGKFEIVPEEAEVVREIFRRVADGDQLSEIYTDLNARGIRTKKGHAFGKNSFQGLLHNEKYIGIFRYDDIVLTDAVPPIVDEATFRRVQERYSGASHQYNPQKRVNQNGSYLLTGKLFCGHCKGPMVGTSGTGKHGELHYYYTCRTRQKTKTCKKKPVRRDEIERLIAQRLHQMIFAEDVVDRIADELIAYLKANEMTDEVRNLTAQIQALEREEANTLKAIRMGVVAAPVQKMLEQIETDLDALRARLLLAKERARSDITKDEVLTLFEMFREGDIGSKEYQEKLIDAFLIRAYVYDDRVKIIFNYSAAGSNEIEIPFDIDSVEKPVKGSDKAPEGVLFLPYTNPDDLFFVKGFFVLITDFAGTLQKEV

SEQ ID NO: 9905 - protein, 537 aa, Unknown
  Description of Unknown: Integrase B9906 sequence
  cd00338,PF13408,IPR011109,IPR038109,PF07508, Coil,G3DSA:3.40.50.1390,IPR006119,IPR036162,PTHR30461, PTHR30461:SF3,PS51737,IPR025827,PF00239,SM00857, G3DSA:1.10.10.2600,SSF53041
MNNAVTYNRFSPGPNQREESITGQLRENHRMAEQKGLTVIHDYIDRSLTGRSDDRPEFQKMLKDAESGLFQYVICYQTGRFARDRFDAIIYKRKLKKLGVKVIYSKMNIPDGPEGIILESVLEGLDEYYSEELRQKVIRGQYDNALQGKASGGPVPYGYKLSDDKFYMIDEDRSIIVREIYNRYAAGESIVAITEDLNRRGLKTAKGENFNKNSLHRMLKNPKYYGLLIFKSKDESYDEVRKEDAIPAIITKDLYMKVQERINQNKHKTAKTLAKTLPVTFLLSGKVFDGTCGGSMVGDSGTSKTGQTYYYYTCNNKKSKKGCKTKSIKKDFLEDLVINTTKESILVPDVMNFISDSISQLQDENYDESMLNSMTSELKQVKANIKNLMAAIERGIITNTTKERLLELERRQDVLEAQIQIERKRIEAPKTVTDKVLFYLEKFKDGDANDDMYRKTLVDMFVEGIVVNPEYITIAYKYNGDNDIIDVPFNLKDSSDNSVRMSLINWSLRYNIRTLKRPQIAFDIKNGWILYTFKRAA

SEQ ID NO: 9906 - protein, 537 aa, Unknown
  Description of Unknown: Integrase B9907 sequence
  cd00338,PF13408,IPR011109,IPR038109,PF07508, Coil,PS51736,G3DSA:3.40.50.1390,IPR036162,IPR006119, PTHR30461,PTHR30461:SF3,PS51737,IPR025827,PF00239, SM00857,G3DSA:1.10.10.2600,SSF53041
MAKRKFNKGGEVRLVAYYRYSGGSGQTEQSIEGQRRDCETYARLHNMTIQKEYVDRHISGKTDDRAAFQQMITDSDKGAFDMVICWKTDRFARNRYDSAVYKKRLRDNGVEIVYAAESNIAGAEGIIIEGVMEALAEYYSAELAEKMRRGMRESALKGQAISRCRALGLKTDEHKRFVIDEKTAPTVRFIFEHYAAGESATSIVDKLNAKGLRTSQGNPFNKSSIPRIIQNEAYRGVYVSKSYDVRIEGAIPAIIDDELWERAQTMLKLNRQLKAKNEPKADYILSGKLYCSCGSLMRGMSGHSATGEVYRYYTCPNKNCHLRNIPKDDLEGKVMQSIVDHLLQPESMEALAEAMVEVQKADVEKPNAERVAIEQSLSDVRRRSKNILDAIENGTANAQLCARLDDLTEQEQTLSFQLSSLEKEKPVVFTKEQYLFLLEQFLMEPSERTPEYGRRLVNTFVTSMVVSGRELVINFNVSDETVNKNKKTSQTNLQKESSSGMRLVHLAHQQANYSLYAASGYFSLVEHQFSARLWRTA

SEQ ID NO: 9907 - protein, 537 aa, Unknown
  Description of Unknown: Integrase B9908 sequence
  IPR038109,IPR006119,PS51737,PF00239,G3DSA:3.40.50.1390, PTHR30461,cd04300,IPR025827,SM00857,G3DSA:1.10.10.2600, SSF53041,IPR011109,PF07508,PS51736,cd00338, PF13408,Coil,IPR036162,PTHR30461:SF3
MLAPNVRVIQPTKIIDDTSMDILKQELPKRVCAYCRVSTDSEEQKTSYNSQKTYYTDKIKNHPGWIFAGIYADEGITGTSMKKRDEFNKMIKDALDGKIDIILCKSIPRFARNVVDILNIIEQLTSKRIPVIFETENLNSLDNSQGTRIQIMMLAANAEDYSISLSESVKWGRIRQIEQGNYPFTECFGYKVEIKKVGNKVVEKKIRIDENEADVVRLIYTTYLNGYSYRQIAAMLEEREIPSPKGKPNWKSSTVQGILQNEKYKGDLHLQKQTTTDVKFRKRVANTTGKQYYIEDHHKAIISKSEWNRVAKEIEHRNSQRGFGETGRSVYTSKYPFSNKIYCLQCGSKFRRYGYDTKDGKVATWVCINHKIKNSTCTQLQVIEKNVENAFIEALNELITDKHQVIETVINNIEEVIKNRKDEITPEEIDNKIALKHRDLMALIQTIGTMDNYNESQKIMNEIENLKAQKEDAIRMDKQRKRDLYRTEDLRKLLDKSQVFDTFQPQIFKQLVDKILIDGNKATFVFTNLVKITKIVK

SEQ ID NO: 9908 - protein, 537 aa, Unknown
  Description of Unknown: Integrase B9909 sequence
  cd00338,PF13408,IPR011109,IPR038109,PF07508, Coil,PS51736,IPR036162,IPR006119,PTHR30461, G3DSA:3.40.50.1390,PTHR30461:SF3,PS51737,IPR025827,PF00239, SM00857,G3DSA:1.10.10.2600,SSF53041
MERAVFYARVSTEEEKQLNALSKQVEECRDCIRAQGWALVGEYVDEGKSGTKVRGRDEYRRLFEDLEEDKFDIIVIKSQDRLMRNVKDWYLFLDRMLTHGKKLFIYIDNQFYTSDNALITGIKAILAEEYSRELSKKLNNAHRRRVEKAKAGEDISAVGSPSTYGYDISDGKWVIDEKEAEVVRLIYSRYLIDLSAKKVMEYLNSHGYKNREGRAFNYDTILRILKNEKNKGTLVINRYHRDFDLKRIVTKPEDEWVIVDDAIPALVDKESWEKVNEIIRSRVRAHDGRGKKVGCEKLSGKLYCASCGRVMWGHRGKYKDKTYLYWKCSGQLSKGDALCSDYVRIPENKVREIIKGIVCDLQPRREVVKATMIKWLEDLKESLSGANTSSQRVSGELSKLRQKKERLTDAYLDGIIDKPDYRGRLSEIEAQIKELERSVTPVEENEDIRDIEAVIANIDQELDMWISSEDFIENKIDFLIEHSQKITVSKNNLLIIELDLIGGVIIAGEGIFAVCQETKILSRTKVKNYEVELRLAA

SEQ ID NO: 9909 - protein, 537 aa, Unknown
  Description of Unknown: Integrase B9910 sequence
  IPR011109,IPR038109,PF07508,Coil,PS51736, IPR036162,IPR006119,G3DSA:3.40.50.1390,PTHR30461,PS51737, PF00239,SM00857,cd03768,G3DSA:1.10.10.2600,SSF53041
MKKCIIYSRVSSDHQDYSSQVTELKTYAKLLSLEVDRVFSEKVSGYDPKAERVQFELMKAYLKETDIKIVLMWELSRIARTTLKSLQEIKTFTEQGIDIYFKKEGINTLSDNPSTKLLLSVMSTMAEVERDNIVSRVKRGLEASAKKGKITGYQTLPYGYKSDDGFLAVDEEEAKIIQLIFSKAKEGLGMRGIASLLNSTGVQSRWKKLGRVSKNRMGKTTEILWKPNSIGLILRNETYIGIRKYRKETIVAPSIIDKDLFDEVQKLLDTKPGLRKGRTKHTYLIRGKLFCAHCGRAFGAITEARYNAPSFYFCNGAKDIEIRCKVGQYKSSFMDKVIYDALFLHRDMYSTLANAKKAETDPAEKEQRIEFYKEEIKKGNDRLTRVLELFKGGMIDKKELTKDRDAILRNRAEYEGNIEVLQGDLDTYKNTVIKVEEIYNTYAPEQSVAKRQSFIDKYLDKVTLKKIENPGVDFEKLATKDVKDLKSWEIIVKGEPTKKSHSRFAYIEIYAFGSKIPLKGVIQTSSGILHLSQNYSF

SEQ ID NO: 9910 - protein, 537 aa, Unknown
  Description of Unknown: Integrase B9911 sequence
  cd00338,PF13408,IPR011109,IPR038109, PF07508,Coil,PS51736,IPR036162, IPR006119,G3DSA:3.40.50.1390,PTHR30461,PTHR30461:SF3, PS51737,IPR025827,PF00239,SM00857,G3DSA:1.10.10.2600,SSF53041
MNNNAAVIYARYSSHRQDEQSIEGQLHVCHEYAKRNGYTIVGEYIDRAISGRSDDRPQFQQMIEDAKKKAWKYVIVYKLDRFARNRYDSAIYKHKLKQCGVKLLSAMEQIGDNPESIILEAVLEASAEYYSLELAQKVRRGRIESAGKGKFVGGGVPLGYRSEGGYLVLDEQRAPYVRQIFEQYADGISKREIIDDLNRRGFRNRQGKPLDHNAIHRVLRSEKYVGVLEQSGVRVDGGCPAIVDRATWDRVQARLDLMRRSGAKSPAGSEVEYLLTGKAFCGHCGMSMHGVSGTGKTGNTWYYYQCTGRRKKRNGCKKKHEKKDFLEWYVVEQTVDYILAPERVRKIAAAVVAEYEREFGADQLRQLEDRIAALGREIEKYIDAVVDLPKSARSSLFDKIQRLTDEKEALEVDLAKLRVANRIQLTEDEIVAWLRSFCKGDLFDMDFRRRIIDVLVNSVFVFDDKIIIYYNVRGGKQVSYVEMLESYGEEGCPGPDDDLPEGSTSAAFGPPSETIVEPAIIFAGGLIGLVLPRPVDS

SEQ ID NO: 9911 - protein, 537 aa, Unknown
  Description of Unknown: Integrase B9912 sequence
  cd00338,PF13408,IPR011109,IPR038109,PF07508, Coil,PS51736,G3DSA:3.40.50.1390,IPR036162,IPR006119, PTHR30461,PTHR30461:SF3,PS51737,IPR025827,PF00239, SM00857,G3DSA:1.10.10.2600,SSF53041
MNNTTAAIYARFSSNNQREESLDAQIRAAKEFAKDNDLKITKIYTDKAQSATTSDRPGFLEMIKDSQDDLFDKVIVHKLDRFARNRYDSAVFKRKLRENEVELISVLENFDDSPESIILESVLEGMNEYYSANLAREVSKGMKENAMQCKHNGGLAPLGFDVADDKTYKINEEDAAKVRLIFRMYAAGNGYGPILKKLKEKNYKTQTGRNFSKPSLHDILRNEKYRGVYVFNRSASKKAGKRNHHKSKPEEEIIRIEGGMPRIVSDKTWRRVQRRMDENKKGPGAHSAKEIYLLSGLIECGKCGGSMVGNRRIAGRDRTVYMSYECSTRKRTKECDMKSITKEHVEEIVLDDMVEAMFSAAKIDQLAKDVYNFAKQENEEINADIKRFEKQLKNINSKIDNLTEAVAAGLFQPSMKEKLNKLESEKSDLGLMLNEAKLQAEKNLPTKSEIKAELKGYRNIKNESLKAQRKAIKTFVKSVIIYENNIKVNYIVDLTGGGGGSRTHVLNGSPSSFYECSSAFGLTVSTPLNWITYCQPV

SEQ ID NO: 9912 - protein, 537 aa, Unknown
  Description of Unknown: Integrase B9913 sequence
  cd00338,IPR011109,PF07508,Coil,IPR036162, IPR006119,PTHR30461,G3DSA:3.40.50.1390,PF00239,SM00857, SSF53041
MRARVYSYLRFSDAKQATGASSDRQRAYAQEWAKQNGLTLDESLSMRDEGLSAYHQKHVKRGALGAFLKAVEDEKVPIGSVLVVEGLDRLSRAEPMVAQGQLAQIITAGITVVTAGDNKQYSRESLKANPMDLVYSLLVMIRAHEESATKSKRVRDAIRRMCRGWAEGTYRGLIRYGQTPGWLRVQDGKWELIPERAEAYRYAIERFRSGVGLGPIIQELQVRGLELGTSEARSGQMSRLLSHPALKGEKHLDLDGETFVLEGYYPAVVPKSEWDELQVLVGQRSRKRIRRSIPAILTGAGVTICGYCGASKKTQTMTARMKADGSVPDGNRRLQCCSDNGAIKCPVRSSCSAAPIERALMNFCSDMLNLQSLYSGDATAAPRAAVIAAREKLKKIDSQLDRLTQAMLDDEGSAPAVFVRRAKEMEEQRGHLEHELQTAERALADAARVDITGSEDRWRELAAGVETLDTESRLRARQLIADTFDQIVVYRIGIDPQTTPAGTMDVLLRAKGGKARLLRIDKKGGWVAGAEFAALPA

SEQ ID NO: 9913 - protein, 536 aa, Unknown
  Description of Unknown: Integrase B9914 sequence
  cd00338,PF13408,IPR011109,IPR038109, PF07508,Coil,IPR036162,PTHR30461, IPR006119,G3DSA:3.40.50.1390,PTHR30461:SF3,IPR025827, PS51737,PF00239,SM00857,G3DSA:1.10.10.2600,SSF53041
MYKVYEPLSAEECLEYLRKSRSDDPSLTVEEVLANHELELNEYAEKYLGGRVPENQTYREVASSETIDDRPEMVRLLKAIESPKIKAVLVREPQRLSRGDLEDAGRIIKIFRYTNTLVVTPQRTYDLRDDMDRDYFERELKRGNEYLEYAKKIMSNGKETAVKKGNFIATFPPYGYRKIHYKVDKEKCSTLEIIESQADVVKMIFDLYVYQDMGFELIANRLNELGFKSQKGDLWKKASIQDIISNEAYIGKVRWKYRKTVKTIENQQVKKSNPRNKVSDYLLFDGLHPAIISQELFDLAQAKRGKNIPIRKNLSINNPFAGIFFCAKCGRAMKLRPQNGKNKPRLECSQMKHCQNGSAVFDEILERVCEALEGCISDFEVKLDNNNVDEKERHKQLISSLEKRLKELKEKEIRQWEKYTDEGMPKEIFDMLNDKVLKEKEETKNALCSAYDSMPEPVDYEEKIVTFANAIEALKSDDVSPELKNKYLREIIEKMTYERPKPIILTKELAEQMGVPYPHKLCYHHYPFTLDITLRG

SEQ ID NO: 9914 - protein, 536 aa, Unknown
  Description of Unknown: Integrase B9915 sequence
  cd00338,PF13408,IPR011109,IPR038109,PF07508, Coil,PS51736,G3DSA:3.40.50.1390,IPR036162,IPR006119, PTHR30461,PTHR30461:SF3,PS51737,IPR025827,PF00239, SM00857,G3DSA:1.10.10.2600,SSF53041
MRPAAYCRFSSDAQREASIRDQLRNIEAYCTRSGWPAPALYQDQAISGSRNDRPGYRALLDAAEFGAFDVLLVDDLSRLSRDHIETAQTIRRLKFAGIRVIGVSDGTDTARDGYKLETGLRGLMSEFYLDDLAKKTFRGLMGQALEGYSAGGLPYGYASHAEEGGTRRQINPEQAAIVRRIFERYAAGVSPRAIADELNRDRIPSPRQSTWVHTALYPDAKGVGMLGNPIYNGRPVWNRTAWVKDPVTGRRKRTQRPRSEWVIIDAPELKIIDDDLWAACEARAKAQKRDTASKENAGRGTGGRGPKYLLSGLLRCGCCGAPFIIVDRTHYACSSRKNRGTSTCANAYKVKRATVERELLAGVRDQLLSEESFKEFEAEARAALKAIRPDPQAAKKRISEANREVDNIMTAIKAGIITPTTKAALQDAEDNLAEARETLKAIERFEPTQMLPRAREIYRDLVARLDAIEDISAAREALRALIGEVKLLPENGKLTAEIQNAGLAGVCEITVVAGAGFGRYLTSTEGRRTVRICGLD

SEQ ID NO: 9915 - protein, 536 aa, Unknown
  Description of Unknown: Integrase B9916 sequence
  cd00338,IPR011109,cd16858,PF07508,PS51736, G3DSA:3.40.50.1390,IPR036162,IPR006119,PTHR30461,PF00239, SM00857,SSF53041
VSVIDLHTRQPVDERPGVVLLRNSTPGQKDNARSVKAEEVARALLMSLGITVGAVLDEQGTSGKDLTRRPVARQLVDELQAGKWAALAVIEVSRTSRDPDGVDQRIFKRACRRGRALLVTPTKCYDFRNDSDDLQYEMESVLSAREWRVLRKRTWEGNVERARLLPVFYGFAPFGYRKVAATYTIRGTTRNALVLEKDTEQAGLMEAIGAAMDVEDGLNAVAWRLNTQGWRQPNGSLWYFSQIQQVIKRSYYRGLWTQGEYREANDLYEMEGVERITHERPELAWYTEERVAKWQRKFTSKGPIRVRPQGHDHPALGVLVCSLCRGLMNGQGERGYCCSNRREGRCKGQNLSDLQANGAIRRLLADVLPGLADLTREVRDALTSDARPDDAAELRELDRQIEARFEVATEAKANGVQPPSGFYAKTHDLQERRARLAERMADVDRIESERRRHMARLAEFSDPEQALQLYDEVMTTGERQQFLGYLFKWIVIATNGGRGNRARAWVSDYEATFPSDFKSVSGLGPWTLWLSRFDVA

SEQ ID NO: 9916 - protein, 536 aa, Unknown
  Description of Unknown: Integrase B9917 sequence
  cd00338,PF13408,IPR011109,IPR038109, PF07508,Coil,PS51736,G3DSA:3.40.50.1390, IPR036162,IPR006119,PTHR30461,PTHR30461:SF3, PS51737,IPR025827,PF00239,SM00857,G3DSA:1.10.10.2600,SSF53041
MRTAAYCRFSSDAQREASIRDQLRNVESYCARAGWPTPALYQDQAISGSRNDRPGYQALLAAAEVGAFDVLLVDDLSRLSRDHIETAQTIRRLKFAGIRVVGVSDGTDTARDGYKLEAGIRGIMSEMYLDDLAKRTHRGLMGQALEGFSAGGLPYGYASVAVDGGFRREIKPDEARWVRYVFERYAAGASTRAIANDLNAMKIPSPRGGTWAHSAMYPDSKGVGMLGNAIYNGRQIWNKTAWVKDPISGRRRRTMRPHSEWVIIESPELKIIDDDLWRACEARAKVVKRDTAGRREAGKNSGGRSAKYLFSGLLKCGVCGAPFTIRGSRYYGRSNYQNRGASVCGNSVSVKKATIERVLLATVKESLLVEDAFKAFEAEARALLKEARPDPGLARRKLAAANKELDNLMSAIKAGIITPTTKAALQEAEGQVASAAEELKAIERFEPTQMLPRAREIYRNMVAQLEEIDDVSAAREALRGLIGDVRLIPENGKLTAEIQSAGLAGALYETVVAGAGFGRYLPSTEGRRTVRICGLD

SEQ ID NO: 9917 - protein, 536 aa, Unknown
  Description of Unknown: Integrase B9918 sequence
  cd00338,IPR011109,PF07508,PS51736,IPR036162, IPR006119,PTHR30461,G3DSA:3.40.50.1390,PTHR30461:SF3,PF00239, SM00857,SSF53041
MPFLGGFAVHFGIYGRKSYFKDTSDSTQMQFSEGDKYIAEHFFPDEIESVTYYEDDGWIRSDMDRPDLNRLKDDILAGLINVVVIYKIDRLCCDMADFVPFYAFLKDHGVKFITIKDGIDTTTPIGEAMMYLAVIFSGLEVQTDSLRITDNMNHLAAEGFWCGGKPPIGYNIQEISLGAKSHKTLVFNEDEIRYKNTLIDIFLENHFSLQSMETYCKNHGITSLKGSFLSTTQLYSMFGSPMCVANTPAMYDYFADKGCQMSEGSPRDAWDGKHGIIVYGRTMEKKVSGKKKHIQAPPENWRVSIGYHEPYMTDERFFAIQAQFGHNVFSKQSKYDLPLLKGSLRCKCGRLMSMSRKKKADGSISTWYYCPRRMRNGVDACDMIQTKADLLDNRVISIFQEIEHDPAALKKYLKEEKRQPQDNAAALRAAMEKCQAKIGKLTATLSLNSESAAAKYIVNEIEKLDIEYNSLRKRMLSANAVDRKNALNMKNAMEKREEIIRLLNDFDNFTPNERNEIAKDVLKECVWDGDTLFLTL

SEQ ID NO: 9918 - protein, 536 aa, Unknown
  Description of Unknown: Integrase B9919 sequence
  cd00338,PF13408,IPR011109,IPR038109, PF07508,Coil,PS51736,G3DSA:3.40.50.1390, PTHR30461,IPR006119,IPR036162,PTHR30461:SF3, IPR025827,PS51737,PF00239,SM00857,G3DSA:1.10.10.2600,SSF53041
MYEDIKTACLYVRFSSHNQTEQSIEGQTRVCRDFCKRHNIRIVEIYADRATSASKDIEKRVQFLKMIKDSERGLFDAVIVYKLDRFARSRYDSATYKYRLKRNGVQLISATENISNDPEGIILESVLEGMAEFYSAELSQKINRGMRESAYKHNSIGGAVPLGYKIEDKKLVIDPKTAPIVKEAFEKYADGETVAEICRQFNARGYKTSKGTTFGKSSFTKIFRNERYIGVYSFHDYRAEDAIPAIIDKDLWDRVQLRVGKIKNAPARNKAKVVYLLSGKIFCGHCGSKMNGNCNAGNYYYYQCYGKKNGNVDCKKKNIRKEFIERLVAQDALSLLTDEYIEQIATIACEKNQHEIELDSALPTIRDRIHQVDLSLNHLLKAIESGSAPDMLVKRMGELEKEKKDLQAQAKKESEDIVELDKAQVIYWLEQFRGGSIEDQEFCRMLIDLFVNSVTVWDEDDNTYKVTVAYNLTSLPTKTYRLNKGGTLSDFASNAPVPHSRTLRQRLRRRRLWSALMCLTLTAIWTGTGSLPASTW

SEQ ID NO: 9919 - protein, 536 aa, Unknown
  Description of Unknown: Integrase B9920 sequence
  cd00338,PF13408,IPR011109,IPR038109,PF07508, PS51736,G3DSA:3.40.50.1390,IPR036162,IPR006119,PTHR30461, PS51737,IPR025827,PF00239,SM00857,G3DSA:1.10.10.2600, SSF53041
MKLTHGAYILARFSTDRQEADSIEVQVSKCREWCERQRLPVLDVFADEAVSGMKETRPQFDRMMRLLSEGGADTVVIYDQSRMFRKMTAWFTLRERLERLGVRVVSVTQPMIGGDLRDPATFMSEGGMALMNQMWVLQTRQKVCEKMRWMAEQGKYTGGVPPLGYVVIDGRIEVCEPEAETVRIIFGDYAAGRSYREIIQRLNAEGRRTKSGGTFGSNSLHDLLKNEKYIGVLTYGRTQKRPDGSRNSHAVASTVMRMEGMIPAIVDRETWDIVQEKLMANKRKQAGRPVRVREYPLKGKVFCGECKASMSVTCSQGGYYYYACSEKKRKKTCDNMPIKVDDLERMIAEAIKNLLGNPENVDGLICILREERGKIQEQTAMRMKALFDRQAEIKKQLDAAMSAVLAGMHSQSLIDTVHALEAEQAQNDREMTTLHNQAQGTTIPEDRLRELLKVAANDIPALLSVVVRVEVGKDRIRVWTLLDAKPDGTFDFNADWDDPEIGLIIIPGVAPPVPRIIINGGLLCFSLPRQKKNRAE

SEQ ID NO: 9920 - protein, 536 aa, Unknown
  Description of Unknown: Integrase B9921 sequence
  cd00338,PF13408,IPR011109,IPR038109,PF07508, Coil,PS51736,IPR036162,IPR006119,G3DSA:3.40.50.1390, PTHR30461,PTHR30461:SF3,IPR025827,PS51737,PF00239, SM00857,G3DSA:1.10.10.2600,SSF53041
MEELTQEPCFVYARYSSHAQRDVSIEEQLADIEVYCRQNNLRIVEVYADRALSGTTDKRPRFQQMMKDAAHGKVRYVVVWKTDRFARNRYDSATYKYRLKRYGVRVLSAKEAIPDGPEGILLESVLEGSAEYYSANLSQNIKRGMRYNATLCKVNNGSMPYGYCKGEDGRFAIVESEAEVVREIFRKVAEGVPFVEISNDLNGRGIRTKTGGLWGRNSYHGMLKNEIYVGVYRYSDVRVEGGAPAIVDKARFLEVQQRLATKKNPQGRHRENGEYMLTGKLFCGLCGSPMVGVAGTGKHGELHHYYVCQKRRREKSCSKENVNRDWLERFVVQSTLDYVLQPEVIEWIADAAMEYQEREGNSAVLLGLRDELDANAKATANVMKAIEAGIITVTTKARLTELEAEAARLRDAITVEEAALTHIERDYLIYWIKRFCGGPIEDAAFRRKVIDTFVNSVYLWDDRIRIAFNYHGKGSTVDAELVTNAEGAAGAVDGVAVEGSYKLSGAPPMGSQTNPAATIFFVGPVFVLAMPLPEKR

SEQ ID NO: 9921 - protein, 536 aa, Unknown
  Description of Unknown: Integrase B9922 sequence
  cd00338,PF13408,IPR011109,IPR038109,PF07508, Coil,PS51736,IPR036162,IPR006119,PTHR30461, G3DSA:3.40.50.1390,PTHR30461:SF3,PS51737,IPR025827,PF00239, SM00857,G3DSA:1.10.10.2600,SSF53041
MPEALNAVIYARYSSDRQTEQSIEGQLRECYAFAKANDIAVIDTYIDRAISGKTDNRPAFQKMIEDSAKRQFQAVIVYRLDRFTRNRYDSAIYKARLKKNGVKVLSAMENLNGSPESIIMESLLEGMAEYYSVELSQKITRGMRENALKGKALGGQRVLGYKVNSDCYFEIDETTAPVVVDIFKLYSSGKTVKEICDILNARGVKTARGGAFNKNSLHTILTNKKYIGIYKTKYGEIVGGIPAIIDKELFEMVALRMEQNKKAPARAKAEINYLLSTKLFCGKCRSAMVGESGTSKTGKKYYYYACVKKKREKACDKSNVKKDWIEDLVIQRTVTDILKDDVIEKIADRLVELQKAEAAQSGTMLYLENSLAEIQVSIKNIMTAIEKGIITESTKTRLTELEDEKRNVEIEIAKESIARRIISREQIIYWISSFKDGDITSEKYRQQLIDTFVHAVFVYDDKIVITYNYSGENNTATISDLDLSSPPNQKSEPLSEGTEVRIFLVCSWYCRGMNSKRRMHDPWSIICSCVAQRSTT

SEQ ID NO: 9922 - protein, 536 aa, Unknown
  Description of Unknown: Integrase B9923 sequence
  IPR038109,IPR006119,PS51737,PF00239,G3DSA:3.40.50.1390, PTHR30461,IPR025827,SM00857,G3DSA:1.10.10.2600,SSF53041, IPR011109,PF07508,PS51736,mobidb-lite,cd00338, PF13408,Coil,IPR036162,PTHR30461:SF3
MPRKKKLQEVGGLRLVAYYRYSNGGQQTEQSIEGQRRDCEAYAKAHGYKIVHEYIDRHISGKSDSRPAFQQMISDSDSHLFDAVICWKTDRLARSRYDSIIYKTRLRRNGVKILYAAETVVDGPEGIIIEGLMESLAEYYSAELAQKLRRGQRESALKCIALGGNRSFGYDIGPDKHYCINEKQAPAVRYIFEQYAAGATAADIVRELTARGYRTSRGNPFNKNSICRIITNEMYLGVYKYADIRIEGGVPAMIDRELFNRCQTQLAFNRAHGGGKGAPRADYVLVGKLDCGLCGHAMKGASATGHTGSKHYYYTCTQHVEKKCPKTSIEKNYLEQIIVDGVAKYVLTPEKISQIVDCMMELQAKEQEPKGNPEKDALEAELAECRRKQNNILEAIEEGGSARLAARLRALEEQEAQLTFALSEINNAPTPPQFSREALTFMFEQFRREEDEVDEEYRRRILDTFVSSILLYEDRAEVKFNITDQETGDFERVILPISANKKPPEDDDTTSNSEGSTALRLVEAMGVEPMSEKSSA

SEQ ID NO: 9923 - protein, 536 aa, Unknown
  Description of Unknown: Integrase B9924 sequence
  cd00338,PF13408,IPR038109,Coil,G3DSA:3.40.50.1390, PTHR30461,IPR006119,IPR036162,PTHR30461:SF3,IPR025827, PF00239,SM00857,G3DSA:1.10.10.2600,SSF53041
MNVEHQFSPRVFVAAHLRDSGGEDQDLSIEQQEKEIRAWCIQKGYILTLVFKDEARPGSSTVAREAFQDMMRHFRSSDCQEQGVIIWKFSRFARDIDDAQFYKADLRRRGYQILSMKDQVPDGLDGRFFEAAIDWMNARFLDDLSTDVKRGLRHLVSEYGGVPGTPPRGFKREIVNIGTHRNGKPHTISRWVPDPETWERAKLAWKMREQGASYNDIRAATGNLYTTNSGIQHFFENRLYRGELHYGDQIIKDYCKPMITEETFQTVQRLNQARSTKAGIQRGENHPRRLKSDYILSGLVRCAQCGALMNGDTITSRKKNITNHYYACTDMKLKRGCSARRIPRDTIETAVLDELIGYLSDPDNIQQLQMEYAKRKSTENADLEAEKRRVTVELGTVKGGITRIVEAITAHGHNQTMLDKLTSLEKRKTELQTQLEHLNRITFSTPSDELPHVAASITKALRAADRNTKRTVLRGLVDRITAERIDKSVQGIIHFYLPQFMPMQQSHRRDSYYNLITIPFISSHSTGSHAPHPAQP

SEQ ID NO: 9924 - protein, 536 aa, Unknown
  Description of Unknown: Integrase B9925 sequence
  cd00338,PF13408,IPR011109,IPR038109, PF07508,Coil,PS51736,G3DSA:3.40.50.1390, PTHR30461,IPR036162,IPR006119,PTHR30461:SF3, IPR025827,PS51737,PF00239,SM00857,G3DSA:1.10.10.2600,SSF53041
MNKTAAIYARFSSNNQREESLDAQIRAAKEFAKNNDMKITKIYTDKAQSATTSDRPGFLEMIKDSQTELFDKVIVHKLDRFARNRYDSAVFKRKLRENEVELISVLENFDDSPESIILESVLEGMNEYYSANLAREVSKGMKENAMQCKHNGGKPPLGFDVAEDKTYKINEEDAPKIRLIFKMYAAGNGYGPILKKLKAKGYKTQTGRNFSKPSLHDILRNEKYRGVYIFNRSASKKVGKRNHHKSKPEEEIIRIEGGMPRIVSDKTWRRVQRRMDENKKGPGAHSAKEIYLLSGLIECGKCGGSMVGNRRIAGRNRTVYMSYECSTRKRTKECDMKSINKEHVEEVVLDDMVEAMFSAANIDELAEDVYNFAKQENKEINADIKRFEKQLKNINSKIDNLTEAVAAGLFQPSMKDKLNKLEDEKADLELMLNEAKLQAEKNLPSKSKIKAELKSYRNVKNESLETQRKAVKTFVKSVIIYENNIKVNYIVDLTGGGGGSRTHVLNGSPSSFYECSSAFGLTVSTPLNWITYCQPI

SEQ ID NO: 9925 - protein, 536 aa, Unknown
  Description of Unknown: Integrase B9926 sequence
  cd00338,PF13408,IPR011109,IPR038109,PF07508, Coil,PS51736,G3DSA:3.40.50.1390,PTHR30461,IPR006119, IPR036162,PTHR30461:SF3,PS51737,IPR025827,PF00239, SM00857,G3DSA:1.10.10.2600,SSF53041
MARKKSQEKAAATAAIYARYSSTAQNDASIEQQIAECEQYAQANNLTIVARFEDRAISGRSDKRPGFQKCLRAADRGEFQVLLAYKSNRISRNMQSALNYEQRLANAGVRVVYCKESFSDDATGRFMLRMMMNMNQFYSENMSEDIRRGMVDSVSKGKVVGSVPYGYRKGADGKYEIDEPAAAVVHEIFARYLKGETIADIRRDFNERGLLTRQKRPWAKNSFHAILVNEKYTGSYTFGEVRIEDAIPPIIDKGVFAMVQKKLDWEKVARKRHRGNVDYMLTGKLYCGYCFAPMVGMSGRSHVGREHFYYACQTRRTKRTCDKENVRKDDIEQKVVEIVQNCILDDETVMWMADALIEASKRFKEQSNLTQLESHLRDIKKQIGNIVRAIEMGVAGDEVKERMDELQEEKRNYEGLIAIEKLAVKDYDKGTVLGYFESIKRGDPTDKDFQKMVIRDFIKAVYVYDDHLRIVVDFTGENNSIDVPFGGTSAGESSADGVRLMTDKVYHISHRRTLEQRNSIEFTAQGFVIIWYFSEK

SEQ ID NO: 9926 - protein, 536 aa, Unknown
  Description of Unknown: Integrase B9927 sequence
  cd00338,IPR011109,IPR038109,PF07508,Coil, G3DSA:3.40.50.1390,PTHR30461,IPR006119,IPR036162,PTHR30461:SF3, PS51737,PF00239,SM00857,G3DSA:1.10.10.2600,SSF53041
MKTAVVYARVSEARNSEDGLPLESQVEQCLKKAESLEASVINTYVDNGISGTTDARPAFKEAFLFCELKRPDYFITWSPERFARNKMHAALYKEKLCEFGVKLVYVAMDIDTGTLGGWFLDGILDVVNQYQALKVSVDVRRSMMKVARDGFWTGGRPPFGYRVVPAGNGTSRKKMVPDEAEADVVREIFRLKTSDHLGCRSIATMLNEKGLLNRGRPWCKSTISYILNHRAMIGEVAYGKRETTTGKRKPLDECIIIKSHEPIISQELWHQAHAALQVDRANTDTSRATSRFLFTGLMMCSCGSSMQTESASGRNRRYWYYNCRAAAERKLHAPRRIAAKDFDHWLLNSICDQLITERTLDGFIQEVEEAAAAWVSDNTRRRNIVLRQISAIEHKINNLYAILEETGAGTPNILDLTPRLRSHRHALGALEDQLKRIDAELPPAIDVQKLNPDALRKMVMKEFASSSVRKIRAFLKTFISGVTVLDDEVRIQYNAAALLGGGGGSPDVQHGPPDTLSKNRLKCLILQLPDWARKAA

SEQ ID NO: 9927 - protein, 535 aa, Unknown
  Description of Unknown: Integrase B9928 sequence
  IPR038109,PS00397,IPR006119,PS51737,PF00239,G3DSA:3.40.50.1390, PTHR30461,IPR025827,SM00857,G3DSA:1.10.10.2600,SSF53041 ,IPR011109,PF07508,PS51736,mobidb-lite,IPR006118 ,cd00338,PF13408,Coil,IPR036162,PTHR30461:SF3
MGSVIVLLVMIYLRVSTRDQERKGYSLPEQSEACRMKAREIASETEKATGKQVDLQIVEFTDTFGGDVAERPVLEEVRDFVRARRPAWFVCMDPDRFSRELTLQLVVTEEIEKAGTRLAFVLHNYEKTAEGKLFYQMRGAISEFEKAKILERTSRGKRGKVKAGRRPNGAEPYGYRHNKETDQLELYEPEAQWVRQIFAWIAEENITSYEVALRLNSLGVRTKRNRRWRGSTVRDIIRNTSYIGQMRCNRWDLRGLSSVRRLPKGKRPNLTAKFRPPSDWKTVPVPALVDPDLFALVGSRIRESTKKGGRRHAGLLSMLVRCGVCGGHMAYSRNNQTGRYYIKCNRRYADLLNYIDRTRCPNRHHHAAVIEAEVWQQIAKWLTDPRLLEVYLQELHSGPDLEGQVGALTKERNLVAGELADRRREQATVISQLSKGNIRESEADALLAGLRPQVDYLEQRLATLDQQVRSLQESIGQAASAAARARELSEAIAAEQADVHRLLESMDQQRRRELVLQIVREVIIKGDGTWTILPV

SEQ ID NO: 9928 - protein, 535 aa, Unknown
  Description of Unknown: Integrase B9929 sequence
  cd00338,PF13408,IPR011109,IPR038109,PF07508, Coil,PS51736,IPR036162,PTHR30461,IPR006119, G3DSA:3.40.50.1390,PTHR30461:SF3,PS51737,IPR025827,PF00239, SM00857,G3DSA:1.10.10.2600,SSF53041
MNAVIYARYSSHGQTEQSIEGQLHDNYAWAEQQGITVIGEYIDRALTGTKDQRPDFQRMIADAAKRQFELVIVWKLDRFARNRYDSAIYKARLKKYGVKVLSVKENITDSPEGIILEGLLESMAEYYSANLAQNVLRGKRETSAKGNWNGGRVPLGYKAVDGKLVADDKTAPFVQYLFHRYAEGASKADVIRELNEKGLRNRNGKPITYSSIRTVISNTLYIGQAMYDGEVVEGLAERLIDDDLYYKVQAQIQANARAPGTYKARVDYLLRGKAFCGHCGFPMVGQPGQSQNGVQFYYYACSGRKRKKTVCKKKYENKDFIEKYVVEQTVQYVLTPERIGFISKAVVEEYRKEFSKSQVSDYQKSLDQISGELERLVDALIDSPKPARASIYARMESLEAQKADIETCLARLKVASEIQLTESEVSSWMKQFCSGDPSNEDFRRRIIDVFINSIYLYDNRIVIFYNIRGGKQVSYMDLVNSSELPADNECSDLVRFAPAKSNKSEPYFVFVNGVIGCVFIRKKDELPKSKRKPLC

SEQ ID NO: 9929 - protein, 535 aa, Unknown
  Description of Unknown: Integrase B9930 sequence
  cd00338,PF13408,IPR011109,IPR038109,PF07508, Coil,PS51736,IPR036162,IPR006119,G3DSA:3.40.50.1390, PTHR30461,PTHR30461:SF3,IPR025827,PS51737,PF00239, SM00857,G3DSA:1.10.10.2600,SSF53041
MNDDKLTTGYIYARYSPGPQQTEASIEGQVRECKEYADRNGIRIINVYSDSKQTGRNDNRAGFQRMLRDCKRGGVSVILVWKIDRFGRNRAEIAQNRALLKLSGVKVISAMEHIPETPEGIILESVLEGMAEYYSANLAENVRRGLKENALQCKSNGAGQSIGYIVGDDRHYAIEPNEAAIVKRIFTEYDEGAKIADIWRGLMADNVKTKRGKDFTQYGIARVLSNRAYIGEYRYADIVTPGGMPRIIDDDLFNRVQERRKAGGRAPRRRGISSVVDFMLTGKCFCGCCKGTMRGTSGTSKSGRKKYYYTCHNKAYKHTGCTKQNVCKEWLEREVTRITAEYILTDSVIDMIADNVVKVQAAELADKTMLHYYQAQLKETQAALNNLLKAIEAGLVTSTTKARLFELEERKAALEIDIEKEKIQHPPLDKRQVMFFLQRFKGGDVDDQTYQQQIIDLFVNKVILYDDKLIITYNVSGSNNEVSAEIVENAAFSAEGDVFDLMHVKSTICRKVEHPTIILFFVGGLFGLSVKTREA

SEQ ID NO: 9930 - protein, 535 aa, Unknown
  Description of Unknown: Integrase B9931 sequence
  cd00338,PF13408,IPR011109,IPR038109,PF07508, Coil,PS51736,G3DSA:3.40.50.1390,IPR006119,PTHR30461, IPR036162,PTHR30461:SF3,IPR025827,PS51737,PF00239, SM00857,G3DSA:1.10.10.2600,SSF53041
MKQSTQPTTNAVIYARYSSHSQTEQSIDGQLHDAYEFAQREGYTIVGEYIDRAQSGTKDNRHDFQRMIADAPKKQFQAVIVWKLDRFARNRYDSAIYKAKLKKFGIRVVSVMERIQDNPEGIILEGMLESMAEYYSANLAVNIRRGQRESIAKGRFCGGAVPYGYKNADGHLIADDKTAPIIREVFSRYAAGDSMKDIIDDLKKRGVKSSSGGELTYTTFSRALLNRAYIGEYAYNGEVVQGCADALIDADTFGKVQEKVAARRRAPAAGKAKVEYLLQGKCFCGHCGGHMIGESGRGRHGATYNYYSCRNRKKNHNCDKKNEKKDFVEWYVVEQTLEYILTPDRMDKVAAAVVAEYNKEFGDGPIKEKERQIKKIGKELDNLVDSLSEAPKAARPRIYARMEELETQKADIEVDVAKLKIAQGIRFTEAEVKAWLKQFCKGDLLDEEFRRRIIDVFINSVYLYDRRVIIFYNIKGGKQVSYIDVAEADIEGSGGEGVSDLIANAPPNASISEPRFIFVNGVFGIVLERQEEQGE

SEQ ID NO: 9931 - protein, 535 aa, Unknown
  Description of Unknown: Integrase B9932 sequence
  cd00338,IPR011109,PF07508,Coil,IPR036162, IPR006119,G3DSA:3.40.50.1390,PTHR30461,PS51737,PF00239, SM00857,SSF53041
MPLAPEYLHLVFPDQVFNALLYGRNSRDPKKKGRSVEDQLADGRALCDRFGWPVLEEFKDTGISASRHGRKTRDDFEALLDTIETGVARIVVAFEASRYYRDLGAYVELRNACHEANVLLCYNGTVYDLSKRDDRRATALDAVNAEDEAEGTRDRIIRTARRTAEAGGAWGHLVFGYRRKYDENTGELIGQFEDEIQGPIVVEQLKRVDGGGSLHSVIKSLKNNPDAKRADGSEWTDNNVKYMLLNRVYLGERLHHGKAVKAKWKPLKGLETPEGRALFRRVTQILTDPARGGQFDSRAKHLLTGIPLCGSCGDDTPLKSNQRGAAAKKLNIYTCSEKRDVSVSERMLDAYVEEALLSWLRNKDQARAALLPDEAQVADDVRRAQSLLETYRDEMEEARRLNRTRNEQGRPLLSLASLSQKELELLPQIEELEGRLQKATGVPLLIQQLLTAPDPEEVWNGGGGAPGLSLEQKREAIRQIVTVRVYKATTFGRKFNPERVKLSFVGADGFRVSRTRARGTARGRAGARAAARGTE

SEQ ID NO: 9932 - protein, 535 aa, Unknown
  Description of Unknown: Integrase B9933 sequence
  cd00338,PF13408,IPR011109,IPR038109, PF07508,Coil,PS51736,G3DSA:3.40.50.1390, PTHR30461,IPR006119,IPR036162,PTHR30461:SF3, PS51737,IPR025827,PF00239,SM00857,G3DSA:1.10.10.2600,SSF53041
MQKNNKSIGNRCVIYARYSCSNQTEQSIEGQMHDCEQFAARNNLQIVNSYIDRATTATTDKRPQFLKMIADSKQCVFDVVLVWKLDRFSRNRYDSAMYKKKLKDNGVRVMSAMENITDSPEGVLMESVLEGFAEYFSKDLSQKVKRGMRETAAKHKITNRIPFGYCKSEEDTYIPDPHTANAVRKVFDMYITGFRKSDIADWLNSNGYKTSYGNQFTLTAITPLIKNTRYIGKYYYADNEYTDETQRIVTDDIFYKAQQKAIANQHGGSCKAIERYLLSNKLYCGYCHNKMIGECGKNQNGLAYHYYTCVGRKRKHICNRKNIKKKDIEQYVINAISCLLNDEYAINKIIETAINYQQNDVEHINEIKDIESTIKEIERKISNILSAIEAGIFTDSTKNRLQELENQKTRLTQELNYKNQSSTKIPRTTLKQILKNLDLSKDATNPEKQNIIDLLIHRIYLWQDKILIVFNQSNLCDNEISVDDTDVNTIIKTLSEPNASSSDSVEYGTPYLLISEFLQLYMYKNIAYQIFTIQQ

SEQ ID NO: 9933 - protein, 535 aa, Unknown
  Description of Unknown: Integrase B9934 sequence
  cd00338,PF13408,IPR011109,IPR038109,PF07508, Coil,PS51736,G3DSA:3.40.50.1390,IPR006119,IPR036162, PTHR30461,PTHR30461:SF3,PS51737,IPR025827,PF00239, SM00857,G3DSA:1.10.10.2600,SSF53041
MMDADMQNCVIYARYSSHAQKDTSIEDQVRDIEVYCKLNNLNIVKVYADRHLTGTSDKRPQFQQMMQDAARGRWQYVVVWKTDRFARNRYDSATYKYRLKRHGVRVLSAKESIPDGPEGILLEAVLEGSAEYYSANLAQNIKRGMRANALQCKVNNGSLPYGYCKGPDGRYAIVPAEAEIVKEIYRKAAGGALFVDICRDLNARRILTKRGTPWRKSSFEKILKNEIYRGVYHYADIRIEGGVPRIIDDALFAEVARKMKSKANAHRRRRKDSEYMLTGKLFCGECGSTMIGVSGTSRNGDTHYYYSCSKRRTEHSCNKRSVAREQIEQLVVNAALDAVLQDDVIAWIADQVMRYQDREGKSAQLEALREELKAKEKAISNMLDAIEAGIITASTKQRLHDLEEQRRQLKSDLAVEEAATTHIERDFIVYWLERFRDGDRNDKDFRRKVIDTFVSAVYLYDDHVRIAFNYTSTQNIVEKEIIDKKFVDGAEDAAGANGSYKLAYAPPNATHTNHPTVIFFLGSVFVLSMSIPTEF

SEQ ID NO: 9934 - protein, 535 aa, Unknown
  Description of Unknown: Integrase B9935 sequence
  cd00338,PF13408,IPR011109,IPR038109,PF07508, Coil,PS51736,IPR036162,IPR006119,PTHR30461, G3DSA:3.40.50.1390,PTHR30461:SF3,PS51737,IPR025827,PF00239, SM00857,G3DSA:1.10.10.2600,SSF53041
MEVLKHPNYPWAAEKINAVIYARYSSHSQGEQSIEGQLEKAYAYAAAKGYRVVHEYVDRAQSGRTDKRDEFQQMLKDTAKKQFQVIILWKVDRFGRNREEIALNKIRCKKNGVRVEYVAENIPDSPEGVILESVLEGIAEYYSLQLSQNVRRGQAISVQKCQSVGGVRPLGYLTDKDKKYIIDPKNAPTVKLIFSMYAEGSTVTEIINHLNSQGLTTVKGKPFSKNSLYSILNNEKYTGVYIHNGTRTEGGMPQIIEPELFHKVQELMKINKRAPSHKWSHADYILTDKLFCGKCGTAMVGECGTSKSGTTYNYYICSKRKRFKACDKKAVRQDWIEGIVLREIKKILANDKLLEFIADNTYQYYMKQNAAEEELRIIRDKLKDVELGIGNIVKAIEAGMFNPALSKRMNELEEQREALLQATAEIEITQVFKLTKEHILFFLHEFKKYDFENVECQKRLVATFVNAIYLYDDKIILTFNYSGDSRTVTLAEIDAVTEGEVFGCCAPWSAMTNTYEHPIVWFSHVFAITVKIPQE

SEQ ID NO: 9935 - protein, 535 aa, Unknown
  Description of Unknown: Integrase B9936 sequence
  cd00338,PF13408,IPR011109,IPR038109,PF07508, Coil,PS51736,IPR036162,IPR006119,PTHR30461, G3DSA:3.40.50.1390,IPR025827,PS51737,PF00239,SM00857, G3DSA:1.10.10.2600,SSF53041
MNRNRTNLNPNGLYYAYLRKSRADRDAEARGEGETLARHQKLLTDLAASLGVTISRFYKEIVSGENIKDRPVVQELLRDISTGICDGVFVVEVERLARGDTSDQGTIANYFKLSDTLIITPLKIYDPNDEYDEEYFEFGLFMSRREYKTINRRIQRGRRASVEEGKWIASTAPYGYERVRIPNDKGYTLKIVPEEAEVVRLIFDLYTTGEQQPDGSYQRLGHYRISKKLDSMGVKPRNSARWSPSSIKDMLRNPTYIGKVTFGKEQDKKIIENGVPKTVRVKNADYTLYNGLHPAIISEEQFYLVQQYVDSRPIFPVVSNKELKNPLSGLIRCTQCGSLLTRAASNTKTNYPVLKCSNRDCSTVSAPLYLIEEKVISSIAEWFEEYKLSWTDDQIISNQIQVTENALASYQAELATLNEQKNKAYDFLEQGIYTPEVFSSRISLLDEKMSDVKLEISRLEFSLKLDRKKEYETNTFLPRVEKLLNSYWDTEDSMVRNHLLQDVVLKIDYTKNEANKKFQRDNANFKLKIYPKLPV

SEQ ID NO: 9936 - protein, 535 aa, Unknown
  Description of Unknown: Integrase B9937 sequence
  cd00338,PF13408,IPR011109,IPR038109,PF07508, Coil,PS51736,IPR036162,G3DSA:3.40.50.1390,IPR006119, PTHR30461,PTHR30461:SF3,PS51737,IPR025827,PF00239, SM00857,G3DSA:1.10.10.2600,SSF53041
MARKKAEKTDGNICVVYARYSSHAQNDASIEQQVAECREYAAAHDLKISDIYADRAISGRSDRRPEFQKMIRHAEAGRFQVVLTYKSNRIARNMLDALRYEERLEKAGVKVVYCKENFGDNAAGRLALRMMMSLNEFYSENMAEDIRRGLIDGAKQGKVMGCIPLGYKKGEDGCFAIDEPKAEIVREIFRRVSENETLASIADDLNARGIQTAYKKPWGKNSFSTLLSNERYIGVYIFAEVRIEGGMPAIIDRALFEDVQEKVRRRKEVAGRRRDYAEYLLTGKAFCAKCGAPMVGISGTSRNGTPHYYYVCKTRREEHTCKKLNVRKEAAEREIAFRLKNTILQPNVVEWMIDNVMRFQEEARKQSDLASYQNRLVEVKRSLDNLVKAVEAGVFSQSTKARLDELEAEQRELQGMIAVEQAKIKTVTRDQIEYYIDSFRDGDVDDPAYQKRLFKAFLVKVFLDDDKFRIVYNYADGLDAMEFPLTLEEIESAYVTAECSYKPCSGPPQPAETNTTWSISMIKGVFVLTVYCSIR

SEQ ID NO: 9937 - protein, 535 aa, Unknown
  Description of Unknown: Integrase B9938 sequence
  cd00338,PF13408,IPR011109,IPR038109,PF07508, Coil,PS51736,IPR036162,IPR006119,G3DSA:3.40.50.1390, PTHR30461,PTHR30461:SF3,PS51737,IPR025827,PF00239, SM00857,G3DSA:1.10.10.2600,SSF53041
MIEKVKSPIKYFLYARKSSESEDKQVASVPAQIKELKDLAKQRNLNVLDVLTEEKSAKAPGRPVFNQMMEDIHQGKAQGIICWKLDRLARNPVDGGQIGWLLQQSIIKHIHTYQREYFPTDNVLMMNLEFGMANQFILDLSVNTKRGLRNKAEEGWLPNKPPLGYLNNKYNLPELPPIYNDPERFSLMKQLWDILLKRQCSINTLYQKAIEIGLVTDKGKPIARSKFYLLFKNPFYYGCFYWKDRLYSGKHNPMINKAEYDLAQVIISGNKPSFYHNHVFAFTGMIKCGECGAGITAENKTKHQKNGNVHHYIYYHCTKKINPNCSQKTIRDTELERQIIDILDKIEIPSMFHQWAIKYLKEEQSKETVDREEILCSQQKRLDVCKRKLNSLFEMRINDEMDASEYMQRKEKLAEEKQRFEQLIADNNHRFDTWLDNAEKLFSFAETAKKRFESGNLVVKREILACLGSNLILLDRKLSIQLQEPLSIFTKYSPELKVLHNRLEPLQDKSEQEVMEVISTGNEIWGGGLWSLRRI

SEQ ID NO: 9938 - protein, 535 aa, Unknown
  Description of Unknown: Integrase B9939 sequence
  cd00338,PF13408,IPR011109,IPR038109,PF07508, Coil,PS51736,IPR036162,PTHR30461,IPR006119, G3DSA:3.40.50.1390,IPR025827,PS51737,PF00239,SM00857, G3DSA:1.10.10.2600,SSF53041
VVRGVIYARYSSDNQREESIDAQVYEIKEYARANNIYIVKIYTDEARSATTDNRPGFLKMIDDANKGIFEVILIHKLDRFARNRYDSAFYKRELKTAGVKLISITEKLDDSPESIILESLLEGMAEYYSKNLAREAMKGLKENARSCKHNGGRPPLGLDVEPTTKQYIISTNTKEVESVKLIFDLYDQGLGYGTLIKELHLKGYTTKLGGKFSKNSLYELLRNEKYIGTYLYNRSASKSDGKRNNHKSKSEEEIIKVENAFPAIIDKDLFERVQEKMDTRKHAKARNKAKVNYLLQGLVYCNECEAAMVGNSGSYKTKTETVRYSYYECNKRNRQKNCNNPRIRKEILESIVLDKLYQEIFAPERVSVLVQKINEYNQKTATERNAELELLETELKETKKQIDNLVMAVANGAPFASFSDKLNELENKKAMLETRLEESRALALRSLITEDMIINYLNQHLQAVEDKDIDACKKFIGNYVEKVVVSLDFIDIHFYLKFLDIDGGGGAYRSISKIHKRDINVKPVGATPTGLLFLQ

SEQ ID NO: 9939 - protein, 535 aa, Unknown
  Description of Unknown: Integrase B9940 sequence
  cd00338,PF13408,IPR011109,IPR038109,PF07508, Coil,PS51736,G3DSA:3.40.50.1390,PTHR30461,IPR006119, IPR036162,IPR025827,PS51737,PF00239,SM00857, G3DSA:1.10.10.2600,SSF53041
VLRGVIYARYSSDNQREESIDAQVYEIKEYARANNISIVKIYTDEARSATTDNRPGFLKMIDDANKGIFEVILIHKLDRFARNRYDSAFYKRELKTAGVKLISITEKLDDSPESVILESLLEGMAEYYSKNLAREAMKGLKENARSCKHNGGRPPLGLDVDPATKQYIISANTKEVEAVKLIFELYDQGLGYGTLIKELHLRGYTTKLGGKFAKNSLYELLRNEKYIGTYLYNRSASKSDGKRNNHKSKSEEEIIKVENAFPAIIDKDLFERVQEKMDTRKHAKARNKAKVNYLLQGLVYCNECEAAMVGNSGSYKTKTETVRYSYYECNKRNRQKDCSNPRIRKEILENIVLDKLYQEIFVPERVSILVQKINEYNQKTTTERNAELELLETELKETKKQIDNLVMAVANGAPFASFSDKLNELENKKAMLETRLEESRTLALRSLITEDMIINYLNQHRQAVEDKDIDACKKFIGNYVEKVVVSTDFIDIHFYLKFLDIDGGGGAYRSISKINKKDINAKPVGAIPTGLLFLQ

SEQ ID NO: 9940 - protein, 534 aa, Unknown
  Description of Unknown: Integrase B9941 sequence
  cd00338,IPR011109,IPR038109,PF07508,Coil, PS51736,G3DSA:3.40.50.1390,IPR036162,IPR006119,PTHR30461, PS51737,PF00239,SM00857,G3DSA:1.10.10.2600,SSF53041
MYTNKIEGLSVDGIIIYLRKSRSDDPMLSVEEVLERHETRLQEWAENNFGEKIPEENILREVVSGETINDRPEMLRLLSMIESPKIKAILIIEPQRLSRGDLEDAGRIIKLFRYTNTLICTPPKNYDLRDEYDRDFFERELKRGNEFLEYQKRIMNNGRLLSVSQGNYLGSIPPYGFDKITIKEGKQTCYTLTENASEADAVRLMFDLYVNQNFGYSKIAARLDELNFKPRNSDLWSPPAIKEMLSNVHYIGKVKWNWRKTQKIVEDGEVIATRPKNKISEYLIYEGKHEGLIPTELFEAAQAKMGRNIPVKNKAKVRNPLSGLVYCHCGRAMSFRTYKNKGVERSAPRLLCDNQAHCKTGSCRFEDLLDRVILALKESIADFEIRLNNDDGDSLKLHLKMVANLEKKLDELNKLEISQWEKYSLESMPKHVFDALNEKVLKEKTEVQEALCKAKDSIPDPVDYEEKRKRFSDALEALQDPEIPARTKNKLLKACIDKIIYKREKPQRVKGKGVKTNGTLWNEPEIELDIYLKV

SEQ ID NO: 9941 - protein, 534 aa, Unknown
  Description of Unknown: Integrase B9942 sequence
  cd00338,PF13408,IPR011109,IPR038109, PF07508,Coil,PS51736,IPR036162, IPR006119,PTHR30461,G3DSA:3.40.50.1390,PTHR30461:SF3, IPR025827,PS51737,PF00239,SM00857,G3DSA:1.10.10.2600,SSF53041
MKKIKNQVQRAVIYARYSCSNQTEQSIEGQLADCEKFAEKYNYYIVDTYIDRAMSATTDRRPQFQQMIADSATGGFDVIIVWKLDRFTRNRYDSAVNKQKLNSNGVKVVSVMEHIEDTPEGALMESVLEGFAEYFSKDLSQKVSRGMRETALKFKATGLIPYGYKKTSDNICVPDEHTAPVVKKIFEMYADGVINKDICDWLNSHGYRTSNGNLFRNQYLRKILNRRRYTGSYTYGDLELHDENQRIISDELFDRVQIQLQAKRRTGRIAREQYILVGKLFCGYCRNPIRGESGRNHQNRIYTYYKCSVNKTGGKCPKTTVHRDIIENNTIKFILNNFLNDEIINSVVDTIQASETAESNSAELITLRTQIEDTDRKINNLLTAIENGVFTPSTKQRLNDLENVKEKLKYELIVKQSEKNNFNATAFKRFLKNIDVDDFKTTEQRQKLINLVLYREYLWNDKVLYIFNLTPSKPNDSVDVDSYVDAVLAGSTSPTDGVPQVAISELLFGYFFVMGFFPFHKHFALSFFALYIYR

SEQ ID NO: 9942 - protein, 534 aa, Unknown
  Description of Unknown: Integrase B9943 sequence
  cd00338,PF13408,IPR011109,PF07508,Coil, PS51736,IPR036162,IPR006119,PTHR30461,G3DSA:3.40.50.1390, PTHR30461:SF3,IPR025827,PS51737,PF00239,SM00857, SSF53041
VVRLSRTDAASTSIERQREEIERWAAIARHDIVAWAQDEDVSGDVAPWRRPGLGQYLPDSLGHRDASASDVARSTASSRAGEWDALVVWKLDRLSRRAADMLAVIDWCRANGRQVWETSGTEYTGPAGTLIVSVLGGLAQGERERMVERARSSFVKLSKSGRWRGGQVPWGYRVETDSAGHPRLGVDEEQAVVIRSVVARVLAGESINSIAADLNRRGVPTVSGRGEWRMGNLQRAVKSERLLGYMVREDKRAGEGRREYVVRGDDGMPVQRAEPILTRAELSAVRAKLADSRKGAGNTAGARPDRAMLLRVLWCWECQNEHEIDEPMYLSMGRSRRYYRCGSRSRTGAAQCSNGSIPAEAVEERVSALVLGMWGDAPVTERVWEAGTDATERIAELTEALRNLRDDRAAGLYSSASAVDEYRATYGALEAQRTHLEALPQVPSGWRAVDTGRTLADRWQECATDAERNALLRSMGVRFYVDRGTGLPGQDAGARLRIGVPLVEDGWADGEARPVADLVLQGAGEIGRRAGEPR

SEQ ID NO: 9943 - protein, 534 aa, Unknown
  Description of Unknown: Integrase B9944 sequence
  IPR038109,IPR006119,PS51737,PF00239,cd03768,G3DSA:3.40.50.1390 ,PTHR30461,IPR025827,SM00857,G3DSA:1.10.10.2600, SSF53041,IPR011109,PF07508,PS51736,mobidb-lite, PF13408,Coil,IPR036162,PTHR30461:SF3
MRRRKPAPVAAAHLEAKRCAIYTRKSTTAGLDQAFTSLDAQRESGISYIQRQPGWTVLEERYDDGGFTGANIDRPAFQRLLHDVEARKIDCVVVYKVDRLSRSLMDFAAVMARFNTANVAFVSVTQNFSTADSMGRLTLNMLMSFAQFEREMISERTRDKVAASRRKGKWTGGTVPLGYNVETGRLVVNELEAVVVQEIFALYLERRSTLEVARILNSSDRRTKRHRSIHGNPREPHDWTTNDVARVLKHPIYAGYMSSGGTLFEGEHSAIVERVVFARVQAALREGTPNRSVGVRNPAYLLRGVLRCAGCGAAFTTASTISHGVTYRYYRCGTRDKQGAQACGSQPLPAEAIEQLVIQRVRAATADGTLAGDVAASVRRRIQARREACQIEREHLPARIASLSQEIRRLVDVLATVEGGARQQVQSRLQELEDQSAHSEADLVASTRQLAELDAVEVDVTWVAQSLADFDRVWDRLTVENRGRLVRAVIHRVEVDEPGNTVRVVLADLGANLADPSTPTPPERVPLAPQSPSA

SEQ ID NO: 9944 - protein, 534 aa, Unknown
  Description of Unknown: Integrase B9945 sequence
  cd00338,PF13408,IPR011109,Coil,PS51736, IPR036162,PTHR30461,IPR006119,G3DSA:3.40.50.1390,PTHR30461:SF3, IPR025827,PS51737,PF00239,SM00857,SSF53041
MNRAAFAIHHNKIKTAPAPTETVYISEDMRLKSTNIVSSSGQSHKRNICFALAVIFVPILNIFYKRRVMQMPEKILRCAIYIRVSTFEQSVHGKSLQAQKECLEQYATDNNMSIVGVYADEGKTARKELKKRKAIHALVEDVKRDKIDVIIFWRLDRWFRNLSDFYKVQDVLDEHGVRWISVSEPGINMETRDGRLQLNVVLSIGQNEVDTTSERIKFVNEASIRQRKLIFGDANMPFGYKTGVVDGKKCMVKDPETEHMVEDFFNYFRIHNSKKGAVRYMQEVYGIDFSYGMLRTMLSSEFYKGTYRGYPYCPAYLSEKEWNEMQTISKRNIKSTPSGRVYLFTGLMRCPVCGQKLVGTGCSSIINRKTGEKRTYCYYRCNRALKDHICTYRHRVSQNLIEKYLLENLEREYEKYKVRSNKVSEELKKEKKAKDPEKLRKEMERLNLLFQKGRISFDYYDKEYQRLEREYSASAAFCEEEETRNLHYVEELLKTDFRQMYDSLSPENKRSFWRSTIQEIYLNDDNTIKAVDFL

SEQ ID NO: 9945 - protein, 534 aa, Unknown
  Description of Unknown: Integrase B9946 sequence
  cd00338,PF13408,IPR011109,IPR038109, PF07508,Coil,PS51736,IPR036162, IPR006119,PTHR30461,G3DSA:3.40.50.1390,PTHR30461:SF3, IPR025827,PS51737,PF00239,SM00857,G3DSA:1.10.10.2600,SSF53041
MKTAVIYARYSSDKQTEQSIEGQLYDCYNYAKQHGITVVREYIDRAMTGKNDDRPAFQQMLHESAMHKWDSVIVWKLDRFARNTIDSAVNRQILAKNGVKLLSVMESFGDDASGQMMTHIIEAINEYYSADLREKTIRGMRQSAMKAQTTGHIPLGYKVVDKKLVIDDETRIIPETVFRMYAEGERLTDIADHLNAQGYRNRRGRPFTTNSFYNMLANEKYIGIYKYDDIVIEGGIPQMIPNEVFEAVREKLITNRKRAAKNTAKADYYLSGKLYCGHCGEPMSGLSGTGRNGVKHYYYRCNGVQKKSGCHKKLENKYLIEDEVCRAARSAFEQMDKAETAETIYQMYLQTVRNEYAPAELEKELTECTKQAENVVNAIAQTGGNQLLFDKVRELEERKEQLGSALRLSQAMTDNVPSVEQITVFIDDILATDINTTEGKKAIADIMISKVYVYDDKLTAIFKDKDGKSVDIPLSDVSDSSSADCAPSALGSQSSFNLNLLKGKESNVCTYLLLLNRSSFFIDLLRINNFLCEK

SEQ ID NO: 9946 - protein, 534 aa, Unknown
  Description of Unknown: Integrase B9947 sequence
  cd00338,PF13408,IPR038109,G3DSA:3.40.50.1390,IPR006119, IPR036162,PTHR30461,mobidb-lite,PTHR30461:SF3,IPR025827, PF00239,SM00857,G3DSA:1.10.10.2600,SSF53041
MNLLPPPSTLPPGSTVWAYLRDSGGESQDRSIGRQLEAIQAYCKGNQLQLVHIFKDIAKSGTTTAGRDDFQRMIKLSNQGENLPQGLLLWNYARFARDLDDSTYYKSLLRRNGLIIHSLTDPIPEGTYARFVETLIDISNEERSRQTGIDAKDGLRSIVSQGAVPGTPPRGFKRSPVKTINTRTGEERTNHKWVPEKKLVPKVRKAFKMRATGSTLFEIHKTTRLYSSLNSYRTFFTNKIYIGILEFGDLVVERYCDPLVDMDTWNAVQKRVEEHSQKRFGDQHPRRVNSIYLLSGIIKCARCGSPMNGNTVTRPALGGKDEAYRCSRAKRRRDCDAGRISKRKLEDLVLATLSGFILIPENLSAVQEIALHSQSKGESERAEKKSTLGGERTELSRQIANITRAIADTGHSPALLDALKAKEGLRAQVKAELDELDIPIQPVPNLSQPQIETVSKILLEHLNNSPIETRRQILRSIVHSVVAERDGKIIRGMITYYYPPPFDLAPVGALPMESTPVGASLYRQTFSYPLSSKI

SEQ ID NO: 9947 - protein, 534 aa, Unknown
  Description of Unknown: Integrase B9948 sequence
  cd00338,PF13408,IPR011109,IPR038109, PF07508,Coil,PS51736,IPR036162, IPR006119,PTHR30461,G3DSA:3.40.50.1390,IPR025827, PS51737,PF00239,SM00857,G3DSA:1.10.10.2600,SSF53041
MKSILICRTSTSRQEIDNQIKEIKEFAIADGNKEEDLILLAKHGASAIKIDAAYQENMERVYREIEAGGIECVYAWALDRIGRNEVVMMQFKEFLIKHRVQLKIKNPALVLLNDDGTVNSGMEIAFTLYITLAKQEMEQKKARFERTRKAKLEKQQHTGGRVLFGYTVDDNDYMMPDPEKAPLVQDAFAKYATGDYSIESLTEKMKYCGWPDCNAENLFRILTNRAYIGEHKVFKCPAIIDNDTWDKCRQVAEKKTTRIGNTKQYWLGAKIITCPECGHHYVVWKTSDKTATYRCVTHGKNKGCSNDVTINAKNLDALLYEVALPLEMERQKEQLNVNKEVLFAELNDLHNEIDNRQSEYDKRVKKAVDRINDMYEVGAIDKDEWKERRAKAVAKADDLKEKIAKLRIEADRKQRQIDSTSVGGRSEAIFGYNFAMSAEEVSQMVHRNIIDVVLKRIGERETLVTLQTTAGEQKFIYTSKTRSNNWQEWHGNGKHLPFVVAKMEKSGEYITFSTAASKHTLTLSDKDIAAFVTK

SEQ ID NO: 9948 - protein, 534 aa, Unknown
  Description of Unknown: Integrase B9949 sequence
  cd00338,IPR011109,IPR038109,PF07508,Coil, PS51736,G3DSA:3.40.50.1390,IPR036162,IPR006119,PTHR30461, PS51737,PF00239,SM00857,G3DSA:1.10.10.2600,SSF53041
MTTTKKKQGAIYGRKSRENEATLESQINACIQWAEENDIEVEIFAEEGTQSSEDWNRPKLQEMLKKVENLEFNYVIVSESSRISRTEDFSIFKKLMKETGTILLEADTRQSTNFLDRNDAVKSGIQQVFNEYELDLAKTRLKRGTVQSAKKGNYQGKKPPIGYSYDHETKRLKKNSDAPIIREMFEMYMAGMSTVEIEHEFTTKNVLAYQKIKGELVPITWGKSTIARSLKNILYVGHTVFGKTKVQRIKGKRVQVDVPEEEQILIENTHEGIITQEEWDKVQQIMNKKRTIPPALKHSKHTFSGLVRCAKCGAVHTFEKATSITGKFRISSCKTRVYDEDFIQYKMCGNSGGELESLEVLFYASLKETKAQIENYIDLIKNIQNSEAKAGKSLETQKGIKFQQIQQMAKKRKKIQAFLEEDFYEGEEEIEKIREVKELANRIKALKDEMEQLEEKKGESELEHVERVLNNINKFFEGTKNSASGKVLNEILNEFVSKILYRRNGRGAQIEVEVYLKEEIQEIINHKEDLTKIA

SEQ ID NO: 9949 - protein, 534 aa, Unknown
  Description of Unknown: Integrase B9950 sequence
  cd00338,IPR011109,IPR038109,PF07508,Coil,G3DSA:3.40.50.1390, IPR006119,IPR036162,PTHR30461,PTHR30461:SF3,PS51737,PF00239 ,SM00857,G3DSA:1.10.10.2600,SSF53041
MQSSLEIQIAEKIETARNHKTKNLAFAYARISSKKQEDGNSKAAQIKGINTYAQRNNLYIIHLFATTESAWSPGRIDFNLMIRLAKKHNIKHLIFKNHDRISRNDEDWLTVDKMIKQEVQFHLYEFNKILDSTRSAEEKFGDKVTSGLNEYWSDKISQGVRRGYNEKAFDRRVAHKAPLGYEWEASLKNWIIDPEKMAVVKYMFELYDSSGNTLQEIADLLNAHGYTTVRDAEFTKSRVHQILHNRFYTGWFQYKNEWIKGTHEPVISDDLFQERISRMDDRYNGNRKSETTYNLSKYVRCSHCGMMYTGYKVIKSDVYYNHHCEALNGKYRIVKESEIVTALDDYIETIVYSDQYSMWLKKTFSEIMNDKSSVTERERAESNKKIRELQSSKSKLLDMYLSDEFTKEEIDKKAHEINTQITVLEDRLVILNKDLSNHFNKVLDIVDYLKNFTKTFLLDSIDGKMEFLRAMSYVMIYDDDNKKVAEIQWKKAFAYLLARDFTTQIPPTSLDLVSPFTYAWRDDFRTNLERWMCA

SEQ ID NO: 9950 - protein, 534 aa, Unknown
  Description of Unknown: Integrase B9951 sequence
  PF13408,IPR011109,IPR038109,PF07508,Coil, PS51736,IPR036162,G3DSA:3.40.50.1390,PTHR30461,IPR006119, PTHR30461:SF3,IPR025827,PS51737,PF00239,SM00857, cd03768,G3DSA:1.10.10.2600,SSF53041
LSNLRRKAKSIQIDPNKVAIYVRWSTDEQAEGTTLTIQLERSKQFILSQGWIINEDLIFIDEGFSGGTLERPEIKKLRKNVNDGLIDCVVIFKLDRLSRNIVDTVNLVLDEWDEICYIKSVTEPFDTTQQIGRQILTMLAGFAEWERYNIKLRTFEGKIETVEKGFSAGFKPPYGYIVGEKTGTFELVKQEAEIVKRIFREYKNGKGTNAICTELNSEGVIFRNSKRWNTNTIAYMLCNPLYIGRLIYGKLQNNPKRSKKEGEPLRSRRAEEDIMVKELTSDVITPIITEDEFNSVQKIRQSRNVFIDHKTSGRIFTSPHLFSGLLKCKCGYGLTARSKQTTDNHAYYMCRGNKMKGSGFCDAGYIRQDTLDNLISQDFINNCLSQDNSIVNVISEQNEVRLAELNNSLNGIVDSLKRLEHEFETIKMKLRKDNLDVSTFNMIKSDIDKESAELKDKQQFLIDELNTLNSNRIDKKEIEELYKLLNTWEFLSIEEQKQILFKWIDHIEVHKTKGKETPDSKISIHIHYKTKFKI

SEQ ID NO: 9951 - protein, 533 aa, Unknown
  Description of Unknown: Integrase B9952 sequence
  cd00338,PF13408,IPR011109,PF07508,Coil, PS51736,IPR036162,IPR006119,PTHR30461,G3DSA:3.40.50.1390, IPR025827,PS51737,PF00239,SM00857,SSF53041
VKKVIELIRVSTSEQAAEDRASIPAQRAVNRKTAAAYGLTISKSIEMSDVSGTAVLRTPEMQELLRLIEAPDIKGVVVREFSRVMRPDNFGDYVLFQVFQDTGTLLYLPDGPLDFNSKTGKLVAGLRAIISGNELSEIRERVWTAKEEMRRDGKHVQGGVALPFGVGYSKEQGFFFKPESEMVRDAFRRLLSGETSYTQLAKPLGFTPQGMRTLFTNPIYMGWRVYDKKRNMAPSAKRYSAGGRQGDRPKILRDPDEVIRVKVIDTPLVTEAEFRRVQEIVMLKDSHHWRHRSGVKHNFTYNGFLLCSECGSTLYGKNASGGSGKRRRIATAFYYGCRRRFWHKEGQCLTPYMQRDRLEEKLDGIFTERLTNQEFLTGLLRDLDAKSETDTSRTRIARLQAELTNLRAKRSRVLDAFFEAVLTKAERDLRLAEIDVRLKSTEELLLREAPVQKVSLRSLMTALAPLFEWRFMNRESKRRILAVTVPEIRVSNYQVQGVAVTSPNLCGYVESRSLAGFDLTTGSPARLWLPLNL

SEQ ID NO: 9952 - protein, 433 aa, Unknown
  Description of Unknown: Integrase B9953 sequence
  cd00338,PF13408,IPR011109,IPR038109, PF07508,PS51736,G3DSA:3.40.50.1390,PTHR30461, IPR036162,IPR006119,PTHR30461:SF3,PS51737, IPR025827,PF00239,SM00857,G3DSA:1.10.10.2600,SSF53041
MEEKSIEKRLGMPSLVHKKKVAAYCRVSVEKDAMLHSLSNQVSYYQDYIAKNDEWIYVGTYADEGISGTKVNRPEFNRLIEDCKAHKIDMIITKSISRFARNTTLLLQTTRLLKKLNIDVYFEEQKIHSLSNDGELMLSLLAGFAEEEAKSMSNNVRWKVNKFFEDGKIWGLHKIYGYDVIDGKLVVNQKEAEVIRLIYHLYLDEGLGTHQIVNRLDELNIPAPKANGWIRYSVRNILRSIIYTGELMLGKYSQEMNPISHHKENDGRYPLYYVEESHEPIISKELYERAQATFKQRNEKYIPTKENNYSPFAGLIKCASCGKNYLRKKNKYRIYWICGQFVVGKGKKCNQALSLREDTLYELTKLALDIDEVTEKSLEPLEQIMVHDSKDLDFIFKNGEKKTYHFEFKSRKESWTEEMKEEARRRGLLNYYA

SEQ ID NO: 9953 - protein, 533 aa, Unknown
  Description of Unknown: Integrase B9954 sequence
  cd00338,PF13408,IPR011109,IPR038109,PF07508, Coil,PS51736,G3DSA:3.40.50.1390,PTHR30461,IPR006119, IPR036162,PTHR30461:SF3,PS51737,IPR025827,PF00239, SM00857,G3DSA:1.10.10.2600,SSF53041
MYEDIKTACLYVRFSSHNQTEQSIEGQTRVCRDFCKRHNIRIVEIYADRATSASKDIEKRVQFLKMIKDSERGLFDAVIVYKLDRFARSRYDSATYKYRLKRNGVQLISATENISNDPEGIILESVLEGMAEFYSAELSQKINRGMRESAYKHNSIGGAVPLGYKIEDKKLVIDPKTAPIVKEAFEKYADGETVAEICRQFNARGYKTSKGTTFGKSSFTKIFRNERYIGVYSFHDYRAEDAIPAIIDKDLWDRVQLRVGKIKNAPARNKAKVVYLLSGKIFCGHCGSKMNGNCNAGNYYYYQCYGKKNGNVDCKKKNIRKEFIERLVAQDALSLLTDEYIEQIATIACEKNQHEIELDSALPTIRDRIHQVDLSLNHLLKAIESGSAPDMLVKRMGELEKEKKDLQAQAKKESEDIVELDKAQVIYWLEQFRGGSIEDQEFCRMLIDLFVNSVTVWDEDDNTYKVTVAYNLTSLPTKTYRLNKGGTLSDFASNAPGMSANPTITGNLLIHTFHCRLKSHSQKRFWDYDTFVV

SEQ ID NO: 9954 - protein, 533 aa, Unknown
  Description of Unknown: Integrase B9955 sequence
  cd00338,PF13408,IPR011109,IPR038109,PF07508, Coil,PS51736,IPR036162,IPR006119,PTHR30461, G3DSA:3.40.50.1390,PTHR30461:SF3,PS51737,IPR025827,PF00239, SM00857,G3DSA:1.10.10.2600,SSF53041
MIAETLNAVIYARYSSHSQTEQSIEGQLHDSYAYAEKCGYRVIGEYIDRALTGKSDDRPDFQRMIRDAEKHQFQVVIVWKLDRFARNRYDSAMYKRILKKHGIRVVSVMENITDTPEGIILEGMLEALAEYYSANLSENIRRGQQESIKKGWFPGGAPPMGYKVVDHKLVPDERWAPVLLEVYTRYASGQGLAMIAEDLNARGYRTRQGHEFRPATFDRVIPNPAYIGQYSYGGVTVPDLCPPIVPEDIYQKALARRERNRRAPAAGRSPVEYLLSGKMFCGLCGAPMVGDCGTSMTGERHIYYSCAAHKRKAANCRKKSEKKDFIEWYICEQTVEYILRPDRLPLIARQVVECYNADIDNSRIRDMERTIRRLKDESSALLEKLTFAPKNIALRIMEKMELLDAQRVDAETDLSKLRMQQKIPLTEKEVTAWLSTFSRGDLMDLAFRCQIIDTFINSVFLFDRKVVILYNIKDGRQTCVIDPIDALDELKEAGQSSTLTGDGGALPSKLEPERPYYIFLRGMLGLVLVRSID

SEQ ID NO: 9955 - protein, 533 aa, Unknown
  Description of Unknown: Integrase B9956 sequence
  cd00338,PF13408,IPR011109,IPR038109,PF07508, Coil,PS51736,IPR036162,PTHR30461,IPR006119, G3DSA:3.40.50.1390,IPR025827,PS51737,PF00239,SM00857, G3DSA:1.10.10.2600,SSF53041
MKYFIYCRKSTEDAESQSLSLPAQLRVLTQLAGDRKLSILDTIEESKSAKTPNNRPLFRKMLNRMYANHAQGLVVWHVNRLARNPMEAGELQQMLVDGKIKEIITPDETITKDNANDIILGVKFGEASQYSKDLSKNVKRGLKEKMIRGQYPNRAPSFYVNVGKSAANKNITPDPRYADIFKKWIKWFKDTCPTLTESANWLNNKGALTCKNKSFNKARISDILNNPVYAGYMQISGEPMIKGTWEPLISLEDHKIIKSIVSSRHVVMKQRHEKGYKQLIVCGHCGCAITCSHKVKNGLDYIYYHCTRRRGKCDQIALTEKNLEDQILKQIVKIRINPIKYNLMIEMTKSMTEFKRKASSRVGHNTLESIDTIKEQKEMILDLFLTKAIDREIYNNKILELDNKIMESKKKYASTEFDYDQWFSFVQGFYTKCRDMQSLYIDGDIDERTTLVRSLGWNLKMMHGNLSWNFEKPWDAMLDIDLVDDRTVLWAVAFTVGTFFRNSANTLLSSISPSSNLLYSQSINNILTINQNG

SEQ ID NO: 9956 - protein, 533 aa, Unknown
  Description of Unknown: Integrase B9957 sequence
  cd00338,PF13408,IPR011109,IPR038109,PF07508, Coil,PS51736,G3DSA:3.40.50.1390,PTHR30461,IPR006119, IPR036162,PTHR30461:SF3,PS51737,IPR025827,PF00239, SM00857,G3DSA:1.10.10.2600,SSF53041
MKQQSTVNAVIYARYSSHSQTEQSIEGQLHDAYEFAQREGYLIVGEYIDRAQSGTKDNRRDFQRMIADAAKKQFQAVIVWKLDRFARNRYDSAIYKAKLKKYGIRVVSVMERIQDNPEGIILEGMLESMAEYYSANLSVNIQRGQRESIAKGRYCGGPIPYGYKHVDGKLIADERTAPIIQEVFSRYAAGESMKAIIDNLTERGVKSSSGAALTYNTFSRALLNRCYIGEYTYKGEVIPGLAAPLIDGHTFDAVQEKVSSRKRAPAAGKAKVEYLLQGKCFCGHCGANMVGESGRGRQGETYYYYSCSNRKKKHTCNKLNEKKDFIEWYVVEQTLEYVLSAERMELIAARVVAEYEKEFGSGPIKEKERAIRKIEKELNNLVDTLAEAPKVARQRIYDRIEELEASKADIEIDVAKLKIAQNIRFTEAEVKAWLKQFCKGNALDIEFRRRIIDVFINSVYLFDKRIIIFYNIKGGKQVSYIDVAEVSNEAGNGETVSDFIANAPPYASKSEPRYIFVNGVFGIVLERTEEQGE

SEQ ID NO: 9957 - protein, 533 aa, Unknown
  Description of Unknown: Integrase B9958 sequence
  cd00338,PF13408,IPR011109,IPR038109,PF07508, Coil,PS51736,IPR036162,IPR006119,PTHR30461, G3DSA:3.40.50.1390,PTHR30461:SF3,PS51737,IPR025827,PF00239, SM00857,G3DSA:1.10.10.2600,SSF53041
MPTAYTYARFSSDRQHESSIEAQQDATRKWAEARGVTIIREFADRGISGTTDERPAFQEMISACRSQRVDFVLVHKHDRFARNRYDAAIYGRIIEKSGARLVAVAQDFGESPEALILEGMMQAWAEYYSRNLSTEVRKGLRIRAERGAHAGGCTPFGYRWQDGEKLVIDEEEAAWVRRWYEGYISGRQCTEMASEANAAGVRGRYGRQVRAGTISRIVRNPVYAGVYIATIGSETYRHDDHHEPIVPLDLWKEANKKVDERAVSRRAPGERTYLLTGIAYCGICGKRIAGHTQLQKGREYASYFCRGPHEGESLRSIRAEVLDENVRQYIRGLLTPEARAMAAHALEQYMAERKKHLGKRGPNVKKRIGELEQKISALVENMSAGVLPPAALKRMGDQIAAMESEIETLKEIGEEPPEPDPVSIDEFFAQGAAIDENTPIEEAQSIVRRFIKRITITNDEIQIESSFADWLREKCGGKKLYQSTENPTLCAFDITLQRIGRHSTVVCKSAQSSIKNTKKAHFPELFARLSPSG

SEQ ID NO: 9958 - protein, 533 aa, Unknown
  Description of Unknown: Integrase B9959 sequence
  cd00338,IPR011109,IPR038109,PF07508,PS51736, G3DSA:3.40.50.1390,IPR006119,IPR036162,PTHR30461,PTHR30461:SF3, PS51737,PF00239,SM00857,G3DSA:1.10.10.2600,SSF53041
MKAVGYLRYSSDSQSEGYSIEAQKNAIDTFALREGYEIEKYYIDEARSGTNDNRESFLNMIEDAEKKLFQYVLVHKLDRFSRSRKDSIIYRAKLNETGVKIVSVLEKIDENVPEDVILLSMLEAMAEYYSKNLGREVKKGMTVAASRGQFVGGRVPFGYYSNRVTKKLHIKDDEAIIVKDIFNKFISYGSIDQLAQYCKDSNYFTREGGQLRSKQLHSMLTNKVYIGSAVYRIFKKESISYKGMKNRPEPIVVESAYESIINKDDFNLVQSILNEAKRGPYQRRSKKTGNTYLLTGKLSCVNGSQMTGRSMHVVKKYKNETEGHFQYFTYHCSCGQKHTVKKDDIENFIHASIQRDIFNEDNILNLAQKLKYVYDKNEKAAHVDLQLAREKLDVVVTNQEKLLDLYLDGKLSKDRFNKKNLDLEQSRLKYLSILQKSSQKHREINIEQFKLAIRMLPEMYGIEEHEKQRNMLINTFIEKITYSDKDINIVYKISLNEVLFKKQNGGGKVFLNITYTTNHRDINHFSLQRGLSS

SEQ ID NO: 9959 - protein, 533 aa, Unknown
  Description of Unknown: Integrase B9960 sequence
  cd00338,IPR011109,IPR038109,PF07508, Coil,PS51736,G3DSA:3.40.50.1390,PTHR30461, IPR036162,IPR006119,PTHR30461:SF3,PS51737, PF00239,SM00857,G3DSA:1.10.10.2600,SSF53041
VYKLPDGEYCAYLRKSRADLEAESRGEGDTYARHIKILLELARRHNITLTKIYQEKPATSGERISERPEMIRLLEDIEDGLWTGVLVVEVERLARGDTLDQGIVAQTFKYSNTLIITPMRVYDPSRPEDEEYFEFGLFMSRREFKTINRRLQTGRITSVKEGKYVGNKPPYGYIRVKLDNGKGYTLEPHPEQAPVVKMIFSLYTDPDPNRRMGTALIARYLNEKKIPTQRNKQWTVATVNGILRNPVYIGYVRWGSRPVAKKKNTKSRPRKPIEEWTLAKGLHEPIIDEVTFRRAQQIMQQNSHPPVDPKKISNPFAGLVKCAFCGSAMILRPYNDKRPPGIICSRQGCKNVSSMFHIFEERVLEALKDWLEEYKSQWLQIRPEEKKHDRLEVLRNVLRAHEKSLKELEVQKDSLHDLVERKVYTIEDFIERSQKLAKRFEEVNEAIRQVKEEIENEVQFRASQDEFIPQVEHVLDIYHKTEDPALKNELLKSVIEQIVYRKDKRGHWKTGGMDNFEISLFPRVPKQINISTS

SEQ ID NO: 9960 - protein, 533 aa, Unknown
  Description of Unknown: Integrase B9961 sequence
  cd00338,IPR011109,IPR038109,PF07508,Coil, PS51736,G3DSA:3.40.50.1390,IPR036162,IPR006119,PTHR30461, PTHR30461:SF3,PS51737,PF00239,SM00857,G3DSA:1.10.10.2600, SSF53041
MYQLPARVKRIILYVRKSRQEELEEQNKDGSDMLERQLEMMKKVLLKFEVPFDWVKEVRSGDSIESRPKFQQVLKDLKAGKYQAIAVRDLSRLGRGSYSDMGVIFDTIHDNRILIIDGTGKVYDTRNQSDERYIRWNMFMAREEYKNIVERLINARYFRASAEGKFMNSKPPYGYMRDKKTKKLVPNPDEAPYVKKIFEWYLEGIGYQGIASRLNKMGVPTRGRKTKTKNNKWVPMVVRGILTNPVHMGDIYFRITERIGNKQVLRPEEEHFIYENAHEPIVSREVWHEVQRKMKDKRKLPLNNDYSPCELASLVVCANCGKKLVRQSSVARYKKSDGTISKYYKEYLYCRGGCGITFKYRDVEEQILNTLSLFKELDTKDIRNYLKAFIESEKEQTRLTNDDKIKTLKRKKESLLARREFIFESFERGDYSSDEFRERRDKIDQEIEFIEKEIELEEQTKNQMVPTSIKPKEFKNRIETVLDTYKILDDKSLKNELLLSVFDHIEITRITKGKGHQSSIFKLKPYFNFNFIA

SEQ ID NO: 9961 - protein, 533 aa, Unknown
  Description of Unknown: Integrase B9962 sequence
  cd00338,IPR011109,IPR038109,PF07508,Coil, G3DSA:3.40.50.1390,IPR006119,IPR036162,PTHR30461,mobidb-lite, PS51737,PF00239,SM00857,G3DSA:1.10.10.2600,SSF53041
MAVLTTAEAVMDEAVTRAAREYLRVSKGNGRTARSIRDQHRDNLATEADHGPWTWGEPYKDTGSASKFARKIRDDFERMLADLRSGQFGGPGDVLVLWEISRLARETGRGVELVDACEKGRYLIHVTSHERTYNPANYQDRHSLIGGINDAEKEARLLSVRTLRGLNSAAREGRPQGQVPFGYRRDYEVVDGRPRPVAQYPDPETAPLVKELYERVVGVNGKLPEPMYAIAKDWEERGVVGKNGKTFTPQNLRSMLLRPSNAGLRKHNGVLVPEQWDGWTPVISRDLFDRVQVILSDPSRRKYTGEHIRHVLSMTLKCGVCGRGMVVQTRRKPGAKDAVGYQCGPRGHVWVPKAQTDRILIGDLDPVDPDTGELLPPKLGTILEYLTAPDRYAGLRHRPDTSAEETTLRAELARLHGELKELEEAPQPKTARARIRRTSDIEELETDVAVLEAKLGTLTTPAPLAELLPDEPITDVVRWWRRAGVEKQRAIAALLLTPSMLGEVRIMPSPVPRGHAPVAERMAVYRETLPAAE

SEQ ID NO: 9962 - protein, 533 aa, Unknown
  Description of Unknown: Integrase B9963 sequence
  PS00397,IPR038109,IPR006119,PS51737,PF00239 ,G3DSA:3.40.50.1390,PTHR30461,IPR025827,SM00857 ,G3DSA:1.10.10.2600,SSF53041,IPR011109,PF07508,PS51736 ,IPR006118,cd00338,PF13408,Coil,IPR036162,PTHR30461:SF3
MTTAAVYCRVSTEDQEREGSSLSSQNSYCLRKAAELGYDVPADCIFTEVFSGADTDRPRLNEMRRLIRSHSVDAVICYSTDRLARNPIHIAIIAEECEKRGIELVFVSEPLDSTPEGALVRYIKGYAAQVEREKIRERSLRGKREKAMQGKLSTGGRRLFGYDVVEGRRVINDTEAEVIRRIFNWFAECRYTLYKAVRDLNSERIPGPAGGKWKEVTIYRLLNHPAYYGVTYAFRYKCVEPKRSKFPKGTKSARILRDKSEWIEVPGATPPIISKNIFEAAQEQLVINRHKSPFTLRQKYLFSGGRLRCGTCGRSMTGGTNKKAGKVYHFYRCICNVKPNYYGKCSQPSISASKVEPLVWGEILNILDNPDMLIENIKSRRSQSPTSIEAEEFLLNNNIKKAREEETRYIELYGKGRISEVSFEKLIEKIRGAIQVQEKKLRALRGKRQSFEQAEAHIEDLVKTSAIFSKVLKNADFELKAKAMEALDIQVTYLPDKTVLITGILPMGATNFHMPRHTQSRNTPRFEISAIVK

SEQ ID NO: 9963 - protein, 533 aa, Unknown
  Description of Unknown: Integrase B9964 sequence
  cd00338,PF13408,IPR011109,IPR038109,PF07508, Coil,PS51736,IPR036162,IPR006119,G3DSA:3.40.50.1390, PTHR30461,PTHR30461:SF3,PS51737,IPR025827,PF00239, SM00857,G3DSA:1.10.10.2600,SSF53041
MPAKSAVQPSTVNAVIYARYSSHNQTEQSIEGQLHDCHAYAERMGYTILHEYIDRALTGTKDTRPDFQRMIRDAEKRQFQLVIVWKLDRFARNRYDSAIYKAKLKKYGVRVVSVMENINDGPEGIILEGILESMAEYYSANLAENVRRGLRESVNKGQFAGGPVPLGYRVDGHRLAADERTAPLAQEIFRRYADGESPSAIAADLNARGYKTRLGRPFRVSSFDTMLSCRTYIGEYTYSGQVIEGVADAIIDKETFDRAAARRAKNRHAPAAKKAREPYQLQGKIFCGHCGSPMIGESGRSRNGEIHQYYTCAKRKKEHSCRKKNEKKGFIEWYVCEQTVAYVLDPERIGLIAERVVAEYDKEFGGDQVRELERRIHRLDNDLEALVDSLLTLPASARARIGERMERLEAEKADAEIDLAKLKLASGIRLTVDQVKAWLRSYTRGDLLDPAFRQRIIDVFVNSVYLYDDKVVIFYNLRGGQETSAIGDISELDEMIDDDGGGSDLSGVTPPLPVKPEPRYIFVRGMIGIVITR

SEQ ID NO: 9964 - protein, 533 aa, Unknown
  Description of Unknown: Integrase B9965 sequence
  cd00338,PF13408,IPR011109,IPR038109,PF07508, Coil,PS51736,G3DSA:3.40.50.1390,IPR006119,IPR036162, PTHR30461,PTHR30461:SF3,IPR025827,PS51737,PF00239, SM00857,G3DSA:1.10.10.2600,SSF53041
MDNAVIYARFSSSKQQEQSIDGQLRYCHEYASRYGYKVVGEYCDRAITGSTDQRPQFQKMIEDSAKKKFKYVLVWKLDRFSRDRYASALYKYKLKNNGVKVLSVTESIGDGNESIILEAVLEAMAEIYVKQLAQNTKRGMKESILHGRNAGGTIPFGYDSIDKRLVVNEKEADIVRRAFTMYADGAQIRDICDEFRRRGYRTRTGGEFNRNSFHRMFQNTKYVGTVTYSDIVIENNCPAIIKKDVFEKCRARLLSNKHSGKPTKTKVEYLLKGKAFCGHCGASMVGDSATSKTGARHEYYSCSAKKKFKNCDKAREKKTYIEWYVTEQTLKYVLQPDRLDFIARNVVRMYEESCDTSELDSLRQKKAKYEKEYDQITDSLIHAATQRLIDKINRRAEELDVLLNDLDAEIAELEAATDAPLTVDDVKMWMTVFCNGDAMDVSFQRKIIDVLVNSVFIYDDKIVIYFNVRDGKQVSYTQMIDETSDIFDDLNCSDIPKGSDIVTDGSPFKAISELYCYIFVDGRVGIVVKRPEV

SEQ ID NO: 9965 - protein, 532 aa, Unknown
  Description of Unknown: Integrase B9966 sequence
  cd00338,PF13408,IPR011109,IPR038109,PF07508, Coil,PS51736,G3DSA:3.40.50.1390,IPR006119,PTHR30461, IPR036162,PS51737,IPR025827,PF00239,SM00857, G3DSA:1.10.10.2600,SSF53041
MKAVIYARYSSHAQREESIEGQLRVCYDYAAREGLVVVDEYIDRAISGTTDERPAFQRMIADSSSGSFDVVLVYAVDRFARDRYAAATYRHELKRHGIKILSATQPLDDSPESILLEAMLEGLAEYYSANLARGVKRGMRENALKCLSVGGPKILGYTTDPDTKKYIIDPVGANTVRDIFEKYDSGMTLAAVVEHCNDQGYLTRNGKPFSRTSLTTILRNRRYIGYYIYDDIEIEGGMPVIIEREQFESVQRRLAMNHRSKSRGKSLVDFMLTGKLFCGHCGRPMAGTSGRSANGEKHYYYSCRIHGEKCVKHNERKEVLEEAIFSYISSSFLTDENIEMLAESVAEEAQGDETAMLIEGLKAEKDDIRRKKKNVLNMIAEGGRDPDLLEMVEDFRNQEDRIDSQLAKAELERNVLTKDMLIFYLEQFRSGHEDTIAARPDIINALVSSIYIYDIEKNQNSCESSDRGSNGLGRRLVISFNVDETVENPMTFECSDLAGMVDCTSPYPNISGRRGRFYILQRGRIIVAVVDI

SEQ ID NO: 9966 - protein, 532 aa, Unknown
  Description of Unknown: Integrase B9967 sequence
  cd00338,IPR011109,G3DSA:3.40.50.1390,PTHR30461,IPR006119, IPR036162,mobidb-lite,PS51737,PF00239,SM00857, SSF53041
MGTTTAVRAVIYLRLSDLRLIEPGPDGIEKAFCAREKDLRELAKRVGATVVKVIRENDLRSRGKGRQQGVSAFKRKKITLPDGRETWRVIRKGFDEILRDLWVGTVTLLLTEDLDRMVRDPRDLEDLIEVAERRGISARSLSGSLTLTNGGTDSEITMARIMVTMANKSSRDTARRVSEARRRAAENNQPTGGGRKFGFEIDGMTPIPAEAAVVLDCSTRVLQIDAKAKEKNPNTTKLTSLRSLALELRAGDVPTVTGAQWSAETLRDILLRPRNAGITVHLGEELGRFTSDPIVPEDIYRAVVALLTDPSRTTGSGPAAKWQGSGVYLCGRCDDGETYMEATGGGTACVPYYRCEGHNHVRRTSSYVDEMVSAAVVARLSRADAVDLIPTVDVPDVDVPGLQAESARIRASLKSLGGMLVRGLIDEDQLLDATQVGRKRLAEIKDLLDVTIVESPLAPLIGVDDVAAEWAKQPVHIRREIISTLFVVKILPTVKGAKFVPGTRFSRSSVVIEPKPAPVCVTAPVETLPAAA

SEQ ID NO: 9967 - protein, 532 aa, Unknown
  Description of Unknown: Integrase B9968 sequence
  cd00338,IPR036162,PTHR30461,G3DSA:3.40.50.1390,IPR006119, PTHR30461:SF3,PF00239,SM00857,SSF53041
MANNTKNNEILKNDNAQQMQYNPYGYMMQPQMMPMQMNHQMIPMQMNPQMNPYMMPMQMNPYMMPMQMNPYMMPMQMQQPMQQLIQPMQQPMQQPMQQPIQQPMQQPMQQQLIQPIKNNGINNGINNGINNMDEIINNIDVDVDVDVELPINNIINEDKNGISGISKTNKKRKIIPKEDLGIENLFDNVLDNYKFNKKQKKDSAFISDKDFKNVIKSIKPHNLNEAHFNNETHPNEIYNVTLLDGNTHNISAKDISNDALKTQKLNYEHNIKLANAYPNMPPNATNTVIYTRRSIKDKEHIDNSIKTQTEACYKYAFANNMKMASFGYLEDNGVSGRNGKNLISGEIAFWMSHIPNHSNIIVYSPDRWCRNTLKGLEVLDSLSKRDITVHFISNNIDYNKDITSANRAMIQTELMTAEKQSNDTSEKIKGTLTRLKAEGHVIGRAPYGFNNIIINGIRKRTINESEKNMINVIKNKYNDIIENYVNYRDKEYLRSSESSIIKFIMRWASREGMKNRNNVAFTISQIKTIINI

SEQ ID NO: 9968 - protein, 532 aa, Unknown
  Description of Unknown: Integrase B9969 sequence
  cd00338,PF13408,IPR011109,IPR038109,PF07508, Coil,PS51736,G3DSA:3.40.50.1390,IPR036162,IPR006119, PTHR30461,PTHR30461:SF3,PS51737,IPR025827,PF00239, SM00857,G3DSA:1.10.10.2600,SSF53041
MSQVNKVRVIPAAPKHNTYEALFERKKRVCAYARVSTNKEEQVTSFESQKRYYTNYIQENPEWEFAGIYADEGISGRSMKKRGEFRRMVQDALDGKIDMIMVKSVSRFARCVVDVLTIVDELRQKGVPVIFEKEHLNSIEDDKRTNFMITLYASIAQEESDSLSDSVNWGIQRRNEQGIVRGVRIYGYDMTEDKKYIVNPEQAEVVRLIFSLYLSGLSSKGVANELKKRGIKTYKGFDNWDESTILYMLKNEKYLGNALLQKTILEPWRAKRRTAYADKQMYLVEDNHEAIIDKDTYNRVQRELEFRKTIRSYTKTGRGGYSSLYPFSCKVFCYQCGSVFRRHNYHSAGKTIPTWVCVNHENNGNAVCSQKPIREDELKQAFMRVVNALVADKKAMLRKIQESIEETVGKGDLSGRIEELDKQIQEKQRELVTMMNRARNANEIIMNEGAQNAIMAEIEKLTEQKRHYENTTVENERNSGRVETLIDLAERKVQMTEFNDTLCRALLEKAVVDGKEVTFMLGGGLEIAETLN

SEQ ID NO: 9969 - protein, 532 aa, Unknown
  Description of Unknown: Integrase B9970 sequence
  cd00338,PF13408,IPR011109,IPR038109,PF07508, PS51736,IPR036162,IPR006119,G3DSA:3.40.50.1390,PTHR30461, PTHR30461:SF3,IPR025827,PS51737,PF00239,SM00857, G3DSA:1.10.10.2600,SSF53041
MRAVAYCRFSSDMQRDGFSIEAQRSAIQAYCKQEGIELVGEYVDEARSGTNAERENFQRMISDSKLHAFDLVVVHKLDRFSRDRYDFAVYRKLLKGNGVSIRSVVERLDDSPESIILEGMLESMAEYYSKNLARETMKGLRARARKGLCCANRPLGYDIAEGRFVINQLEAIVVREIFSRVGSGESLASISRDLASRSIRGSRGAPLQYVSLSKIVKNTIYYGSYTFAGELACANCAEPIVDFELWTAANARLQGHRNPSIRRHRVEDYLLTGLLYCGLCGGHFSGHCSHGRNGKIYRRYRCTNSTQGKCDASVVDKEAIESFVLSALEHDLVKGSIVPHVIDSLNARLKERAKSSDAGKLKKELASLEMKKTRLLDVYLDSKIEKDVFVVRSSELDTKISEMKDLLAQCELPSILLVENTVRKSAESYCLSIKQKSGKDLSRLIGALIERVILYPDRIVIVYKIKNSTGDPIESVVPREPVAPAESAIPSGALNANYGGAFVCLSATYGVASYRRESLLFQPDAVVYYTLL

SEQ ID NO: 9970 - protein, 532 aa, Unknown
  Description of Unknown: Integrase B9971 sequence
  cd00338,PF13408,IPR011109,IPR038109,PF07508, Coil,PS51736,IPR036162,IPR006119,PTHR30461, G3DSA:3.40.50.1390,PTHR30461:SF3,PS51737,IPR025827,PF00239, SM00857,G3DSA:1.10.10.2600,SSF53041
MPNTAVIYARYSSAQQRDVSIEQQVKACQKYAADNGLTVLRVYDDHAMTGTNDNRPAFQQMISDSASGAFSFVIVYSLDRFSRDRYDSAIHKHTLRERGVRVLSAMEQIQDNPTGVLMESILEGFAEYYSKELAQKVKRGIHSNAERAMVVARPAYGYRRGEDGRYEIIPEEAEIVREIYRRIADGEQYTSIYADLNARGVPTKKGGKWGKNSFQAILRNEKYTGVYRYEDVLIPDGIPQIIEPELWQRVRDRSAAHTLSVTPKKRPNENGAYLLTGKLYCGHCKGAMVGTSGTGKHGELHYYYTCRTRQKNKTCKKKPVRREFIERLIAQRLQQMIFAEDVVDRIADELIAYLKANETTDEMRNLSAQIEALEREEANTLKAIRMGVVAAPVQKMLEQIESDLDSLRARLLLAKERARSDITKDEVLTLFELFREGDIGSKEYQQKLIDAFLIRAYVYDDRVKIVFNYSAAGSNEVEIPFDIDTVDKTPPGSDKSPEGVLILPHTNPDSLYFVKGFFVLITDFSGKMQKET

SEQ ID NO: 9971 - protein, 532 aa, Unknown
  Description of Unknown: Integrase B9972 sequence
  cd00338,IPR011109,IPR038109,PF07508,Coil, PS51736,G3DSA:3.40.50.1390,PTHR30461,IPR006119,IPR036162, PTHR30461:SF3,PS51737,PF00239,SM00857,G3DSA:1.10.10.2600, SSF53041
MSKINSYSSPQQNIYKIICYIRRSRQDIERENRTGEDTLATQKRIMIKVLDDLSIPYDQVLEIGSGDKIETRPVFQQVLEDLKIGTYNAISVKEIARLGRGSYSDMGVIYDLFFGKNIYIITPYKIYDPSNPSDARQIRFELFISREEFLMIKERLLSAKCSLAHTGCWMAGNLPYAYKLNSQTSKLEPIEEFADIVRLIFILYVNGIDGQEVSFRAIATYLTRIGIHTPKNGITWEPSTVKRILSNPVYNGTVMYYRRKRVMKDNKSIVIDRPKEDHIIVEHAHESIIDEETWELAQKKFNSRGTAPHNKLDFSPCELAGLVLCSKCHKTMIKQTTRTHYDRKDGTRKTYFQEVLWCTKPGCSYAMYRRIEENILLFLDRLKDMGIEEAKKLLEDDFNKFVNNKKENSVDINDVMSKKELELKRKLKFAYEKWEDGLIDDNMYKERTNELNNELNKLKLLISNENVNNNNFEQKFFEWQDKVKTVLEAYKICDDKTEKNGLLKSVIIKIEFERINKKDFKIRITPSFYSHE

SEQ ID NO: 9972 - protein, 531 aa, Unknown
  Description of Unknown: Integrase B9973 sequence
  cd00338,PF13408,IPR011109,IPR038109,PF07508, PS51736,G3DSA:3.40.50.1390,IPR006119,IPR036162,PTHR30461, PTHR30461:SF3,PS51737,IPR025827,PF00239,SM00857, G3DSA:1.10.10.2600,SSF53041
MRAIIYARYSTEHQTESTILDQLRRCRDYAKNHGLKIAAEYTDEGISGAAIGNRPGVQRALAELERGDVLLVVDTTRLSRSQDLAPLLTRLRHRGIRVVGVLDGFDSDSRTARMQAGLSGIMSEEFRAQIASRTHSALDMRARQGKATGGKCYGYSKAGEIIEAEAAIVREVFERAARGEAMKAIASDLNRRGVPSPGSTWERKARRSDGMWLVSGIHSMLGNDRYIGRVVWNRSVWKRDPDTGKRQRVERPQSEWVVSEGPAIIELEAWDKVRALAKPRQFHGGTKGRGPKYILSGILVCGECGGKLVATGANGSWYYCGTRHQGGDSACSMAIGARRDVAEEKLLEPISSQLLSNEAVELAVQMIRQWRRDERTESTRPAELEELDHRIARLEAQVSQGILDREDIAPSVAALLERRQALLSKSWRKANSRSNVDQAVAEEAYRQAVANMREALQGPAARARAAVHELLGDVVCRPEDGALVAVVRVKTAPLLRAAGVSQNGSGGSLPYYEMVPLVRDGPPLFSKLLAA

SEQ ID NO: 9973 - protein, 531 aa, Unknown
  Description of Unknown: Integrase B9974 sequence
  cd00338,PF13408,IPR011109,IPR038109,PF07508, Coil,PS51736,G3DSA:3.40.50.1390,IPR006119,IPR036162, PTHR30461,PTHR30461:SF3,IPR025827,PS51737,PF00239, SM00857,G3DSA:1.10.10.2600,SSF53041
MRAIIYARYSTEHQTESTILDQLRRCRDYAKNHGLKIAAEYTDEGISGAALGNRPGVQKALAELERGDVLLVVDTTRLSRSQDLAPLLTRLRHRGIRVVGVLDGFDSDSRTARMQAGLSGIMSEEFRAQIASRTHSALDMRARQGKATGGKCYGYSKAGEIIEAEAAIVREVFERAARGEAMKAIVCDLNRRGVPSPGSSWERKARRSDGMWLVSAIHSMLGNDRYIGRVVWNRSIWKRDPDTGKRQRVERPESEWIVTEGPAIVQLETWEKVRALATPRKFHNGTKGRGPKYILSGILVCGECGGKLVATGANGAWYYCGTRHQGGDSACSMAIGARRDVAEEKLLEPITKQLLSSDAVELAVAMIRQWRRDERTESTRPAELEELDRRIAKLEAQVSQGILDREDIAPSVAALLERRRALLAKSWRKANSRSNVDQAVAEEAYRQTVANMREALQGPAARARAAVHELLGDVVCRPEAGVLVAAVAVNTAPLMRAAGVSQNGSGGSLPYYEMVPLVRGGPPLFSKLLAA

SEQ ID NO: 9974 - protein, 531 aa, Unknown
  Description of Unknown: Integrase B9975 sequence
  cd00338,IPR011109,PF07508,G3DSA:3.40.50.1390,IPR006119, IPR036162,PTHR30461,PTHR30461:SF3,PF00239,SM00857, SSF53041
VPPQLTADPIPTIGYIRVSMAREEMISPAIQRSAIEEWARRTGRQIVLWIEDLDLSGRNFRRKVMGGIERLEAGEAREIACYRYDRWGRNAFESLANIARVEQAGGHVQSATEPMDAETAIGKYNRLNALGLAEMQSDIISDNWKAALANRIGRQIHPSGAAQFGYLRLGRVRSEDDPTRFRRDRDDAAGERYEADYAGGAADVLIGMYDRYITEQKGFRKIAVWLNARGILNTRGAPWSDVTVRNVLDSGFGAGYLRIHDKDCKCGKPSSCRKREYVPGAHEPILDEPTWQAYLALRARRRNLPPRSRYAAYPLTSLILCGHCCSGMSAQNASYVPGHTYRCTRWKQYGGDTPGGCRGVFPQRLRVEAAVRARLAEWADEIDGRTAVREAKAAVRVPAAIDRDRIARALVATDAALTRLAVTNAVDPMPEGVYKAARAELLAKRTQAEAELEAAPAEDAPAVDYLPIVRSILEGWDLWPAGQVRDMLAKVIRHVKVSRQPGVPTKSRHPPLVDVTPVWEPCDCVACERVR

SEQ ID NO: 9975 - protein, 531 aa, Unknown
  Description of Unknown: Integrase B9976 sequence
  cd00338,PF13408,IPR011109,IPR038109, PF07508,Coil,PS51736,G3DSA:3.40.50.1390, IPR006119,IPR036162,PTHR30461,PTHR30461:SF3, IPR025827,PS51737,PF00239,SM00857,G3DSA:1.10.10.2600,SSF53041
MKAIVYARYSTEHQTESTILDQLRRCRDYAKNHGLKIAAEYTDEGISGAAIGNRPGVQKALAELERGDVLLVVDTTRLSRSQDLAPLLTRLRHRGIRVVGVLDGFDSDSRTARMQAGLSGIMSEEFRAQIASRTHSALDMRARQGRATGGKCYGYSKAGEIIEAEAAIVREVFERAARGEAMKAIVCDLNRRGVPSPGSTWERKARRSDGMWLVSGLHGMLGNDRYIGRVVWNRSIWKRDPDTGKRQRVERPESEWIVSEGPAIVELETWEKVRALATPRKFHNGTKGRGPKYILSGILVCGECGGKLVATGANGSWYYCGTRHQGGDSACSMAIGARRDVAEEKLLEPITKQLLSSDAVELAVAMIRQWRRDERTESTRPAELEELDRRIAKLEAQVSQGILDREDIAPSVAALLERRRALLAKSWRKANSRSNVDQAVAEEAYRQAVANMREALQGPAARARAAVHELLGDVVCRPEAGVLVAAVAVNTAPLMRAAGVSQNGSGGSLPYYEMVPLVRGGPPLFSKLLAA

SEQ ID NO: 9976 - protein, 531 aa, Unknown
  Description of Unknown: Integrase B9977 sequence
  PS00397,IPR038109,IPR006119,PS51737,PF00239, cd03768,G3DSA:3.40.50.1390,PTHR30461,IPR025827,SM00857, G3DSA:1.10.10.2600,SSF53041,IPR011109,PF07508,PS51736, IPR006118,PF13408,Coil,IPR036162,PTHR30461:SF3
MIIYNKQKSPTLSNFGESEREASGKKQSIKKLFFLYPFYHFLGNFERGTTMITTNKVAIYVRVSTTSQVEEGYSIEEQIDKLESYCKIKDWTVYKVYTDGGFSGSNTERPALEKLIKDADKKKFDTVLVYKLDRLSRSQKDTLFLIEDVFIKNGIEFLSLQENFDTSTPFGKAMIGLLSVFAQLEREQIKERMQLGKLGRAKAGKSMMWAKTSYGYDYHKETGTMTINPVQSLVIKFIFESYLSGRSITKLRDDLNEKYPKEKPWHYRAVRVILDNPVYCGYNQFMGEIYKGNHEPIISKETYDKTQEELKIRQRTALENLNPRPFQAKYMLSGIAQCGYCLAPLKIIMGVKRKDGSRFKKYECHQRHPRKLRGVTTYNDNKKCDSGFYYKDDLEAYVLQEVNKLQHDSEYLETIFSDNRKESIDRESYQKQIRELSKKLSRLNDLYIDDRITLEELQSKSREFLSMRALLEKELEDDPSLKQEETKNTIKQELSKGDIYKMDYESQKTIVRALIRKVQVTADSIVIKWRI

SEQ ID NO: 9977 - protein, 439 aa, Unknown
  Description of Unknown: Integrase B9978 sequence
  cd00338,PF13408,IPR011109,IPR038109,PF07508, PS51736,G3DSA:3.40.50.1390,IPR006119,PTHR30461,IPR036162, mobidb-lite,PTHR30461:SF3,IPR025827,PS51737,PF00239, SM00857,G3DSA:1.10.10.2600,SSF53041
MDRIVQRVKFEAPKQERLLRVAAYSRVSNGKDTMLHSLSAQVSYYSNLIQNHEGWIYCGVYSDEALTGTKESREDFQRLIADCRAGKIDLVITKSISRFARNTVTLLNTVRELKLLGIGVFFEEQNINTLSAEGELMLTILASYAQEESLSASENVKWRIQNDFKQGKLPMSVWNIYGYKRTPDGGLEIIPEEAEIVEQIYKLYLDGLGVLKIAQILNEMGIESNTRDTWSAKKVRYILSNEKYIGDLLLQKSFRLDHLTKKTVRNRGEKTQYYVEDNHEPIIPREVFEAVQLELEKRREKHCKEVVPQKYAFTGKILCENCGKNFRRKVTATRVVWICSTFDRLGKKVCASKQIPDETLCAVSAEMLGIADFDADLFEEKIIKITVPEANHLIYHFKDGHTVETTWKDRSRSESWTPEMREQVRQNNLKRRNQEWQKQ

SEQ ID NO: 9978 - protein, 531 aa, Unknown
  Description of Unknown: Integrase B9979 sequence
  cd00338,PF13408,IPR011109,IPR038109,PF07508, Coil,PS51736,IPR036162,IPR006119,PTHR30461, G3DSA:3.40.50.1390,PTHR30461:SF3,IPR025827,PS51737,PF00239, SM00857,G3DSA:1.10.10.2600,SSF53041
MTIYDAVIYTRVSSDEQRRSGFSLDYQEKQGREYAQKNNLKVVKVYTESYTAKRPGRPLFNEMMMFVRKNKVRHLIFLKSDRASRNGVDSAALVYMAERDIFNIHLIQDGLCLNKNSRPTDFLIFEINNTFANFYPRNLSVEVTTKLIEKAEQGFYPVTAPVGYENKRIKHRSYIQINPDKAPFIKRIFELYSTGEYSYKTLATKMREEGFMISPAVKCGKSNIEDILNNPIYMGDFVYKGKRYYNGKHEPIISRELYSICQEIIKSRTSGRISKHDFVFSNLIKCSKCGCFMVGEIKKGRYIYYHCTGNRGGNCKSKSYIREEKIEKAILDTLATIRLSDDVLELAKRSFKYELENQNIYNEERIKSLDEEIKKMKERSDKLFNLVLDGKVNETIFEKKSAEIESTLDDLILSRSAYTKTGFELLKYSENLFELFKMSSGLYSRLDNAKKRELLKLLCSNFSYDGENIRITIKKAFQPIVEIAKLEKLGLKRQSSNFLKCIQTLVNTMQTPENILMLEKFSTLKKDFLVA

SEQ ID NO: 9979 - protein, 531 aa, Unknown
  Description of Unknown: Integrase B9980 sequence
  cd00338,IPR011109,IPR038109,PF07508,Coil, PS51736,IPR036162,G3DSA:3.40.50.1390,IPR006119,PTHR30461, PTHR30461:SF3,PS51737,PF00239,SM00857,G3DSA:1.10.10.2600, SSF53041
MLVAVYCRYSSDRQRETSIADQLRVCQTFADQRGWSLVAMHSDEEVSGSTPVRARRGGAALLADAMADRFGALVLEGLDRLSRDLVEQETIVRRLEHRGIRIIGVCDGYDSEATGKKLHRGMRGLINEVYLDDLRAKTHRGQAGQVSRGYSAGGGGYGYRSTHDGTGYRIEIDEDQARWVRWIFEHFAEGWSSKRIVAELNRLRVPSPRGGTWAVSAVYGSAAKGCGILHNELYVGRYIWNRSQWVKDPDTGKRQRFERPRSEWLIEERSALRIIDQAIWDATRARFSTSYKEGGTKGKGRAPRSLLGGLMKCGYCGGAVVAINGKLYGCATKHDRGAVVCRGVFAPRQETETRILAGVREELLRPSAIAEMQQMVTEMLRAELAVGESEAKAARGRVVELEREIDRLVEAIASVGISDALTQRLRNAEAELASVRRTAATSSGKKVEIPNLKSIYREQVMNLQEALRSDIQQARNALREMIGPITVVERNDEVWAQIDTGPEAMLKASGLYIGLVAGACFGSNIREIRIS

SEQ ID NO: 9980 - protein, 531 aa, Unknown
  Description of Unknown: Integrase B9981 sequence
  cd00338,PTHR30461:SF21,IPR011109,PF07508,Coil, PS51736,IPR036162,IPR006119,PTHR30461,G3DSA:3.40.50.1390, PS51737,PF00239,SM00857,SSF53041
MAIDAPGIPTRAIIYCRISRDREGAGLGVERQREDCEALAKQLGVEVVAVYTDNDLSAYSGKPRPGYQQLLNDLRDGQADTVLAWHTDRLHRSPAELEEYIDVCEPRRVETRTVKAGHLDLTTATGRMIARQLGVQARYEVERMVERQRRTRDQMAEQGKNFGGRRPFGYEGDRITPRALWCPSCGVEEGFSVVQRCSSCSHAGQFVPGRVCGSCGAREGVAVVALCGCGADAEVVEGSEAWHVRWAADAILAGASLQSIAAAWNEKKVATSTGGEWAGPEVRSMMVRPRNAGIIRHRGQEAGPARWPALLEEPLWRSVVAVLSDPSRRTSPGNERKYLGTGLYECGLCPSPNSVRTVTSNRKGGRHELAYGCRISKHVVRKAEPVDAYVQTVVLDRLSRDDAAELLAEREDPVDVRGAQRDMREARETLDALAEQLGAGEMDVQEWRVARKSARERLENAERVLARAVDVNPVAGLIGADDVDAEWERLDLSRKRAVVSYLMSVKLLPARRGRIPGGGYFDSDSVEITWK

SEQ ID NO: 9981 - protein, 400 aa, Unknown
  Description of Unknown: Integrase B9982 sequence
  cd00338,PF13408,IPR011109,IPR038109, PF07508,PS51736,IPR036162,IPR006119, G3DSA:3.40.50.1390,PTHR30461,IPR025827,PS51737, PF00239,SM00857,G3DSA:1.10.10.2600,SSF53041
MRNITEVTRQPKSLFLTDRLKVCAYVRVSTDHREQLNSLENQTQYYERLISSNPDYEYCGIFSDAGISGAKENRPGFLAMLEKARIGEIDLIITKSISRFARNTLMLLKYVRELRDMGVGIIFEEEMVNTLKSEGELLLTVLAAIAEEERKSVRSNVQWAMQNKCKRGEVMVDTNRLLGYDKDSKGNLIINQEQAKIVRQIYKLYLNGISGYKIAQMLNDQSIPTYNKKPWSSHRIIRIISNEKYAGDCLMQKSFVADNGRQIINRGQKDKYYIEDNHPAIITRLDWEAAQIIREKRRKKIYPFSSMLRCPFCGASLTRVVHEGQWVSWICATYLHKGKAMCQGMRITDGILQELVKDIHIIEPMVVEGVIYGKGRKKRTKEDFRLVPAAQYRGYKSNRE

SEQ ID NO: 9982 - protein, 525 aa, Unknown
  Description of Unknown: Integrase B9983 sequence
  cd00338,PF13408,IPR011109,IPR038109,PF07508, Coil,PS51736,IPR036162,PTHR30461,IPR006119, G3DSA:3.40.50.1390,PTHR30461:SF3,PS51737,IPR025827,PF00239, SM00857,G3DSA:1.10.10.2600,SSF53041
MSANVIIIPPRKIAGNTVDKHEDKPKLRVVAYCRVSTDSEEQATSYDTQVQHYTDYISRNPLWEFAGIYADDGISGTSTKKRVGFNDMIHDCMSGKVDMVITKSISRFARNTIDCLKFVRQLKDKNIPIIFEKENINTMEASGELLLTIMASLAQQESASLSQNVKLGLKFRYQEGKVQINHNWFLGYTKDDEGNLVILEQEAKVVRRIYREYLEGASLRDIAEGLEKDGIKNGAGHLKWNLSNIKGILQNEKYIGDALLQKTITTDFINHVRIKNDGTEPQYYVKDSHTPIIPRDIFFKVQEEMLRRANMFSGEENKKRRVYSSKYALSSLCVCAKCGDVYRRIAWNNRGVRSVVWRCCTRVENGPSACDAPTVQENELQSAIVKAINKVFSISDEVLDTLKNNIREIIAGNNLSEIETVDKKIADKQAILLTLLKAKKDYTKIADEIDELKGKKQQLLIEKAGQEDAKRRIREMEDFLKNERHDISEYDEKLVRKYIKKIKVYEDRFSVTFKSEISVDIERAS

SEQ ID NO: 9983 - protein, 531 aa, Unknown
  Description of Unknown: Integrase B9984 sequence
  cd00338,PF13408,IPR011109,IPR038109,PF07508, Coil,PS51736,G3DSA:3.40.50.1390,IPR006119,PTHR30461, IPR036162,PTHR30461:SF3,IPR025827,PS51737,PF00239, SM00857,G3DSA:1.10.10.2600,SSF53041
VAKRKRDPNAPKLGVIYARYSSANQREESIEQQVAECRIFAEAQGITILDVYADAAQTGRNDKRQSYQKLLADARHGGFSYIIAYKSSRISRNMVDALVFEAEMLRNGIKTLYAKEEFGNNAAGRFALRTMMNVNQFYSENMGEDIKRAKDDNARQCKANGIIPYGYKKGPDGKLVIDENTAPIVQEIFRRVRSGENYIDIANDLNARGLKTRQGNPWNKGSFHIMLKSERYLGVYIYKDIRIEGGNPAIIDLETFLEVQKIVSDKAKIRGRHRSDEDYLLTGKLFCGKCKAHMNGMSGKGKGGDIYRYYSCSTRRLTGECDKEHVQKDYIEREVAKAVRDYVLRDDVIEWMIRTVMEFQDRMDITAEINQLEQQIADNENATANLMKAIEQGIITQTTKDRMFALEEEKSELRKQLAEAKARDISVSPQEIRTYLNSFRRGDVSDPSYQARLFDAFLTAVYVYDDKLKIVFDMYDGTGKTVDVELLDVPAEEAEFSLKLPYAPAYGNEANTTITMISGVFVLTVAFISRN

SEQ ID NO: 9984 - protein, 530 aa, Unknown
  Description of Unknown: Integrase B9985 sequence
  cd00338,IPR011109,IPR038109,PF07508,Coil, PS51736,IPR036162,G3DSA:3.40.50.1390,PTHR30461,IPR006119, PS51737,PF00239,SM00857,G3DSA:1.10.10.2600,SSF53041
MNPADIQRKINSASVPAFAYDRVSTSSQAEEGISLAYQETQAEQYAQRAGIEIVHFFTVAESARSSERRKMFREMIEAARNFGVRHLIFKNVDRMSRNYADLVLIEQLIDEEGFHVHFYQNNKMLNADSNHNDRFILGIEIAVAKQLSDKLSHDMREVHRHKVRHGIMPGRSLGYTYDRDTKRHMIDPETEEMLRYLFDTFDNEKISVAEMTDRMNQRGYCTSTGRPWHKSITHRLLSSPVYCGMFEYRGEIFEGVHQAFYPAERYYSRRCRLDMKYTGTRKRNYEFLLAGLLQCQGKTLTGEVKKNKYIYYTNRFNGASFRQEDIFRWIDADIESIQFSPNFAEYIKELFRESVQEQEQGNRHVIGAVNRQISKIRVRIDRLLDLYVDGDVDRESLTRKVDLYRREISRLQENRKRAELDKAKFILKSADIVDQIQKFPALWQNSTPEEKAELLPIMATHVTIENERASVAWRKPFSIILIPELIDHAQKVRKFHNNLHEWDDFRTLIPECEDLVFSRISPELQFFVAA

SEQ ID NO: 9985 - protein, 530 aa, Unknown
  Description of Unknown: Integrase B9986 sequence
  IPR038109,PS00397,IPR006119,PS51737, PF00239,G3DSA:3.40.50.1390,PTHR30461,IPR025827, SM00857,G3DSA:1.10.10.2600,SSF53041,IPR011109, PF07508,PS51736,IPR006118,cd00338,PF13408,IPR036162,PTHR30461:SF3
MNEKVAIYIRVSTKYQIDKDSLQVQRRELIAYSELILNIRDYVVFEDPGFSAKNTDRPEFQAMMARIRAGEFSHILVWKIDRFSRNLLDFAEIYKELKKSGVAFISKNEQFDTSTPVGEAMLKIILVFAELERNMTADRVTSVMLSRANNGQWNGGRVPLGYSWDSESKTFSIIRQQAELVQLIFDTYEEQRSLIKTASVINSLGFTSKNGKTWKAETIHSILTNIFYTGAYRYNVHGYGQGYTLKNDSEWITIEDHHPTIIRKIQFNRVQHMLSSNNKTSTRQFRYNKNIHIFAGLLTCGQCGTNMSATPGKRRIDGWLPSVYGCRGRRNKTCPQKYVYDLTVAPFIFNTIQTILTNREESPAYIESKLKEVLGVNSVKGLDDLLSNQSDTLFSTPTSVSISEHEKLLTSKNRIENALTRLKNLYLFSTDSIPEKDYIIEHTELTAELEKINKSLASIPDDSEDNIRRASYYLMADQLSKGTFDFMTHAKNMDRSVLRTFILATVKEAVVLDDTICQITFQNNKTIFFQ

SEQ ID NO: 9986 - protein, 530 aa, Unknown
  Description of Unknown: Integrase B9987 sequence
  cd00338,IPR011109,IPR038109,PF07508,Coil, PS51736,IPR036162,IPR006119,G3DSA:3.40.50.1390,PTHR30461, PS51737,PF00239,SM00857,G3DSA:1.10.10.2600,SSF53041
MGRIKENGLYCAYLRKSRRDMELEALGQGETLARHEKQLADLAARLGIRIARTYREIVSGDTIAERPQVQQLLRDVNAGLWDGVLAVDVDRFGRGDSIDQGVIMQSFMYAGVLIITPDKIYDPSDDSDAEFFEIKLFFSRREYNMIKKRMQRGRLASALDGCYMGSRPVYGYERVKLQGRKGWSLKVVPEKAAIVRSVFDWYAHGMDGRDVGAAVIADRLNQMGLRTDMGNAFEASYIRHMLQNPVYIGKVQWNQRTTQYAIRDGRRVHSRPKNDDPVLVDGHHQAIIDPALFERVQQMFAAHEKRPRNKMADVANPLAGLVVCSQCGRHLQLKGDRHRRAGFLGCVTQRCPTCATSIDVVEGVVLDALRGWISAYEARADAPAPEPSADVRASDAARAQLTDQLAALNEQRKKNFDLLELGVYDVPTFRERRADLAARIAEIHAALAALDAPPKPDPVVTILPQVRTVLGSYDLAATPAEKNTLLRSVIDHIAYTKTQRCYRNSAPTDHLSLVLFPRVPSAGDGDGSGF

SEQ ID NO: 9987 - protein, 530 aa, Unknown
  Description of Unknown: Integrase B9988 sequence
  cd00338,PF13408,IPR011109,IPR038109, PF07508,Coil,PS51736,IPR036162, IPR006119,PTHR30461,G3DSA:3.40.50.1390,PTHR30461:SF3, PS51737,IPR025827,PF00239,SM00857,G3DSA:1.10.10.2600,SSF53041
MLYDIKQIKIEDLIIYLRKSRSDDPSMTVEDVLAKHEEDLQEYCEREFGQKMPESQIFREVVSGETIDDRPVMTSIMKMLETGKIAGVLVKEPSRLSRGDLQDCGRIINTFRYTNTLVITPDTTFNLTNERDRKFLEMQLTKGNDYLEYNKQILNSGRIRSVKRGNFIGSVAPYGYKKVKIGSGKDSCYTLEIIPEEADNLRLMYHLFINEGYGFMRIAKHLDNIGVKPRKSETWSPAAIKDMLENPVYIGKIRWNWRKTEKTIVDGKIVKVRPKTKDETQWIFVDGKHDPIIDDATFQAALDKRGKNVRVTKGKELKNPFAGLLFCGTCGSAMSYKKFKQYRGNYENNCENMLCNRQSWCKTKSVKYDAFLDRVIATLERTIADFEMKLQNDDGDAAELHKNIIKNLEMDLKKLKDKDIRQKDAYEDGIYTKEEYASRNAKLQEQISETMEALCQAKDSVPPSIDYTEKIVRFTDCLTALKDPEVPAIEKNMLLKACIEKIVYHNKMESKPGIGRYVENVFNLDIFLRL

SEQ ID NO: 9988 - protein, 438 aa, Unknown
  Description of Unknown: Integrase B9989 sequence
  cd00338,PF13408,IPR011109,IPR038109,PF07508, PS51736,IPR036162,IPR006119,PTHR30461,G3DSA:3.40.50.1390, IPR025827,PS51737,PF00239,SM00857,G3DSA:1.10.10.2600, SSF53041
VRTITRIEPKTFIIPTKLRVAAYCRVSLEKESMLHSLSAQVSYYSEFIQNHRGWQYVGVYADEAISGTSNIRPEFNRLLVDCREGKIDMIITKSISRFARNTLTMLEVVRELKSINVDVFFEKENIHSISGDGELMLTILSSFAQEESLSVSENCKWRIRNQFKTGVPYHFSIIGYELKNNKLEIVPREAEVIRMIFNDFLSGMGKIAIIKKLNAKGLMTRNNKLWQEKAVDRILRNEKYAGDLLLQKFYSSNHLEKQKRVNVGQLPSYYITDSHEPIIDRDTFERVQLELEKRARIYNAGAVTGMPHSFAGKIVCGECGDNYRRRITHAGEKYEKAVWICTTKNRLGKEACGSKQIPEDIISKTTAEVLGIKDFDEDLFSQNIKMIKVTDTNHLVFVFLNGLECIKLWQNNSCRNSWSEEKRQKQREMITCRLQEQK

SEQ ID NO: 9989 - protein, 530 aa, Unknown
  Description of Unknown: Integrase B9990 sequence
  cd00338,IPR011109,IPR038109,PF07508,Coil, PS51736,IPR036162,PTHR30461,IPR006119,G3DSA:3.40.50.1390, PTHR30461:SF3,PS51737,PF00239,SM00857,G3DSA:1.10.10.2600, SSF53041
MYYNELRHYLPEEILVYLRKSRSDDPMLSVEEVLQRHQQILEEWIERNLDGPIPEENYFREVVSGEQLETRPEMMKLLKLIESPKIKAVLVVEPQRLSRGDLEDCGKLIKLLRYTDTHVITPMKIYDITNEYDRDGFERELKRGNEYLEYTKKILKRGKVQSCKDGNFIGSVPPYGYNKTIVYDGRKKCPTLTINEQEAEVVRMIFDMYGNRDLGRATIAAELNRMGIKPRSNELWSRTSILSMLRNEVYLGKVKYGYNKTIHVVEDFTVRQTRKITGDYVLADGKHEPLISEELFNRCQKNNGKQAKVKSNKILSNPLASLIFCEECGYALTYRTYNDGITQARYQCRRKEVHRAGSIIASRVWSAVADTLEAQIPNFEVELRENTGEDKKRKEQAIALLQNRLADIERKEISLWEKYTEEAMPRDIFDKLKDKITREKEEVTLSLQNEKQIDSRGIDYKEKIVSFHQAVDALRDSEVSAAEKNKLLKKCVKRITFKIPHSERVSMQVEGANSRGWTQPTPEINIELKF

SEQ ID NO: 9990 - protein, 530 aa, Unknown
  Description of Unknown: Integrase B9991 sequence
  PF13408,PS00397,PS51736,IPR036162,IPR006119,G3DSA:3.40.50.1390 ,PTHR30461,mobidb-lite,PTHR30461:SF3,IPR025827, PF00239,SM00857,cd03768,IPR006118,SSF53041
VSPSPSPALRWISYCRVSTDEQASEGVSLDAQAAACRAYAQAKGWLLAEEIQDAGASAATMKRAGMQRVLAELQAGAGVVVYRLDRLTRSLRDLLDLVALAGDRGGLVSVSESLDTTNPMGRFTIHLLGALAQWERETISHRVKGAMQHARGEGFYVGGGVPAGLGLVSEGARKRLVRGKYADAVAPIWGMVLRGASLSDVGATLRAAGVPGQWTKNRVRGLLLATYCTGLLVDKGTQEAVRSTLAKRPGLPGRPPAGEARALPASPVAGIARCPACGATLIQVSARGRGGRYRYLRCVGRAKGVCTAKDRRAEPVEAGIAVAVSHALRGGDYTRAWVSTLRGETQRAEGLAAERGRLTVERDQTRARAEELSLSGPRPSDPAFWVAMRPLTDRLTVIESRLAEIEGKLAASEGQGLSAEEILSRLELAGAGLAEAAPERQRLVYDGVLAAATVHEDRVELRLFPPDETSTPPERGGGSFQSRLWLGSRPIPTNRSRIKGRLCRMIRLDVPRRSGSLARCAVPAREGSKA

SEQ ID NO: 9991 - protein, 530 aa, Unknown
  Description of Unknown: Integrase B9992 sequence
  cd00338,IPR011109,IPR038109,PF07508, Coil,PS51736,IPR036162,PTHR30461, IPR006119,G3DSA:3.40.50.1390,PS51737,PF00239, SM00857,G3DSA:1.10.10.2600,SSF53041
MEQYLIYLRKSRSDLEAEAHGEGETLSRHEHTLLELAKRQHLNVTDIYREVVSGDTIAARPMMQRVLSEVEQGVWSGVLVMEVERLARGDTIDQGIIAQTFKFSGTKIITPIKTYDPDNEFDEEYFEFGLFMSRREYKIINRRLQRGRLASAKEGKWPSGLAPFGYRRVKLKNEKGCSLEPIEEQAAIVRMIFDLYTVGLQDEDGSARPLSLGSIATRLNDMHIPSPSGSQWARITIRGIIKNPTYIGMVRWGSRETKKKVVDGKVVSVRGPADPEKECIFKGIHPPLIPKETFELANDKLTRSENTSTHKEKVVRNPLAGLLVCSECGRQMMRMINPVHPDMPVVRCPRRGCPNCSSYLPIVEGRVIQGLSEWMKGYELEWSSAAASSSVSSVGVREKALASAEAELRKLQQQLERTHDFLEQGIYDTDTFLSRSRMLSDKIAAAKDSVARCSRELTEEKLRETSRRDIIPKVKNLLDVYPLLETAEEKNALLKEVLEKVVYQKLNEKRKKSPDGFTIEIYPRIPKSEK

SEQ ID NO: 9992 - protein, 530 aa, Unknown
  Description of Unknown: Integrase B9993 sequence
  cd00338,PF13408,IPR011109,IPR038109,PF07508, Coil,PS51736,IPR036162,IPR006119,G3DSA:3.40.50.1390, PTHR30461,PTHR30461:SF3,PS51737,IPR025827,PF00239, SM00857,G3DSA:1.10.10.2600,SSF53041
MANLRAKTKIINIDPNKVAIYVRWSTDEQAEGTTLTIQLERSKQFILSQGWTISEDLIYIDEGYSGGTLDRPAIKKLRKDVDNGLIDCVVIFKLDRLSRNIVDTVNLVLEEWDDTAYIKSVTEPFDTSQQIGRQILTMLAGFAEWERYNIKLRTFEGKIETVEKGFSPGIKPPFGFRIGEKTGTFEIVEQEANIVKRIFREYRNGKGTSLICTELNNEGIQFGVGKKWNSNTIAYMLSNQLYIGRLIYGKLQNNPKRLKKDGEPYRKRRDVEDIMVKDLTEEVITPIITVEEFNLIQKIRKSRNVFMEHKTSGRIFTSPHLLSGLLRCKQCNYGLIARGKQKGDNHSYYVCRGNKQKGTGFCNAGYIRQDKLDKLVSKRCADRYLSEEMSLIDDFLEQNKIRLSELNTSLIEVDTSLKRLEKEFENIKLKLRKDNLDVNTFNMIKNDIDKEEKGLKEKKEVMIEEINKINASKQDDKEIKELCLQFSNWELIPLEIKKQILRKCIDYVLVYKSKGKETEKTVFDYHIEWK

SEQ ID NO: 9993 - protein, 530 aa, Unknown
  Description of Unknown: Integrase B9994 sequence
  cd00338,IPR011109,IPR038109,PF07508,Coil, PS51736,IPR036162,PTHR30461,IPR006119,G3DSA:3.40.50.1390, PS51737,PF00239,SM00857,G3DSA:1.10.10.2600,SSF53041
MEQYLIYLRKSRSDLEAEAHGEGETLSRHEHTLLELAKRQHLNVTDIYREVVSGDTIAARPMMQRVLSEVEQGVWSGVLVMEVERLARGDTIDQGIIAQTFKFSGTKIITPIKTYDPENEFDEEYFEFGLFMSRREYKIINRRLQRGRLASAKEGKWPSGLAPFGYRRVKLKNEKGCSLEPIEEQAAIVRMIFDLYTVGLQDEDGSARPLSLGSIATRLNDMHIPSPSGSQWARITIRGIIKNPTYIGMVRWGSRETKKKVVDGKVVSVRGSADPEKECVFKGIHPPLVPKKTFELANDKLARSENTSTHKEKVVRNPLAGLLVCSECGRQMMRMINPVHPDMPVVRCPRRGCPNCSSYLPIVEERVIQGLSEWMKGYELEWSSAAASSSVSSVGVREKALASAEAELRKLQQQLERTHDFLEQGIYDTDTFLSRSRMLSDKIAAAKDSVTRCSRELTEEKLRETSRRDIIPKVKNLLDVYPLLETAEEKNALLKEVLEKVVYQKLNEKRKKSPDGFTIEIYPRIPKSEK

SEQ ID NO: 9994 - protein, 530 aa, Unknown
  Description of Unknown: Integrase B9995 sequence
  cd00338,IPR011109,IPR038109,PF07508, Coil,PS51736,IPR036162,IPR006119, PTHR30461,G3DSA:3.40.50.1390,PS51737,PF00239, SM00857,G3DSA:1.10.10.2600,SSF53041
MEQYLIYLRKSRSDLEAEAHGEGETLSRHEHTLLELAKRQHLNVTDIYREVVSGDTIAARPMMQRVLSEVEQGVWSGVLVMEVERLARGDTIDQGIIAQTFKFSGTKIITPIKTYDPDNEFDEEYFEFGLFMSRREYKIINRRLQRGRLASAKEGKWPSGLAPFGYRRVKLKNEKGCSLEPIEEQAAIVRMIFDLYTVGLQDEDGSARPLSLGSIATRLNDMHIPSPSGSQWARITIRGIIKNPTYIGMVRWGSRETKKKVVDGKVVSVRGPADPEKECVFKGIHPPLIPKETFELANDKLTRSENTSTHKEKAVRNPLAGLLVCSECGRKMMRMINPVHPDMPVVRCPRRGCPNCSSYLPIVEERVIQGLSEWMKGYELEWSSAAASSSVSSVGVREKALASAEAELRKLQQQLERTHDFLEQGIYDTDTFLSRSRMLSDKIAAAKDSVARCSRELTEEKLRETSRRDIIPKVKNLLDVYPLLETAEEKNALLKEVLEKVVYQKLNEKRKKSPDGFTIEIYPRIPKSEK

SEQ ID NO: 9995 - protein, 530 aa, Unknown
  Description of Unknown: Integrase B9996 sequence
  cd00338,PF13408,IPR036162,G3DSA:3.40.50.1390,IPR006119, PTHR30461,IPR025827,PF00239,SM00857,SSF53041
MNLSPFSRGDKVVAYCRYSGGEEQGHKDTSTDEQEAAIRRFCDETGLSLIKVYADPFVSGRSTKGRDHYLEMMSDLLHKKIKGIAGIIAWDFERLHRNVDQATMDAARLRMVGYKIFSLQQPVVDSGPFARVMEAMYMASAQNQSDMISADVRRALQSNFTRFRVIPRTNIPDGWIAVPVDMGTYSDGKPRVGYRAEPDPDLADRIRAGILKRMEGATMDEVKAEIGGIFATKPRETIRHLMMKTLLFGQLTYGGTTMDDYCTPIIDKETFDRLQIYNEQAPREHHKPLGHFSPNRPLLSGLLYCGECGKKAFLDRRKAKGHVYETYYCNDYHVGFRRELLDDLVITKAIELLSDAQFSKDVAALIAQAGNLEALPDPKETAAELARIDRKIARLTEAIEDSDEPPASLVKRLSELEHQRAELTASVPADTDGSRDRILAEADRLRRTILDVLTNKKSTTDSLRDALSLFVQSVTIYHDNRVRITYTLPGLAKLQVTPEEKSKRPWSAFAVTCNFEIWVTVDRRGGQPSL

SEQ ID NO: 9996 - protein, 530 aa, Unknown
  Description of Unknown: Integrase B9997 sequence
  cd00338,IPR011109,IPR038109,PF07508, Coil,PS51736,IPR036162,IPR006119, PTHR30461,G3DSA:3.40.50.1390,PTHR30461:SF3,PS51737, PF00239,SM00857,G3DSA:1.10.10.2600,SSF53041
MYYNELRHYLPEEILVYLRKSRSDDPMLSVEEVLQRHQQILEEWIERNLDGPIPEENYFREVVSGEQLETRPEMMKLLKLIESPKIKAVLVVEPQRLSRGDLEDCGKLIKLLRYTDTHVITPMKIYDITNEYDRDGFERELKRGNEYLEYTKKILKRGKVQSCKDGNFIGSVPPYGYNKTIVYDGRKKCPTLTINEQEAEVVRMIFDMYGNQDLGRATIAAELNRMGIKPRSNELWSRTSILSMLRNEVYLGKVKYGYNKTIHVVEDFTVRQTRKITGDYVLADGKHEPLISEELFNRCQKNNGKQAKVKSNKILSNPLASLIFCEECGYALTYRTYNDGITQARYQCRRKEVHRAGSIIASRVWSAVADTLEAQIPNFEVELRENTGEDKKRKEQAIALLQNRLADIERKEISLWEKYTEEAMPRDIFDKLKDKITREKEEVTLSLQNEKQIDSRGIDYKEKIVSFHQAVDALRDSEVSAAEKNKLLKKCVKRITFKIPHSERVSMQVEGANSRGWTQPTPEINIELKF

SEQ ID NO: 9997 - protein, 530 aa, Unknown
  Description of Unknown: Integrase B9998 sequence
  cd00338,PF13408,IPR011109,IPR038109,PF07508, Coil,PS51736,G3DSA:3.40.50.1390,PTHR30461,IPR006119, IPR036162,PTHR30461:SF3,IPR025827,PS51737,PF00239, SM00857,G3DSA:1.10.10.2600,SSF53041
MYEDIKKVCLYARFSSHNQTEQSVEGQVRVCTEFCQKHGFHIVETYVDRATSAAHDIEKRTSFLKMISDSAKDKFQAVVVYKLDRFARSRYDAATYKYRLKKNGVVLISATENITNTPEGIILESVLEGMAEFYSAELSQKITRGLRESALKQNSAGGQIPLGFKVENKKYVIDEETAPIVREAFQRYADGEAVADICRDFNLRGYKSSKGAEFGKCSFTRMFKNEKYIGTYVYGKYKFENAIPAIIDMKTWRIVQARMNKQKKTHSRGKQKYRYLLTGKLFCGHCGYQMTGNSSASLDYGYYQCYGKSSYKSNCSKRNIKKNIIEEIVVKDALSLLTDERIKEIAKVACNTNKAYIQEETNIYVIKEKLREVEISLSNITKAIESGEAPVTLVKRMNELEAEKRTLLKEQKKESADVVQLDEEQVIYWLSQFKGGDIKDEEFCRNIIDLFVNSVTVWDEPDGTQKVVIAYNLQSENKKTYRLNSDGKSATDMNGNTSPCATGEYASITIPLSWQYLIRSSGVLEMWQST

SEQ ID NO: 9998 - protein, 530 aa, Unknown
  Description of Unknown: Integrase B9999 sequence
  cd00338,IPR011109,IPR038109,PF07508,Coil, PS51736,IPR036162,PTHR30461,IPR006119,G3DSA:3.40.50.1390, PTHR30461:SF3,PS51737,cd06455,PF00239,SM00857, G3DSA:1.10.10.2600,SSF53041
MKLRCYVRISTEGQQDNYSIPQQRADAEAFAKQQHCTDFLIYEDVRSGADITRIGWNKLLADIENGECDCVWVGRPDRFSRNTQDGLMAIDVLRKHNVRYFIGGIEYDIFNEYTKLLITMQFAFSELERNLIKQRTMMGKIRAANSGNRINNNTLGYENVGKKSVKIIDDEAEMVRKIFTWYAVDNLSYKQIAYRLNTEGYKCKKYGQTFHYKDGSEKKVGLTWTDARMPDIIKRPEYVGLTWNWNKTELIKSNIYPPIIDKELWDKANNKFKQRTKETTYKGYRITYHTVSGLVRCKKCGAGYFFRDGKYQYYVHKVSSQKNTDCTQLPTCLTASTLEDAFAVLFINTFTNTDELKKLYDLSSKAIEKDRQELEAIEKRIGERIDDINTKLKRFTVAIESGMDIDDIKQRYNELKDERSELEKNLDKAKKEYQLKTTQYDEIARQFTVDSLGEFIQSDGKNRRLIYFKTIRSAEIDDKVLTIEFITGRIIKLDVTSYPAWLMAQIKNYQAGLYSVEWINEKRLALSLHT

SEQ ID NO: 9999 - protein, 530 aa, Unknown
  Description of Unknown: Integrase B10000 sequence
  cd00338,PF13408,IPR011109,IPR038109,PF07508, Coil,PS51736,G3DSA:3.40.50.1390,IPR006119,PTHR30461, IPR036162,PTHR30461:SF3,IPR025827,PS51737,PF00239, SM00857,G3DSA:1.10.10.2600,SSF53041
MKKTTSPRGTVAVIYARYSSHQQRDVSIEQQVSACRQYAQQHGYTVLRVYDDHAMTGTNDNRPAFQQMIRDSASHAFDYVIVYTLDRFSRDRYDSAVHKHTLKENGVRVLSAMEHITDDPTGALMESVLEGFAEYYSKELAQKVRRGLNDNARRGILNVAPGFGYRRGADGKYEIIPAEADVVREVFSRVANGEQYASISRDLNQRGIRTKNGGEWGRSSYTYILQNENYIGVYNYADIRVEGAIPPIVDRETFDRVQEMRRIAKHGPQKRRRENGTYLLTGKLYCGECGAPMVGISGTSKTGDLHFYYVCKCKREEKRCHKRNVRRDDAEELVAQSLARMISDPQVVNWIADSVIKYQAERNVNPEVPILTERFADVQRKKQNVMNAILAGVLTPTVKDTLQQLEAEEADVAKKLDAARRSTELTFTREDVIAFLQLTADGDIRDKAYQERLIDTLLVRAYMYDDRLKLVCNFTDMPAYEVPINIEDDEGDEGEEVRIDSCSVHLCHIIRTIQIRMIAGFFVAVARLAE

SEQ ID NO: 10000 - protein, 485 aa, Unknown
  Description of Unknown: Integrase B10001 sequence
  cd00338,PF13408,IPR011109,IPR038109,PF07508, Coil,PS51736,G3DSA:3.40.50.1390,PTHR30461,IPR006119, IPR036162,PS51737,IPR025827,PF00239,SM00857, G3DSA:1.10.10.2600,SSF53041
MRKRAVAYARVSSNSASQEHSFEFQKEYWDRKLSNDPNYEYVGLYADRGISGKFANRRPQFQLMLSAIKSGNVDIVFTKSVQRFARNTEELLTIVRELRELGVGVFFEKENINTLTNDNDLFLTIAVAVAEDDLSRYSQNVVWSIQDKFKKGHPVVNGRIYGYSMGKGKGDSFRIIESEALIVNRIFELYLYGNSVTTISDILNQEKIPSPLGKTWHQSCIDRILRNEKYVGDCLLQKYYREKWNSKVTNKGVRDKYLVENHHEPIVSRELFDKVQEMIKQRSNHKLIGRIIKPFPFTGLIICGDCGKHYRHKVSKSFYSKDFDVWMCNSKKDVCHSVRVKDDELKQRFVEAYNEFILMKYQGNEEKLIQDEIDALISQKNELDRLKSNGWISLTQYQSEIDKIIKPLSIKKGELSALKLRKLSEKDFRVIESFDESKVEKFLSKIVISGININFHFYNGVVVTRTIQNTRIYDKDKKLLGIKEE

SEQ ID NO: 10001 - protein, 530 aa, Unknown
  Description of Unknown: Integrase B10002 sequence
  cd00338,PF13408,IPR011109,IPR038109,PF07508, Coil,PS51736,G3DSA:3.40.50.1390,IPR006119,IPR036162, PTHR30461,PTHR30461:SF3,IPR025827,PS51737,PF00239, SM00857,G3DSA:1.10.10.2600,SSF53041
MKKKIDDCSGKNAVIYARYSSHAQRDVSIEQQVQKCQEYAQRQGLTVVETYSDAAVSGKTDNRPAFQRMMKDSKKHRWQYVIAWKSNRMGRNMMEAMINNAELMKEGISCLYVEEDFDDTAAGRFALRNMMNVNQFYSENMAEDIRRGLMDNAEKALVNTRPPFGYAVGPDRRYVIREDQAEIVREIFNRILEGWSFISIANDLNQRGIKTALGREWNKSSFHAMIKNEMYLGVYKYSSVRIEGGVPAIIDRGTFEEVQRKVQTKRNAPGQPRNSTGDYMLTGKLFCGHCREPMVGVSGTGKHGELHYYYACQGRRRKKNGCEKKNVVRDKIEQQVINAIRDYVLNDDVIDSIAEAYGRFYESARKDSVLQAMRERLKENQKATANLMKAIEMGIITETTKARLLELEAEKKDLESSINSQEKVLLRLTPDHVRFFLERYKTMDFEDREVQRQLIRTFVQEIYLYDDHMKILFNFDSSGEHRIDFDEIECENSSPASGSYSDASRPLYIVYTNPAIVSIFAHGFVLTVPV

SEQ ID NO: 10002 - protein, 498 aa, Unknown
  Description of Unknown: Integrase B10003 sequence
  cd00338,PF13408,IPR011109,IPR038109,PF07508, PS51736,IPR036162,IPR006119,PTHR30461,G3DSA:3.40.50.1390, mobidb-lite,PTHR30461:SF3,IPR025827,PS51737,PF00239, SM00857,G3DSA:1.10.10.2600,SSF53041
MAKQRAVAYIRVSTKSDAQSHSFEYQLEYWRNTITQNTECEYMGVYADKGISGRALAKRPQLLKLLTDARQHKFDVVYTKSVSRFGRNTEELLETVRELRELGVKVVFEKEQIDSFNPAAETYLTIAASIAENDLQIYSDNMRWSIRNRFKNGWFSVGHGIFGYRTNKDTDELEIEPSEAETVRRMFDLYLEGYGTIAIGLILEKENRPNSFGKVKWNRGAILYMLTNEKYKGCALSQKYVQSQGVCRLNKNEAPKYYIENTHPPIISPEQFDKVQAELEKRGKSHKGKGKPIYAFTTKIVCGQCGHGYVHKINSSGKPWANPIWICSHQNFFGTKNCNNRRIKDSVLKEKFVECFNEFIANKTESDEAIELRQRLASLIESENELNLLRINRMIDGAAFAVESASLRKEITAVTMQIAAKEMRGIDKADFTQITEYDDDKVEKFVERVTINNNVVTFTFINGAEISREYTNGPSGNQKGWRDKQRERLEKENKTEVQ

SEQ ID NO: 10003 - protein, 530 aa, Unknown
  Description of Unknown: Integrase B10004 sequence
  cd00338,IPR011109,IPR038109,PF07508,Coil, G3DSA:3.40.50.1390,PTHR30461,IPR006119,IPR036162,mobidb-lite, PTHR30461:SF3,PS51737,PF00239,SM00857,G3DSA:1.10.10.2600, SSF53041
LYYQPKIDFKPEEVIDYLRKSRSDDPLLTVEEVLSKHEAMLDEWAEKNLGGVVPEENKYREVVSGETIAERPEINRVLRLIESPRYKAVAVVEPQRLTRGDLEDIGRLMKLLKHTNTLVATPQRIYDLRDEYDWDAFERELKRGNDYLEYTKKILSRGRLLSVSQGNYVGNTPPYGYDKTFVTEGKRKCPILVPNEAEADVVRMMFDLYVNKDMGCWNICKKFDEMGIKPPKGDHWSANAMTKMLQNIHYIGKVKWNHRKTLTVVEEGEFKKTRPVAKVGEYMIYDGKHEAIIDEALFNAAQAKKGRNTRQKPTTKIRNPLAGLLYCKCGRAMSLRTYKAHNTEPRLLCDGQIYCKTGSCTYAEMEERVISILTDCIKDFEIRLKNDKGDSAKLHARLIKNLEAKQKELDEKELAQWEAQADPDPAKRMPPHIFQQLNEKLLKEKEEVRQALCKAYESMPEPVDYEEKIEQFATALNALKDPKIDAATKNRLLKDCFERIEYHRDAPQRIKSQQVRYYDKEQKEPAISHR

SEQ ID NO: 10004 - protein, 530 aa, Unknown
  Description of Unknown: Integrase B10005 sequence
  cd00338,PF13408,IPR011109,PF07508,Coil, PS51736,IPR036162,IPR006119,G3DSA:3.40.50.1390,PTHR30461, PS51737,IPR025827,PF00239,SM00857,SSF53041
LKTCIYARKSTHKLGQKETIENQIKICRSKGKELGLEIVDIKQDVGTGRDDLNRPEIKELISDALEGKYQCVIMKGISRLFRDTEKGLGLIKLLDRNNIRVITVEEMFDSGNPESRTGTGKLDLSKITMYLMFSEMESKKLGDRVKYTQIEKAKNGEWNQPNNTPFGYSYNPETKKLIVNPEEAKIVKLIFDLYRNGLGIRSIMNYLNGENQEKIKYPTPNKGKLWNQYTINFILKNEAYTGDVIYNKRTKKERTYKNPELYGKDKSDIWIGADYNPEEEWIIARNAHEPIISRDMFADVQRIMNNKATRKGIRSNVGLLAGIAKCGLCGASMTFKRGNRDKNGRIKTRNNYYCMNYIKYGNKVCTSHHVKAEDLENTIIDEIEALAKDEKMLNDLIIEICQIRKNDKEIQRLKNEQNYYENEIEKTLNKMNKLLERNIEGIISDVQFKEMNKRFSEELQKYQEQLLEIKEKIPKLKEEEFRIDEFKKLISRCINLKEKTKEEIRHLLLGLINKVIINEKGEIEKLTYKF

SEQ ID NO: 10005 - protein, 529 aa, Unknown
  Description of Unknown: Integrase B10006 sequence
  cd00338,PF13408,IPR011109,IPR038109, PF07508,Coil,PS51736,IPR036162, IPR006119,G3DSA:3.40.50.1390,PTHR30461,PTHR30461:SF3, IPR025827,PS51737,PF00239,SM00857,G3DSA:1.10.10.2600,SSF53041
MIKAVIYARYSSHNQREESIEGQIRECQEFAARNGFIIIGEYIDRAISGKTDNREDFQRMIRDSEKGHFQAVLMYTLDRFARNRYDSAMYKSKLKKNGVKIYYAKQSIPDTPEGIILESVLEGYAEYYSENLSRNIKRGMMENALQCKSNGSGLALGYNVGADQRYEIDPVGAKIVQEIYQLYADGKSATQIIEYCNERGYRTRRGQPFNKNSLRTLLHNEKYIGIYRFGDVVVEGGIPAIIDKALYDKVQSMLHHNRSARAKKKAKEDYLLSTKAFCGHCGSLMVGESGTSRHGTLYHYYKCANRKRGHSCTKKTEKKDWLERVVVQHTVEKVLTTENIEKIATKAMELIEKETADNRLVLAYESELKEVKKRLANILDLMEQGIATDSTKERLLELESRKKELLALISREKAKKPILTKERIIYWLSSFKNGDIDDVDYQRRVIDTLLNSVYIYDTNGGKGREIVFTFNLSGQNTSRLTVSDIACSAPPIETATHRVAVSIGGSRWNRKGGTSAHTGAKTCWGEHVF

SEQ ID NO: 10006 - protein, 529 aa, Unknown
  Description of Unknown: Integrase B10007 sequence
  cd00338,PF13408,IPR011109,IPR038109,PF07508, Coil,PS51736,IPR036162,IPR006119,G3DSA:3.40.50.1390, PTHR30461,PTHR30461:SF3,PS51737,IPR025827,PF00239, SM00857,G3DSA:1.10.10.2600,SSF53041
MPESLNAVIYARYSSHSQTEQSIEGQLHDCYAYADRCGYRVVGEYIDRALTGKNDDRPDFQRMIKDAEKRQFQLILVWKLDRFTRNRYDSAIYKQRLKKFGVRVVSCMEAITDSPEGIILEGLLESMAEYYSANLSENIRRGQQASIAKGWFCGGPVPYGYIVHDHKLVPDERTAPVVREIYQRYADGEGLSVIAEDLNARGIYSKKGSPFSVNSFSALVPNPVYIGEYTYGGHVVPGCATPILDPSVYARAVARRERNKRAPASARSVTYILQGKAFCGLCGMPLCGDFGTGKNGDRYHYYVCSGRKRRLSKCPKHPEKQDYLEWYVCEQTQQYILASDRLPAISSAVADLYNSEIDDSRLHELERKIRSLESEMNLLVGRLGTVADKFVSRITDRMEQLDADLKETETELSKLRIQQKIRITEKEVAAWLRTFSRGDLFDNDFRLKLIDTFINSVYLWDEKIVIFYNVSGGKQTSVIDPLPLDEIKKDGLPVSDLPVHGGALHDNSEHHPPYFVLVRGMIGLVIFRK

SEQ ID NO: 10007 - protein, 527 aa, Unknown
  Description of Unknown: Integrase B10008 sequence
  cd00338,PF13408,IPR011109,IPR038109,PF07508, Coil,PS51736,IPR036162,IPR006119,PTHR30461, G3DSA:3.40.50.1390,PTHR30461:SF3,IPR025827,PS51737,PF00239, SM00857,G3DSA:1.10.10.2600,SSF53041
MTKAVAYARYSSDNQTDNSIAAQLRAIRDYAAKNGIFITREYIDEAKSATTDDRPDFLQMFTDIAKGLETDYLLIHKLDRFARNRYDSAMYRRKLTQNGIKLIAVDQPLGDSPEDKLLEGLLESMNEFYSLNLAREVMKGMKENALAGKHTGGKPPLGYDVDPSTKKLVINEHESKAVKMIFEMYIAGKTYSAIINRINSLFYKTKENRPFSNTSLHSILTNEKYTGTYIFNRSAPAINGKRNNHSSKSDDLIIRIPDSLPVIITKEDFAMVKKIMERRKKQTGANQAKETYLLTGLIKCGKCGAPMIGNRKSAGRNKTIYHSYDCNNRKRFKTCDAKSVNKEYVEKMVIDNLMSKVFSDRGIVTLTNQLNKIREEKFKQQADEFNTLKKELEEIENQIKNAVKAIMAGLDLVALRDELSEAEKKKVILTQTLKSIVKSELAPITKDFVKSKVSKDKKTISEGTLEEIKNVVQSYVTEVLVNPDNIDTTLVCDFDGGGGAHTFKSKLDYRILRNQSRPSEYKKTLVI

SEQ ID NO: 10008 - protein, 529 aa, Unknown
  Description of Unknown: Integrase B10009 sequence
  cd00338,IPR011109,IPR038109,PF07508,Coil, PS51736,G3DSA:3.40.50.1390,IPR006119,IPR036162,PTHR30461, PS51737,PF00239,SM00857,G3DSA:1.10.10.2600,SSF53041
MKRAIGYARISDEDQSTWSLPGQLELITEYCSQNNIELVATFTDDGESAKNFDRADWKRLEEFVKKNHGQVDQLLVMAWTRFSRNTKEALTMIEQLENRYHIRVVSIREPLHMHPQSPFFHHIRTQMIQYGELELNFIKDRTKFGIHQAQKSGRYLNRAPRGYLNARNEKDEPIIIIDQTRAPLIRHIYDRFLIGDTIDSIRKQVKERGMNVKGNSMVQNILRNPVYMGCIKQIAYYDAPEAIVKGIHEPIIDENTWWKVQALFENKKSIHRSILNEDFPLRGVLKCFCNRNVTAAFSKGRNNLVGYYKCNSHTAINLNAKKLHLQFDEILKEISLPAFHIDYLQKKILENLTAKLRNREKEMQEKQQQLSALQKKIDSMEEKYILGDLDKEAYMKWKGRYHSETSLLQASLADLRRPVDQIWRNYKSSTSDLANLQFIYNKGSVQHKQSFVRMVFNNQLYYQEGVYRTPWIMPVFASKSAFLAEQRLLVIEQPPAETTNLAICAPSGSIIEPLFQLLNLFSEIKSKTA

SEQ ID NO: 10009 - protein, 529 aa, Unknown
  Description of Unknown: Integrase B10010 sequence
  cd00338,PF13408,IPR011109,IPR038109, PF07508,Coil,PS51736,G3DSA:3.40.50.1390, IPR006119,IPR036162,PTHR30461,PTHR30461:SF3, IPR025827,PS51737,PF00239,SM00857,G3DSA:1.10.10.2600,SSF53041
MRERIPGAMINARYSTDNQNPDSIEVQVTKCKEWCHQNGVPILGIFADEATSGMKDSRPQYENMMMQLRQGIGDTVVIYDQSRMFRKMTAWFTFRDEMTSMGVKVISVTQPMIGKDLRDPTNFLTEGSMALFNQIWALQSRQKTLEKMRHMARNGQHTGGKPALGYHVKDGRLVICEEEAKIVRRIFEEYASGKSYREIIAGLNRDGIKTKRGNAFGNNSLHDLMRNEKYIGVLLYGKAPYREDGTRDTHSRDDPYVICVEDAIPPIVSKELFEKVQKQMAQNKRQQGGRPPVKREYPLKGKVFCGDCKSAMTITTSQQKYNYYRCTAKKRLHTCEAAPISAEYLENRVADALRMVLGKPEETNGLIQILRDQAEQLQAGAVNSLQDLIQQEKDVTTKLNNAVEAVLNGLYSETVKSRIAALEQQKATIAKEMRTLKAAVDASAIPERKLRDILDLIISSTDSDANILLSIVYRVEVGKDTITIWTILDSDPTGIIDDTSGGVTITLGVPSGVPRVFVTDRYIRITVAR

SEQ ID NO: 10010 - protein, 529 aa, Unknown
  Description of Unknown: Integrase B10011 sequence
  cd00338,PF13408,IPR011109,IPR038109,PF07508, Coil,PS51736,IPR036162,IPR006119,G3DSA:3.40.50.1390, PTHR30461,PTHR30461:SF3,PS51737,IPR025827,PF00239, SM00857,G3DSA:1.10.10.2600,SSF53041
MKKKIVTPCLPKIAVIYARYSSHNQTEQSIEGQLHDAYAFAEKNGYTVIKEYIDRALSGTSDSRPAFQQMIKESASRQFQVVIVWKQDRFARNRYDSAVYKRILSKNNVRVVSVMENITDSPEGVILEGLLEAMAEYYSANLSENIRRGKAETVRKGLFPGGSAPYGYMRQDRRIVPDPRTAPIVQEIFRRYADGDRPKDIIADLNDRGIRTFSGKVFQHGTIRSILENRIYIGEFYFNNQLVSDTMPAIVDPAVFDRVASRRAFNRKNPAAFRGDSVPSLLLGKVFCGDCGSKVFGGRFTGRSSTYHYYLCTGKNNHLTDCKAKCIKKDDLHYAVCKVVSDFILNKKRRTLESLAESIMEIYRSDIDTSELKALEKQSAKLENDLNKLVESLIEMPESARPRIARKMEDLELQLNELKPRIARKKAETSLCFSKDDFVKFLQITFDDLRNIETQKFIIDKFINSVYVYQDGRIVVYLNHITGLPFGPDDSKPGKDDWKSGRSLPLPPECSPSGFSAGAFLVNFTQNYR

SEQ ID NO: 10011 - protein, 529 aa, Unknown
  Description of Unknown: Integrase B10012 sequence
  cd00338,PF13408,IPR011109,IPR038109,PF07508, Coil,PS51736,IPR036162,IPR006119,PTHR30461, G3DSA:3.40.50.1390,PS51737,IPR025827,PF00239,SM00857, G3DSA:1.10.10.2600,SSF53041
MKFTSTWKISDPLAQYIIYLRKSRKDMEAEALGQTDTLKRHRAALLSLSESRELNVVEICEEVVTGDSIAVRPEVQKVLQLVETGNYAGVIVMEVERLARGDTIDQGIIAQTFKYSDTRIITPNKTYDPNNEMDEEYFEFGLFMSRREYNTIKRRLSRGKEASLREGKWISGKTPFGWLREKLPNDKGYKLVPHPEQAPVLQQIYNWYTGDGCARIGAKAISTRLNSLGVPTNSGSLWRADSVLDILRNPANAGWIKSGGRPETKRIVDGSVVVSRPRTRQEDLKLYKGLHNGLISQEQYDKAVALSYSSASPRGKGAWGTVTSLAGLVRCDQCGRVMVRRPSSGNRRDTLLCPSYGCTTVSAWYDDVEDAVLDALRGWLRELELGEAAAPDDTPMRTALESSISADRKQLAKLEAQEARAYELVETGVYTPEIFLQRSQALSADKQVIVDRIEASQTTITELARAKQARARLAPAVRRVLETYPLAASPQEKNALLKTVLQKVLYHKQTKSYTKSGSDMHVTLYPLAD

SEQ ID NO: 10012 - protein, 529 aa, Unknown
  Description of Unknown: Integrase B10013 sequence
  cd00338,PF13408,IPR011109,IPR038109,PF07508, Coil,PS51736,IPR036162,IPR006119,G3DSA:3.40.50.1390, PTHR30461,PTHR30461:SF3,PS51737,IPR025827,PF00239, SM00857,G3DSA:1.10.10.2600,SSF53041
MDRAVIYARYSSDNQRDASIDQQVKACEQYAREQRMEVIRIYADRALTGKTDKRPDFLRMIRDSARQDFQFVIVYSLDRFSRNKYDSAIYKQKLKENGVRVLSAMEHITDDPTGILMESILEGFAQYYSDELSQKIHRGLKDNAEKAIVNGSVPLGYRRGADGHAEIVPEEAETVREIFRRVSEGEMLIRIIEDLNRRGITTKRGGLWNKSSFNKLLANERYIGVYTYKETRIEGGFPSIVDKELFDSVQAHVQAKPNARGGTKRRKCKADTYLLTGKLYCGECDSPMSGISGKSQADEPYHYYICTKKRYEKACHKHNVRRDEIERQITQEMRNLLDDDELLEWMADQAMAHLESERDTAELEDVRAKLKEATRKRDKLLDALEDEDMVSLIKDRLKARQEEVKDLERRLRILEADNEITISRDMILSYLEMLRDGDVEDRAYQEMLIDTFLIRAYVFDDGRLKLIFNYQKEHREVTIALEDFSRKEGAEDCGEVRLSSSYLHQSGRRRTVAVYMVKGYFVCDISFAG

SEQ ID NO: 10013 - protein, 529 aa, Unknown
  Description of Unknown: Integrase B10014 sequence
  cd00338,PF13408,IPR011109,IPR038109,PF07508, Coil,PS51736,G3DSA:3.40.50.1390,IPR036162,IPR006119, PTHR30461,IPR025827,PS51737,PF00239,SM00857, G3DSA:1.10.10.2600,SSF53041
MKFTSTWKISDPLAQYIIYLRKSRKDMEAEALGQTDTLKRHRAALLSLSESRGLNVVEICEEVVTGDSIAVRPEVQKVLQLVETGSYAGVLVMEVERLARGDTIDQGIIAQTFKYSNTKIVTPNKVYDPNNEMDEEYFEFGLFMSRREYNTIKRRLSRGKEASLREGKWISGKTPFGWSREKLPNDKGYKLVPHPEQAPILQQIYSWYTGDGCARIGSSAIATRLNNLGVKTNSGNAWTASAVLDTLRNPANAGWIKSGGRPETKRIVDGSVVVSRPRTRQEDLNLYKGLHDGLISQEQYDKAVALSYSSGSPRGKGAWQTMTSLAGLVRCDQCGRVMVRRPSSGGRRDAFMCPSPDCPTVSAWYEDVEDAVLDALRGWLHELEVGEAERSDEHSLLDALAASISADQKQLAKLEVQEARAYEFVETGVYTPEIFLQRSQALAADKQVIISRIEENQRAQDEITRAKQARARLAPAVRHVLETYPLAATPQDKNDLLKTVLQKVLYHKQSKSYSKAGSDMRVTLYPLTD

SEQ ID NO: 10014 - protein, 529 aa, Unknown
  Description of Unknown: Integrase B10015 sequence
  cd00338,PF13408,IPR011109,IPR038109,PF07508, Coil,PS51736,G3DSA:3.40.50.1390,IPR006119,IPR036162, PTHR30461,PTHR30461:SF3,PS51737,IPR025827,PF00239, SM00857,G3DSA:1.10.10.2600,SSF53041
MEERVRTVTVMPATLRANLSEMIQKENVTYYARVSTDMNEQEESYEKQREYFENYIKLRPEWNYVEGYADQGISGTKAQQRPEFMRMIEDCRKGKINRILVKSISRFARNTVDTLHYIQELKELGVSVWFETQGIDTMTPNGEVLITILAALAEQESRTISTNVKWGYQKRFKDGKVTLNYKTFIGYDKVGKEYVVVEDEAKIVRKVFLDYLSGKTIRQIADELNKQEIKPRRGQKWNPSTILGMLANEKYTGNAILGKTYKLDVLSKTRVKNVGQGTQYHVQNSHPGIISQELFDMVQVEKERRTKLRSSVNTGKGKYSSKYPLSGLLVCGDCGSKFRRYGRSVASGEFVPTWVCIQHQKDISKCKMLPLKEVDILEAYKRVVTRFSGDLSDVLETVRESINEELKAENIADLTPVKERLTETRKQILELFKDKKCGAISAEEYNQKYDELSKMVRQLEEEEKNLEDSNTTDYMRKEQLKEINDILSDESVDLLDSQIMRTLLNCIKVIDKHTVEFQFNCNLNIIEKL

SEQ ID NO: 10015 - protein, 529 aa, Unknown
  Description of Unknown: Integrase B10016 sequence
  cd00338,PF13408,IPR011109,IPR038109,PF07508, Coil,PS51736,G3DSA:3.40.50.1390,IPR036162,IPR006119, PTHR30461,IPR025827,PS51737,PF00239,SM00857, G3DSA:1.10.10.2600,SSF53041
MKFTSTWKIADPLAQYIIYLRKSRKDMEAEALGQTDTLKRHRAALLSLSESRGLNVVEICEEVVTGDSIAVRPEVQKVLQLVETGNYAGVIVMEVERLARGDTIDQGIIAQTFKYSNTKIITPNKIYDPNNEMDEEYFEFGLFMSRREYNTIKRRLSRGKEASLREGKWISGKTPFGWLREKLPNDKGYKLVPHPEQAPVLQQIYNWYTGEGCARIGAKAISTRLNSLGVPTNSGSLWRADSVLDILRNPANAGWIKSGGRPETKRIVDGSVVVSRPRTRQEDLKLYKGLHDGLISQEQYDKAVALSYSSASPRGKGAWGTVTSLAGLVRCDQCGRVMVRRPSSGNRRDTLLCPSYGCTTVSAWYDDVEDAVLDALRGWLRELELGEAAAPDDTPMRTALESSIAADRKQLAKLEAQEARAYELVETGVYTPEVFLQRSQALAADKQVIVDRIEASQTTIHELARARQARARLAPAVRRVLETYPLAASPQEKNALLKTVLQKVLYHKQTKSYTKSGSDMHVTLYPLAD

SEQ ID NO: 10016 - protein, 529 aa, Unknown
  Description of Unknown: Integrase B10017 sequence
  cd00338,PF13408,IPR011109,IPR038109,PF07508, Coil,PS51736,G3DSA:3.40.50.1390,IPR036162,IPR006119, PTHR30461,IPR025827,PS51737,PF00239,SM00857, G3DSA:1.10.10.2600,SSF53041
MNFTSTWKIADPLAQYIIYLRKSRKDMEAEALGQTDTLKRHRAALLSLSESRALNVVEICEEVVTGDSIAVRPEVQKVLQLVETGNYAGVIVMEVERLARGDTIDQGIIAQTFKYSDTRIITPNKTYDPNNEMDEEYFEFGLFMSRREYNTIKRRLSRGKEASLREGKWISGKTPFGWSREKLPNDKGYKLVPHPEQAPILQQIYNWYTGEGCARIGAKAISTRLNSLGVPTNSGSLWRADSVLDILRNPANAGWIKSGGRPETKRIVDGAVVVSRPRTRQENLKLYKGLHDGLISQEQYDKAVALSYSSASPRGKGAWGTVTSLAGLVRCDQCGRVMVRRPSSGNRRDTLLCPSYGCTTVSAWYDDVEDAVLDALRGWLRELELGEAAAPDDTPMRTALESSIAADRKQLAKLEAQEARAYELVETGVYTPEIFLQRSQALAADKQVIVDRIEASQTTIAELARAKQARARLAPAVRRVLETYPLAASPQEKNALLKTVLQKVLYHKQTKSYTKSGSDMHVTLYPLAD

SEQ ID NO: 10017 - protein, 529 aa, Unknown
  Description of Unknown: Integrase B10018 sequence
  cd00338,PF13408,IPR011109,IPR038109,PF07508, Coil,PS51736,G3DSA:3.40.50.1390,IPR036162,PTHR30461, IPR006119,PTHR30461:SF3,PS51737,IPR025827,PF00239, SM00857,G3DSA:1.10.10.2600,SSF53041
MGKSNAVIYARYSSSGQREESIAGQLRECRAYADRSGLRVVGEYTDSALTGTTDKRPGFQRMIKDAEAGGFSVVIVWKLDRFARNRYDSAMYRHKLKKHGVRLVSAMENISDSPEGIILEGLMESLAEYYSANLSQNIRRGLYDSALERKKTARVFGYRRGPDGRYEIDPVYGPIVRRCFEEYAAGKSMPEIINGLNADGIRTEKGTKFKRNSLRAMLRNERYKGVYRYRDIVDPAGIPPIVPADLWEQVQKEIGKRAHNHTKGTTKTGVTYLLTGKLFCGHCLAPMAGDSGRSSTGTVYHWYSCPNNRYKPHTCDKKRIPKDWIESEVLRILNNEILTDDFIERAADAAVEYEKHYDNTSEIEGLRADLKRTEKKISNVADAIATGITTKTLPAMLADLERMREQLEDAIAEKTVGVKEFSREAVVAYLHELKALSLTESGSQRQLIQACIKSIYVFDTDKKDELRLVVNMNYFDDDAEINHSEIVRITSAPLHLNGTTRTFVHGHSLLLVRNIKKPGGLHTVRRMKK

SEQ ID NO: 10018 - protein, 529 aa, Unknown
  Description of Unknown: Integrase B10019 sequence
  cd00338,PF13408,IPR011109,IPR038109,PF07508, Coil,PS51736,IPR036162,IPR006119,PTHR30461, G3DSA:3.40.50.1390,PTHR30461:SF3,IPR025827,PS51737,PF00239, SM00857,G3DSA:1.10.10.2600,SSF53041
VNAVIYARYSAGPGQNEQSIEGQLRDCRDYAKKNDITIIDTYIDRHISGTDFENRTEFNRLIKDCERHQFSAVIVWKVDRFGRNREEIAMNKVKMKKHGVKLLYAKEHIPNGPEGIILESLLEGMAEYYSAELSQKVRRGLRESMLKGHALGGNLMLGYKIINKKYVVDPVTSPIVVEIFERYAAGETAKAIATDLNTRGVVNAKGDPFKNNTIYFILRNEKYIGIYRYGDIVVNDVIHPIINMELWGKVQMILEMNSRNRSRSRCTAPEEFLLTGKIFCEYCKRPIIGESGTSRNGASHYYYKCSSRKNKGVKCEKSTVRKTDLENFIISQTIDNVLQPDTIDYLAKKVVEIQNSDAQELQMQSLRKQLSDVQKGLNNLVNAVEMGIITETTKERMMALEERKEELKICIAKAEIKRPKLTEEMVEYWLNKFRDQDVDSTEFKIRLINTFVNSIYLHNDYAIIVYNFCDDESGHRAEIRAQLDDALRAKKEDQTCSSDPTQVPATVLQTNILLITLTIFAIKFRIPRK

SEQ ID NO: 10019 - protein, 529 aa, Unknown
  Description of Unknown: Integrase B10020 sequence
  PF13408,IPR011109,IPR038109,PF07508,Coil, PS51736,G3DSA:3.40.50.1390,PTHR30461,IPR006119,IPR036162, PTHR30461:SF3,PS51737,IPR025827,PF00239,SM00857, cd03768,G3DSA:1.10.10.2600,SSF53041
MKPIVIYSRVSTTNQNFESQIEDLKRWCKGNDFIVKMSFGEKVSGFNPDVERIEYDKMKDFVLSNNIKNIVIWEISRLSRSIDRTLTEVKFFTSKGVNIHFKKEGFNTISDNATDKILLALLSSMADFERDTIIGRLGRGRLSAILKGKMMHSVPPYGYIKDEQGMWSINKVEAKVIMTMFEMAAKGDTLYKICQHLNSLNIPTRQTIQGKKSTLYDGTEVEGKWNPTTIRRDLMKTIYKGIKTFQEHTISIPIIISPDLWDKVQKRFTDNIGHINKNKHPYLFKGMIRCGRCNRVLSTQTRVNDIGYYLCSKINDVTHKCENQGYINTHMIDDNLYSNLFNHQYIKEILSRDSLDALSLKEKSGQIEYFNSEINSLEGTTNRYKNLYATGYLVFEEMVKEVGKVTNQITDYKNRIEILNNDIQVISKTDIDDIILTYKNATDYNVKREFLTKYINNITLWNVDLANVNWRVPLQKNEKMIYIEMKAFNYNIPIKILLTPYSKNVIVTKTLEFLKDYNMVVDTSKKLSV

SEQ ID NO: 10020 - protein, 434 aa, Unknown
  Description of Unknown: Integrase B10021 sequence
  cd00338,PF13408,IPR011109,IPR038109,PF07508, PS51736,G3DSA:3.40.50.1390,PTHR30461,IPR036162,IPR006119, PTHR30461:SF3,IPR025827,PS51737,PF00239,SM00857, G3DSA:1.10.10.2600,SSF53041
MAKIRVITKQLGLQKLVNVAAYTRVSSDKDAMLHSLSNQVSYFSSYIQSNKNWIYCGVYSDEAQTGTKSKRSAFQRMIQDAKDGKIDIIITKSISRFARNTETLLKTIRELKEINVDVYFQEQNIHTLSNDGELLMSILASYAQEESRVSSENSLWRVKKNFNEGKIYGGKNCLGYKIVDGQFEVVPDEAELVKHIFNLCEQGYGDDKIAKTLNDMGVKSYFGNLWYRSSVRGVLTNYNYTGDLILQKTYRENHLTKTTKINYGEMDMFHVANNHEPIISKEQFQNVKRIRAERLPRNHRVAFTLHSFTGFLKCGVCGRSYKHKKNKYLEYWVCSTYEQLGKSYCDSKQIRDDVLKKATCQVLNLEEFDTQKLDQFIAQIEILNGNKLIFNMHNGEKREVNWDVPKRSDSWTDEMKEKARLDALKRKTVAGGSE

SEQ ID NO: 10021 - protein, 529 aa, Unknown
  Description of Unknown: Integrase B10022 sequence
  cd00338,IPR011109,IPR038109,PF07508,PS51736, IPR036162,IPR006119,PTHR30461,G3DSA:3.40.50.1390,PTHR30461:SF3, PS51737,PF00239,SM00857,G3DSA:1.10.10.2600,SSF53041
MPTVKPDGLYCAYLRKSRRDVELESLGQGETLARHEKQLAALADRLGIAISHTYREIVSGDTISERPQIQRLLSDVGAGRWDGVLVMDVDRLGRGDSIDQGIIMQSLMYAGVLVITPDKIYDPTSDADAEFFEIKLFFSRREYNMIKKRMQRGRLASAMDGCYMGSRPVYGYERVKLAGRKGWTLQVVPEKAEIVRAVFAWYADGIDGREAGAAVIADRLNGMGLRTDLGNRFEPSYIRHMLQNPAYIGKTRWNQRVTQYRIENGRRVSARPKNADALLVDGLHEGIVDPALFERVQRMFAAHEKRPKNKQLQDANPLAGLVVCSACGRHMQRKPSPNRAGDFLRCPTQRCPTCATYIPVLEDAILSELERWTLEFDSPADPPQISGADRAAMDAARAQLAEQRATLQGQLSRLYDLLEQGLYSPDLFRERQADLGERLAAVDADLAALDAAPRPDPRRLLLPQIKKVTSAYRAAATPGEKNALLRTVIDHVTYEKTQRCYRNESPAAHLTLHIFPRLPDETPENDDFV

SEQ ID NO: 10022 - protein, 529 aa, Unknown
  Description of Unknown: Integrase B10023 sequence
  cd00338,PF13408,IPR011109,IPR038109, PF07508,Coil,PS51736,IPR036162, IPR006119,G3DSA:3.40.50.1390,PTHR30461,PTHR30461:SF3, IPR025827,PS51737,PF00239,SM00857,G3DSA:1.10.10.2600,SSF53041
MTGKNEMAVVYARYSSTSQQEQSIEGQLAAARQYAESKGYTIIREYCDRAKTGTNDNREAFQRMLSDCAKKQFSVIIVWKVDRFGRNREEITFNKHRAKKNGVRVEYVAESLGDGPESIILESVLEGMAEYYSLQLSQNVKRGQLEGAKKHHAIGAHPPFGYRTAPDKTYEIDPKTAPIARMIFEKYAEGSTEADISRWLNDKGYRTVRGNMYSRTSLTKMLKNERYIGTYIYKDIIREENAIPAIIDRDLFERVQGMLDKNRRMPSNRWSYSDYILTDNLYCGNCGSPMAGVSGTSKSKKKHCYYACMNKFKHKGCSKKSIRQDLIEPLVLDQINLLLHDQELFDFIVSKTWEYYQRQDQTQAEIHSLETQLADVEKGLSNLVRTIEAGIFNDIVQNRMAELEAQRSAIKKSIAEIRISEGIKLTEDRIRFFLQRFRDADTTDRKCQRRLIETFVNSIHLYDDKMTIAFNFSGQNNTVTVEDIKKATASEVFERDCQSVRKRSAYEHLTIRWIPECCAFAIDFSLRVS

SEQ ID NO: 10023 - protein, 529 aa, Unknown
  Description of Unknown: Integrase B10024 sequence
  cd00338,IPR011109,IPR038109,PF07508,Coil, PS51736,G3DSA:3.40.50.1390,IPR006119,IPR036162,PTHR30461, PS51737,PF00239,SM00857,G3DSA:1.10.10.2600,SSF53041
MNLEVFEQFAKKEKGRIIGKSDTAVIYTRVSSKEQFDNNASLTTQLKYCQEYAIRKKLEVIEYFGGTYESAKSDERKEFQKMLSYVKRRKNIGYIIVYSYDRFSRTGANGAYISGQLKKQGVAVMSATQEIDVTTSAGTFQENLFHMFSHFDNQIRRDKSITGMQEKLRRGYWTGAYPFGYTNANPGKGKVPNFVITKEGRLLKQAFLWKANANMSHVEIAKRLEEKGLNINAKRLTDLFRNPFYCGLMVNSLIPGEVIQGKHEALISKEIFLRIHNLLHAGDPPKKYSFDDENLPLKQFIKSSICGTPYTGYIVKKKGLYYYKNRRKGSKENRSAKKLHEEFLNVLGRFTIADKKYIEPLTDIIHDTLIAKNQEALEDQRRLAKELGQLEERINTLERRFVVLNEITKSQYDLFMPELKAKQRELEVKMENGGINSSNLKKAVKLALNFACNLPTLWKLGDLETKKSVQYMVFPDGIEYDFKKKLVRTFRVNEIFGAISSLSGNCKEIEKGTFHQICGKSPLVTAKES

SEQ ID NO: 10024 - protein, 529 aa, Unknown
  Description of Unknown: Integrase B10025 sequence
  cd00338,IPR011109,IPR038109,PF07508, Coil,PS51736,IPR036162,IPR006119, G3DSA:3.40.50.1390,PTHR30461,PS51737,PF00239, SM00857,G3DSA:1.10.10.2600,SSF53041
MNELARDIALSRDKGLVPAFSYERVSTDEQAEHGMSLDNQVQYARQYAEKNNLQIIKFFTVAESAYKEGRQRFNEMIASALEYGISDIIFKNSDRLGRNDIDWPRLKKLAKEKKIKLHFYEFSIVFDHGATAESEMFLDQASALARYWSNKISYSVRKSYDFKISQGIAPQACRTIGYIYDRANKRFLIDEKTKGIVEYIFNEWDSGTHSLRDFCVMLNARGYRTLRGSHWKKSSIHRMLTNPFYAGKFIYHGQIYDGIHESYISWEKFQIRLQKLGVKNVSKKGRPFLFKGLLKLSGSGRVLSGAYKQGAHNSGEYIYYTSYEPYFSIREDQVFEMLDQAIKEISFNDNFEQNLIDLFTERAKNKSDKRDGEIKFIRRRIGKLESENKRLLELAIAGIDPKTIQDKMQENRGMINVLEKQTHGINMDWHNFSMDIASKIESCREFPEIYLQVDREDKADLIKTIASKLIVHQDKIEIVFLKPFEFIFNPEILKHKSGFQNRHVMGPQRDNLRTAVDHQIERWVQWLAA

SEQ ID NO: 10025 - protein, 529 aa, Unknown
  Description of Unknown: Integrase B10026 sequence
  cd00338,PF13408,IPR011109,IPR038109,PF07508, Coil,PS51736,G3DSA:3.40.50.1390,IPR036162,IPR006119, PTHR30461,PTHR30461:SF3,PS51737,IPR025827,PF00239, SM00857,G3DSA:1.10.10.2600,SSF53041
MTQAAIIYARFSTSEQSKGHSLERQAQYGLEYAQQQGWAVEATIKDEGKSAFKGGNRAEGSALATFETEASQGVHHGKVLIVENIDRLSRQGAKTTAQLIWALNKAGVDVATWQDNQIYRADGNGDMLELFSIIIKAQLAYDESKKKSDRTAANWKKRHEMIASGDYSLAKSRPPLWLNVVDNEFEVIPDKAALINRMFDMFIDGFGYQRIAKQFNDEGIEAFKTTKSNTNGWYGLTIDRFLRNRAVIGEYVTSEGETLATDFYPLIVPVDKFNRAQAIMSSRVRRSTGGSLETRSRNLFGGIATCHKCNGHMGYEGKYSEKKHRRKDGGISIYKQQPQQYLRCDNARRKHLCDNTFSYRYGEMEKTILDHILHFTLDDDEQPNEHLNKIKEAHAELGRQIAVDEQKRDNLLDAISNGGGAAFITKVNELEEGIKAAQERLGQLKQDIAQEEAKPRKTDDQEALRLMIGKLNSEDMDERIYARTKTNTLLRQIVDGLILMENGEFALWIDSEVTYHWDKDGNMLSGQML

SEQ ID NO: 10026 - protein, 529 aa, Unknown
  Description of Unknown: Integrase B10027 sequence
  PS00397,IPR038109,IPR006119,PS51737,PF00239,G3DSA:3.40.50.1390 ,PTHR30461,IPR025827,SM00857,G3DSA:1.10.10.2600, SSF53041,IPR011109,PF07508,PS51736,IPR006118, cd00338,PF13408,Coil,IPR036162,PTHR30461:SF3
MNKKVKAGIYIRVSTEEQKQGHSLEAQESMLKEFADRKGYEIYDVYNDGGYSGKNFNRPEIQRLLRDLKDDKIDVILVWKVDRLSRNNTDVMSLIDTELTPRKKNLIITSIDMDSSSPTGHMFISLLSTFARYERATIIDRVKAGMQKRAEKGYWNGGLILGYDSVDKKLIINENESEIVREIFQLRAEGKGYKFIVNILNDKGIKTKTGKNFSIPAIKVIVNNYIYNGKMVWKKHQDWNTRRRTGKSEPIIVEGIHDAIIDEGLWTRVQKVNELQKNSFSSNRNFNGNFLLTGILKCPKCGAGTVMSKTKKRNSDDYHLYYMCQAYHNKGSSVCSANLIRKDQVEQQVLNIISLLVNENDIINALIDELNSDNNKTNESHIAHIKMLKKQLGKAYDKRKKLDNDYFEGNIEGSTYNRLMNELQLDINKLKRNVRESESEIIKNDSTINKEEVIYALGNFNKLFKIVNDEEKKLLIRSLIREVQMEANRKDVKEITFWFLPSSVLPSNKVRRTVSQVIVKRKWEIEICY

SEQ ID NO: 10027 - protein, 528 aa, Unknown; identical to SEQ ID NO: 9559
  Description of Unknown: Integrase B10028 sequence
  cd00338,PF13408,IPR011109,IPR038109,PF07508, Coil,PS51736,G3DSA:3.40.50.1390,IPR006119,PTHR30461, IPR036162,PTHR30461:SF3,PS51737,IPR025827,PF00239, SM00857,G3DSA:1.10.10.2600,SSF53041

SEQ ID NO: 10028 - protein, 528 aa, Unknown
  Description of Unknown: Integrase B10029 sequence
  cd00338,Coil,G3DSA:3.40.50.1390,PTHR30461,IPR036162, IPR006119,PF00239,SM00857,SSF53041
MIPNICPFNKGDKVVGYARYSGGDEQGLKNTSTDEQDAAIRRFCEQNDLVLVKVYSDPFVSGRSTKGREHYLEMMSDLLHGKKKRTDIAGLIAWDFERLHRNMNQAQLDAARLRMAGYKIYSLQQPVMDNGPFARVMEAMYFASAQNQSDMISADVRRALQNNFQKYKVIPRSNIPDGWIAVPVDMGFYSNGKKRTGYKAEPDPNLAPKIREAIDQRLHGATLDEMRIIIGGPFANKQRVYIQRLMHKPLLYGQLTYGETTMTDYCEPIIDKETFDNLQIYNKYAPKEHEKPLGHFSKNRPLLSNLLYCGVCGKKAFLDRRTAKGRLYETYYCNDKHVGFRKEILDKLVIEKGIELLSDAQYQKDILSIVDALKSPFPDEVNKYKVEEEIAKIDRKIARISSAIEDSDETPVTLVKRLSELEKQRAEFAQSLQIVDDSESHGKIIEECDRIRTSILQVLENEKSSTDELRNALSLFVHSVVIYPEAKVLIRHTLPGFATVASTTSGEVTAPPREVFRYSQLFESWCTA

SEQ ID NO: 10029 - protein, 428 aa, Unknown; identical to SEQ ID NO: 9583
  Description of Unknown: Integrase B10030 sequence
  cd00338,PF13408,IPR011109,IPR038109,PF07508,PS51736,G3DSA: 3.40.50.1390,IPR006119,PTHR30461,IPR036162,PTHR30461:SF3, IPR025827,PS51737,PF00239,SM00857,G3DSA:1.10.10.2600,SSF53041

SEQ ID NO: 10030 - protein, 528 aa, Unknown
  Description of Unknown: Integrase B10031 sequence
  cd00338,IPR011109,IPR038109,PF07508,PS51736, G3DSA:3.40.50.1390,PTHR30461,IPR006119,IPR036162,PS51737, PF00239,SM00857,G3DSA:1.10.10.2600,SSF53041
GTSLNKRDQFNAMIADAKHGKIDMIITKSVSRFARNVVDFIGIVRDLAEKTPPVGVFFESEAIFSLNDDSQLALSFQATMAEEESHTRSRSMESSLRMRLDNGIPLTPKLLGYMHDADGALIPNPTEAPTVKLAFFMYLYGYSTKQIADAFNALGRKSYLGNINWTSTGIVQILRNERHCGDVLTRKTFTPNYRTHKSKKNKGQRPQSRYRNHHEGIVSRDDFIAVQRLLDNAKYGNKNILPEIRVVKEGVLKGFVVINPRWSGFKENEYYQASKSVYLTPDEEPQLNKEIEFEVAAGDFDLTGFEIARGEFFDNPRSPHVFVFHRNIKFSTACARKFGMNNYIELLIHPISRKIAIRPTTKDNRNAIIFSKVKEGIIYPKVIHSTAFSETMFNLLGWNIDYKYRILGSLYEQDGEIAYIFDTTDSEAYFKKNTLSQDVDEGYQPLLPSGKRVRAIPESWIGSFGKQFYAHEKSVEELERQSEADWMLRIEGQLYETGNKLNVTSFDELKKYITKELEDIEQWEVTND

SEQ ID NO: 10031 - protein, 528 aa, Unknown; identical to SEQ ID NO: 9667
  Description of Unknown: Integrase B10032 sequence
  cd00338,PF13408,IPR011109,IPR038109, PF07508,Coil,PS51736,IPR036162, IPR006119,G3DSA:3.40.50.1390,PTHR30461,PTHR30461:SF3, IPR025827,PS51737,PF00239,SM00857,G3DSA:1.10.10.2600,SSF53041

SEQ ID NO: 10032 - protein, 528 aa, Unknown; identical to SEQ ID NO: 9665
  Description of Unknown: Integrase B10033 sequence
  cd00338,PF13408,IPR011109,IPR038109,PF07508, Coil,PS51736,IPR036162,IPR006119,PTHR30461, G3DSA:3.40.50.1390,PTHR30461:SF3,PS51737,IPR025827,PF00239, SM00857,G3DSA:1.10.10.2600,SSF53041

SEQ ID NO: 10033 - protein, 528 aa, Unknown
  Description of Unknown: Integrase B10034 sequence
  cd00338,IPR011109,IPR038109,PF07508,Coil, PS51736,IPR036162,IPR006119,PTHR30461,G3DSA:3.40.50.1390, PTHR30461:SF3,PS51737,PF00239,SM00857,G3DSA:1.10.10.2600, SSF53041
VTVFEAQNAIKRAKIIDSKMYAMYLRKSRVDLELEAISKEETLAAHKKLLFALAERNGILPSQIVIYHEMVSGDSIDERPEMLRLLEDVYKGTYAGVLVTEIERLARGNTKDQGEVADAFTFSDTKILTPQRIYDPNDEFDQEYFEFGLFMSRREYKTIRRRLTTGKELAAQDGNFLLPEAPYGFDIVKENRKNRYLVEKPEESKYVKMIFNWYTEDRKPTSWIAKQLTLMGVPTRKKGKDWSRTTIKDILFNEHYIGLIPWGKQITVKEKDPTTGKVVKKRKQNPNPKFYNGKHDGFIAEEQFWKVREIYGSQAPVKVKNELVNPLAGLLVCSRCGKAIIQQPYPDGRKTRYQHPKGVYACKMKSILVDDVNEAIANALRDRMEDFKFKLKTGNTNEEAERQLQAIADMEKELAKQERMKKRLFESWEADDGTYTREEFIERKGMYNSTIENLKNEIEIMKQATPAPVNYEEIISTLHTAIDYINDPDVDPKEKNIFLKSFIDKIEIYTVDLGRGKGSDPLLDIHLL

SEQ ID NO: 10034 - protein, 528 aa, Unknown
  Description of Unknown: Integrase B10035 sequence
  PS00397,IPR038109,IPR006119,PS51737,PF00239,G3DSA:3.40.50.1390 ,PTHR30461,IPR025827,SM00857,G3DSA:1.10.10.2600, SSF53041,IPR011109,PF07508,PS51736,IPR006118, cd00338,PF13408,Coil,IPR036162,PTHR30461:SF3
MEQCVLYARVSSKEQEREGFSIPAQIELLERYAYKNNYKIVEKFIDVETAKQSGRTNFEKMLAFLKKNKTVRDVLVEKTDRLYRNLPDYVTVDGLNLNLHFVKEGVIINNESHSSEKFMHLIKVGMAKQYIDNLSEEVRKGISQKCNEGYYPSKAPIGYLNVTSPTKKKIIVPDINTSHYIKKCFERYASGLYSYKSLAKKMTDDGMRINGNPVRKHNIENILENPIYYGDFIFKGKQYNGKHEPIISRELFVICQQRKRLQSSPKIKTHEFPYSNMIKCSECGCYLVGEIKKKKYIYYHCTGNKGGTCKKHYIRQEVIEKAIAEVLKLIEVTSEEIIEIKDTVKELLKMKEDYEEDKAQSIMQKISKTKTRLNKLYTDKIDGLIDEDFYFEMRNKYQSELDELHIVFNAMTTTSKYFIEDITRMLELCKNAHSLYLSETDEEKRKLVNLLCSNLSFDGSNIRVELKSVFNIFIENASRRLNLGQDVEVRTFNRAIKIAEALSNCYFMQDYRDFFDCVRIYEDEKLRA

SEQ ID NO: 10035 - protein, 493 aa, Unknown
  Description of Unknown: Integrase B10036 sequence
  cd00338,PF13408,IPR011109,IPR038109,PF07508, Coil,PS51736,IPR036162,G3DSA:3.40.50.1390,IPR006119, PTHR30461,PS51737,IPR025827,PF00239,SM00857, G3DSA:1.10.10.2600,SSF53041
LAKVKRIDNANIEIPCCAYARVSTMKEEQESSLLMQESYWTEKLQSLPNRKFCGVFADQGISGSRIIQRKEYCKMIDLAMAGFIKEIYTKSIYRFGRNSKETMEVIQKLREKGVAIIFDEENINTLKCPQDLLLKIKAILGEQELKTMSMNVQFTTRNKFKQGIVPKTLTFGYDHDENQHMIINEAEAKIVRFIFSMYLKGYGTNSIANQLTKLKIATCCGHEVWHPCAIKGMLTNEKYVGDALLQKETYTNGIRKKNTGELEQYYVTNDHDAIIDRDTFNRVQELMQKKFEYSKQVRPNMAKTTYALSGKIQCGLCGKNFRHRINKKIINFDNRLWMCLTKERRGKAICPAIEIPEPLLNEIILDAYNDYIDTPYELPCDTELKNKIREQQELQERLKRLYLDKLITYAQYKKEIESIQEKLSDMLDKMRNYKILSIYKKPKTKAREYSDEIVNKHIEKVIITGYKVQIVFKNLQSITKEYIYEHRKYRKNY

SEQ ID NO: 10036 - protein, 528 aa, Unknown
  Description of Unknown: Integrase B10037 sequence
  cd00338,IPR011109,IPR038109,PF07508,Coil, PS51736,IPR036162,PTHR30461,IPR006119,G3DSA:3.40.50.1390, PS51737,PF00239,SM00857,G3DSA:1.10.10.2600,SSF53041
MAKITVIPQTRNTLTRIPISEFSKRRVAGYARVSTDLEEQVTSYEAQVDYYTKYIKANPNWEFVEVYTDEGISATSTKNRHGFNRMINDALAGKIDLIVTKSVSRFARNTVDTLDTIRKLKASGVECYFEKENIYTFDGKGELILTIMSSLAQEESRSISENVTWGKRKAFSDGKVGLPYKAFLGYKKGEDGSLEIVEEEAVIVRLIYSLYLEGLSISTICDRLSELGYKPKLEKSKGWHVSTINSILHNEKYKGDALLQKHYTVDFLTKTRKVNNGEVQQYYVENHHPAIISKEEWDDVRAEELRRKAHRRAYSGKGIFGCRVICEECGSAFGIKVWHSNDEYKRQILQCNDKYKVKGSYCTNTHIGVEEFQEMFFKAYNLYMNGVEQVIEDIEFLISNLTNFTDLDLEITKTNDEIEIIRNMVEKLVRENSSTAMSQDDYQKRYNSLYDKYEVLEAKYNELTDKKSKALARNSSLKRYIKILKKNPTNLVEWDSAIWALVIDRAIVHKDKSVTFRFICGKEIKIEY

SEQ ID NO: 10037 - protein, 424 aa, Unknown
  Description of Unknown: Integrase B10038 sequence
  cd00338,IPR011109,IPR038109,PF07508, PS51736,G3DSA:3.40.50.1390,IPR006119,IPR036162, PTHR30461,mobidb-lite,PTHR30461:SF3,PS51737, PF00239,SM00857,G3DSA:1.10.10.2600,SSF53041
MKKIERIKPSIPKIKRKKRVAAYARVSAESDRLTHSLSAQISYYSTLIQKNLEWEYAGVYADSFISGTSIDKRTEFQRLIDDCEAGKINIILTKSISRFARNTVDLLSTVRQLKTIGVEVRFEKENISSISSSGEIMLSILASFAQEESVNNSENVKWAKRKRFEQGIPHAKFSLYGYTWDGDHMVIVPSEARVVEHIYKDYMAGMTELAIARELSERGISTRRGGRWSNTSIKGILKNAHYTGNLLLQKYYVESPLTHRVRRNEGELTRYWVENTHEAIIDKETFDAVQDEMARRKALRSTHTSCFSRKIKCPFCGHSYIYYTDKNLSHDYWVHHRRKRDCPMSWGITQEKLKSVCAEVLNTEQFDEEAFREQVDFINVPQRENLEFHLRDGRIITKISRNQRRRKTGGGSDGKKGHDYSSND

SEQ ID NO: 10038 - protein, 528 aa, Unknown
  Description of Unknown: Integrase B10039 sequence
  cd00338,IPR011109,IPR038109,PF07508,Coil, PS51736,G3DSA:3.40.50.1390,IPR006119,IPR036162,PTHR30461, PS51737,PF00239,SM00857,G3DSA:1.10.10.2600,SSF53041
MRKIIVENLIEAKNQTKPTAFAFGRISSANQEDGMSLSYQDEKGINYATRKELYLVYSFSVTETGYKHNERQVFNEMLDLAEEFNVKHLIFKNTDRLSRNLHDLLKIEDLYENHGVTLHFYDQGKVISAGSTYDDKWVIKLLILLAEKYSGDISEKVRAAHRCKAERGIPVFRPPIGYRLTPEKNYIFDEHEEQVRWFFDTFDSGNYSLSEMVRLATEHGFRTRNGNVWHKGTLHHMLTSPIYAGFFVYGGNEYNGSYTPYVTRERFEARLKRMSSNFIGWSDTIRSYAFSRFVYCDHCGCVYIPELKKGKVLYGHCCKKQNNKRSYYNETALLKIIDQEMEKHVLSEDFAEEIKKMFTRTVTVKTQEVDQNKIHDEIRLLKIKQQRLYRLYAEEDTALDSLRAVISGYQEKIDQLERTLKKVNVNAQDVIIKVAELIDGIRQLPKAYKIATPEQKGRLLRSMASGLILSPEGAEIKWLPPYDIILSPLKENATQHTPSSVRHRPKIRGVRNETRILCENLYKWAIVA

SEQ ID NO: 10039 - protein, 528 aa, Unknown; identical to SEQ ID NO: 9670
  Description of Unknown: Integrase B10040 sequence
  cd00338,PF13408,IPR011109,IPR038109, PF07508,Coil,PS51736,IPR036162, PTHR30461,IPR006119,G3DSA:3.40.50.1390,PTHR30461:SF3, PS51737,IPR025827,PF00239,SM00857,G3DSA:1.10.10.2600,SSF53041

SEQ ID NO: 10040 - protein, 528 aa, Unknown
  Description of Unknown: Integrase B10041 sequence
  cd00338,PF13408,IPR011109,IPR038109,PF07508, Coil,PS51736,G3DSA:3.40.50.1390,IPR006119,IPR036162, PTHR30461,PTHR30461:SF3,PS51737,IPR025827,PF00239, SM00857,G3DSA:1.10.10.2600,SSF53041
VRTLLYARYSSQLQNARSIEDQISLLRARADREGWPIVDVFTDYAISGAAGVGAEQRPGLHAMLARAEAGGIDQIFTESTDRIARHQGDAFGVRERLRFVGCRLFTLLDGEVDELTGTIKSLMDSRMREDLAARVRRGHRGVATSGRSPSSVAFGYQRTPKLDDRGELVRGLREIDADEAAIVRRIFEEFAAGRSAMAISQGLNIDGVLPPRRGFWRAGTLLGNAALGTGILRNRLYVGELVYGRTTGVQSPTTRKQIIRPAADPVSIGAVPALRIIDDALWSAVQLRLEQNTGDRPEKHRRPKHVLSGLGFCGVCGGNWIITGNNGKAGARRWGCARAHEKACTNTRLILGHVYEARVLADLKGQMLAPDVVAAFVREYHLEHARESKKLGRDRDRAERQLAEAGRKLDRLVAALSDGGSSFPQIRAAMTAARDDHDRIKRALASMDALPVLTLHPGLADSYRREMDDLERLLMEPDAHLEAIPQIRSMIDRIELLPKADKLRGVDLTVHRRIDKVLAIATRRHALP

SEQ ID NO: 10041 - protein, 528 aa, Unknown
  Description of Unknown: Integrase B10042 sequence
  cd00338,PF13408,IPR036162,PTHR30461,IPR006119, G3DSA:3.40.50.1390,IPR025827,PF00239,SM00857,SSF53041
MTVSTSPFKIGDKVVAYCRYSEGDEQGLKNQSTEEQAEAIRRFCESSGLQLVRVFADPFASGRSVAKRDHYLEMLSFLLHKKKPDVQGVVLWDYERYGRNYDQAQLDAARLRMAGYKIYSLQQPIVDNGPFSHVLEAMYFASAQNQSDMISADVKRALQNNFIKYKVIPRSNIPDGWAAVPVRMGFMTDGSERVGYRMEPDPEYLHKFRVAINARLNGSSVGEMMQIIGGKYGTKYSKVCDLMRKPLLYGSFSYGGTVIEDYCTPVITRKEWEKLQEYNDGLKTKVRKRAPGSGAYSLNRTLLSGMLYCGVCGKRMYNDKRTAKGHVYETYRCNLKHAGIRREFLESMVLSAAEDLLTGETWKNDSERLIASFSEPLDAGVDKFAIRREIAQIERKLGRLSDAVADGGGSRSILSKITELETKREALSAQLEAGSGADLEKIRNVTERLRVRILDTLNDDSASVDDKRDALALFIPRITIYNGCDLLVEHGLPGYSGVAGESAISDERPQRDGDYTRNHMLRMVIHLS

SEQ ID NO: 10042 - protein, 441 aa, Unknown
  Description of Unknown: Integrase B10043 sequence
  cd00338,PF13408,IPR011109,IPR038109, PF07508,PS51736,IPR036162,IPR006119, G3DSA:3.40.50.1390,PTHR30461,PTHR30461:SF3,IPR025827, PS51737,PF00239,SM00857,G3DSA:1.10.10.2600,SSF53041
MAEIKIIPKEKEMPKLKKVAAYARVSIDTDQMLHSLSSQVSYFSEFIQSHPDWQYVGVYYDRGETGTKASRGDFQRLLGDAKKGLIDIIITKSLSRFARNTVDCLKSIRELKAIGVDIYFQEQNIHTLSANGEFLITLLAGYAQEESRQCSENVLWRVKKNFNEGRLASKYDCLGYKVENKEFTIIEEEAKTVRKIYDLYLKGYGYYKIAKILNEEGLRGKQGGLWSQSSINQILDNEVYTGTLVLQKTYSENHLTKRRMVNKGEKQKYVVDENHEPIISIEDFNKVQELRALKRKDPSSYVPKGPRRDFIFTGLIKCGICGSTYRHKQGAHKIFWKCNTFLDKGKDYCASTSLRDDCLRKACAKALDITVFDESKFKQNIDFIETYPGNKLVFHFTDGNAKEVEYEPPKKRCEWSIEAINKARERSKLQYAKRKNNTEQN

SEQ ID NO: 10043 - protein, 528 aa, Unknown
  Description of Unknown: Integrase B10044 sequence
  cd00338,PF13408,IPR011109,IPR038109,PF07508, Coil,PS51736,IPR036162,IPR006119,G3DSA:3.40.50.1390, PTHR30461,PTHR30461:SF3,PS51737,IPR025827,PF00239, SM00857,G3DSA:1.10.10.2600,SSF53041
MAIDDAILYTRVSSDEQKKSGFSLDYQRKMGEEYAKMNKLNIIKVYAESYTAKKPGRPQFNEMVDYCKKHKVKNLIFLKSDRASRNGVDSALLVYMAEHLDYNIHLIQDRLILNSSARATDFLVFEINNCISNFYPRNLSVDVSTKMREKAEQGYYPSIAPIGYKNERINHRSYLQINPEKAAFIKMIFELYATRDYSFNTLAAKMREMGFKMGKKTPCSRRNIEDILKNPIYIGDFIWKGKRYYNGKHEPIISRELFVMCQRIMEERSTAHAQKHNFLFTNLIKCKKCGCYMVGEIKKEKYIYYHCTGNRGGDCKKGSYIRENVIEDAILDVLSNFELPTDALDIVKRCLKNEMESQNYYNETRIKELEKDIEKTKNRLNKLFDLYLDGEILEEIYKQKNKELQNMLDEYLLRYSSYTKTGVELLKLSEGLFELCKDAKKLYLRGNIEERRRLLKILCSNFYYDGQEVIIAIKKAFQPLVKIAYLLKLGRRCQNSNLKLYVNEFIKEIKENAETFNIVEINTLLKVA

SEQ ID NO: 10044 - protein, 528 aa, Unknown
  Description of Unknown: Integrase B10045 sequence
  cd00338,PF13408,IPR011109,IPR038109,PF07508, Coil,PS51736,G3DSA:3.40.50.1390,PTHR30461,IPR006119, IPR036162,PTHR30461:SF3,PS51737,IPR025827,PF00239, SM00857,G3DSA:1.10.10.2600,SSF53041
VAIKKDESRQLIRAVIYARYSSSGQREESIEGQIRECRAFAKRNGFTIVGEYADRALTGRTDKRPDFQRMLRDAERGAFEAVLCWKMDRFARNRYDSATYKYRLKKCGVRLYYAAETIPEGPEGIILESVMEGYAEYYSENLSQNVKRGNYESAKELKTLGLTLLGLRKGADGRFEIDPETAPVVRRIFEEYAAGIPAKDIYKKLNDEGYRTTRGGRFNKNSIRRIIQNERYAGVYLFKDMRVEGGIPAIVDRDLWEKCQKVAAQHHVSPAAERGVSYLLTTKLFCGHCGEAMTGESVSSIYYYYVCNGRRAHRCKKKRVQKQWIEDLIVRELAALIHSDEFIEAVADSCVEYQQRTRDTADLDALERRQRENEQAIRNTLAAIDAGIITDSVKSHLVELEAERADLERGIAQLLIAEPDVDREQVIYFLERFRDGDLDDPGYRQFLVDTFLNAAYLYDDDRILLVLNYTQEGERVTLELAEAAAEDDGVKISCFAPSGPPNGANTKKARELVLHFVEKAVAVLIELR

SEQ ID NO: 10045 - protein, 446 aa, Unknown
  Description of Unknown: Integrase B10046 sequence
  cd00338,PF13408,IPR011109,IPR038109,PF07508, PS51736,G3DSA:3.40.50.1390,IPR036162,IPR006119,PTHR30461, mobidb-lite,PTHR30461:SF3,PS51737,IPR025827,PF00239, SM00857,G3DSA:1.10.10.2600,SSF53041
MARNIIRIKASNIKQLERKKVAAYVRVSSGKDAMLHSLSAQISYYNDYIQKRPEWEFVGIYADEGMTGTKDNRKEFQRMLQDCRDRKIDLIITKSISRFARNTVTMLEVVRELKDINVDVYFEKENIHSISGDGELMLTILASFAQEESRSVSENCKWRIRKGFLEGELVNLRFMYGYNIDDGEITINEEEAEIVRMIFNDYLNGMGTTSIAKKLSQMKVERPRGGKWNSERVAEILRNEKYAGVALLQKKYVEDHLTKTLVRNKGDLPQYYVENSHPAIIDKDTFEKVQYIMEERRNKFAGKKVPYPFTSKLICENCGKKYRRKLSHGRVYWVCSTYTRHGKDYCNSRQIPEEILLEITSEVLEIDIFDETLFNEKIEHIEICDSNILNFVFRDGEIIQRTWEHKPRSKSWDEEARQGARERALKQWEERNHGGSKDGNGNTCQE

SEQ ID NO: 10046 - protein, 528 aa, Unknown
  Description of Unknown: Integrase B10047 sequence
  cd00338,PF13408,IPR011109,IPR038109,PF07508, Coil,PS51736,IPR036162,PTHR30461,IPR006119, G3DSA:3.40.50.1390,PTHR30461:SF3,IPR025827,PS51737,PF00239, SM00857,G3DSA:1.10.10.2600,SSF53041
MPRKRSTLPSGSIGVIYGRYSSHNQKDISIEQQVALCRELAAERGIEIKEVYADRAISGKTDKRPAFQKMLRDSTSGTFHYVIAWKSSRIGRNMLEAMVNECRLADNGVRILYVEEDFDDTAAGRFAKRSMMNVNQFYIENMAEDVKRGMNSNAERCLVNGPAPFGYKTEDHHYVIDEPAAAIVREIYERAARGEPFVDIYTDLNRRGLRTRKDGEWGRSSFQAILHNEKYRGVYIFDETRIENGMPRIVSDSMYFKVQEVLRMKKNPQGRHRINGDYLLTGKLYCGHCKKPMVGISGTGKGGDMHYYYTCNGKRQHSGCDKKNVRRDFIEQEVARGIVEYVLQDDMINWIAEATVNYHKTHRDETDFDKLNDQMSDIDKSLGNLMKAVEEGLNSESVKERIKELEKEKKHVKSKLFDITANYPEVTKQEVVAWLTGLKSGDIEDKKFQSELFNTFISAVYLYDDKRIKIVFGMPGGGKSTENNLPDDFDDLEENVCIDSATGHQYVHQTNFSIVMIGFMFVLSYKHI

SEQ ID NO: 10047 - protein, 527 aa, Unknown
  Description of Unknown: Integrase B10048 sequence
  cd00338,IPR011109,IPR038109,PF07508,Coil, PS00397,PS51736,G3DSA:3.40.50.1390,IPR006119,PTHR30461, IPR036162,PTHR30461:SF3,PS51737,PF00239,SM00857, G3DSA:1.10.10.2600,IPR006118,SSF53041
MKNVILYVRVSTDEQAGRGYSLRDQEQKLLTYCQNNNFNVLHVFREDYSAKTFKRPEFKKLLEYCKKNKKDIHQLIFIKWDRFSRNTAESYQMIGVFNELAIQVNAIEQPLDLTIPEQGLMLAVYLSMPEVENQRRSLNVISGMRRAFKEGRYVGSAPKGYDNGKDAAKKPILIPNDDAKYIQEAFELMATGNYQRNEVFFKLKAKGFKSSKSVFANIINNHLYYGGVYIKAYKDEKETIVDGIHEPIITKALFDKVQQVLRNRKRGKQKAPKTYNEDFPLKGFLHCPICNKQMTASKSKGRTQYYSYYHCISPCKGRYTSEEVHQQVNDFLSDLSFDKQFQELYFEIIKEKLTEDTKQKALGAKHYENLNSIEDKLIKLQDLYIDGDMDKAGYESAKERYENIKAELKSKEMSSEDNKKLIELYNRATKKFIDIDNQYNNSTIEQKRKIIGSIFEKNIQFENKKVRTANLNPILNEISSINKGLRAKTKKDLTKKTVKSSMVIAEGFEPSTACLEGIIKKYFKVLK

SEQ ID NO: 10048 - protein, 527 aa, Unknown
  Description of Unknown: Integrase B10049 sequence
  cd00338,IPR038109,Coil,PS51736,IPR036162, PTHR30461,IPR006119,G3DSA:3.40.50.1390,PTHR30461:SF3,PF00239, SM00857,G3DSA:1.10.10.2600,SSF53041
MSKKKSKEKVVEFSKLTNKVAAVWTRVSTERQADTNGSLESQRRICTEYAESHAIRIKKYYGGTNESAKVEGKLYREMIAEVARDKEINIILVYSFDRFSRAGYEAMMTKAYLKAKGIYVVSATQATDPDSAAGGFMEDVIFLFNQFENNLRKDKCITGMVECLRNGNWYSKPPLGYDKLKVGREHVLTVNEKGKILRNAFIWKATEGIKDIEIVHRLKGLGLSIDRKHLNKILHNPFYCGYIQHSLLGDEIIKGNQEILIDEAIFNKVNDISNAGYEHKEITEPFPLKRHIICSDCGGYLTGYTVKARGRDYYKCNKKGCKSNHSTEKLHQKYINLLNEYNIPDGLIPILTDVLRKVFEEYNQNKGETKKVLLKRKTECENRINTVKVRFGLGEINSEIYTATMSELNSRLAEIRRELEDAGKNLSNMMKYINQTIEMSCKLGGLWSDSNFSNRQKIQNLVYPSGIYFDKENDDYRTENENEVFKIFRRFTASCEGGKEKATTDFARLSPSVGMRRLERPTPTSRT

SEQ ID NO: 10049 - protein, 527 aa, Unknown; identical to SEQ ID NO: 10007
  Description of Unknown: Integrase B10050 sequence
  cd00338,PF13408,IPR011109,IPR038109, PF07508,Coil,PS51736,IPR036162, IPR006119,PTHR30461,G3DSA:3.40.50.1390,PTHR30461:SF3, IPR025827,PS51737,PF00239,SM00857,G3DSA:1.10.10.2600,SSF53041

SEQ ID NO: 10050 - protein, 527 aa, Unknown
  Description of Unknown: Integrase B10051 sequence
  cd00338,PF13408,IPR011109,PF07508,G3DSA:3.40.50.1390, IPR036162,PTHR30461,IPR006119,mobidb-lite,PS51737, IPR025827,PF00239,SM00857,SSF53041
MTSTNSRTARPARRKLSTSYSYVPDWAEEHNAAMPADAPIIDLYARLSKNRYGKLEKIEDQIDAGRYEVLVPRRWRIGMVHVDNSLSAWNKNVRRPAWEHLLDRLGSRAAAGAGVYHQDRLMRQPRDLEKLIDLAEFHGSLFASVHGAKDLNDSDDRHYLRGQVNAACKSSDDTSRRTKNRNTRLRERGRLTGGPRAFGFPGVDRTATPDDDGHRPRVAAATVAAERAAILDASKRVAAKVELAKIAADWNVAGLRTATGIEWEAITVRQVLSRGRNAGRLEHEGKVIGRVVGEEPIVDDELFARVQAVFAARRRGRAASGRYLASRLIFCAECGNGLTGRPHGKQGRYERQRAYICEKSPRGGCNKIFIHVDGVDEVLRRFVIGRLSDPKLAERLSKIAREHAQRTEAIASELAEIDTLRRALSDRLGRREIKLDAYDAVCAPLAADEAKLLAELATLEAADDPQLREVRHEAHRDEITAEWDAPDADRRAMLETALRGYRVQVKPHGKYAARRFDPRRVEIMKAG

SEQ ID NO: 10051 - protein, 437 aa, Unknown
  Description of Unknown: Integrase B10052 sequence
  cd00338,PF13408,IPR011109,IPR038109,PF07508,PS51736,IPR036162, G3DSA:3.40.50.1390,IPR006119,PTHR30461,mobidb-lite,PS51737, IPR025827,PF00239,SM00857,G3DSA:1.10.10.2600,SSF53041
MKKTIRVIEPTIPLLKKKKRVAAYARVSSGKDAMLMSLSAQVSYYSELIQRNSEWEYAGVYADEATTGTKEDRTNFQKLLKACRNGEIDIILTKSISRFARNTVTLLEAVRELKKYGVDVYFERENIHSLSGDGELMLTILASFAQEESLSASENQKWRIKKNFEEGKPWTYGMLGYRYNGEYYELIPEEAEVVRKIFAYYLEGLGYNAICKRLNAEGIVTRNNNKWSQNSVSKILKNYTYTGNLLLQKTFRENHITKKTRVNRGELPKYHAEDTHEAIVDIDTFMAVQNEMARRLKGFEHKSQVQKTYPFTHKMVCDCCGAYYRRKITKTRVVWICATFNQKGKALCQQSKQLPEETLIALCNDVLGLVEFNEQIFINKVSKIRILDNNRVQFLLSNGKTEERTWKDRSRSDSWTDEMKETARQRTLQRYAPKEVE

SEQ ID NO: 10052 - protein, 527 aa, Unknown
  Description of Unknown: Integrase B10053 sequence
  IPR038109,IPR006119,PS51737,PF00239,G3DSA:3.40.50.1390, PTHR30461,IPR025827,SM00857,G3DSA:1.10.10.2600,SSF53041, IPR011109,PF07508,PS51736,mobidb-lite,cd00338, PF13408,Coil,IPR036162,PTHR30461:SF3
MAKKQKPSMVPITAAVYARYSSSNQNDASIEQQIAECKAYALQNNLTVVAEYEDRAMTGRNDKRPGFQRMIRAAERHEFQVLLTYKSNRLARNMLDALRYENKLDKAGVKVVYCKEDFGDNAAGRLALRMMMSINEFYSDNLSEDVKRGMLDGAQKCKVVGSIPFGYKKGPDDRMVIDEATAPIVVEIFKRVLNNEAYMDIARDLNERGLKTSQGKPWGKGSFLGILRNERYTGTYIFKDVRIEGGMPQIIDREVFDAVQEIRKERNAFTGRHRSNNDFLLTGKLFCGQCLSPMVGISGRGRHGDVHYYYSCNGKRLQKSCDKKNERKEFIEEEVTRAIMTVVLDDDMMEWMVDTIMAKAEEMKEASKLGYYEAQLSETQKQIANILRAVELGIIADEFKERMAQLQSDKQTLQGKIALEKRDLLQVDRLRVIHFFEQIRNGNPADPAFQHRIIRDFVLAVYLYDGYFKLVVNFTGKNRAYKVPFSIGTSSTDTTDLSTDEVETSTEMSTEEMGKGLYKRTFAPLKR

SEQ ID NO: 10053 - protein, 527 aa, Unknown
  Description of Unknown: Integrase B10054 sequence
  cd00338,PF13408,IPR011109,IPR038109,PF07508, Coil,PS51736,G3DSA:3.40.50.1390,IPR036162,IPR006119, PTHR30461,PTHR30461:SF3,IPR025827,PS51737,PF00239, SM00857,G3DSA:1.10.10.2600,SSF53041
MESAVIYARYSSDNQRDASIDQQVKACTKFAADRGLEVIKVYEDRALTGRTDRRPSFLQMIKDSSKRRFQFVIVYSLDRFSRNKYDSVMHKHTLKENGVTVLSAMEHITDDPTGALMESILEGFAEYYSRELSQKINRGLSDNAEKGIVNGSVPLGFRRGKDGYPEIVEEEAEIVREIFRRVAEDEPFIRIIEDLNRRGLKTKVGHEWNRSSFNRILSNDRYIGVYRYKQYVHENGFPAIVDRDLFYSVQKKVKEKPNARGTGMRRKTEYGTYLLTGKLICGKCGALMTGISGVGRHGDRCFYYSCVRKKNDHACDKKNVRRDPVELAITSHLQQMLMDDDLIEWMADQTVAYQGTGRDEDEITAKEDRLKEITRKRENILKAIEDGIYTASTKDRLRELEDEDNSLRMELAAIKAEQNSMITKDMILSYLETLRDGDVTNKSFQQLMIDSFLAKAIVYDDEIKLIFNLTKEHEEATIPLEFDGKGGAGENTPQGLFKLCTSPQHGLKQTPVFFINGWFVASFPFAG

SEQ ID NO: 10054 - protein, 527 aa, Unknown
  Description of Unknown: Integrase B10055 sequence
  cd00338,IPR011109,IPR038109,PF07508,Coil, PS51736,G3DSA:3.40.50.1390,IPR006119,PTHR30461,IPR036162, PTHR30461:SF3,PS51737,PF00239,SM00857,G3DSA:1.10.10.2600, SSF53041
MGSIKPNGLYCAYLRKSRRDMELEALGQGETLARHERQLSDLADRLGIRVARWYREIVSGDTISERPQVRQLLEDVGAGLWDGVLVMDVDRLGRGDSIDQGVIMQTFMYAGVLIVTPDKVYDPADDSDAEFFEIKLFFSRREYAMIKKRMQRGRLASALDGCYMGARPVYGYERVKLQGRKGWSLKPVPEKADIVRAVFDWYAHGMDGRDVGAAVIADRLNGMGLRTDLGHRFEPSYIRHMLQNPVYIGKVQWNQRTTQYAIRDGKRVSTRPKCADPILVDGQHEPIIDRALFDHVQQMFATHEKRPKNKMAQVANPLAGLVVCSECGRMMQYKGDKTRRNGLLGCVTQRCPTAGTYIDVVEGVVLDGLRAWVDAYEAKGDAPTPAPFADACASAAARAQLTDQLATLQQQSARLYDLLEQGVYSIATYRERRADLDARLADVQAALAALDAPPKPDPIAAILPQVRTVLGSYDITATPAEKNALLRSVIDHITYTKTQRCQRNNAPTDHLNLTLYPRVTPEETSDI

SEQ ID NO: 10055 - protein, 438 aa, Unknown
  Description of Unknown: Integrase B10056 sequence
  cd00338,PF13408,IPR011109,IPR038109,PF07508, PS51736,IPR036162,IPR006119,G3DSA:3.40.50.1390,PTHR30461, PTHR30461:SF3,PS51737,IPR025827,PF00239,SM00857, G3DSA:1.10.10.2600,SSF53041
MERIVETIKSRYDPKMKPKRVCAYARVSYEKETLLKSLAAQVSYYRTFIQNHAGWQFCGVYADEPISGTKENRKQFLEMVEECRKGNIDMIITKSISRFARNTVVLLETVRELKAMGVEVFFEEQNISSFTTEGELMLTILAAYAQEESFSVSENMKWRIKKCFEEGKPWSGTIYGYRLINRRFEIIPEEAAVIKKIVGYYLDGLGYVKISKLLNDAGLRTRFGGLWNHGGVSAILKNYNYTGNLLLQTSYSSDYLTKKPKRNKGELPMYHALDTHEAIIPLETYNFIQAEMERRKQRFSKHGDRRNKVRYPFVGMIKCPCCGVHYRRKKTYYTVAWVCSISSQKGKEFCGQTQTIPEDILISTTCEVLGTNELDEAMFRARVEKIIPTQNNVLLYKMKNGQEIIKEWQYHSRKASWTEEKRKEFGEQLKEKRRQCRK

SEQ ID NO: 10056 - protein, 527 aa, Unknown
  Description of Unknown: Integrase B10057 sequence
  cd00338,PF13408,IPR011109,IPR038109,PF07508, Coil,PS51736,G3DSA:3.40.50.1390,PTHR30461,IPR036162, IPR006119,PTHR30461:SF3,PS51737,IPR025827,PF00239, SM00857,G3DSA:1.10.10.2600,SSF53041
MYEEIKTACLYLRYSSSNQTEQSIEGQMHVCQDFCKRHNIRIVEMYIDRATSASKDIEKRVEFLKMIKDSEKGNFDAVIVYKLDRFARSRYDSATYKYRLKRNGVQLVSATENITQDPEGIILESVLEGMAEFYSAELSQKINRGMRESAMKHNSIGGAIPLGYKTVDKKLIVDETTAPIVREAFQMYADGESVAEICRTFNNRGYKTSKGTRFGKSSFTKIFRNEKYIGVYKYHDYRAEDVIPPIIDKALWDRVQVRVGKIKKAPARNKARHTYLLTGKLFCGHCGSAMNADGNSNGYLYYRCYGKKNLDKQCNKRNMEKNLIERLVAQDAMSFLTDEYIEKIATIACDRNKQEIESDSPIPVIRDRIRQVDVSLNNLLKAIETGSAPDMLVKRMGELETEKKDMEVQLKKEMAHQVYIDKEQVIFWLEKFREGDINDEEFCQTVIDLFVNSVTVWDEPDDKFKITIAYNLTSIPQKTYRLSKDGRLSDYASNTPPLSANPMILGSLMIHTFTVTVHPQKRGKKTV

SEQ ID NO: 10057 - protein, 446 aa, Unknown
  Description of Unknown: Integrase B10058 sequence
  cd00338,PF13408,IPR011109,IPR038109,PF07508, PS51736,IPR036162,PTHR30461,IPR006119,G3DSA:3.40.50.1390, PS51737,IPR025827,PF00239,SM00857,G3DSA:1.10.10.2600, SSF53041
VKRGDYMARIIRKIEPSVLKLPTKKRVAAYARVSSGKEAMLHSLSAQVSYYSEFIQKHRGWEYVGVYADEALTGTKENRAEFQRLLTDCRNGKIDMIITKSISRLARNTVTMLETVRELKQLNVDVWFEKENIHSISGDGELMLTILSSFAQEESLSVSENCKWRIRNNFKDGISNTFAILGYNFEKGNITVNETEAKIIKIIFTNFLSGMGRVSIIKKLNEMGIRPKNGGAWDSTKIREILKNEKYCGDLLLQKVFIANHLTKINKTNNGELPQYLVKNNHEPIIDREVFDRVQVEMESRAKRYEAKSTTVATYPFTGKIVCGVCGKNYRRKLNNAGTKYQKAVWICSTFNTLGKTHCQSKQIPEGILTLLTAETLGITEFDERIFMQNIKEIRVQSSNLLIFVLNNGDTIEKQWQNKSRSESWSDEAKELARQKSIERMNSQCY

SEQ ID NO: 10058 - protein, 435 aa, Unknown
  Description of Unknown: Integrase B10059 sequence
  cd00338,PF13408,IPR011109,IPR038109,PF07508, PS51736,G3DSA:3.40.50.1390,IPR006119,PTHR30461,IPR036162, mobidb-lite,PTHR30461:SF3,IPR025827,PS51737,PF00239, SM00857,G3DSA:1.10.10.2600,SSF53041
MDRIIKQVVFAAPTIITALKVAAYTRVSSGKDTMLHSLSAQVSYYSKYIQEHPGWIYCGVYSDEAITGTKESRKNFQKLLQDCKAGKIDLVITKSISRFARNTVTLLENIRELKNLGVGVFFEEQNINTLTADGELMLTILASYAQEESLSASENAKWRIHKDFEKGILPKNVQNIYGFNRTEDGGFEIIPEEAEIVKDIFNLYLEGFGFLKIAQHLNELGVESNTREKWSDKKVKYILSNEKYVGDLLLQKSFVVDHLTKKCKNNNGEKPQYYVKDNHQGIVSREIFEAVQEEIKRRQLKYGKQLTVVPTYLFTGKMQCGICGKNYRRKIIRGKPIWRCPTFDRFGKKECPSKQIPEDILIDLTMEVLGTKTVDMRVFNKKISKMFLPSADRIIFEFTDGHTIKKTWQNRSRSQSWTDEMKEQARQHTLKRRKY

SEQ ID NO: 10059 - protein, 527 aa, Unknown
  Description of Unknown: Integrase B10060 sequence
  cd00338,PF13408,Coil,PS51736,IPR036162, G3DSA:3.40.50.1390,PTHR30461,IPR006119,PTHR30461:SF3,IPR025827, PF00239,SM00857,SSF53041
LNFAIYSRKSYFTDTSESTKMQVDACQEYIERHHDDVESVTIYEDDGYVRSEIDRPGMNRLRQDVADGLIDCVVVYRIDRITSKMDDFCIFYAFLKDRGVKFVTVKDGIDTTTPIGEAMMYLAVIFSGIEVENDTLRITDNMNHLAASGYWCGGKPPLGLKIQEIFVGGRKSHKILVIDEEAKAWKDELVRIFLDNHLTLQNLETYCRQQGIKSMNGKFLSTTQLYNILRAPQCVAATAKMYDYYESLGCQIDEGSPREKWDGSCAIMVYGRTTEKRIDGKKKHTIASPEEWRVSLAKWAPYMSDEIYLSILSQFGKNKIDKKMKHETTLLKGVLRCKCGRLMSLARKPKVDGSVTTWYHCPKRERAGVEACDCSAIKADLIDEKVMEIFRAIELDPKTLEKYVGVSVKAPADATEAARKALKTVEGKIARLTDALAENGASAAAKYIVQQIEELDAEASRIRRKIAEDSAAVRRAQKELKSTKEKRVDIIRLCEHYDDFTMAEKNEIARAVIKSATWDGETLKILL

SEQ ID NO: 10060 - protein, 527 aa, Unknown
  Description of Unknown: Integrase B10061 sequence
  cd00338,PF13408,IPR011109,IPR038109, PF07508,Coil,PS51736,G3DSA:3.40.50.1390, PTHR30461,IPR036162,IPR006119,PTHR30461:SF3, PS51737,IPR025827,PF00239,SM00857,G3DSA:1.10.10.2600,SSF53041
MSTAKKKLTTCEPKTAVAYARYSSAQQRDVSIEQQLRDIRAYAEREGYKIIYEYADHAKSGFKNVERRTQFQAMIQAAASGAFDTVIAWKVDRFGRNRRESATYKGQLADNGVKVVYAMEPIPDGAAGVLTEGMLESLAEWYSRNISENTKRGQLDNAVKGLYNGHVAYGYRRSADNRFEIYEPEAAVVRRIFDLYAQGHSFADIVRELNDDGILTKYGNPYQKASVLYILTNDNYIGTYHFADVRIPNSLPPIIDMDLWERAQEQRRKTYKKHGWAPEDYFLSGRCTCGLCGSPIYGAYGSGRGGKRYQYYHCKGIKTKPRICTSHYMHKEDIEKPIFDFLFNKILKGSLLDDYIGMVSDVLKARQATSPKRQLEAELSDTTRRIDNITRAISEGIWSKQTAAMLEDLNKRAEELEKKIAYHKMTDEKIIADSRIRFIMEKVADGKRDDPEYLKTVINVLVNHVRIFDHWLEVAINATGAIEQIPPEILPPLDVLPDGNRFEFCKVNAPSLYVLEPYPVIVFKIAI

SEQ ID NO: 10061 - protein, 527 aa, Unknown
  Description of Unknown: Integrase B10062 sequence
  cd00338,Coil,IPR036162,IPR006119,PTHR30461, G3DSA:3.40.50.1390,PF00239,SM00857,SSF53041
MMQNLSPFKQGDKVVGYCRYSGGEEQGLKNTSTDEQEAAIRQFCDANRLNLVRVYADPFVSGRSTKGREHYLEMMSDLLHDKKHRSGIIGIIAWDFERMNRNVDQAQLDAAQLRMAGYKIYSLQQPIMDNSPFARVMEAMYFASAQNQSDMISADVRRALQNNFQKYKVIPRSCIPDGWIAVPVDMGFFSNGKPRIGYKAEPDPDLAPRIRDAIEQRLHGATLEEMRIIIGGVFISKTREMVRRLMFKPLLYGSFTYGGTTMVNYCEPIISKETYDNLQVYNDFAPREHQKPQGHFSKNRPLLSDLLYCGVCGKKAFLDRRRAKGRLYETYYCNDKHVGFRREILDKLVVQKGIELLSDQQYQKDLEAVISSIKSPFEKSSDTTSVNSELAKIDQKISRISRAIEETDEPPATLVKRLAELEKERAAISSQLQSFDDADARDKILAEMDRIRLSILEVLKNEKSTTEEIRNALSLFIHSVVIYPGSRVLIRHTLPGMAVGSTMSGVVSAPPEGVSVYSQLLESWYQV

SEQ ID NO: 10062 - protein, 527 aa, Unknown
  Description of Unknown: Integrase B10063 sequence
  cd00338,Coil,PS51736,G3DSA:3.40.50.1390,IPR006119,IPR036162, PTHR30461,PTHR30461:SF3,PF00239,SM00857,SSF53041
MKPTSPLASPTHACCYLRSSKDRHDLSLDAQRRALQDYAHNQSLTLVAEFADAVESGKDDDRPGFQSLLRALRDPARDWAVILALDTSRIARRRHLALIFEHEAEKAGVRILYKSVPDTDPITGMLLRSILQAMDEWHSLTSKAKGLAGMAESIKQGWRAGGQAPRGYRLEHQPTGTLRDGQPVLRSKLVPGPEAAAVAAYLQARAAGKPRGIASQLSGITGSLNELEWQALTYAGHTTWGMHHEHRPGGYVGGVKRRPRAEWHLTRDTHPPLITDAEAEAILTRLAARAGLRTRAGDRVYLLSGLLQDTHGQPFAGETSKGQAAYRLGKGRRIAARLIEGAVLDQVFADLAAPEVAKAIADRMRQAAAPASKPRDLAGLRRKLATLDGKIGKLVELIADAGTAAPAYQRAIAGMELERATLATELEQAATESHQAEVIRAWTPADVARLLASLRNAMETDLAEDRTLAAREAMAGLVDRITLDLGSRAWEIHYKLHTGVKMASPRGSRLAPVVWISRGTLPRRRAA

SEQ ID NO: 10063 - protein, 527 aa, Unknown
  Description of Unknown: Integrase B10064 sequence
  cd00338,PF13408,IPR011109,IPR038109,PF07508, PS51736,IPR036162,IPR006119,PTHR30461,G3DSA:3.40.50.1390, PTHR30461:SF3,IPR025827,PS51737,PF00239,SM00857, G3DSA:1.10.10.2600,SSF53041
MTKKKAPQPKSGKAVIYARYSSHNQREASLEQQIAECKKYAEKNGYTVSDIYQDAAVSGRTDDRPAFKRLMKDAEKEKFDYIIAWKSNRIGRNMTQTMTNMAKLAEYGVECLYTEEDFDNTASGRFALRNMMNVNQFYSENMAEDIRRGLMDNAEKCMVNGMTPLGLKRGEDGRYAIDEPSAAVVRQIFDRILHGWTITEVMTDLNNRGIKTRYGNEWKHQSFNKLLSNEQYIGVYKYSGVRIEGGIPPILDKEVFEGVQKVLGEKKRPRGKKRDTADYFLVGKVFCGKCESPMTGISGTSKTKAKHYYYACNAKHYDHTCDKKNVPKDDLEFSVGLGVKTLLQDQGLVDWLLGGYDDIIRQIREESKVSTLEGQLAEVTVSLDNIMKAMEAGAFNDVIIKRMNELADTKKDIEQAIAVETEALKTFSVDKLRENLYKFRDGDLEDERFLRDLIQNFVRRVLVFDNEIRISFYFGEEKTFPLVKREAGAIVRENVTMLHHSIISRTLLYADHVEITVPIQKRGTVPE

SEQ ID NO: 10064 - protein, 527 aa, Unknown
  Description of Unknown: Integrase B10065 sequence
  cd00338,IPR011109,IPR038109,PF07508,Coil, PS51736,G3DSA:3.40.50.1390,PTHR30461,IPR006119,IPR036162, PS51737,PF00239,SM00857,G3DSA:1.10.10.2600,SSF53041
MPQAVAYCRLSDANERSGSIANQKRKVIEYCERYGLELLQTFVDDGKSGWTFDRPGFKELEDFCKKNKAIQYLIIPHFDRFSRADPIDAMVKERYFRDKLNVKVLQVSEPPETDVLNPTYQIIRFMQAFVANEERNRIIDRTISGMRHSLMNGRYCSKAPFGYLNSHDENNKPIIVIDKDKVDIVKTIFRDYIAGVPVEEIRSKVKKQGFNQQGRSSIQRIVTNPLYAGLIRVPAYKHQPEAIVKGIHEPIVSESDYWSCIDIGKPHKFHQTEDVPLKGVLHCECGKLFTAAPSKGKLGKYYWYYFCNTHRKGNYSAIKIHTSFVQLLQALSFTKEEADLLKVKFIEGMEKFKQEKGKALMTIGLKINKVESQITQIETKYLLNNVSEETYKKVIQEKRIELSHLSNERVKYEADNTVLNQRMEKILSVITDIAFMWERMPLDLKQKFIKVVFGQNLQYTGGTYRTQYLHPAFLPKALILKEKGLLTLSTTLLNSEVLLPSAPSFTAAEPSILDLTDLYSIFGELVA

SEQ ID NO: 10065 - protein, 527 aa, Unknown
  Description of Unknown: Integrase B10066 sequence
  cd00338,PF13408,IPR011109,IPR038109, PF07508,Coil,PS51736,IPR036162, IPR006119,PTHR30461,G3DSA:3.40.50.1390,PS51737, IPR025827,PF00239,SM00857,G3DSA:1.10.10.2600,SSF53041
MKKDLISAVAYCRVSTKSTDQKNSYDAQIKFFREKAEELGYELVKGIGTFGDGIFADRGISGKALTKRIEFKKLTEQVKTLKFKAILVTNASRLARNAVDGMNVIREIKPYDAYIHFLKENLKSCNHSDEFLIDFFMMFSQNELREMSKKIQDGVRKAQGKGVWTAPPPYGYNRLNGYLQINEEEKQVVELMFFLYAEIGYSIDKLVRELNGICIPTKKEKKWQHTTIRHIIENPIYTGLQINHQTEMKDIFINLIEKINEHGQIRNYFEHLQIIDKEIFIKAQEIKKERSQMVENGKKYSSTNVLSNIFFCKYCNASMKRMQRSDKKGQFYYVCSNCHKDRAICKYYNYIKGEEAFDKIMKDVKSFAENIKGRTNLKELYQFYIDKYLNKNFVNKLPEIESEIERLENRKKNYQIMKADGELSKNDFSDRMNEVESELKNLYRNRDKILNIEKEIENIWDIYNYLISTIQNFDIRKSSNGDIKKIITKVEIKTVDNEKLIEVQLNNGLEKDFSTISNEYNMQFIDF

SEQ ID NO: 10066 - protein, 527 aa, Unknown
  Description of Unknown: Integrase B10067 sequence
  PS00397,IPR038109,IPR006119,PS51737,PF00239,G3DSA:3.40.50.1390 ,PTHR30461,IPR025827,SM00857,G3DSA:1.10.10.2600, SSF53041,IPR011109,PF07508,PS51736,IPR006118, cd00338,PF13408,Coil,IPR036162,PTHR30461:SF3
MFTTMAPQAAAVYCRVSSEAQQERQTIENQIEFARKYCDLNNIDIIEIYKDDGITGTLPLDERPAGFQLLQDAKAGKFKLLLIFKLDRLGRSTRVILNAVHDLDAMGVKVRSMTEPFDTSDASGRFLLTILAGVADLERSNILQRMGLGTARAAKEGKYLGGNTPYGYRVDKDGYFEPNHDIIPNINMSEVDVIQLIYDTALEGVSTVKIADRLNALGVPTLYTLRKRKSKKPNLKWLGSTVYRILKSTTYKGIHCFAKKSKHIEREVPPIISVEKWDKVQSILSSNQVKIKGNHIKRNYLLRGIIKCEHCGRAYTGLNKGKHSYYTDNGRFHYNVYGMDKKCFGKTIRQEAVEDVVWESCLEYIRNPKLIVEPIQKEINQSDKVKKEIALVHAKIVSNDAENQRLIDLYKAGLIDLQAVSGEFKKVKDEKAFLQAELDKLEKQLRDYDFIGQVDEAIDLLELLRQKVDTPDVSFEMKRAVVETMISKITVNSSSEKGVFITIYFRFGDKKGGYLCTRFAVRIIIYK

SEQ ID NO: 10067 - protein, 437 aa, Unknown
  Description of Unknown: Integrase B10068 sequence
  cd00338,PF13408,IPR011109,IPR038109,PF07508, PS51736,IPR036162,IPR006119,PTHR30461,G3DSA:3.40.50.1390, PTHR30461:SF3,PS51737,IPR025827,PF00239,SM00857, G3DSA:1.10.10.2600,SSF53041
MIQKTITTIEPLPQLERLIRVAAYARVSSGKDAMLHSLSAQITYYQNYIVSHQGWEFAGVYADEALTGTKDNREEFQRLIQDCKDGKIDLIIVKAISRFARNTATLLETVRLLKSLKVNVYFEEQNLYTMSAEGEMVLTFLASFAQEESRSVSENMKWRIRKDFEQGLIWGSKPQLGYRVVDRRLVLVPEEVDLVKRIFSLYLDGYGFQAIANILNAEGLTGIHGVRWSKMTVDHILKNYNYTGDLILQKTFRIDHLSKKKKKNNGEVDQFLVENAHEPIISKEDFMRVQELIEQRARYFKTKKKPNTIHPFTGIIKCGICGKGFRRKTQKPRIWWACSTFNTQGKDHCSGKSIPEETLIEETKKVLGVESVTIDIIKKKLDHIEAFDGNKLVFYLKNGKVVETTWKDRSRRQSWTPEMKEIARQRALEQHRRKEGK

SEQ ID NO: 10068 - protein, 526 aa, Unknown
  Description of Unknown: Integrase B10069 sequence
  cd00338,IPR011109,IPR038109,PF07508,Coil, PS51736,IPR036162,PTHR30461,IPR006119,G3DSA:3.40.50.1390, PTHR30461:SF3,PS51737,PF00239,SM00857,G3DSA:1.10.10.2600, SSF53041
MKLFDNDGPRNNRIRGHVDKYAIYLRKSRADEEAEQSDNEDTLSRHRRILTDLAARKGYYVEKIYEEVISGQTIEARPEIQQLIKDCYEGKYKGIIVIEVTRLSRGSQGDAQIIMDCLKYSNHNNGILVITPTKTYDIAHSAEDEEYMEFELFMSRREYKMINKRMDRGRKQAVVEGNYMGSSRPYGYNIIKGKKLRTLVPNDDEAPIVKMIFDWFVNENMTTGKIAEKLTLMGIPTYHDEKEWSKHTINNLLVNPVYKGKVRWNNRMAVKTMVNGELVRIRPRRNISDQYMEYDGKHMKYALVSEEMFEKAGKRFTIDRTKSNTKLANPLAGLLYCKKCNTPMRRTTHENSKYNTKERYQHKYTKLCKVKSASIPDVLNAVAYGLKLYIEDFEMQMKDLPSVNKNTIASQIDALNKELLKTQKRLSKLFEAWEDEQISNNEFVDRKTVNNEKIENIKQQISELENTIPEKEELETKTILLSDALKALTDDSVEAKEKNIYLKQIIEKIDYSRENEKEFILDITLK

SEQ ID NO: 10069 - protein, 432 aa, Unknown
  Description of Unknown: Integrase B10070 sequence
  cd00338,PF13408,IPR011109,IPR038109,PF07508, PS51736,IPR036162,IPR006119,G3DSA:3.40.50.1390,PTHR30461, mobidb-lite,IPR025827,PS51737,PF00239,SM00857, G3DSA:1.10.10.2600,SSF53041
VERTITKMPVLPKMPVRKRVAAYTRVSSGKDAMMHSLSAQVSYFSSMIQSNPEWEYVGVYSDEAISGTKDTRENFMRMVEDCRAGKIDMVITKSLSRFARNTVTLLRIVRELKDLGVDVFFEKENIHSTNGDGELMLTILASFAQEESRSVSENCKWRIRNDFAKGIATSWCFMYGYRIKKCVVTIHEKEAAVVRWIFHQYIEGVGTAAIARLLRRHNVKSYFGGVWTAQRVRNLLKNEKYSGDMLLQKRYVVDHLTKVCKHNHGELPQYFVEGSHPAIISRETYQKAMAIMRVNFLKNNISAEAPPHYVFTQKIVCDKCGKNYRRRTSAYEKAWNCATYLEMGKAYCHTKKIPEDILMREAAYVLRIDEFDPDVFTEQIAEIRVPEDNKLVFVFYDGRRVETHWQDKSRRDSWTPEMKKKASEAEARRRQK

SEQ ID NO: 10070 - protein, 526 aa, Unknown
  Description of Unknown: Integrase B10071 sequence
  cd00338,PF13408,IPR011109,IPR038109,PF07508, Coil,PS51736,G3DSA:3.40.50.1390,PTHR30461,IPR006119, IPR036162,PTHR30461:SF3,IPR025827,PS51737,PF00239, SM00857,G3DSA:1.10.10.2600,SSF53041
MNAVIYARYSSYTQTERSIEGQIEDCTRYADGNNFVIVGQYIDRARSGTSADARPDFQRMIRDAEKRQFEAVLVYKLDRFARNRYDSAIYKAKLKKAGVRVVSVTEAISEDPEGVILEAMLEGLAEYYSRNLSQNVKRGMKIAREHGTFTGGRLPYGYGLDGKKVIVDEHEAEAVRYVYSEYARGSTMREIVEELNRRGYKPRTGAKFTTNSFQSVLRSKKYIGQYTFAQEASECAYPRIIEDELYYAVQDRFAAVRRAPAAGKAKIAYLLQGKLFCGHCGANMVGESGRGKGGAVYHYYACANRKKRHTCKKKNEKKDVIEQYVIDQTLEYVLEPERLDYIAGRVAAEYEKEFSDSSILTLQKQLAQIEREMDDCVDVLLEVRKNAFLTQKITEKVQTLTDRKSEIELDLSKLKIACKNRLSQEEIKKWLKSFASGDPLDEEYRRRIIDIFVNAVYLYDDKIVIYYNVKGGKQVTYSEMLEDTAAAEMSECSDSAGSAPPLLAISEKLRLRSVSFGIAIQRREGR

SEQ ID NO: 10071 - protein, 526 aa, Unknown
  Description of Unknown: Integrase B10072 sequence
  cd00338,IPR011109,IPR038109,PF07508,Coil, PS51736,G3DSA:3.40.50.1390,PTHR30461,IPR006119,IPR036162, PTHR30461:SF3,PS51737,PF00239,SM00857,G3DSA:1.10.10.2600, SSF53041
MKLFDNDGPRNNRIRGHVDKYAIYLRKSRADEEAEQSDNEDTLSRHRRILTDLAARKGYYVEKIYEEVIFGQTIEARPEIQQLIKDCYEGKYKGIIVIEVTRLSRGSQGDAQIIMDCLKYSNHNNGILVITPTKTYDIAHSAEDEEYMEFELFMSRREYKMINKRMDRGRKQAVVEGNYMGSSRPYGYNIIKGKKLRTLVPNDDEAPIVKMIFDWFVNENMTTGKIAEKLTLMGIPTYHDEKEWSKHTINNLLVNPVYKGKVRWNNRMAVKTMVNGELVRIRPRRNISDQYMEYDGKHMKYALVSEEMFEKAGKRFTIDRTKSNTKLANPLAGLLYCKKCNTPMRRTTHENSKYNTKERYQHKYTKLCKVKSASIPDVLNAVAYGLKLYIEDFEMQMKDLPSVNKNTIASQIDALNKELLKTQKRLSKLFEAWEDEQISNNEFVDRKTVNNEKIENIKQQISELENTIPEKEELETKTILLSDALKALTDDSVEAKEKNIYLKQIIEKIDYSRENEKEFILDITLK

SEQ ID NO: 10072 - protein, 437 aa, Unknown
  Description of Unknown: Integrase B10073 sequence
  cd00338,PF13408,IPR011109,IPR038109,PF07508, PS51736,G3DSA:3.40.50.1390,IPR006119,IPR036162,PTHR30461, PTHR30461:SF3,PS51737,IPR025827,PF00239,SM00857, G3DSA:1.10.10.2600,SSF53041
MKEKKITKIEALSKLPKKTRVAAYARVSNGKDAMLHSLSAQINYYKKMIQDNNDWQFAGVYADEALTGTKDSREEFQQLLEDSKAGKIDMIITKSISRFARNTMTLLETVRELDKLNVDVFFEEQNIHSISSEGEMVLTLLASVAQEESRSVSENMKWRIKKEFQQGEIWGGRSPLGYNLKNKAFRVIPKEAELVQLIYKLYVDGNGAEAICQILDAKGIKPKESKKWGPTSIIKILSNRNYTGDLLLQKTYLNNHLSKKQVINKGELDRYLVKGNHEAIISNELFDKVQKLKHQRAIKNKSNLPKKKTFLHGLIQCGICGSTYTPKKMRKKDIWICSKSASKGQDVCDSKLVPHNIIVEASNHILEMDQNNEATFKSKVTKIIVQENRMLEFHMKDGKILNYRWKHKSRSKSWTPEMKEQARLRALEQHHGGGENA

SEQ ID NO: 10073 - protein, 526 aa, Unknown
  Description of Unknown: Integrase B10074 sequence
  cd00338,IPR011109,IPR038109,PF07508,Coil, PS51736,G3DSA:3.40.50.1390,IPR006119,IPR036162,PTHR30461, PTHR30461:SF3,PS51737,PF00239,SM00857,G3DSA:1.10.10.2600, SSF53041
MGKIRLNGLYCAYLRKSRRDVELEALGRGDTLARHETQLRALAERLGVRIAMTYREIVSGDTLAERPEARRLLEDVNAGLWDGVLVMDVDRLGRGDSIDQGVIMQSFLYSDTLIVTPDKIYDPSDDSDAEFFEIKLFFSRREYAQIKKRMQRGRLASAMDGCYMGTRPVYGYERVRRQGRKGWTLRVVPEKAGIVLNIYDWYAHGMNGRDAGTLVIADTLNRMGLRTDLGNPFEASYIRQILRNPAYIGKVQWNQRQTVYKIVDGRRVKSRQISDNRILVDGCHEPIVPVELWRQVQAIFDSHGKRPFNANAPVSNPFAGLVLCPVCGHHMQRKPSPSRRGDFLYCPTQRCPTTSAYIAAVEAATLDVLRGWVAEFDAADDAPDAAHSAASAVSAADAARKQRADQRAALQTQLSKQYDYLEQGVYTIAEFKARREELQQKIAALDAADARPDTPAVDPRRLIAPKARSVLEAYSLTASPADKNALLTSVIDHIEYHKTQRGLRNNKPGDNLSIVVYPRLPSNPDL

SEQ ID NO: 10074 - protein, 433 aa, Unknown
  Description of Unknown: Integrase B10075 sequence
  cd00338,PF13408,IPR011109,IPR038109,PF07508, PS51736,G3DSA:3.40.50.1390,IPR006119,PTHR30461,IPR036162, IPR025827,PS51737,PF00239,SM00857,G3DSA:1.10.10.2600, SSF53041
MNRTVQRVVFKNPPKPQATRVAAYGRVSSGKDAMLHSLSAQVSYYSGLIQSHEGWLYVGVYTDEAITGTKEQRDGFQRLMEDCRAGKIDLVITKSISRFARNTVTLLEAVRELKLLGIGILFEEQNINTLTSDGEFMITILASYAQEESLSASENQKWRIKKNFEEGMPWNGRMLGYRYDHGIYKVVPTEAVIVKRIFAEYLSGKGCVAIVNLLNNEGIPSPLGGKWGKTAIMKILRNYAYTGNLLLQRFYRNNHLEKITLPNHGERPMYHVEKSHEAIITIEEYTEVQRLIALRGEQFHKNGGSRNRYPLSGRIVCAGCGQKFRRKTTATGIVWICSTYSYQGKDACPAKAIPDETITQACKEVLGIDEVTADALDSRLTAIRADKNNTLVFCFKDGEEIVKRWYDRSRSESWTDEMREAARNRIKERVVNG

SEQ ID NO: 10075 - protein, 526 aa, Unknown
  Description of Unknown: Integrase B10076 sequence
  cd00338,IPR011109,IPR038109,PF07508,Coil, PS51736,G3DSA:3.40.50.1390,PTHR30461,IPR036162,IPR006119, PTHR30461:SF3,PS51737,PF00239,SM00857,G3DSA:1.10.10.2600, SSF53041
MTVFEMNRSIENALNPKMEQYAIYLRKSRADMEAEKLGEGETLARHKKILTELAARKGLYIGEIYQELVSGETIEARPEIQRLIQDCYAGKWAGILIVEVSRLSRGNQGDAQVILDCLKYANRNNGVLVITPTKVYDVAHNHDDEEYMEFELFMSRREYKMIKRRMDRGREQAVVEGNYMGSYRPYGYNILKTKTARTLVPNEDEAPIVKYIFEWTVKENLSPRKIAERLDSMNVPTYSGDPEWSAATIKTILTNPTYKGKVRWNDRMQVKTMVNGEIVRSRPRSSHSDKYMEYDGKHKDNALVDEETFKAASSRFYADRTKANYKLQNPLAGIMICKHCQKMMQYQAYKHRPTTEPRFLHRQSKMCKVKSAVASDVMNAVVHSLKLYIEDFSMKVDNLPDVDENTIVAQIEGFQKKILQSKRKLAKIFDDYENEVYTANEFVERKAKHNADIESFEKQIIELENSIPEKEEYEDMIISISEALDHVLDPDLDADIKNEYLKRIIDRIEFSRENDEEFILDVFLKP

SEQ ID NO: 10076 - protein, 526 aa, Unknown
  Description of Unknown: Integrase B10077 sequence
  cd00338,PF13408,IPR011109,IPR038109,PF07508, G3DSA:3.40.50.1390,PTHR30461,IPR036162,IPR006119,PTHR30461:SF3, IPR025827,PS51737,PF00239,SM00857,G3DSA:1.10.10.2600, SSF53041
MDTVIYARYSAGPRQTDQSIEGQLRVCTDFCKQRGLTVVDTYCDRHISGRTDERPEFQRLIADAKKKKFAAVVVYKTDRFARNKYDSALYKRELKRNGIQIFYAAESIPDGPEGIILESLMEGLAEYYSAELAQKIKRGMHESALKCQSTGSGRPLGYRVDEQKRFQIDPEAAQAVQIIFDRYIQGESNEAICELLNVRGFRTVQGNLFNKNSINRIIKNRKYIGEYRYQDIVVEGGVPAIISRETFCLAQAEMERRRTRKRPKSPKAEYLLAGRLFCGHCKTPMQGVSGTGKTGNKWYYYYCANTRGKTKTCDKKQVSRDRLERAVVDFTVRYVLQEDVLADLARKVYAAQERQNDTAAEIAVYEKKLADNKKAISNVLRAIESGTATQTLPARLQELENEQVVIEGELAFLRGHKLEFSEDQILFALTKHLEPYPGETEQDYRRRIICDFVSEVYAYDDRLLIFFNISGADGKLKSADLAQIEVSEFDERSVSSTKSIAGRTPAAMITVLSYGFVLATRLESRL

SEQ ID NO: 10077 - protein, 526 aa, Unknown
  Description of Unknown: Integrase B10078 sequence
  cd00338,PF13408,IPR011109,IPR038109,PF07508, Coil,PS51736,G3DSA:3.40.50.1390,IPR006119,IPR036162, PTHR30461,PTHR30461:SF3,IPR025827,PS51737,PF00239, SM00857,G3DSA:1.10.10.2600,SSF53041
VIAIRKTKKAACRPKTAVAYARYSSAGQRDVSIEQQLRDIRAFADREGYTLIHEYADHAKSGFHHTAARADFLAMLSAAETGAFDTIITWKVDRFGRNREEAALYKGQLRRLGVSVVYAMEPIPAGAAGVLTEGMLEAIAEWYSRNLSENVTRGHRDNAAKCISNGCPIYGYRRGPDGRYILQQEEAAVVRSVFSRYGQGFSAATIAAELSAAGMKTVRGCAFSPQSIIRMISNERYIGTYIWADVRVPGGMPAIITPQEWEAAQRMKEKTGRHVEQGQTDFLLTGKAFCGHCGAAMIGDSGTSKTGATHYYYTCQGHKSRKGCNKKSLRKEYLEDAVLRFIVDHCLTGPEREKIADAVIAAQREEEKKSPLASMEKELTETQKKIDNVNSAIESGIWNSSTAVRLKALEDVAADLRLSIDKLKFSQSQLLTRDRVLFFLDKMARYNLADPHRRKQLFDTFLNAVYVYDGYAHIVINCVEGNSRVPLSDLEALDLPPVPPGSDNVTGGAPFVTHPNSRIVIYTIAV

SEQ ID NO: 10078 - protein, 526 aa, Unknown
  Description of Unknown: Integrase B10079 sequence
  cd00338,IPR011109,IPR038109,PF07508,Coil, PS51736,IPR036162,IPR006119,G3DSA:3.40.50.1390,PTHR30461, PTHR30461:SF3,PS51737,PF00239,SM00857,G3DSA:1.10.10.2600, SSF53041
MYIIPQLTPIETLLYSRKSRTDDPNMSVEEVLENHEKILNDWIERNLPGMGPIPQENRYHEVVSGETIDSRPKMKELLKRIESPKVKAILCVEPQRLSRGDLEDIGRLVKLLRYTNTIVITPTFTYDLRDDHDRDSFERELKRGNEYLEYSKKIMRRGRELAVERGCFIGNIPPYGYDRIMIKEGNRKCYTLTPNPEQAKVVKMIFEWYRDGLGSHRIAAKLNELAIPTTKGGKWHAESLNKMRKNEHYIGKVFWNHRKTVRTIEDGELVTSRPINNEYMSFPGKHEPIIDMELWNAVQEIRGQIPPVKRSKETVNEFAGIVYCTCGYAMSLRTYKQKDGSERSAPRLLCTNQHECSTASCTVEEMQNEVVKILQDAIKDFELRIERDASDSVAFHRELVANLEKRLVDLNALEVSQWEKYTMEGMPKHIFDMLNEKVLKEKAEVEQALCTAKDSVPEPIDYENKKAMFSDALDALRDPVVPAKYKNMLLKRCICRINYYRQKKPKEYGNRWGEAAPMELDVHLTV

SEQ ID NO: 10079 - protein, 526 aa, Unknown
  Description of Unknown: Integrase B10080 sequence
  cd00338,PF13408,IPR011109,IPR038109,PF07508, PS00397,PS51736,IPR036162,IPR006119,G3DSA:3.40.50.1390, PTHR30461,PS51737,IPR025827,PF00239,SM00857, G3DSA:1.10.10.2600,IPR006118,SSF53041
LAEKRKALIYARVSTLRQERKDLSIPGQIKRCREKLEELGYTPVRVFEEAKTASESADRRPAFQEAITMCLDKTQGIEAFCVLDSSRFARHRVDSVVYKHELRQRGVKIVYTMRDVDENDIGDMMSEGMEEIFNAVSAILSGRKAKMGMLDKAEKNGLYPGGAPPIGYRWKSAPQGKVFDPDPKWAPLIRRIFGLVLEGKGVIEIAKILRDEGITTPKGKPWRTTSLARLLHNVKYKGDWSYLHVYKKGAHTPIVDPDTFGQVQKIMEARAPNKKGDRTPANPKLYFSGVLYCGECHSRMDSDTGKSKNGRLYFYYVCSGRRKITNECPGLRIPAREFDTSVREWFIRHLISENNVLRCIEALREMIQEHNEGLEYKDKSFQSQISEIDARIERLYTILETSDEFDLSDLAPRIKGLERAKKELREERALVQPLSLPEADERLISTISGELYDLVLNMTPEEFSRCLKKMGVKIFAYKSRKLRITVSPSNFVAEVFAADDRWRAACVSGANTQRITILQRGALYED

SEQ ID NO: 10080 - protein, 526 aa, Unknown
  Description of Unknown: Integrase B10081 sequence
  cd00338,PF13408,IPR011109,IPR038109,PF07508, Coil,PS51736,IPR036162,PTHR30461,IPR006119, G3DSA:3.40.50.1390,PTHR30461:SF3,PS51737,IPR025827,PF00239, SM00857,G3DSA:1.10.10.2600,SSF53041
MSENAVVYARYSSRRQQEQSIEGQLAAAKKYADGKGYTIIAEYCDRAKTGRNDRRAEFQRMLSDCAKRKFSVIIVWKVDRFGRNRYEIAMSKARAKKYGVRVEYVAENISPGPEGVILESVLEGLAEYYSLQLSQNVSRGKLESAKKHHVIGGFLPYGFRAASDKSYELDPDQAPIARQIFERYAAGETVSQLLIWLDESGIRNARGTKFTKTTLPRMLKDERYIGTYTFKDIIRDEDAIPAIVDKKTFQKVQVMLKKNKRMPSHAWDYTEYLLTGKLFCGHCGSMMAGMSGFGKLGTKYGYYACSDRRHGGSCKKKNVRQDWIEPLVIEETMKLLQDEDLFQQIVDAAWSFYQEEAAANEEIDAMASELHDVEKGISNLVKAMEAGAISDALVSRLQDLEDQKAGLEKAIAQAELEAGPELTRDHIEFFLLKFREKDPEKEEDRKALIDTFVNSIYLYDDKMTMTFNYRPGGTGEMKQITLSDLDDGVRLSTHLFQWTGHSRTLSGEPITVRVWRHVIIITIDLI

SEQ ID NO: 10081 - protein, 526 aa, Unknown
  Description of Unknown: Integrase B10082 sequence
  cd00338,PF13408,IPR011109,IPR038109,PF07508, Coil,PS51736,G3DSA:3.40.50.1390,PTHR30461,IPR036162, IPR006119,PTHR30461:SF3,IPR025827,PS51737,PF00239, SM00857,G3DSA:1.10.10.2600,SSF53041
MGKVTVIPATRDFHTGVVKNSIYRKRVAAYARVSTDHEEQRTSYEAQVDYYTKYIQGRADWEFVRVYTDEGITATNTKHRDGFNEMIADALAGKIDLIITKSVSRFARNTVDSLTTVRKLKEKGVEVYFEKENIYTLDSKGELLITIMSSLAQEESRSISENITWGKRKFFADGKVYLPYKRFLGYKKGEDGLPEIVPEEAEIIRLIYSLFLEGKTTCAIADILTQKGIPTPSGKLVQWSFSTVESILTNEKYKGSALLQKVFTVDFLTKKRKANEGEVPQYYIEDSHPAIIPPVEFEMVQEEMRRRKRISHNYSGNNIFASKIVCAECGGYYGPKVWHSNDKYRRIIYRCNRKYSKGEHKCETPILTEDGIKAAFITAFNLLIAKKEEVLEQCRYMQALLSDTTEIDAELGAAVEEMNFVKELLIKCVENNTKVQQDQEEFWNKYNLLEQRYEKAKTRVEELQVIRKEREHKLENIGGFMFEIHERDDALEAFDDRLWCVTVETVKVQTDGKFTVVFKNGLEIVV

SEQ ID NO: 10082 - protein, 526 aa, Unknown
  Description of Unknown: Integrase B10083 sequence
  cd00338,IPR011109,IPR038109,PF07508,PS51736, IPR036162,PTHR30461,IPR006119,G3DSA:3.40.50.1390,PS51737, PF00239,SM00857,G3DSA:1.10.10.2600,SSF53041
MNNLNPNGLYCAYLRKSRRDVELEAMGQGETLARHEKQLTDLAARLGIRIARTYREIVSGDTIAERPQVQQLLQDVNAGLWDGVLAVDVDRFGRGDSIDQGVIMQSFMYARVLIITPDKIYDPADDSDAEFFEIKLFFSRREYNMIKKRMQRGRLASAVDGCYMGSRPVYGYERVKLQGRKGWSLKAVPQKAAIVRSVFDWYAHGMDGQDVGAAVIADRLNQMGLRTDLGNRFEPSYIRHMLQNPVYIGKVQWNQRTTKYAIRDGKRVHSRPKNADPVLVDGRHEGIIDPALFARVQQMFASHEKRPKNKQADVANPLAGLIVCAQCGRHLQLKGDKNRRAGFLGCVTQRCPTCATSIDVVEGVVVDALRGWISAHEARADAPTPQPRADVCATEAARAQLTDQLIDLQAQRKKNFDLLELGVYDVPTFKERRADLEARISEVQSALAALDAPPKPDPVAVILPQVRTVLGSYDLTATPAEKNALLRSVIDHITYAKTQRCFRNNAPTDHLSLTLYPRVPSDVDDV

SEQ ID NO: 10083 - protein, 428 aa, Unknown
  Description of Unknown: Integrase B10084 sequence
  cd00338,PF13408,IPR011109,IPR038109, PF07508,PS51736,IPR036162,PTHR30461, G3DSA:3.40.50.1390,IPR006119,mobidb-lite,PTHR30461:SF3, IPR025827,PS51737,PF00239,SM00857,G3DSA:1.10.10.2600,SSF53041
VIQKVAFPQKKPFLLKRTAAYARVSSGKDAMLHSLSAQVSYYNQLIQSNPEWLFCGVYADEALTGTKENRAEFQKLLNRCRRGEIDLILTKSISRFARNTVTLLETVRELKTLGVDVYFEEQRIHSMSSDGELMLSILASYAQEESYSASENKKWQMRKDFEQGKVGSMRMLGYRRTKSGKLEIVPEEAEIVRMIFLYYLSGMGKLAIAKKLNEQQICTVRGCAWTTEDVRRTLRNEKYTGNLLLQKSFRENHITKKKVANIGQLPQYFVAGSHEAIISQEQFDAVQKQMAERQKKYAGSCTINRYPFTQKIRCACCGKYYRRKTTVTGVVWICSTYNTKGKKYCPTAKQIPENTLISACCDVLEISEFDAERFAEQIEQIQIPAPNELQFCFSDGTEQTVSWKDRSRSESWTAEMREKARQKKWRQS

SEQ ID NO: 10084 - protein, 526 aa, Unknown
  Description of Unknown: Integrase B10085 sequence
  cd00338,PF13408,IPR011109,IPR038109,PF07508, Coil,G3DSA:3.40.50.1390,IPR036162,PTHR30461,IPR006119, PTHR30461:SF3,PS51737,IPR025827,PF00239,SM00857, G3DSA:1.10.10.2600,SSF53041
MSENAVVYARYSSRVQQEQSIEGQLAAAKKYADEKGYTIIAEYCDRAKTGRNDRRAEFQRMLSDCAKRKFSVIIVWKVDRFGRNRYEIAMNKARAKKYGVRVEYVAEHISPGPEGVILESVLEGLAEYYSLQLSQNVSRGKLESAKKHHVIGGFLPYGFRAASDKSYELDPDHAPIARQIFEKYAAGETVSQLLIWLDESGIRNARGTKFTKTTLPRMLKDERYIGTYTFKDIIRDEDAIPAIVDKKTFQKVQIMLKKNKRMPSHAWDYTEYLLTGKLFCGHCGSMMAGMSGFGKLGTKYGYYACSDRRHGGACKKKNVRQDWIEPLVIEETMKLLQDEDLFQQIVDAAWSFYQEEAAANEEIDAMAAELHDVEKGISNLVKAMEAGAISDALVSRLQDLEDQKAGLEKAIAQAELEAGPELTRDHIEFFLLKFREKDPEKEEDRKALVDTFVNSIYLYDDKMTMTFNYRPGGTGEMKQITLSDLNDGVRLSTRLFQWTGHSRTLSGEPITVRVWRHVIIITIDLF

SEQ ID NO: 10085 - protein, 526 aa, Unknown
  Description of Unknown: Integrase B10086 sequence
  cd00338,PF13408,IPR011109,PF07508,Coil, PS51736,G3DSA:3.40.50.1390,IPR036162,PTHR30461,IPR006119, PTHR30461:SF3,IPR025827,PF00239,SM00857,SSF53041
LNFGIYTRKSYFTDTSDSVKMQLETCEEYIRRIFDHVDSITPYEDDGFVRSDIDRPAMNQLREDVADGLIDCVVIYRIDRVCSDMMDFCTFYTFLKEKGVKFVTVKDGIDTTTPIGEAMMYLAVIFSGLEIGNDALRIRDNLNHLAARGFWCGGSAPFGYDIIEVGAGGSKKHKTIVKNEEQHEEKERLIDILLDNNFTLQQMETYCRQQGIKSQNGKFLSTTQLHQIFRSPYCCPDSAEIYDYYEKKGCIIDEGSPRELWDGKHGVMVYGRTKEIRVNHKKKHIQAPPEEWRVSIGYHEPTISAERWLQVQDHFGKNKFEKKKKHETTLLKGVLRCKCGRLMTLARKSRADGSVGTWYHCPRRERAGVEACDCKAIKAELLDEEVLKIFRAIEHDPEVLKKYIREEKKTTDSGDKIKKKIAETEKKIGKLTSALAASAKSSAAKYIIAEIEDLDVELMRLKREEAAALQEKRRNAQSLQSAENKRKTIMELLANFDSFTMDEKNEIAKSVIREATWDNETLFIML

SEQ ID NO: 10086 - protein, 439 aa, Unknown
  Description of Unknown: Integrase B10087 sequence
  cd00338,PF13408,IPR011109,IPR038109, PF07508,PS51736,IPR036162,PTHR30461, G3DSA:3.40.50.1390,IPR006119,mobidb-lite,PTHR30461:SF3, IPR025827,PS51737,PF00239,SM00857,G3DSA:1.10.10.2600,SSF53041
MEIEKIAALPKLKRKIRVAAYARVSSGKDAMLHSLSQQVSYYNNYIQRHNDWMFVGVYSDEAITGTKEDRAGFQRMLADAKKGLIDLVITKSISRFARNTVTLLKSVRALKDLNVGVYFEEQNINTLSGSGELMITILGSFAQEESKSASDNQKWRIKANFEAGIPWGAKLYGYKFVKDHLEVIPEEAKVIKKMTDYFLEGLGSAGIARRLNKEGILTRAGKAWGESSIRVILGNYYYTGNMVLQTGFRENHITKKRVNNNGEKPKYVVEEAHEAIIPIDTFNKIQEELKRREAISNHSHGPTITPFSKMIVCGKCGCSYKRKTTRYKHIWCCRTNVEKGASLCNAKMVPEDVLYELSKEVLNINEFDEDLFKDKIKQIKVLDNNEVVFILSDDTEILKCWTPKSRSEAWTKEKRELARQREITRRSTNAKDNSNTTED

SEQ ID NO: 10087 - protein, 526 aa, Unknown
  Description of Unknown: Integrase B10088 sequence
  PF13408,IPR011109,PF07508,Coil,PS51736, G3DSA:3.40.50.1390,IPR006119,IPR036162,PTHR30461,PTHR30461:SF3, IPR025827,PS51737,PF00239,SM00857,cd03768, SSF53041
MRFASYTRKSIYSDKSDSVDNQWRMSQDYAEMHFHGQIDSFQRYCDEDFTGANTNRPDLQRLMSDVKNGMVDVLIAYQLDRISRDVKDFANIYSILEEHNVKFVSIKENIDTTTPIGRAMMYVTVVFAQMERETIAARVTDNMIGLAKKGFWTGGNPPRGYVRQRININGRNHVSIVPDPEGTAYVLKIFDTFLDNNFSLQSMERYFMNNKIRTESGAFFSSTQIYKILTMPYCVEATPEVYNYYENKGCVMDPDSPREKWDGSHGVMIYGRSTEKNHKHELQSPNKWIVCVGTHEPFMSADKWLAVQNKLSKNKFIKTMKYDVPLLKGILRCSCGSIMCVSRKKKVNGDISSWYYCLKRMRQGEDACSSSQIKVDLLDEKVLDIFRSIQHDPSLVNDFVQKDEQKTPLVSSKDISAQITTYETKIGRLAATLALASNESSSATKYIVSEMEKLDKELQELKHELSVSLIEERNHSNEVLNTTGKVSEISRLIDGFSDFTSTERNSIMKNVLSGCTWNGETLFVTF

SEQ ID NO: 10088 - protein, 526 aa, Unknown
  Description of Unknown: Integrase B10089 sequence
  cd00338,PF13408,IPR011109,PF07508,Coil, PS51736,IPR036162,IPR006119,G3DSA:3.40.50.1390,PTHR30461, PTHR30461:SF3,IPR025827,PF00239,SM00857,SSF53041
MNFGIYTRKSYFTDTSDSVKMQLETCEEYIRRIFDQVDSITPYEDDGFVRSDIDRPAMNQLREDVADGLIDCVVIYRIDRVCSDMMDFCTFYTFLKEKGVKFVTVKDGIDTTTPIGEAMMYLAVIFSGLEIGNDALRIRDNLNHLAARGFWCGGSAPFGYDIIEVGTGGSKKHKTIVKNEEQHEEKERLIDILLDNNFTLQQMETYCRQQGIKSQNGKFLSTTQLHQIFKSPYCCPDSAEIYDYYEKKGCIMDDGSPRELWDGKHGVMVYGRTKEIRVNHKKKHVQAPPEEWRVSIGYHEPTMSAERWLQVQDHFGKNKFEKKKKHETTLLKGVLRCKCGRLMTLARKTRADGSVGTWYHCPRRERAGVEACDCKAIKAELLDEEVLKIFRAIEHDPEVLKKYIREEKMTTDSGDKIKKKIAETEKKIGKLTGALATSAKSSAAKYIIAEIEDLDVELMRLKREEAAALQEKRRNAQSLQSAEYKRRAIMELLANFDNFTMDEKNEIAKSVIREATWDNETLFIML

SEQ ID NO: 10089 - protein, 526 aa, Unknown
  Description of Unknown: Integrase B10090 sequence
  cd00338,IPR011109,IPR038109,PF07508, Coil,PS51736,G3DSA:3.40.50.1390,IPR006119, IPR036162,PTHR30461,PS51737,PF00239, SM00857,G3DSA:1.10.10.2600,SSF53041
VENFISDDNRPYAMYLRKSRKDLEAEEHGEGETLARHLNILEILAKNMKIAVFDEYIYKEIISGETIEARPRMQELLDKVEQGFFKGVLVVEIERLARGDSIDQGIVARAFKVGNAKIVTPVKIYDPNNEFDEEYFEFGLFMSRREYKTITRRLQTGRIMSAKEGKFVGSTPTYGYSKTKLKGQKGYMLIVNDQESKIVKLIFDLYINKKMGSSKIAKQLDDLSIMPRRGIHWSYSTIQDILSNTHYIGKIKFNNRVTVKNIKNGKIEKSRHKYANQEVIYVDGLHESIIDNDTFEKAQELKKNKYITRKSVNLNLKNPLAGILKCKKCGLTITKGNVRGKSYLYCKNQYCDNIGNYLDNIEDKILSFLEIWLKDTNLIIPNIKNDNSLTLKQDILKNKENLLNISKLKIDNIYDLFEEKVYDKNIFLERSNKMNETISTLIEEIKKLKDEINSLNSLQVDSITFIPKLEYVLRNYKKTDDIETKNKLLKDIIDKIYYLKDTKGNRWHDESFEIWILPKIKSNFIL

SEQ ID NO: 10090 - protein, 526 aa, Unknown
  Description of Unknown: Integrase B10091 sequence
  cd00338,PF13408,IPR011109,IPR038109,PF07508, Coil,PS51736,IPR036162,IPR006119,PTHR30461, G3DSA:3.40.50.1390,PTHR30461:SF3,IPR025827,PS51737,PF00239, SM00857,G3DSA:1.10.10.2600,SSF53041
MSENAVVYARYSSRRQQEQSIEGQLAAAKKYADGKGYTIIAEYCDRAKTGRNDRRAEFQRMLSDCTKRKFSVIIVWKVDRFGRNRYEIAMNKARAKKYGVRVEYVAENISPGPEGVILESVLEGLAEYYSLQLSQNVSRGKLESAKKHHVIGGFLPYGFRAASDKSYELDPDQAPIARQIFERYAAGETVSQLLIWLDESGIRNARGTKFTKTTLPRMLKDERYIGTYTFKDIIRDEDAIPAIVDKKTFEKVQIMLKKNKRMPSHAWDYTEYLLTGKLFCGHCGSMMAGMSGFGKLGIKYGYYACSDRRHGGSCKKKNVRQDWIEPLVIEETMKLLQDEDLFQQIVDAAWSFYQEEAAANEEIDAMASELHDVEKGISNLVKAMEAGAISDALVSRLQDLEDQKAGLEKAIAQAELEAGPELTRDHIEFFLLKFREKDPEKEEDRKALIDTFVNSIYLYDDKMTMTFNYRPGGTGEMKQITLSDLDDGVRLSTRLFQWTGHSRTLSGEPITVRVWRHVIIITIDLI

SEQ ID NO: 10091 - protein, 437 aa, Unknown
  Description of Unknown: Integrase B10092 sequence
  cd00338,PF13408,IPR011109,IPR038109,PF07508, PS51736,G3DSA:3.40.50.1390,IPR036162,IPR006119,PTHR30461, PTHR30461:SF3,IPR025827,PS51737,PF00239,SM00857, G3DSA:1.10.10.2600,SSF53041
MGRKITKLAVSEPIPTRKRVAAYARVSSGKDEMLHSLAAQVSYYKEYIQSQQGWEFAGVYADEAVTGTKDNRAEFIRLLADCKAGKIDMVITKSISRFARNTVTLLETVRGLCELSIDVFFEEQNLHTASTNGELLLTILASYAQEESRSVSENCKWRIRKDYQEGKLTGGVHMYGYDFRDGMLVVNPQEAEVVRMIFRDYLSGMGRNAIMRKLIRLGVPTKLGGRWAENTVASILTNEKVVGDLCLQKSFISDHLTKQKRVNRGELPKYYVEGAHEAIIDRATFDAVQAEVARRAYESKPASREPRNEFSGIIRCGRCGANFNRKINGIGTKYAKANWACATYTTHGKDHCAAKRIPEDILRQKCAEALGSAAYNAVDFMARVAAITIPEDGVLVFTFKDGMQKTILWEKHSRRDSWTHEMKNKAKDEAQRRLGNG

SEQ ID NO: 10092 - protein, 526 aa, Unknown
  Description of Unknown: Integrase B10093 sequence
  cd00338,PF13408,IPR011109,IPR038109,PF07508, PS51736,G3DSA:3.40.50.1390,PTHR30461,IPR006119,IPR036162, PTHR30461:SF3,PS51737,IPR025827,PF00239,SM00857, G3DSA:1.10.10.2600,SSF53041
VRVCRDYVERAGGRIADDLVFADVAISGTTSARPGLQALLAAVETGTVDVVVTEDLSRIGRDVGINDRVLKSLRSHGARLLAINDGIDSRQHSAKLLGTIKSAMAEGYIDEIKHRTRRGMDGLFGAGMSTGGKTYGYRSVPAGDASGRMRLEIDNEQAAVVRRVFGWYVAGVGIRMIAERLNTSAILSPRGGKWSHTTVNSMLANDIYQGVVFFNKRQYERDSASGKRGKSMRARSEWLRDDRPDLRIVDAITWDRAASKRADTHKTYTQGKRPKAGYPLSGLLVCDVCGDFMTIGGGSPGRRYYWCSAYRKGHGCTNTQSILEQSLRKWVLDQIRDTAGAPKLLEAMRAAWASSLGSKDREIKSEITQRRAALTRTETQISALLEYVADGNATPSILAKLKEKEDYAELQRATLVRLAAELGSVPMIPSIEQMRAFLRELPEAAQIRPVESRELLRGMVRDAVIRCRPARDGYDVEFKLVPSALLGIGIAPTVAGTMSSGSCGGAIVPLGIMADVIISGTCPLVY

SEQ ID NO: 10093 - protein, 526 aa, Unknown
  Description of Unknown: Integrase B10094 sequence
  cd00338,PF13408,IPR011109,IPR038109,PF07508, Coil,PS51736,G3DSA:3.40.50.1390,IPR036162,IPR006119, PTHR30461,PTHR30461:SF3,IPR025827,PS51737,PF00239, SM00857,G3DSA:1.10.10.2600,SSF53041
MNTVIYARYSAGPRQTDQSIEGQLRVCTDFCKQRGLTVIDTYCDRHISGRTDERPEFQRLITDAKRKKFEAVVVYKTDRFARNKYDSAVYKRELKRNGIQIFYAAEAIPDGPEGIILESLMEGLAEYYSAELAQKIKRGMHESALKCQSTGSGRPLGYRVDEQKHFQIDPESAQTVQTIFEQYIKGESNAAICELLNSRGLRTAQGKPFNKNSINRIIKNRKYIGEYRYHDIVVEGGMPAIISKDTFNLAQAEMERRRTRKAPKSPKAEYLLAGRLFCGHCKGPMQGVSGTGKSGNKWYYYYCGNTRGKNKTCDKKQVSRDRLERAVVDFTVRYILQEEVLEELARKVHAAQERQNDTASEIAFYEKKLADNKKSIANVLRAIESGAATQTLPARLQELENEQAVILGEISFLKGKRLAFTEDQILFALMKHLEPYPGESEQDYRRRIISDFVSEVYLYDDRLLIYFNISSENGKLKSADLSNIEGGEFDEGLVRSTNLITGRTPEVTIVVLPYGFVLATQIKDRL

SEQ ID NO: 10094 - protein, 526 aa, Unknown
  Description of Unknown: Integrase B10095 sequence
  cd00338,PF13408,IPR011109,IPR038109,PF07508, Coil,PS51736,IPR036162,PTHR30461,G3DSA:3.40.50.1390, IPR006119,PS51737,IPR025827,PF00239,SM00857, G3DSA:1.10.10.2600,SSF53041
MSTAKKKLTTCQPKTAVVYARYSSHGQRDVSIEQQLRDIRAFAEREGYTIIHEYADRAKSGFKNSDRRAEFQAMLMAAASGAFDTVIAWKVDRFGRDRRESSMYKGQLADVGVSVVYAMEPIPDGAAGCLTEGMLEAIAEWYSRNLGENVRRGQHDNALKCLSNGHIPLGYTTGADHHLVIKEDEAATVREIFELYSEGYSLSAIEKKFESEGIRTKKGCVFRKMSLLGILENEAYIGVYRFGDIRIPGGMPAIIDQDLFDLCQEQRKKTARHARACNQTYLLSGKTFCGFCGTKMYGASANSSKRRFNYYVCNKKKAGRFCPDSRSIHKEALEGPVIDIAFNRILQGERLDQLISMSVDILNRKKESSTVSQLEKERRDILRRIDNITLAISEGIWTKQTASLLDELNKRADNLQKEISYCHMTGKQHDHEMRLRFMKEKLANGDMTDPYCLQTLVNTFINSITVYNDYARIVLNLEENIDTIPIDELPPLSKLPDWSNFAFGNVGQGQLYALETHPVIAFKIAI

SEQ ID NO: 10095 - protein, 444 aa, Unknown
  Description of Unknown: Integrase B10096 sequence
  cd00338,PF13408,IPR011109,IPR038109,PF07508, PS51736,G3DSA:3.40.50.1390,IPR006119,PTHR30461,IPR036162, mobidb-lite,IPR025827,PS51737,PF00239,SM00857, G3DSA:1.10.10.2600,SSF53041
VENKERIVERVQFPDAQKVKLLRTAAYARVSSGKDAMLHSLSAQVSYYNKMIQSNPEWLFCGVYADEALTGTKENRQNFQKLLSECRAGRIDLIITKSISRFARNTVTLLETVRELKELGVDVYFEEQNIHSISPDGEFMLTLLGSYAQEESYSVSENQKWRIRKDFEQGRLGSITMLGYKRDENGTLIIVPEEAEIVRMIFNDFLSGMGKNAIANKLLAMGIPTKGGGLWTAWSVRRILKNEKYCGDILLQKSYRENHITKRKMPNHGELPQYYVEEAHEPIISKETFIAVQNLLQEKKEYFTPDKPTTVTYPFTGMIHCGCCGKYYRRKVQKYRTLWICWTYNARGKKFCPKSKQIPEDILYDKVCEVLQLDEFDNEVFQSEIESILVPRPNVLTFLFKDGHEQTVHWQDHSRSEAWTAEKRSQAAECGKKGAAAKERRRKK

SEQ ID NO: 10096 - protein, 525 aa, Unknown
  Description of Unknown: Integrase B10097 sequence
  cd00338,PF13408,IPR011109,IPR038109,PF07508, Coil,PS51736,IPR036162,IPR006119,PTHR30461, G3DSA:3.40.50.1390,PTHR30461:SF3,IPR025827,PS51737,PF00239, SM00857,G3DSA:1.10.10.2600,SSF53041
MKKTNKKTRAVIYIRYSSHKQADSFSIEYQVSECTKFIEMQGYTLEGTYIDEAKTGKKTAGRDAFDSMIFDASQGKFDKIVVFSFSRSFRNTRDALNYNHDLMEKHGIMIESVIERIDMSDPHGKFSGTNLFAMHELQADIIAAHVKSGMYFAAQQGYYLGGFVPFGYELFGTGEFSRGKERKKYRPNDSEAAIVREMFDLYADGFSLDFVQTMLRTKGIRGRRGDIIGKQTVARILKNPFYIGTREYSIKGYEPIVVENIIPKIIDLETWHKVQARHAENKPAQPRRTKRLYSLTGKITCAKCGGHMFGTYKGDKRSTNWHYAYYHCANKKIKGTCDALNVRKDQIDAYCLEQIKKHILNEEAMRSIAEQIAAAAGDSSEEMMAAQNKAIKRRDKVAGILKNIKKDVYEGEITKEQGDELSADYSKELLELENTLSTLRAALASAISSESVYLYLQELLSYYGADNDELTKMLFDKLIDKILVHDDRIEVHLIVFPFARSGDNKPLGQPHYSLSLDTTRKDLKA

SEQ ID NO: 10097 - protein, 525 aa, Unknown
  Description of Unknown: Integrase B10098 sequence
  cd00338,PF13408,IPR011109,IPR038109,PF07508, Coil,PS51736,IPR036162,IPR006119,G3DSA:3.40.50.1390, PTHR30461,PTHR30461:SF3,IPR025827,PS51737,PF00239, SM00857,G3DSA:1.10.10.2600,SSF53041
MNIAAYCRVSTDKTDQLNSLEAQKAFFAEYTQRTGDTLVRLYADEGISGTKIKNRKEFLRMMADAEHGLFEMVVVKDISRFARNTVDLLQSIRKLKSLGVETQFLTANMTSMGNSEFVLTIFGALAQEESANTSKRVKFGKKMNAEKGRVPNIVYGYDKTIGDYFNLTINQEEADVVRQIFYWYTREGYGSAKISILLNQRGLKTKRNCSWNQNGVRRILNNELYIGKIINGKEEVIDFLTGKRTERNEEDWLIVDRPELQIVDSQTFEQAQQIMASRTELFKLSHERQSNKHLFSTLIRCKECGWSFRRTVRTYKNTYVRWVCSHHNGRGESECSNRITIDEEELVTVLQEYFANLLRFKKDVILYVIKEFQRVYRAKDENVEYEKELNAQIAKLQKSRQKYMNMYADDLITREEVNEKIGGMRKEIERLENELKMVAFHLTKAEHLEAVLRQTFKEIEDIADVRQMTNAQLKRIIQKIEIDKDGNVDIYLRLFSDLGLEETVLVNDICTQGCNKIERFIWAIK

SEQ ID NO: 10098 - protein, 416 aa, Unknown
  Description of Unknown: Integrase B10099 sequence
  cd00338,PF13408,IPR011109,IPR038109,PF07508, PS51736,G3DSA:3.40.50.1390,IPR006119,IPR036162,PTHR30461, PTHR30461:SF3,PS51737,IPR025827,PF00239,SM00857, G3DSA:1.10.10.2600,SSF53041
VAKIKQITRLPVSRPKLVKVAAYARVSTSTCRQLSSISAQVSYYSRLIQSTPGWDYAGVFIDEGTTGTKMRGRQGLADLMALAHDGGVDIVLCKSISRLARNTVDLLQIVRKLKNLNVSIRFERENIDTSTNDGELLLTLLASFAQEESASLSANVKWAIRNRYKDGGTNSFFIYGYVWTQGKFVINHDEAQIVQRLFSNYLEGISPEKTANQLNSEGLRSRGGGLFHGSVLRRMLENERYKGCQLLQKTFNKTIRSTSRTPNDGVLTKYWVEQALPVIIEPALFDKVQQEIARRRQIGPAATPSLNTGVFTGRIRCGTCGRNYQRKTRRYASGNYYHYWRCWSACKGQGNPCGGHNLRETMLQSICATTLNLEEFDEHAVENHIVIIEAFPDHLMIHLRDARSIKIALDKQGRLT

SEQ ID NO: 10099 - protein, 525 aa, Unknown
  Description of Unknown: Integrase B10100 sequence
  IPR038109,IPR006119,PS51737,PF00239,G3DSA:3.40.50.1390, PTHR30461,IPR025827,SM00857,G3DSA:1.10.10.2600,SSF53041, IPR011109,PF07508,PS51736,mobidb-lite,cd00338, PF13408,Coil,IPR036162,PTHR30461:SF3
MQQALNAVIYARYSSHSQQEQSIEGQLRDCYAFAEREGLHVVGEYIDRAITGRTDERPDFQRMIDDASKKQFQRVIVWKLDRFARNRYDSAHYKAKLKKYGVKVISATENISDEPEGIILEGLLESMAEYYSANLSKHVRRGQRESIINGTYLGGVPPIGYKVENKRLVIDERTAPTIRYMFEQYAKGVSKRQIIDELNARGIRNKKGKPLTLSSMQAALRNEKYIGIYRYNGQEVTGGCDALIDEATFRKVQERLDKVKHAPAAAKAKIDYLLQGKAFCGYCGTRMVGESGRGKMGSTYHYYACGKRKKEHTCKKKNEKKDFIEWYIVEQTVEYVLTPDRMDYIAAALVAQYEKDFGDNRITDYEKQLERINGEIRSLVDTLAVCPPSARQPIFDKMELLDVQKTDLEIDIAKLRVAARVRPSEEQIKAWLKQFCKGDLDDMEFRERIIDVFISSVYLYDDKVIIYYNIEGGKQVSYMEMIESTEEPPFADDPQGSSGVRISNDTPRQKSTSFDRSLSILLFHS

SEQ ID NO: 10100 - protein, 525 aa, Unknown
  Description of Unknown: Integrase B10101 sequence
  cd00338,PF13408,IPR011109,IPR038109,PF07508, PS51736,G3DSA:3.40.50.1390,IPR006119,IPR036162,PTHR30461, PTHR30461:SF3,PS51737,IPR025827,PF00239,SM00857, G3DSA:1.10.10.2600,SSF53041
LRAVIYARYSAGPRQTDQSIEGQLRVCTDFCKLKGLTIVGEYCDRHISGRTDERPEFQRLIADAKKKNFEAVVVYKTDRFARNKYDSAIYKRELKRNDIQIFYAAESIPEGPEGIILESLMEGLAEYYSAELAQKIKRGMTESALKCQSIGSGRPLGYYVDDQKRFQIDPESSQTVQIIFDMYIKGESNAAICELLNSRGLRTVQGNPFNKNSINRIIKNRKYIGEYKYQDIFVKDGMPRIISDEVFTLAQREMEKRRTRKKPKSPKAEYLLAGRLFCGHCKEAMQGVSGTGKSGRKWYYYYCANARGKRGCDKKQVTKDGLERSVVDLTVNYILQEDVLRGLAQKVYAAQERQNDTAAEIALYEKQLADNKKSIANILKAIESGTSTKTLPERLQELEEQQTVLLGEIAYLKSKKLDFDEDQILFMLMQYLEPFENETEQEYHKRIITCFVAEVYVYDDTLRIFFNISNPDGKLQSTDLEKIEGQEFDERIISSTNLIAGRTPKVELIILPYGFVLASHLTSPL

SEQ ID NO: 10101 - protein, 525 aa, Unknown
  Description of Unknown: Integrase B10102 sequence
  cd00338,PF13408,IPR011109,IPR038109,PF07508, Coil,PS51736,G3DSA:3.40.50.1390,IPR006119,PTHR30461, IPR036162,PTHR30461:SF3,IPR025827,PS51737,PF00239, SM00857,G3DSA:1.10.10.2600,SSF53041
MARKITMIPQTINPQTRTAMDTRTKRKVAGYARVSTDYEEQITSYEAQVDHYTNYIQSRDDWEFVKVYTDAGISATNTRHREGFNQMVEDALAGKIDLIITKSVSRFARNTVDSLTTVRKLKEKGIEVHFEKEGIYTLDSKGELLITIMSSLAQEESRSISENVTWGQRKRFADGKVSLPYSHFLGYKKGEDGLPEIVPEEAEIVRFIYRSYMNGQTSYAIAKTLTERHIPTPAGKENWRQSTIESILTNEKYKGSALLQKKFTTDFLTKKTKINEGEVPQYYIEESHEPIISPEDFEEVQAEFTRRKKLGRKYSGSTMFSAKLVCGDCGHFFGSKVWHSTSKYRRVIWQCNNKFKGEHFCSTPHLYEDEIKIRFISAFAAFFQNREMVLETCRMLLEDLSDTSALDTKIEMLTMELNDIGTLIREHIQKNAESVQNQDSYNLRYDELTEQYERKKGLLQKMQQKRIEHQSRIESMASFLRTLEKTNEPIDYFDDSIWRTTIEKVTVFHDGRMVFQFVDGTEIEA

SEQ ID NO: 10102 - protein, 525 aa, Unknown
  Description of Unknown: Integrase B10103 sequence
  cd00338,IPR011109,IPR038109,PF07508,Coil, IPR036162,IPR006119,PTHR30461,G3DSA:3.40.50.1390,PTHR30461:SF3, PS51737,PF00239,SM00857,G3DSA:1.10.10.2600,SSF53041
MFTYHGVTISANEILKYSRKSRTDDPLLTIEEVLEKHERILNEWCERNLGETVPACNSFQEIVSGETIEARPDFQKILRLIESPKYKAILVVDTQRLSRGDLEDAGRLIKLLRYTNTFVITPDMAFDLSEEYDRERFKRELERGNDYLEYYKKINWRGRLESVRSGYYIGSIAPYGYDKDTIPDGRKKRPTLKINEREAEAVRLIFDLYVNQDMGMTNIAHQLNGLGYKTRKGELWKTVTIRDILLNVHYIGKIKWNWRKAVNVVADGEISKTRPKSKDYYIFDGKHPAIIDEELFERAQAKLGKNPRTNTSHKLRNPLAGLVYCQCGKAMAYRQYKDTDGNDRCAPRLLCNNQMYCHTQSVTYDEILDKVKDVLRACISDYKLKIKNEGTNTLINKNNQIKRLESKLEELNKKELSQWEKYSEEAMPKAIFEKLNAKVLAEKESTLKALEMARSTAPTVEDFKERLMLFTDALEALQNPEAPAELKNRLLKNCIKKIVYTRPKGGNRWKSEGFELDITLNVQPI

SEQ ID NO: 10103 - protein, 525 aa, Unknown
  Description of Unknown: Integrase B10104 sequence
  cd00338,IPR011109,IPR038109,PF07508, Coil,PS51736,IPR036162,PTHR30461, G3DSA:3.40.50.1390,IPR006119,PTHR30461:SF3,PS51737, PF00239,SM00857,G3DSA:1.10.10.2600,SSF53041
MISEQTKSEISGKYVGSPDQYAMYLRKSRADLEMEALGEGETLTRHKNMLEALAAKHDISMNQITVYKELVSGDSLDERPEALRLLADVFAGKYKGVLVVEIERLARGNTKDQGEVADAFTFSNTHIITPAKVYDPNNEFDQEYFEFGLFMSRREYKTIKRRLEAGKLQSVKEGNYLLSVPPYGFDILKKSRKERTLVEKPEESKIVRMIFDWYTEDRKPTSWIANQLNIMKVPSRSGREWARATVKDILFNAHYIGKVSWGKQQTIKEKDPVTGKVVKRRKNSGNEQHYEGKHEGFISEEQFWKVRTIYGSNAPAKVNTALVNPLSGILRCCDCDRAIGFQRYGDNRIPRFQHPFGKACKKNSIFQPVVMDALIESLENDIADCQVKMEAKEDHSEVLHHEAVIQSLEAELEKLEKRKRKLLDSWESEDGMYTKDEFIERKQMYTKNIDDLKTKIAEAKKNAPAPVDYSEQITTLHAIINCIKNEDVDAKTKNVFLKRFIEKITYDTIDNGVNKKVPVLEVYMK

SEQ ID NO: 10104 - protein, 525 aa, Unknown
  Description of Unknown: Integrase B10105 sequence
  cd00338,PF13408,IPR011109,IPR038109,PF07508, Coil,PS51736,IPR036162,IPR006119,PTHR30461, G3DSA:3.40.50.1390,PTHR30461:SF3,IPR025827,PS51737,PF00239, SM00857,G3DSA:1.10.10.2600,SSF53041
MARKITMIPQTINPQTRTAMDTRTKRKVAGYARVSTDYEEQITSYEAQVDHYTNYIQSRDDWEFVKVYTDAGISATNTRHREGFNQMVEDALAGKIDLIITKSVSRFARNTVDSLTTVRKLKEKGIEVYFEKEGIYTLDSKGELLITIMSSLAQEESRSISENVTWGQRKRFADGKVSLPYSHFLGYKKGEDGLPEIVPEEAEIVRFIYRSYMNGQTSYAIAKTLTERHIPTPAGKENWRQSTIESILTNEKYKGSALLQKKFTTDFLTKKTKINEGEVPQYYIEESHEPIISPEDFEEVQAEFTRRKKLGRKYSGSTMFSAKLVCGDCGHFFGSKVWHSTSKYRRVIWQCNNKFKGEHFCSTPHLYEDEIKIRFISAFAAFFQNREMVLETCRMLLEDLSDTSALDTKIEMLTMELNDIGTLIREHIQKNAESVQNQDSYNLRYDELTEQYERKKGLLQKMQQKRIEHQSRIESMASFLRTLEKTNEPIDYFDDSIWRTTIEKVTVFHDGRMVFQFVDGTEIEA

SEQ ID NO: 10105 - protein, 525 aa, Unknown; identical to SEQ ID NO: 9619
  Description of Unknown: Integrase B10106 sequence
  cd00338,PF13408,IPR011109,IPR038109,PF07508, PS51736,G3DSA:3.40.50.1390,PTHR30461,IPR006119,IPR036162, PTHR30461:SF3,IPR025827,PS51737,PF00239,SM00857, G3DSA:1.10.10.2600,SSF53041

SEQ ID NO: 10106 - protein, 525 aa, Unknown
  Description of Unknown: Integrase B10107 sequence
  cd00338,PF13408,IPR011109,PF07508,Coil, PS51736,IPR036162,IPR006119,PTHR30461,G3DSA:3.40.50.1390, PTHR30461:SF3,IPR025827,PF00239,SM00857,SSF53041
MNFGIYTRKSYFTDTSDSVKMQLDTCRDYIERSFEEVTSVTPYEDDGFVRSDIDRPAMNQLREDVANGLIDCVVIYRIDRVCSDMMDFCTFYTFLKERGVKFVTVKDGIDTTTPIGEAMMYLAVIFSGLEIGNDAIRIRDNLNHLAARGFWCGGMAPFGYDILEVDVGSKKHKTLVKNEEQHARKMELIRILFERDLSLQQMETYCRQNGIKSWTGKFLSTTQLHQIFSSPFCCPATPEIYDYYAEKGCIMDEGSPRDMWDGSHGVMIYGRTTEKRVNRKKKHIQAPPDQWRVSIGYHEPTLDAETWLRIQGHFGRKKFDKKMKHETTLLKGVLRCKCGRLMSLARKKHVDGSVVTWYHCPKRERAGVEACDSKAIKAELLDEKVLEIFREIEHDPEAVRKYVQEEKKTADSGDQIRKKIHETEKKIGKLTAALATSEKSAAAKYIIAEIEELDAELVKLKRKEAEASLEKRRNAAMLKSAQEKREEVVRLLANFDDFTMDEKNEIARAVIREAVWDNETLFIVL

SEQ ID NO: 10107 - protein, 525 aa, Unknown
  Description of Unknown: Integrase B10108 sequence
  cd00338,PF13408,IPR011109,IPR038109, PF07508,Coil,PS51736,IPR036162, IPR006119,PTHR30461,G3DSA:3.40.50.1390,PTHR30461:SF3, PS51737,IPR025827,PF00239,SM00857,G3DSA:1.10.10.2600,SSF53041
MDKTPAVIYARFSSENQRQESIEGQIRECRIFAERNGFDVIAEYTDSALTGRTDQRPGFQKMVKDAEKRQFKMVIVWKLDRFARNRFDAATYRAKLKKYGVEIVSAKEFIPEGAEGIIVESLMEGMAEYYSANLAENVRRGLYESALQRKALSKMPYGFRRSADGKYEIDPETAPVVQRIFQEYIDGKTPRDIAADLNADGLLNSVGRRFQLNNIQLILRNEKYTGMYRYGDIEDPEGIPAIIPADLFQRAQDLRAARYRRRSPRVDNLYLLSGKTFCGLCGRLMTGEYAKSKTGDLHYYYYCRGAKMHECDAKRIKRDLLEDLIKEELTKILTSGEFQEEITAMILEHPDEEQEALRRNIEIQKKSLAEEARKHENMLKAIENGIFSAGLSKRLQTAEKRISGLQRELAEMQLQVLPPITREDIEFSFYELNRMRSESPLNWQKIIDILVSRIYVFPDHIVILLNHPGANNRITVDLETLKSSTEPQDGQPFDTLSNQALVWWFGCPALWVPLQGLHNCKIRAI

SEQ ID NO: 10108 - protein, 447 aa, Unknown
  Description of Unknown: Integrase B10109 sequence
  cd00338,PF13408,IPR011109,IPR038109,PF07508, PS51736,G3DSA:3.40.50.1390,IPR006119,PTHR30461,IPR036162, mobidb-lite,PTHR30461:SF3,IPR025827,PS51737,PF00239, SM00857,G3DSA:1.10.10.2600,SSF53041
MRKITKLETKKIDLPKLKRVAAYARVSVERGRTLHSYSAQVSYYNDLIQKNPEWEFAGVYADLGISGTGIEKRNDFKRLLQDCEEGKIDIILTKSVSRFARNTVDLLKVVRHLKKLGIEVRFEKENINSLTGDGELMLSILASFAQEETISISNNVKWGIRKKFEKGIPNGGFIIYGYRWKNKKLEVVPEEAEVVRYIYDNYLQNKAYQKVASELNELGYKAYKGGKFSPSSVREILSNITYTGNLLLQKYYIVDPIIKKEKKNTGELNQYYVENSHEAIISMEQFEAVQKEFERRNKLGQRANQSLHITCFTSKVKCPLCGKSYRRSGKKNRMGKDYTYYVWVCRTKSEKGAKYCGAKVIPEEELKIAACNALGWNEFDSDLFDETIEKVVPIGEDMIEFYPYDGGVIKQEWHSTARQRGWNEERKRTTTEKRLKTLEARKNAKEC

SEQ ID NO: 10109 - protein, 525 aa, Unknown
  Description of Unknown: Integrase B10110 sequence
  cd00338,PF13408,IPR011109,IPR038109,PF07508, Coil,PS51736,IPR036162,PTHR30461,IPR006119, G3DSA:3.40.50.1390,PTHR30461:SF3,IPR025827,PS51737,PF00239, SM00857,G3DSA:1.10.10.2600,SSF53041
MYEDIKRVCLYARFSSHNQTEQSIEGQVRVCKEFCQRKGFNVVETYVDRATSASHDIEKRTSFLKMISDSAKGKFQAVVVYKLDRFARSRYDAATYKYRLKKNGVVLISATENITNTPEGIILESVLEGMAEFYSAELSQKITRGLRESALKQNSAGGQIPLGFKVENKKYVIDEETAPIVREAFQRYADGEAVADICRDFNLRGYKSSKGAEFGKCSFTRMFKNEKYIGTYVYGKYKFENAIPAIIDMKTWRIVQARMNKQKKTHTRGKQKYHYLLTGKIFCGHCGYQMSGNSSGSVDYGFYQCYGKASYKSSCNKKNINKDIIEELVIKDALSLLTDERIQEIAKVACNTNKTYIQEETNLYKIKDKLHEVEVSLSNITKAIESGEAPVTLVKRMNELEAEKRTLLKEQKKESSDVVQLDEEQVIYWLSQFKNGDIHDEEFCRNVIDLFVNSVTVWDEPDETQKVVIAYNLQSENKKTYRLNPDGKSATDMNGNTSVLNPNPLIVNGVLLHSLSIGERNPSCA

SEQ ID NO: 10110 - protein, 525 aa, Unknown
  Description of Unknown: Integrase B10111 sequence
  IPR038109,PS00397,IPR006119,PS51737,PF00239,G3DSA:3.40.50.1390 ,PTHR30461,IPR025827,SM00857,G3DSA:1.10.10.2600, SSF53041,IPR011109,PF07508,PS51736,mobidb-lite, IPR006118,cd00338,PF13408,Coil,IPR036162,PTHR30461:SF3
VIPAAIYARVSTEDQAERYGLAGQLHELRAAAAARGYVIPSGMEFVDDGHSGATIDRPALHRLREVAKARAVDVILVHDPDRLSRRLAHQLVLLEDLERAGVRVEFLSVERTDGAEGRLLLNVRGAIAEYEREKIKDRTLRGKREKARRGLVVGGPVPFGYRLDAGSAGGLAIREDQAAIVRLLYAGLVDAGRSIRGLVLELRASGIPPARGAAWSKTSVRRLLTDPLYRGQAYFNRRARTGSSRRWRPEADWIVVAVPAIVTADLWARAAARLADNKTAAAGRPASRVYLLRGLLRCGSCGRALEGLPSHGRRFYRCAGRQRLAEPRCTAPLRAADRLEAALWAAVTGLLRQPQVLTAKVEAWQLAAGVRDVELRSEVVHLTAELGRLTRQEQRTLDLYVEADLEVPGLRERLERLRARRRAVQARLDQAQAASTRTQDAAAQQGAVQRACEAVLLGLEAAPPEVRQQILRALIDRITVSQDHVTVEGLLPSGPGGLESSRPSTRSAQFQPRPAFRLVVPMGAR

SEQ ID NO: 10111 - protein, 525 aa, Unknown
  Description of Unknown: Integrase B10112 sequence
  cd00338,G3DSA:3.40.50.1390,PTHR30461,IPR006119,IPR036162, PF00239,SM00857,SSF53041
VNASPFQPGDLVVGYCRYSGGEEQGLKNTSTDEQEQAIRAFCEQNGLVLVKVYADPFVSGRSTKGRDHYLEMMSDLLHEKRKKNDVKGCLVWDWERMHRNVDQAMLDASRLRMAGYKIYSLQQPIVDNGPFARVMEAMYMASAQNQSDMISADVRRALQSNFQKYKVIPRSCIPDGWIPVAVDMGFYSNGQPRTGYRAEPDPDLAPRIKNAIEKRMKGATIEEMTMIIGGIFANKPREYIRRLMLKPLLYGMMTYGGTTIEDYCTPIIDKDTFDRLQLYNEYAPKEHVKPQGHYSKNRPLLSNLLYCGVCGKKAFLDRRRAKGRLYETYYCNDKHVGFRREILDKFVIEKGIELLSDEQYRKDVRSITEGLKTPFPSRPDNLSLTAEIAKIDRKIARISSAIEDTDDAPATLVKRLSELEKERAELMSQAATADPDTTDSILAEADRLRLSIIDVLKNEKSGLEEIRTALSLFVSSVVIYPEHRVLIRYTLPGMAEVASTTTRKVSAPPRAVSVYSQLIESLFIL

SEQ ID NO: 10112 - protein, 525 aa, Unknown
  Description of Unknown: Integrase B10113 sequence
  cd00338,PF13408,Coil,IPR036162,IPR006119,G3DSA:3.40.50.1390, PTHR30461,IPR025827,PF00239,SM00857,SSF53041
MTPNNSPFKIGDKVVAYCRYSGGEEQGLKDTSTDEQEAAIRRYCDDHGLDLVKVYADPFVSGRSTKGRDHYLEMMSDLLHAKRKKTGIEGLIAWDFERVHRNYDQAQLDAARLRMAGYKIYSLQQPIIDNGPFAHVLEAMYFASAQNQSDMISADVKRALQHNFVTHKVIPRSCIPDGWIAVPVDMGVYSNGEPRIGYKAEPDPDMVEPIRQAVQARIAGAPIREVKHLLGEAFARHPEKVEKLFVKPLLYGSMTYGGTTIEDYCAPIIDRATFDRLQVANSAGKAKVRRPGSGAYSKDRAMLSGLCFCGVCGERAYINRRTAKGRVYESYYCNHKHAGFRKELLDQLILDAAEDLLTGEKYETSKAALMRSMVRDQAQKAQDAEAIRQQISVIDRKIDGLTEAIADNPHSRALALKLADLEAKRENLSASMESPAEAQFEAFGDVLDDLRDNTLSILKDEKSSTDDLRTALSLFVSAITLYPNGEVVITHTLPGLAKVESELSGLPTAPPEAEALYSQFHIHAW

SEQ ID NO: 10113 - protein, 525 aa, Unknown
  Description of Unknown: Integrase B10114 sequence
  PS00397,IPR038109,IPR006119,PS51737,PF00239,G3DSA:3.40.50.1390 ,PTHR30461,IPR025827,SM00857,G3DSA:1.10.10.2600, SSF53041,IPR011109,PF07508,PS51736,IPR006118, cd00338,PF13408,Coil,IPR036162,PTHR30461:SF3
MKRAVIYARVSTERQADDGLSIESQIEACQRKAGELGAVVVHVFKDEGISGTTRARPGFRNAIQRCEAGDVHYLLCWSSSRFARDQHDAITFKRELVASGTKLVYAQSTIDLDSMEGWMLDSFQQVVDESYSRQVSADTKRSMIKAAREGFFMGGRVPFGYQVVPAGDGKRRRLAPLEHEATVIRQIFRLALEGRGAYFIALQLNLQGLKMRGKNWSKNTVLHMLKSEVYVGNVIYNKFHRKGRGQRPPEAWVRVPSHEPLVSQADFDQVQSGLDDRTPFNGRSPGNVQHIFSGMLRCGLCQASLQMTNGTGRGGKLYHYYACRGSCQGKPCRFKNLPADSFDEWMLSELLDKVLNVDVIQGVLDRLDEAATRWVKDRAARRTAMVLELRNAEHKRDKLFELMESLGKDTPDLRGTLERVNQLTDQVQRLELGLVQLEDEPDPMVGTPRVTAQEAADIMRRTVTQNSDVRAVRAFVATILEWIDVEADQLVVHYKPDCLVQVDGQPVRSKHKWLPDLGSNQGPTD

SEQ ID NO: 10114 - protein, 525 aa, Unknown
  Description of Unknown: Integrase B10115 sequence
  cd00338,PF13408,IPR011109,IPR038109,PF07508, Coil,PS51736,IPR036162,IPR006119,PTHR30461, G3DSA:3.40.50.1390,PTHR30461:SF3,PS51737,IPR025827,PF00239, SM00857,G3DSA:1.10.10.2600,SSF53041
MPAVQVIPAKKTKIAVAGINITKRRVAGYARVSSDTEEQLNSYEAQVSYYTETINAKPDWELVKVYTDEGISAVNTKRREGFKAMINDALDGKIDLIVTKSVSRFARNTVDSLSTIRKLKEKGVECYFEKENIWTFDNKGELLITIMSSLAQEESRSISENVTWGKRKSMADGKISLPWSSFLGYEKGEDGLPKIVPEQAVIVQRIFKMYMSGLSFNVIAKQLTANGIPTPKGKKVWQMATVRSILQNETYRGSKRLQKTLTVDFLTKQKKINNGELPMFYIEKSHEPIIPPDEWDAVQVEIERRKVLGRPLSCHSPFATRIICGECGGYFGSKLWGSNTKYKRTVWQCNDKYKEKGMVKCTTPHISEDQIKDGFITAFNKLMSTRDNIIDDCCLAQKLLCDTDEIDKELVELEHELEIVDALAHQSIEENKRSVIDQAEWSERNVKYLQRYDNATNRIEELTKQKNEKIGKSKMLELFIKSIEQQELVITDFDESVWNMSIDKAIVGSYAELTFKFKNGVEITV

SEQ ID NO: 10115 - protein, 463 aa, Unknown
  Description of Unknown: Integrase B10116 sequence
  cd00338,PF13408,IPR011109,IPR038109,Coil, PS51736,G3DSA:3.40.50.1390,PTHR30461,IPR006119,IPR036162, PTHR30461:SF3,IPR025827,PS51737,PF00239,SM00857, G3DSA:1.10.10.2600,SSF53041
MYMTQSAPELYGVRVVKYIRCSHDDQVLHGDTLEAQNEILDDFIARNHCVLIDTFIDEALTARKKYTNRKEFVRLLDGVRRHDFDVILFTKLDRWFRNIGDYHKIQEVLEANGVQWKAVTESYDTTTTNGRLHINIRLSVAQDECDRDSDRIKDVFAFKLKNKSFVTGSVPRGLMLDAEKHVVPDPEWKQFALDAFDMLEVTGSVRKSLFALQERYSCIYSYSSFIRMLKNPLYKGMYRDDPQFCDPLIDPDRFDHIQTLIKKNVRQRRSGTQFIFSGLLTCDVCGRSIAGYTTGRRRKDGSITRKPRYRCTAWNMNHSCTNNKSWMEEVLEDRVLALVRPSLSAYIADYDVEDGGGRGRNPAADAARIRTKLKKLYDLFMDDLIDRDLYKSEYDQLNAQLQEALTAADHPRKDVSELKKFLSQPWEDVYKDFSVQEKNAFWKSFVDTMRIREDGSIADIIFL

SEQ ID NO: 10116 - protein, 525 aa, Unknown
  Description of Unknown: Integrase B10117 sequence
  cd00338,PF13408,IPR011109,IPR038109,PF07508, Coil,IPR036162,IPR006119,PTHR30461,G3DSA:3.40.50.1390, PTHR30461:SF3,PS51737,IPR025827,PF00239,SM00857, G3DSA:1.10.10.2600,SSF53041
MIKNKIPSCSPRTAVAYARYSSAGQRDVSIEQQLREIHAFADREGYTIVHDYADHARSGFKNTSARTAFQSMMAAAENGTFDTVISWKVDRFGRNREESALYKGRLRRFGVKVVYAMEPIPEGSAGVLLEGMLEATAEWYSRQLSENVTRGMTDNAHRCLYNGTRILGYSRGPDGHYVLNPEEAAVVRNIFQLYRSGLSAASICRQLNAQGLKTSRGKSFSPESLLRILSNERYTGTYIWGSIRVPDGMPAIVDQKTFQEAQRMKTKTARHVEQGAVDFLLTGKAFCGHCRSAMIGDSGTSKAGNRFYYYSCQAHKARKGCQKKSIGKDRLEDAVIDFVLDYVLSDAMIEKNADAIMALQAEELKSSPLAAMEAEQAEVKKQIDNINNAIAAGVWSTSTVEKLKALEATAENLRVSIETLRFSQTQLMDRDRVIFFLHQFTKGDRNDPLRRQHLIQTFVNSVYVYDDHLWIVVNNTEGNFRYNLPDILPEESPGDSSPGCSDSVSSGVPNVLHPNTRVTAFRLAI

SEQ ID NO: 10117 - protein, 525 aa, Unknown
  Description of Unknown: Integrase B10118 sequence
  cd00338,PF13408,IPR011109,IPR038109,PF07508, PS51736,G3DSA:3.40.50.1390,IPR006119,IPR036162,PTHR30461, PTHR30461:SF3,PS51737,IPR025827,PF00239,SM00857, G3DSA:1.10.10.2600,SSF53041
MTPAIYARYSSDNQRETSIEDQLRAGAARCEREGWPAPRCYTDAATSAGTPTLLRDGGARLMADIRAGLIDILIIEALDRCWRDIVDQERTVREIERHGVRIIGMQDGYDGQREGREVHRGIMGVLNEEQLRIIGKKTHRGLAGQVARGLRAGGLPYGYLSAAADGGHRLAPHPEHAPVVLEIYQRFAAGESPRAIAHALNFRRVPSPRGSTWALSAITGHAGQQSGILRNPIYRGDYVWNKSRWVKNPDTGIRARIERPESEWQRQTLPELKIIDDDLAAAVRARLRGPRARGKGRPARSPWSGLLRCGHCGGPLIVADARCYGCGRHKDRGATVCPGLRIPRPLLESRLLDIAREHLTSPAAVATLRAEIARLTREHNATHGQRATHAHRRLADLEKQIPRLVDAIASAGWSPALIERLNQAETERAALIAEKTTAPDAPTAEIVPRLMERYQAALDRLPDMIARTPDTARDALRELLGEITVIKDQAGDVWAELPEYGGGMLLNVVAGARFVIKKRRRYRVA

SEQ ID NO: 10118 - protein, 525 aa, Unknown
  Description of Unknown: Integrase B10119 sequence
  IPR038109,IPR006119,PS51737,PF00239,G3DSA:3.40.50.1390, PTHR30461,IPR025827,SM00857,G3DSA:1.10.10.2600,SSF53041, cd17753,IPR011109,PF07508,PS51736,cd00338, PF13408,Coil,IPR036162,PTHR30461:SF3
MARKRESSTRAVIYARYSSHAQNDQSIDGQLHDAYAFAERNGYTVIGEYIDRALTGTKDTRPDFQRMIRDAEKGQFQLVIVWKLDRFARNRYDSAIYKAKLKKSGVRVVSVMENLTDGPEGIILEGILESMAEYYSANLAENVRRGMSELVRRGLFPGGPVPLGYRVENHRLVIDERTAPIVREMFRRYADGEGPAEIARDLNRRGYKTQTGQAFTPSSFKLISNPAYVGRYTYAGEVVEGAADAMIDEETFRRANERRTMNRRAPAQHKAADRYLLSGKAFCGHCGKPMIGESGRGKLGTVYHYYACAQKKKTGACRKHNEKKDFVERFVCEQTVRYILDPERQQLIAERVVDAYNREFNDGQVEALERRLRRIDADLNKLVDNLLDLPKSAREKVISRMEQLDAEKAEAEADLAKARITAGIRITAAQVTAWIRSFADGDLEEPDFRQKLIDTFVNSVYLYDDKLVIFYNLRGEAPSTIPTKQDVDSAVEGSDFEGDGVPPIPKSEPRLIWVHRMMGIVILRG

SEQ ID NO: 10119 - protein, 525 aa, Unknown
  Description of Unknown: Integrase B10120 sequence
  cd00338,PF13408,IPR011109,IPR038109,PF07508, Coil,PS51736,IPR036162,IPR006119,G3DSA:3.40.50.1390, PTHR30461,PS51737,IPR025827,PF00239,SM00857, G3DSA:1.10.10.2600,SSF53041
MAGRIRAAVYARYSSHSQTEQSIEGQVHAAEELCRRKGYELVEQYCDRAKTGRNDNREAFQRMLKESAKRRWQVLIVWKVDRIGRNREEIAINKYRLKKNGVTVEYAAENLPDTPEGVILESVLEGMAEYYSLQLSQNIRRGIKESAVKGKRNGGTMALGYKRGEDGKPVIDERTAPAVRYAYEHYAAGETEAEIIRALNEKGYRTSRGQEFQRTSLRTVLKNPAYKGLFTALGGEVVIEGGCPPIVSEELWDRVQAVRASGAARRGSERAGRHEFILTGKLFCGHCGRPMTGITGTSHTGARHTYYICHGRKTHSGCRKRSEPCQYVEELVIRETLELLKDEAVVDEIVQAVYAYYEQTDTETDDLEGLRAGIRDAQRRRANLIRSLEQGAPYDVLASRMKEIEDEEASLRSELDRLEALASERLTEDHIRFFIERFRDMDHSDRKVQRLLVHTFINAVYLYDDGPVKIVYNFSEHTEVVPLSEVDGLGDPTVRLEASVLHFGAHRRTIMYRGCAYVILFIPRH

SEQ ID NO: 10120 - protein, 525 aa, Unknown
  Description of Unknown: Integrase B10121 sequence
  cd00338,PF13408,IPR011109,IPR038109,PF07508, Coil,PS51736,G3DSA:3.40.50.1390,PTHR30461,IPR006119, IPR036162,IPR025827,PS51737,PF00239,SM00857, G3DSA:1.10.10.2600,SSF53041
VATPEKQITIIPGVIKYTEGFESGYPGKRKVAAYARVSTGSEEQLTSYEAQKDYYEMKIKENPVWQYAGIYADEGISGTSTKGRVQFNKMVSDALSGKIDLIITKSVSRFARNTVDSLTTIRNLKEHGVEVFFEKENIYTLDAKGELLISLMSSLAQEESRSLSQNISWGKRKRFADGKVSLPYKHFLGYEKGENGHPKIVEEEAEIIRLIYKMFLAGNSAHTIAKHLTSEGIKTPAGCDVWQQTTVLSILRNEKYKGEAILQKTFTADYLTKKVKDNTGEVPKYYVQYSHPAIISPDVYDLVQLELERRKNSKGYITSKNALSGKLICGECGATYGSKLWHSNSKYKRTVWHCNQRHKKYCKTPPLNDWEIHAAFVDELNRLVENKDELTGRLESMLAGVLDSTQYNARLRRQKAQRDACLNELNSLIRRNATVALDLEAYEKEFTKLSDEFEETRATCERLSERIDNLERRRVQASAYLEKIRNLPGVIESFDENLWNGLLDRVIVNSKKDMRFIWKDGTGEE

SEQ ID NO: 10121 - protein, 431 aa, Unknown
  Description of Unknown: Integrase B10122 sequence
  cd00338,PF13408,IPR011109,IPR038109,PF07508, PS51736,G3DSA:3.40.50.1390,PTHR30461,IPR006119,IPR036162, IPR025827,PS51737,PF00239,SM00857,G3DSA:1.10.10.2600, SSF53041
MGRVITKTVPAAPSLAKRQRVAAYARVSSGKEAMLQSLAAQVSYYSALIQRRADWEYAGVYADEALTGTKDSRPGLQRMLAACRDGKVDMIITKSISRFARNTVTLLETVRELKLLGVDVYFEEQNIHSMSGDGELMLTILASYAQEESLSASENCKWRIRKQFENGELAGLRFMFGYRIVKGKVEIDTEQAAVVRMIFEDYIGGMGGGKIAKKLKDMNVATVHGATWDAERVIVILKNEKYAGNALLQKKYVADHLSKRKIWNKGALPQYFAEGTHPAIIDAATFDRAQAVMEERRRSCGTKGDTGSRYPFSGVILCVNCGKKYKRKSSGEKAAWQCASYLQEGKAACPAKQIPEAVLCSTGAEVLGLDEFEADIFKERIAEIRVTEFNTLLFEFCDGHAIEKVWQDRSRRESWTIEMRQAACEKAKGRQ

SEQ ID NO: 10122 - protein, 525 aa, Unknown; identical to SEQ ID NO: 9982
  Description of Unknown: Integrase B10123 sequence
  cd00338,PF13408,IPR011109,IPR038109,PF07508, Coil,PS51736,IPR036162,PTHR30461,IPR006119, G3DSA:3.40.50.1390,PTHR30461:SF3,PS51737,IPR025827,PF00239, SM00857,G3DSA:1.10.10.2600,SSF53041

SEQ ID NO: 10123 - protein, 524 aa, Unknown; identical to SEQ ID NO: 9625
  Description of Unknown: Integrase B10124 sequence
  IPR038109,IPR006119,PS51737,PF00239,G3DSA:3.40.50.1390, PTHR30461,IPR025827,SM00857,G3DSA:1.10.10.2600,SSF53041, IPR011109,PF07508,PS51736,mobidb-lite,cd00338, PF13408,Coil,IPR036162,PTHR30461:SF3

SEQ ID NO: 10124 - protein, 524 aa, Unknown
  Description of Unknown: Integrase B10125 sequence
  cd00338,PF13408,IPR011109,IPR038109,PS00397, PF07508,Coil,IPR036162,IPR006119,PTHR30461, G3DSA:3.40.50.1390,PTHR30461:SF3,IPR025827,PF00239,SM00857, G3DSA:1.10.10.2600,IPR006118,SSF53041
LPDEPEDKSPSTSELYHFWYVLTRGVFFIPKINTLDQGDDIMTTQSTVEIGAAYIRVSTNDQTELSPDAQLRVILESAKADGYVIPKEFVYIEKKGVSGRRADNRQEFQRMVATAKTQPCPFKRLYLWKFSRFARNQDESVFYKSVLRKKCGVEIKSVSEPIADGMFGRLIESIIEWFDEYYSFNLSGEVMRGMTEKALREGYQCSPSLGYAAVGEGKPFIIIEKEYVIVEFIHQSFHKGKDMTAIAREANDMGFRTKRGNRFDRRGIYRILVNEFYNGIVVWNGIKFQGAHETRPSITDIFESNQQRIKEEYRPKSRRETSSCQHWLSGILKCSVCGASLSYNRSNDQKKRPDFFQCWKYGKGVHRESCSVSVKKAEEAVLTSLRQVMADQSVQYEYIRKPDQKVISEESRLSEALEKVAMKEMRVKDAYESGIDSLEEYKANKLRLQDERTHILDELEQLKETPDEPEGPDMQEILKRITTVYDLLMDPDIDNVTKGNAVRRIIKKIVFDRQMNEFHFYYYA

SEQ ID NO: 10125 - protein, 524 aa, Unknown
  Description of Unknown: Integrase B10126 sequence
  cd00338,PF13408,IPR011109,IPR038109,PF07508, Coil,PS51736,G3DSA:3.40.50.1390,IPR036162,IPR006119, PTHR30461,PTHR30461:SF3,PS51737,IPR025827,PF00239, SM00857,G3DSA:1.10.10.2600,SSF53041
VRAFIYCRFSSHKQQELSIEGQRDICLEYAQKHNITVVGEYIDRARSARTENRADFRRLIRDATAGVVDCVLVWRYDRFFRDRAESALYRRQLEAAGVRLISVTEFIPDGSAGVITQGMIETVAEYFSAKLSEDVSRGMNKAAQHCQVTGSAPLGYRPGPDKRWQIDPVGAELVRRIFEWYDSGQPMEQLARQFNQEGHKTAKGVAFNRSSFSTILRNKKYIGIYEYNGTVSVAGGCPRIIEDDLFFQVQRRLEANRHRPGAYKAQASYYLSGKLFCGLCGSPMTGTAGTSRHGVRHHYYTCNNRRAKVCDKKNERLEPIEAAVLQAALDVLTDENIAYISKEVERRCAENSDSIALLSSLRAQLADVERQIKNIGAAIAQGIITETTKQLLMDAEADRAGLRQQIEKAKVQASLEVKAEAVACWLDGFRHGNRNDPDFRREVYGALVHSVFVYDDYLKIIFNVDRAGAVVVPFSAVEKAAVSESPRAVSGSYLERSGVPKKQIPKWVSAFLHMQRKGLEWFYP

SEQ ID NO: 10126 - protein, 524 aa, Unknown; identical to SEQ ID NO: 9776
  Description of Unknown: Integrase B10127 sequence
  cd00338,PF13408,IPR011109,IPR038109,PF07508, PS51736,IPR036162,IPR006119,G3DSA:3.40.50.1390,PTHR30461, PTHR30461:SF3,IPR025827,PS51737,PF00239,SM00857, G3DSA:1.10.10.2600,SSF53041

SEQ ID NO: 10127 - protein, 524 aa, Unknown
  Description of Unknown: Integrase B10128 sequence
  IPR038109,IPR006119,PS51737,PF00239,G3DSA:3.40.50.1390, PTHR30461,IPR025827,SM00857,G3DSA:1.10.10.2600,SSF53041, IPR011109,PF07508,PS51736,mobidb-lite,cd00338, PF13408,Coil,IPR036162,PTHR30461:SF3
MAKTVTTIPATISRFTSSPINENKKRRTAGYARVSTDSEEQNTSYEAQVDYYTNYIKSRDDWEFVEVYTDEGISGTNTKHREGFKRMLADALAGRIDLIVTKSVSRFARNTVDSLTTVRQLKEKGIEIYFEKENIWTLDSKGELLITIMSSLAQEESRSISENVTWGQRKRFADGKVTVPFNRFLGYDRGEDGNLIVNPEQAATVNLIYSLFLQGMTPFGIASKMTADGVLSPGGKERWNAGSVRSILTNEKYRGDALLQKSYTVDFLTKKKKVNEGEIPQYYVKNNHPAIITPDVFDMVQRELARRGQSRGRHSGIHLFSGRIKCAQCGNWYGSKVWHSTDKYRRTIWRCNHKFKNDEICTTPHLTDEEIQNFYLSALRKLLADKDEIIAAFELAQDAAFDLSALTAERDELQNELLVVSELMHQCINENAHIALDQADYQKRYNGLTDRFDKAKTRLEAVTGEISDKQARQATIEAFLDELKRLDGVTEFQHALWYSLADFMTVYSKDDVWVTFKDGTVIQA

SEQ ID NO: 10128 - protein, 524 aa, Unknown
  Description of Unknown: Integrase B10129 sequence
  cd00338,IPR011109,IPR038109,PF07508,Coil, PS51736,G3DSA:3.40.50.1390,IPR006119,IPR036162,PTHR30461, PS51737,PF00239,SM00857,G3DSA:1.10.10.2600,SSF53041
MQAIAYIRISTKDQSNFSIEGQQRYITDHCAKNNMHLQQTFIDDGRSAKNFDRPNWKALEQFIQHHKQVNYLVVVKYDRFSRNTAKGLQKIEELERRYNIVIISIFEQVFIDYDSPYFFKQRADMLVQAEFELHVIRDRTKFGIHQALSNGRFIGKAPVGYTNARDEKNKPIIIINPATAPIIHQIFIDYLAGHPFGFIRQKAIAAGLKSKDRSFIPAALTNPLYAGMVHVPAYRKEPAKTIDAQHPAIISKHQWYEVQRRLQTRKNPKVQMADEVPLRANVAHTCGRMLTAGKSKGQRQYYWYYKCNTCPRTNYSAITMHKKFDEMLRGLSFNQQHIQYLISEAETQLSQRQQQSTNAIVALRKELQQTMQDMEAMEEKYIRNQIKADTYEKFHHRYSSQIAALNYRVKQHGADAGQQWRAFRSGLHHLENLQWLWQNATLMQKHEFLRLVFNSSLYYNGEVYRTPYIMEIFHHNLLTLKQKNLLHIDEAGLSLVKSMECAPTSTPIEKTELLLSLFNNIKTA

SEQ ID NO: 10129 - protein, 524 aa, Unknown
  Description of Unknown: Integrase B10130 sequence
  cd00338,PF13408,IPR011109,IPR038109, PF07508,Coil,PS51736,IPR036162, IPR006119,PTHR30461,G3DSA:3.40.50.1390,IPR025827, PS51737,PF00239,SM00857,G3DSA:1.10.10.2600,SSF53041
MNESVCIYLRKSRADREAEAHGEGETLARHERILLDLAKKKEYIVGAIYREVVSGETIADRPVMQQLLHEVESGMWDGVLVVEVERLARGDTIDQGVVSRAFQYSDTKIITPTKIYDPNNEFDEEYFEFGLFMSRREYKTIKRRLNAGRISSVKEGKYCGNKPPYGYERVKLEKEKGYTLRPVPTQAEIVKMIYTWYSGDGCEQIGVAKIARKLNEMGIESALGGDWTPASIQGILTNPVYIGKIRWNGRKTVKTIQNGQVIKTRPRSKDTLICEGLHPAIISEDLFNSVQEIRKKNPPRPVSIANSIRNPLAGIVYCSKCGRAMVRRPYQKRGQEDTLMCPYTSCPTVSSKLSLVEKAVIDGIKEIVEEYKLNNDINASSKDIDCVITSKQNLIHEKENELESLNAQKAKQYDLLEQGIYTTEVFLERAKTISASIQSCSDTIEKLKEEIKHDQNIIKQQSDFIPRCEELLDNYWSLDTESKNKMLKSLIEKVAYSKDTKNAYGKGNEIGFQLDIFPKIQKNN

SEQ ID NO: 10130 - protein, 524 aa, Unknown
  Description of Unknown: Integrase B10131 sequence
  cd00338,PF13408,IPR011109,IPR038109,PF07508, Coil,PS51736,G3DSA:3.40.50.1390,PTHR30461,IPR036162, IPR006119,PTHR30461:SF3,PS51737,IPR025827,PF00239, SM00857,G3DSA:1.10.10.2600,SSF53041
MKAVIYARYSSHGQTEQSIEGQLRDNYAWAKQQGITVIAEYIDRALTGTKDQRPDFQRMIEDAAKRQFEMVIVWKLDRFARNRYDSAIYKAKLKKYGVKVVSVKENITDSPEGIILEGLLESMAEYYSANLSQNIRRGQRESMAKGTYCGGPVPYGYKVANKKLVIDDKAAEVIRYVFDQYAQGVPKKEIIDELNRRGVRGKTGKPLSITAFQRALPNPAYVGRFTYKGEVIPGLSERIIDDDTFQKVQERLKLTARAPAANKAKVEYLLQGKAYCGHCGAPMIGESGRSRNGETYNYYACADKKKKHTCKKKNERKDFIEWYIVEQTMQYILTPARAARVAKAVVQEYKKEFSDSRVDDLDKALKQIDRELDKLVDALVDSPKVAHKKIYARMETLEAQKAEMETDLARLRIAQEIQLTETEVRAWLKKFCTGDPLDEEFRKRIIDVFINAVYLYDDKLITFYNIRGGKQVSYIDLINSADLPAPECSDLKAYAPPNASKSEPQYVFVNGVFGCIFHRKKDED

SEQ ID NO: 10131 - protein, 524 aa, Unknown
  Description of Unknown: Integrase B10132 sequence
  cd00338,PF13408,IPR011109,IPR038109,PF07508, Coil,PS51736,IPR036162,PTHR30461,IPR006119, G3DSA:3.40.50.1390,PTHR30461:SF3,IPR025827,PS51737,PF00239, SM00857,G3DSA:1.10.10.2600,SSF53041
MNGVIYARYSSERQTEQSIEGQIRECTQYAEANNITVIGTYIDRAISGRTDDRPDFQRMLRDSKKGAFECVIVWKVDRFGRNREDIAKNKAILRRAGVQVLYAREHIPEGAEGIILEGLLESLAEYYSAELREKIERGMRESAYKCQFNGSAPPFGYRVDADKHFVADPEEAAIVRGIFEAYASGRSMADIRRDLIERGVKTPKGNAFSYTVLTRMLRNRRYLGEYRWREIVVPDGMPRIIDDVLFERVQRELAKNKAAPARARGESAVRFLLTGKVFCGHCLGTMTGDSGTSCAGRTYYYYSCYNHKIRRTCRKKSVKKEWLEREVVRLTAERVLTDEMIGRISARLAELQREEYEQASALGYLESRLRECSAAISNILRAIEAGIFTETTGARLRELEGQRAQLQADIARESIRPVPMMQAEIAYCLERFRGGDVEDPDYAAQIIETFVDKVLVYDDKIVITYNFSGDGRTLEAAVIDRAASEAECSDKVTGGSPRRDNSNKTVFFLPQVFGIVALIKPPRG

SEQ ID NO: 10132 - protein, 524 aa, Unknown
  Description of Unknown: Integrase B10133 sequence
  cd00338,IPR011109,IPR038109,PF07508,Coil, PS51736,IPR036162,IPR006119,PTHR30461,G3DSA:3.40.50.1390, PS51737,PF00239,SM00857,G3DSA:1.10.10.2600,SSF53041
MLKYNSETNLDSDIDSDIDKYAIYLRKSRADLEAEKIGDGETLARHKKILTDLAARKGLYVSKIYEEIISGETIEARPEIQKLIQDCYDGKYRGILVVEVTRLSRGNQGDAQTIMDCLKYSNYNKGLLVVTPTKTYDIVHSQEDEEYMEFELFMSRREYKMIKKRLERGRMQAIVEGNYMASHRPYGYNIVKTKTGRTLIPNKDEAPIVKLIFDLAADNVPLLTIARHLKDMGVPTYNGDYYWSRVSVKRILENPVYIGKVRWNNRTTIKTMVDGKIETRLTTLNKNHYMEYDGKHKKYALTDEETFAKVNSRLTETRTKYDYKLVNPLAGLLRCKKCGRVMNLRTYDSRKYNVSPRYNHDGSPYCKLSSVMYTDVIDTLIRSLELYIEDFKIEINNDFQHDNTNIQMQIQTLKREETKLKQKITKLFDSWENGILNDNEFIERKVINNESLENIQRQIRDLEKSIPEKIDYKEKIILLSNAVESLRDDTVSAKIKNDYLKEIISTIEYSRERPGEFILDIELL

SEQ ID NO: 10133 - protein, 524 aa, Unknown
  Description of Unknown: Integrase B10134 sequence
  PF13408,IPR011109,PF07508,Coil, PS51736,IPR036162,PTHR30461,IPR006119, G3DSA:3.40.50.1390,PTHR30461:SF3,PS51737,IPR025827, PF00239,SM00857,cd03768,SSF53041
MRFFNYGRKSIYSDSSDSIDNQFRMCREHCELRYSGQVDSWERFSDEDFTGANTDRPGLQQMLDEIRAGCCDVLVVYQLDRLSRDVRDFANIYSLLQDCHVEFVSLKENIDTTTPIGRAMMYVTVVFAQMERETIAQRVNDNMIGLAKKGYWTGGNPPYGYIRQRIEIAGRKHVTLIPDPEGVKYTLKIFDDFLENNYSLQSMETAYRRAGVKTARGAFFSTTQLHKILTTPLYAENTQEIYDFLEGRGYKMDPDSPREKWDGRHGIIVYGRTTQKNKKHQIAPVGDRLVCIGYHEPFVPADKWLAAQARLHRNVFQKTNKYDIPLLKGVLRCKKCGVLMQVARKKLVNSVSSHYYCLTRMRRGIEVCDGRMLKCEVLDERALAVFQEIEANPTAIKNYVAETERPREVPGVSEIKRKIGLQESRIGRLTASLAEAGESSAMKYILAEIERQDLSLQALKRQLDMARASDREEKRRERSAEQRAAVIARLIRGFAEFTASEKNEIVRAVVRECTWDGETLFLRL

SEQ ID NO: 10134 - protein, 439 aa, Unknown
  Description of Unknown: Integrase B10135 sequence
  cd00338,PF13408,IPR011109,IPR038109,PF07508, PS51736,IPR036162,IPR006119,PTHR30461,G3DSA:3.40.50.1390, mobidb-lite,PTHR30461:SF3,PS51737,IPR025827,PF00239, SM00857,G3DSA:1.10.10.2600,SSF53041
VENRERIVERVQFPNAPKIKLLRTAAYARVSSGKDAMLHSLSAQVSYYNNMIQSNPEWLFCGVYADEALTGTKDTRENFQKLISECRAGNIDLIITKSISRFARNTVTLLETVRELKELGVDVYFEEQNIHSISPDGELMITILASYAQEESYSASENQKWRIRKDFEFGKVSTVIMLGYKRNPEGILEIIPDEAETVRMIFADFLNGIGRQSIANKLNELNILTKNGCQWTSEAIRRILNNEKYCGDLMLQKFYSENHITKRKMVNNGVVRMIQVEDAHPAIIDKETFLRVQEIMQEHQRFAAKIPTTSIYPFSGMIKCGCCGKSYRRKTTVTGIVWICNTYNKKGKRFCPTAKQIPEEKLIAACCEVLNTDSFDEEVFHSKVEQIIIPKPNNIRFLFSDGLERTVTWQDRSRSESWTPEMRARTGQQTRERSKKCRK

SEQ ID NO: 10135 - protein, 524 aa, Unknown
  Description of Unknown: Integrase B10136 sequence
  cd00338,PF13408,IPR011109,IPR038109,PF07508, Coil,PS51736,IPR036162,IPR006119,G3DSA:3.40.50.1390, PTHR30461,PTHR30461:SF3,IPR025827,PS51737,PF00239, SM00857,G3DSA:1.10.10.2600,SSF53041
AGQREESIEGQVRECRAYAKRLGMKVGEVYADRALSGTSDARPAFQKMIKDAEAGAFDVIVCWKHDRFARSRYDAAVYKNRLKHAGVRLEYVMEPMVEGAQGVLIDSVLEGFAEYYSANLSENVKRGLYESALKRWTLGQICFGLREAPDKTWEIDPETGPVVKEIFERYAGGEQSATIARDLNERGFRTRSGRPFVVSSIYNIIKNPKYKGLYVYEDIEDPEGIPAIVSPELWEKANMNKDERKRAPNSRRLPGQNFILSGKLFCGECGAPMTAGGGRSKSGAYYDYYVCNNRRRGGSCRKEYAKKQWIEDLVVSLLVDSVLSDEMLEWIVDQFMQHQAAEMETSDVPRLKAELADVEKRRSTLLRNMQAVELDVRTMSDLSASLSELGDRAAQLEDAIAREEEMVKPFDRATVDAWLRMFRDGDVNDPTWRSSLVRVFLRAVWLFDDRVVLDLNYTGEEEGCVTFEIARDAAGRLDEAGGVDVLKLPPLVCQTSSIPKARAFTFLSGRALMVAKVSRSRLSY

SEQ ID NO: 10136 - protein, 524 aa, Unknown
  Description of Unknown: Integrase B10137 sequence
  cd00338,PF13408,IPR011109,IPR038109,PF07508, PS51736,IPR036162,PTHR30461,IPR006119,G3DSA:3.40.50.1390, IPR025827,PS51737,PF00239,SM00857,G3DSA:1.10.10.2600, SSF53041
MNRLDPSGLYAVYLRKSRKDVEMEALGHGETLSRHEQALGDLAARLGIRVAQTYREIVSGDTIAERPEVRRLLEDVNAGMWDGVLVMDVDRLGRGDSIDQGVIMQSFLYSSTLIITPDKIYDPSEDSDSEFFEIKLFFARREYNMIKKRMQRGRLASAMDGCYMGSRPVYGYERVKLQGRKGWSLKVVPEKAEIVRAVYDWYAHGMDGRDVGAAVIADRLNQMGLRTDLGKRFEPSYIRLMLQNPVYVGKVQWNQRQTVYHIEDGKRVKSRPRSDNMILVDGHHEAIIDEKLWKEVQAMFATHEKRPKNVNAVTVNPLAGLVVCSCCGHHMQRKPAPNRQGDFIYCPTQRCPTCSTYIPAVENAILDGLRAWVSRYEASPDAPAPAPSADASASAAARAQLTDQLATLEAQAGKLFDLLEQGVYDVQTFRARRADLDARIAATKDALGKLDAPAPVDPIAAILPQVRTVLGAYDLSSAPADRNALLRTVIDHVQYKKAQRGYRNSAPGDNLEIQLFPRIPTDDD

SEQ ID NO: 10137 - protein, 524 aa, Unknown
  Description of Unknown: Integrase B10138 sequence
  cd00338,PF13408,IPR011109,IPR038109,PF07508, Coil,PS51736,G3DSA:3.40.50.1390,PTHR30461,IPR036162, IPR006119,PTHR30461:SF3,IPR025827,PS51737,PF00239, SM00857,G3DSA:1.10.10.2600,SSF53041
LDNLNLANVVIYARYSSAGQNDQSIDGQLSKCREYAQQRGYRVVGEYCDRALSGRYAETRPEFQRLIADSAKRAFDFVLVWKLDRFSRDRYDSAIYKKKLRANGVRVLSVTEGVGDSSESVLLEAILEAMAEEYSRQLAQNVRRGMRQNAEKGLSLGGLAPLGYRVMNKQYEINEDEARIVRFIHEQYADGAGQKQIVADCARLGYRNQRGNPLTLAAVKRILANDRYIGRYDYLGDIVIEDAFPAIVSKELKKRVRDRLNANAKAPGHAKAKVEYLLHGKLFCGECGAPMIGECGRGRHGATYYYYTCAARKKQHTCKKRNERKDELEACIVDYIGSCVLTDSWIDGAAERVVAEYQKSYDASGIKPLEKQIRDADKEIDQLVDALISATAEAARRRINERIETAEARKQALEADLASLRIASRVQIKKEDIVVWLNQFRTGDRSDLEYRKKVIDLFVNSIYLYDDTFKLFLNVTDSTQITYSDSLALAPPSVSDFGASGVPDMHLSEHIIFVNGVIGMIVQR

SEQ ID NO: 10138 - protein, 524 aa, Unknown
  Description of Unknown: Integrase B10139 sequence
  cd00338,PF13408,IPR011109,IPR038109,PF07508, Coil,PS51736,G3DSA:3.40.50.1390,IPR006119,IPR036162, PTHR30461,IPR025827,PS51737,PF00239,SM00857, G3DSA:1.10.10.2600,SSF53041
MNESVCIYLRKSRADREAEAHGEGETLARHQRILLDLAKKKEYIVGAIYREVVSGETIADRPVMQQLLHEVESGMWDGVLVVEVERLARGDTIDQGVVSRAFQYSDTKIITPTKIYDPNNEFDEEYFEFGLFMSRREYKTIKRRLNAGRISSVKEGKYCGNKPPYGYERIKLAREKGYTLRPVPAQAEIVKMIYTWYAGDGCEQIGVAKIVRKLNEMGIESAQGGDWTPASIQGILTNPVYIGKIRWNGRKTVKTIQNGQVVKTRPRSKDVLICEGLHPAIISDDLYNSAQKIRQKNPYRPISIKNTVRNPLAGIVYCSKCGRAMVRRPYQKHGQEDTLMCPYTSCSTVSSKLSLVEKAVIDGIKEIAEEYKLNNNINVSSKAIDSTIISKQNLINEKENELKSLNSQKAKQYDLLEQGIYTTEVFLERAKTISASIQSCSDTIEKLKEEIKHDQNIIKQQSDFVPRCEELLDNYWSLDTESKNKMLKSLIEKVVYSKNTKNAYGKGNEIGFQLDIFPKIQKND

SEQ ID NO: 10139 - protein, 524 aa, Unknown
  Description of Unknown: Integrase B10140 sequence
  cd00338,PF13408,IPR011109,IPR038109,PF07508, Coil,PS51736,G3DSA:3.40.50.1390,IPR006119,IPR036162, PTHR30461,PTHR30461:SF3,PS51737,IPR025827,PF00239, SM00857,G3DSA:1.10.10.2600,SSF53041
LNAVIYARFSSHSQREQSIEGQLRDCYEYAKRYDINIVGEYIDRAISGMTDDRPDFQRMIADAPKKQFERIIVWKLDRFARNRYDSALYKHKLKQYGIRVISAMENVGEGDESILLEALLEASAEYYSLDLKKKILRGQRETIAKGRWCGGPIPYGYKAVDGKLVADEKTAPIIRYVFEQYAQGVPMKEIIDELKRRGVRSSRGGELTYTTFSRALTNPVYIGNFMYKGELVPGVAEALIDEDTFNKVQIIVKANAHAPAANKAKVEYLLQGKAFCGHCGSHMIGESGRSRNGDNYYYYSCAARKKKHSCRKKNEKKDFIEWYVVEQTLQYVLTPARMRDIAKAVVAEYDKEFAGSRVEEYEKAIKQYERELDKLVDALVDAPKVAHKRIYEKMETLETQKASMENELVKLRIASEIRFTEEEVRAWLRHFCTGDLFDPEFRRNIIDTFINCIYLYDDRIIIFYNIKGGKQVSFVDLAESLDSESESSGSDLNANAPPFNIKSEPAYIFVNGVFGCIFPRNDVE

SEQ ID NO: 10140 - protein, 524 aa, Unknown
  Description of Unknown: Integrase B10141 sequence
  cd00338,PF13408,IPR011109,IPR038109,PF07508, Coil,PS51736,G3DSA:3.40.50.1390,IPR006119,IPR036162, PTHR30461,PTHR30461:SF3,PS51737,IPR025827,PF00239, SM00857,G3DSA:1.10.10.2600,SSF53041
MAVVYARFSSAKQHETSIEGQLAAAQKYAEKKGYTIIREYCDRAKTGTNDNREAFQQMLHDCAKHQFSVIIVWKVDRFGRNREEITFNKYKAKKHGVRVEYVAENVVDGPEGVILESVLEGMAEYYSLQLSQNVRRGLLEAAKKHHVPGGRAIAFGYRAAADKTYEIDPVTGPIAKKIFEMYAAGSTEFEIIRYLNEQGHRTQRGVAFNRSSLKRMLHNELYIGTYIYKDIIRDEDAVPALVDKDTFRKVQDMLKINKRMPSHKWSYSDYLLTGKLFCGKCGSSMVGKSGTSRTGDKHCYYGCWNRHNGKGCDKQNVRQDYIEPLVLEKIHEILHNPEIFQLIVDKTWEFYLKQDTEQTEIQAMQTELAGVEKGIANLVKSVESGMPFDLIQTRLDELNGQKAALKKALADRELAKGIKLTKERIEFFLETMRDMDTDNLDAKKRLIDTFVNAIFLYDDHFLITLNFSGDGNTVKVEDIEKATTDGTSEVFDCSRSPVPERPTGEPLRLIWYMHLDVFAIEGLL

SEQ ID NO: 10141 - protein, 437 aa, Unknown
  Description of Unknown: Integrase B10142 sequence
  cd00338,IPR011109,IPR038109,PF07508,PS51736, IPR036162,IPR006119,G3DSA:3.40.50.1390,PTHR30461,mobidb-lite, PS51737,PF00239,SM00857,G3DSA:1.10.10.2600,SSF53041
MERLIQKIEPSVDISHKLRNVAAYARVSSGKDAMLHSLSAQVGYYSELIQSNPEWRFCGVFADEAITGTKESRPEFQKMLAECRKGKIDLIITKSISRFARNTITVLETVRELKMLGIDVYFQEQNIHSISADGELMLSILSSYAQEESFSASENQKWRIRKDFEQGKICNIRMLGYRRTTNGSLEIVESEAEIVRFIFLNYLSGNGKLLISNKLNEMGIATINGCEWTTADIHRILQNEKYAGNMLLQKRFRENHLTKRMIRNDGQLPKYFVEESHLAIIEKSIFDAVQKKLEEQHQRFSTSKSVVSYPFTGKIQCTCCGKNYRHKITATGNVWICATYNTRGKKYCPTAKQIPESTLISVCCEILSITEFDANIFENQVEKILVPAPNKLIFQLTNGKCINTTWKDRSRSESWTEEKRAAAAESSKTRRWKKCQK

SEQ ID NO: 10142 - protein, 524 aa, Unknown
  Description of Unknown: Integrase B10143 sequence
  cd00338,PF13408,IPR011109,IPR038109, PF07508,Coil,PS51736,G3DSA:3.40.50.1390, IPR036162,IPR006119,PTHR30461,PTHR30461:SF3, PS51737,IPR025827,PF00239,SM00857,G3DSA:1.10.10.2600,SSF53041
VRAFIYCRFSSHKQQELSIEGQRDICLEYAQKHNITVVGEYIDRARSARTENRADFRRLIRDATAGVVDCVLVWRYDRFFRDRAESALYRRQLEAAGVRLISVTEFIPDGSAGVITQGMIETVAEYFSAKLSEDVSRGMNKAAQHCQVTGSAPLGYRPGPDKRWQIDPVGAELVRRIFEWYDSGQPMEQLARQFNQEGHKTAKGVAFNRSSFSTILRNKKYIGIYEYNGTVSVAGGCPRIIEDDLFFQVQRRLEANRHRPGAYKAQASYYLSGKLFCGLCGSPMTGTAGTSRHGVRHHYYTCNNRRAKVCDKKNERLEPIEAAVLQAALDVLTDENIAYISKEVERRCAENSDSIALLSSLRAQLADVERQIKNIGAAIAQGIITETTKQLLMDAEADRAGLRQQIEKAKVQASLEVKAEAVACWLDGFRHGNRNDPDFRREVYGALVHSVFVYDDYLKIIFNVDRAGAVVVPFSAVEKAAVSESPRAVSGSYLERSGVPKAVISETDITAFGIFGKKGLEQFN

SEQ ID NO: 10143 - protein, 524 aa, Unknown
  Description of Unknown: Integrase B10144 sequence
  cd00338,PF13408,IPR011109,IPR038109,PF07508, PS51736,G3DSA:3.40.50.1390,IPR006119,IPR036162,PTHR30461, PS51737,IPR025827,PF00239,SM00857,G3DSA:1.10.10.2600, SSF53041
VTAPVTLSRIVAYLRKSRDDGEDSVEAVLARHERILQDWCRRTYDAPLPPEKILREVQSGETIESRPVMQDLIRRVQNREVDGVLVVELQRLSRGDFLDIGELERLFQFTRCQIITPTRTLSLADDYDRQYFEMELLHGREYLSYVKKILRRGVEQSCREGNYVSAVAPFGYQRATVNRKPTLAGDPREAPIVRMIFEMYAHEQIGPTVISDRLNALGLTTRDGGEWNPAKLRHIIENPVYTGKIRWGFRRGEKEYRDGEVVTVKRRHDGEDVILVDGRHPALISDDLFREAQDVSRGRKIPAANRPKEMRNPLAGLLRCGNCGHTMTAVPTRHYKSTELIDYTMRCTYSRGCHMRGAYLREVMGVLCATLSASLRDLDVDAGEEKPESPAADMRKVYADELAEIGRQRERLFGFLERGVYTDEIFLERRAKLDEREGEITAALSRIDAQAEDADHAEALRANLAACLALIDDPDTPPAELNAALKKIIDRITYTRAPASPAEMSGPPSRFRFFICDAVIASRG

SEQ ID NO: 10144 - protein, 524 aa, Unknown
  Description of Unknown: Integrase B10145 sequence
  cd00338,IPR011109,IPR038109,PF07508,Coil, PS51736,IPR036162,PTHR30461,IPR006119,G3DSA:3.40.50.1390, PTHR30461:SF3,PS51737,PF00239,SM00857,G3DSA:1.10.10.2600, SSF53041
MRIAAYVRYSSENQSAASLQDQARNCRAYCERAGWADPTIYQDAAISGSRKDRPGYQRLMADATRFDVILVDDLSRLSRDSIEAQQQVRRLKFAGVRVIAVSDGIDTADKGHKLGVGLRGLMGELYLDDLRDKTHRGLTGRAMAGASAGGLPYGYRITSVGEREIDEGQAAVVRRIFDDYIAGATPRAIAAALNREGIPSPRGRTWALTAIRGDIRRGIGILGNPIYVGQQVWNRSRWVKHPETGRRIRQERPEAEWITTHLPDLAIVTQAQWDAAQARQRGRTKASGGAGRPARHLLSGLLRCGGCDGPLVVVDRYNYGCARAKNAGTCPAPIRLAIRDAERELLAGIRAELLTDKAFQRFQRAVAARLREAGPDVDAVRRRVQQATRDRDNVMAAILQGIVTPTTKAALEKAEGEIKTAEAELRSAEAMQPAKMLPRARERWNALANDLGNRARGNDKARQAIAAAIGTATVRNENGDLVAEVAVASSGPEQGTQICVVAGARSVPYLLEPFRVVLRRASRE

SEQ ID NO: 10145 - protein, 433 aa, Unknown
  Description of Unknown: Integrase B10146 sequence
  cd00338,PF13408,IPR011109,IPR038109,PF07508, PS51736,G3DSA:3.40.50.1390,IPR036162,IPR006119,PTHR30461, mobidb-lite,PTHR30461:SF3,IPR025827,PS51737,PF00239, SM00857,G3DSA:1.10.10.2600,SSF53041
MKVDIIAPTKHKKYRLINVAAYARVSDAKDAMLNSLAAQVEYYTAYIQGTPGWSFAGVYTDKGITGTKSDRPEFQRLIADAKAGKIDKIVTKSVSRFARNTVDLLDTVRMLKELNIDVFFQKENIHTLSGEGEVMLTILASFAQEESKSVSDNCKWRIRSGFKEGRINALTMSGYRRSDDGSFTVVPEEAEVIRTIFNMCLDGKGCQSIANFLNEHHKASRCNGQWSPSGIRYILSNEKLTGRLILQKTYRKDHLSKTKKVNDGELPRYVVDCHHEPIISPDTFARTQRELARRKGAINVRTGTASMFTGKIVCGSCGKNYKRKCVGHSTGYVWICSTYNLKGKAYCPKAKRIPEQVLFTESAKVLGLEEFDAAVFEAEIEKVVVPEPNRLEFRFKNGTIGNVEWQDRSRKESWTDEMKEKARRRGLCTKQQK

SEQ ID NO: 10146 - protein, 524 aa, Unknown
  Description of Unknown: Integrase B10147 sequence
  cd00338,PF13408,IPR011109,PS00397,PF07508, Coil,PS51736,G3DSA:3.40.50.1390,IPR006119,PTHR30461, IPR036162,PTHR30461:SF3,IPR025827,PS51737,PF00239, SM00857,IPR006118,SSF53041
VIAVPAVRAALYARVSSAAQRDAHTIENQLRALPAFAAAQGWTVTETYVDDGRSAKAGQLERREGFARLVRDAEARRFDVLVVADVDRLTRTDSLEERARILGPFQRLGIRIVTPAGGELDLRTLVGELYVTLQAIVAAEENRKRAERVKAGKARAIAEGRKPAGPTPYGLAYARAAGAWSIEPARAAIVREIFARVIAGESCMVIADDLHARGAPPPRGPWTRHKVWQLARSPHAMGRWAADKRRRLVIDVPPIVDEATWHAAQAKLIEHGKRGLRRTRHVYLLEGLAVCGRCGSPIAIRSAALGGSPAAYVCRARKLARRGEARCSAPIVPVADLDGRLWARLAEVLEDPQLADLVQRRSGELAADRRGWHEDVAGYRAELARLGRASAGVLRRLSRELVPEEVGEAELAAIARQRAAVAAQLQAAERAADGPDELERAPTAWLEAIRELAGDGTPTERQRVVRELLQPGAVIDGTDVRLTLRVPVGASRGAGGGSAGAPSLAVAPGCRMHHENGLRIRLVA

SEQ ID NO: 10147 - protein, 524 aa, Unknown
  Description of Unknown: Integrase B10148 sequence
  cd00338,PF13408,IPR011109,PF07508,Coil, PS51736,G3DSA:3.40.50.1390,IPR006119,IPR036162,PTHR30461, mobidb-lite,PTHR30461:SF3,IPR025827,PS51737,PF00239, SM00857,SSF53041
MSQRRGPRVLGATRLSRYTDATTSPERQESAVETVSDAIGGHVVGWARDMDVSASKVSPKDRPELGDWMNRPQDYDVIAWWRLDRAVRSMADMADLGRWAKEHKKRLIFAEGPGGTRLELDMGSPMSELIMMLLAFAAQMEAEAISERVTGAREYLRSVGRWSGGRVPFGFIPVPHPTEDQGWWLGLHEDSEETPGTAPIARQMVAMVLSGKSYHQVSEWMNAAHPGITPANHRRKLAGRDIDPKARWNPGMVSTWIKNPLLNGRLQFEGSAVRNADGETVKCGDALIDDGTWRRLVKVTTKKADTGAERRSDAHPLLGVLYCGSCGGRLYQGWLAPGPNRKESVRQYRCAAKTHGRKCRKPAYVVADPVDRYTEREFLARAGSVNVVEVITTPGIDHTDEIEELKADIADLAERLTGMRGAAADAVGKQLQSRSDRLERLQAAPVIPPRHEEVPTGETYAAQWARETVEGRRDMLKAAGARVVVGETYRGARDPEKRLTFALGQPDDPDDAEAAELAALVLTV

SEQ ID NO: 10148 - protein, 524 aa, Unknown
  Description of Unknown: Integrase B10149 sequence
  cd00338,PF13408,IPR011109,IPR038109,PF07508, Coil,PS51736,IPR036162,IPR006119,G3DSA:3.40.50.1390, PTHR30461,PTHR30461:SF3,IPR025827,PS51737,PF00239, SM00857,G3DSA:1.10.10.2600,SSF53041
MRTAAYARYSSDQQRDASLEDQLRNCRAYAARQGWPAPEEFTDAAMSGARNDRPGYLRLIAAAGRLDVILVDDLSRLSRDSIESAQAVKRLTFAGVRLIGVSDGVDTGRKGHKVDVGLRGLMSELYLSDLADKTHRGLSGRALDGASAGGLAYGYRVTSVGYRDIDPDQGAVVRRIFAEYLDGKSARAIAAGLNADRIPSSRGGTWAMTAIYGDTKRGIGILVNPIYRGLQVWNRSHWEKHPDTGRRIRKERPPSEWITKELPELAIVDAATWQAVQDRLGGSRQPHHGRPKAGRPPSHLLSGILRCGTCGGPLVVLDRYRYGCSVHKDRGDAVCNSRLRIPRTATEAALLSGIKEQLLSEAAFQRFQRRVAAALKSAAPNLDAMKRKLADSERERDNVMAAIRAGIITPTTKADMVRAERQVATAIAELERMRGFQPAQMLPRARDEWRKIVDTLENYARNVPAARAALRKMLGDQVTIKEKAGDLYAEIAGSSDSQINVVAGAGFGLHLSGRIEIPLRLRRA

SEQ ID NO: 10149 - protein, 524 aa, Unknown
  Description of Unknown: Integrase B10150 sequence
  cd00338,IPR011109,IPR038109,PF07508,Coil, PS51736,IPR036162,PTHR30461,G3DSA:3.40.50.1390,IPR006119, PTHR30461:SF3,PS51737,PF00239,SM00857,G3DSA:1.10.10.2600, SSF53041
MDAIGYARLSDKNESSNSIKSQVKRIEEYCAANKLTLLKTFIDDGRSGWTFDRPGFKELEQFCKKNKAVQYLVIPHFDRFSRTDPIDAMVKERYFRDTLNVKVLQVSEPVDIDVNNPTYLIVRFMQAFASNEERNRIVDRTITGMRYSLSQGRYCSNAPFGYKNSRDEMGKPLLIVDEERAPVIRFIFNQYLKGEGLEEIGRLAKAKGFTRSGNSAITRILQNPIYAGLVNVPAYKNQPARVVKGLHVPIVSENDYYMAMDKLSGKNFRHQNNEAVPLRGVVKCHCGKLLTAAPSKSKTGKYYWYYFCNDHRKANFSANKMHGQLLAILDELTMDKESAERIAAASRAAINEQINTSTKQLMKLDLAIQKAGHAISAIEEKYLLQPDISQATYNKVIKEKRIQLNELQAQRAAFSTDAYVLLEQLNIALSTLTSLRQRYEQLDVLHKQIFFKQGFGSNMTYTDGIYRTPFINPIFNANALVLKEKGLLIIEQPSENIALDNECAAGGTSTELAALFALAKLFVA

SEQ ID NO: 10150 - protein, 524 aa, Unknown
  Description of Unknown: Integrase B10151 sequence
  PF13408,IPR011109,PF07508,Coil,PS51736, IPR036162,PTHR30461,IPR006119,G3DSA:3.40.50.1390,PTHR30461:SF3, PS51737,IPR025827,PF00239,SM00857,cd03768, SSF53041
MRFFCYGRKSVYSDHSDSVDNQEGMCRDYVSSRFPGEVDSFICFQDEDFSGANTDRPGLKEMMRRVRARECDALVVYQLDRLSRNVRDFSNLYAELDSLSVKFISLKENIDTATPIGRAMMYVTVIFAQMERETTAVRVLDNMRGLSKKGYWTGGNPPTGYVRQRVVEDGRKHVIIVPDPDGVAYVRKVFSDFLSMNCSLQHMETAYRDAGVRTITGKFFSSTQLYKILTMPFCVEATPEVYDFYAAKGCQMDPGSPRSAWDGSVGVMIYGRSTERNKKHELQPPSEWIVSLGRQEPFIPASEWLEVQSRFTHNKCIKDSRWPVPLLKGVLRCGKCGTLMQVARKARVDGSCSSWYYCRKRMREGADVCDMRHIKCEILDDRVLEVFRGIAADPDLIQKYVERSEPAAGPDLAAINQKIAAQERKIEKLAASLALADGSSAARYIISEMESLDAGLSSLRQEATAAEAAVREKRAAAASAKEKAEEIRRLISGLDGFTPKERNEIVRSVVKSCAWDGETLFLSL

SEQ ID NO: 10151 - protein, 524 aa, Unknown
  Description of Unknown: Integrase B10152 sequence
  cd00338,IPR011109,PS00397,PF07508,Coil, IPR038109,PS51736,G3DSA:3.40.50.1390,PTHR30461,IPR006119, IPR036162,PS51737,PF00239,SM00857,G3DSA:1.10.10.2600, IPR006118,SSF53041
MNKKRCIIYVRVSTEEQIKGFSLDAQENEDTAFANNLGYEVIKIFREEGISASSLNRPVLQKMMQWGYEHKGEFDAVVFWKWERISRGTEEDYVVLGKFFTTCGIKPLSVTECNDESAEGELLRWITKGINLYELRKISQRTKLGMRQVARTGRKPAGVPIGYKNITNPDDTKSIIVDEKTAPFIHKAFEMYATGNYSTESIEDFLYKNGIRNKKGNRYTKVDYMLKNIFYIGKFIWSGQLYEGTHTPIIERELFDAVQSKFGFKKPKTHDLYFPYTTMIKCSHCGKHYLTAEMKRGAHNSGQYIYYKCRCGVKAIKQDELEIEFMRMLDDIYIPPHEIEALKDGAKEILDAIKDFENKLETPAQIQNSIDIINTRIKKAYKDKLDGNSLGMSEDEWNKMISEWIKEKDYLQIKLNDRIEKSKILYDKLHLLMMFMNKLPELFRLAEPRIKREIIQTCCRTLSYDGKNLYIEQFPLFKELKKWKNSIYGAAIGTIVEPKILLKLIENDEQTNHLLLKIKGLIAA

SEQ ID NO: 10152 - protein, 523 aa, Unknown
  Description of Unknown: Integrase B10153 sequence
  PS00397,IPR038109,IPR006119,PS51737,PF00239,G3DSA:3.40.50.1390 ,PTHR30461,IPR025827,SM00857,G3DSA:1.10.10.2600, SSF53041,IPR011109,PF07508,PS51736,IPR006118, cd00338,PF13408,Coil,IPR036162,PTHR30461:SF3
MRVGIYIRVSTDEQAKEGFSIPAQSRILEAQAIIKGADDIVKYVDDGYSAKNLNRPHVQRLISDCKARKLDAVIVWKLDRLTRSLRDLLMLIDDVFRANGVEFISSTETIDTSTPSGRLMVNILGAFAQNERENTSLRTRTVMLELSKTGKHLGGRPPYGYTVNTDGFYEIEPNESKAVRMAFEIKAGGGSYSEIISALAAAGHTSRSGKPFERNTLYSMLRNEKYTGVYIYNRATAADENGHRNNWTSKPEEEIQRIPGGMPAIITSELWEAVRTMSQEGKALGGKNSAKNIYLLSGRVRCAICGKGMTITNGGRNRDGTYWRAYRCKNKCVKGIEFQKLESCVVDFLVSAASGDDLLQQLLNIADDFNSAAAEDSAASINALRSNLTSLQRERDNLLKLAAKSDDPPVSLLDEIQRRDREISAVKSQIEAAERASVVIHKDELTKRFRALYNLRSCTKEKQKAVIKDIVDHVTIYDDHIDISMITTSASGPDPIHAAIVKLLTLTISKNFISSHNLPKRFL

SEQ ID NO: 10153 - protein, 523 aa, Unknown
  Description of Unknown: Integrase B10154 sequence
  cd00338,PF13408,IPR011109,IPR038109,PF07508, Coil,PS51736,IPR036162,IPR006119,PTHR30461, G3DSA:3.40.50.1390,PTHR30461:SF3,IPR025827,PS51737,PF00239, SM00857,G3DSA:1.10.10.2600,SSF53041
MKKQSLPSCPPRTAVAYARYSSAGQRDVSIEQQLADIRAFAKREGYTLVHEYADHARSGFKNASARTAFQSMMAAADSGSYDTVICWKVDRFGRNREESALFKGRLRRRGVRVLYAMEPIPEGSAGVLLEGMLEATAEWYSRQLSENVTRGMTDNAQRCLYNGTKTLGYVRGSDGRYALQPDEAAVIRYIFDLYCSGYSAAQICKRLNDRGVRTSRGCLWKPESLLRVISNERYTGVYIWGDVRVPGGMPAIIDQSVFEEAQRMKKKTSRHVEQGAVDYLLTGKAFCGLCCAAMIGDSGTSKDGTRHHYYTCQARKARKGCKKRSLKKDYLETLVIEYVLNVVLSEENIAENVRVIMAQQQEELKTSPLPAMEAEYDETQKKIRNINNAIAAGIWNASTSAVLKELEDTAENLRVSIEMFRYSQAQLMDPDRVAFFLHQFVKGDRADPLFRRHVIETFINAIYVFEDHIDIVTNNCEGNQRFPLADLQDDDYDPGSLCSDTLVSGVLMITHPNTQVSIHRIAI

SEQ ID NO: 10154 - protein, 523 aa, Unknown
  Description of Unknown: Integrase B10155 sequence
  cd00338,PF13408,IPR011109,IPR038109,PF07508, Coil,IPR036162,IPR006119,G3DSA:3.40.50.1390,PTHR30461, PTHR30461:SF3,PS51737,IPR025827,PF00239,SM00857, G3DSA:1.10.10.2600,SSF53041
MKKTVAPSCSPRTAVAYARYSSAGQRDVSIEQQLREIHAFADREGYTIVHDYADHARSGFKNASARTAFQSMMSAAENGTFDTVISWKVDRFGRNREESALYKGRLRRFGVKVVYAMEPIPEGSAGVLLEGMLEATAEWYSRQLSENVTRGMTDNANRCLYNGTRILGYSRGPDGRYALDPEEAAVVRHIFQQYCSGFSAASICRQLNAQGVKTSRGKSFSPESLMRILSNERYTGTYIWGSIRVSEGMPAIIDQKTFQEAQAMKKKTARHVEQGAVDFLLTGKAFCGLCRSAMIGDSGTSKAGNRFYYYSCQSHKARKGCNKKSIGKDRLEDAVIDFVLDYVLSDEMIEKNADAIMALQAEELKSSPLAAMESEQAEVKKQIDNINNAIAAGVWSSSTVEKLKALEATAENLRVSIETLRFSQAQLMDRDRVIFFLHRFTKGDRNDPLHRQHLIQTFVNSVYVYDDHLWIVVNNTEGNFRFDLPADLQEEVPDAALCSDSVSNGVPDVLHPNTRVTAFRIAI

SEQ ID NO: 10155 - protein, 523 aa, Unknown
  Description of Unknown: Integrase B10156 sequence
  cd00338,PF13408,IPR011109,IPR038109,PF07508, Coil,PS51736,IPR036162,IPR006119,PTHR30461, G3DSA:3.40.50.1390,PTHR30461:SF3,PS51737,IPR025827,PF00239, SM00857,G3DSA:1.10.10.2600,SSF53041
MEVVLYLRYSSDRQNEQSIEGQRRVCEKYCESMGYTIVGEYADRAMSAMKDTDKRVNFQRMVKDSEKRLWQGVIVYKLDRFARNRYDSATYKARLKKNGVRVISATENISDNPEGIILESVLEGMAEFYSKELSQKITRGMYESALKCNSCGGHISLGYKIENKKLVIDPKTAPIVRKAFDMYANGHTVAYICQVLNEAGYRTKTGSLFNKNSFHSIFRNRKYIGEYKFMDVVVEGGVPAIIDKETFEKVQVILNRKAQAPARGKALVDYMLSGKVICGHCNKLATGTASTSHTGRKYFYYTCSGRRGHNGCTKTPIRKELLEEAVVNDTVEMLTPEVIEYLADLAVKASEKERQDYTLISSLQAEISEYEKSIERLLKLVENGADSPTLSKRLNELEKAKRSAERSLVKEEAEYFLLDKDQVVFFLTQFTQGDKADPEFQRRIIDLLINSVIVWDDEDDGDGTHKITITYNLTPRKSKTITVKDLSKVGCVFQPDKPTITSKYAPYLIGQIVFAINVKHRFE

SEQ ID NO: 10156 - protein, 523 aa, Unknown
  Description of Unknown: Integrase B10157 sequence
  cd00338,PF13408,IPR011109,PF07508,Coil, PS51736,G3DSA:3.40.50.1390,PTHR30461,IPR006119,IPR036162, PTHR30461:SF3,IPR025827,PF00239,SM00857,SSF53041
LNFGIYTRKSYFTDTSDSVKMQLSACQEYIDRVFDDVTTVTPYEDDGYVRSDIDRPAMNRLREDVGAGLIDCVVIYRIDRVCSDMMDFCTFYTYLKEHEVKFVTVKDGIDTTTPIGEAMMYLAVIFSGIEIGNDSIRIRDGMNHLAARGFWCGGMAPFGYDIVEVDLGAKKHKTLVKNDEQHEEKERLVDILLTNDFSLQALETYCRQQGIRSQRGAFLSTTQLHQILRSPFCVADTPEIFDYFQELGCIMDEGSPRELWDGQHGVMVYGRTTEKRVNRKKKHVQAPPEEWRVSIGYHEPTMSAERWLQVQDHFGRKKIDKTMKHETTLLKGVLRCKCGRLMGLARKKKVDGTVSTWYKCPRRERAGDCDMGQIKAELLDEKVLEIFREIEHDPDVVKRYIKEEKQTTGSGDKNKKKIQETEKKIDRLVASLGSAKNGPAAKYIVAEIEKLDVELATLKRAEAEALQEKRRNAVTLRNAQEKRLLICEMLANFDNFTMEEKNEIAREVIQSATWDGETLFIML

SEQ ID NO: 10157 - protein, 523 aa, Unknown
  Description of Unknown: Integrase B10158 sequence
  PF13408,IPR011109,PF07508,Coil, PS51736,IPR036162,PTHR30461,IPR006119, G3DSA:3.40.50.1390,PTHR30461:SF3,IPR025827,PS51737, PF00239,SM00857,cd03768,SSF53041
MRFFSYGRKSVFSDKSDSIDNQFRMNREYCESKFSGQVDSWQQFSDEDFTGANTSRPDLQRMLSFIKGGFCDVLVVYQLDRLSRDVRDFANIYALLEEHGVMFISIKENIDTTTPIGRAMMYVTVVFAQMERETIAARVTDNMLGLAKKGYWTGGNPPVGYVRKHIVVNGKKHCSIEVDPEGARYVTQIFDTFLAYNCSLQGMETRFKNQGIRTQNGKFFSTAQLHKMLTMPYCVEATPEVYDFYAAKGCIMDPGSPREMWDGSVGVIIYGRSTEKNKKHQAQPPEKWTVCLGKHKPFMPAEKWLAVQSRFTQNKCIKDAKWPVPLLKGVLRCKCGNLMQVSRKKKVDGTCSSWYYCRKRMRQGVDACDMGQIKCDLLDEEVLELFRGITADPALIQKFVKAEAPADVPDLKAAQARVSACERKIGRLAASLALAEDSAASKYIIAEMERLDVELGALKREASLAEMESHRAAASAKDAKATAAEIAKLIHGLEGFDDKEKNAIARAVIQECTWDGERLFITL

SEQ ID NO: 10158 - protein, 523 aa, Unknown
  Description of Unknown: Integrase B10159 sequence
  cd00338,PF13408,IPR011109,IPR038109,PF07508, Coil,PS51736,IPR036162,IPR006119,PTHR30461, G3DSA:3.40.50.1390,PTHR30461:SF3,PS51737,IPR025827,PF00239, SM00857,G3DSA:1.10.10.2600,SSF53041
MKKTKAVIYIRYSSHKQRESFSIEYQVDECTKFIETQGYELVDKYIDEAKTGKKVAGRDAFDKMLFDASQRKFDKIIVFSFSRSFRNTREALNCNHDLYEKYGIVIQSVIEPIDMTNPHGKFSGTNLFAMHELQSDITAAHVRSGMHVAAQQGYYLGSTVPFGYELYGTSEFSRGKERKKFRPNEAEAKIVREMFELYADGFSLNFIQTSLRTQGVKGRRGDIMGHQTIARILKSEFYIGTRHYHVKGYDPLVLKNCVPAIIDMDLWHRVQARHSENKLPKPRRTKRLYSLTGKIICAKCGGHMFGTYKGDKRSDNWHYAYYHCANKKNKGTCDALNVRKDQIDQYCLDQIKKHILNEEAMRSIAAQISTAAGDSADDMQAKRDKLSKRKEKIEGILQKIRRDVYEEKITEAQGDADSAYYKQELLDVENALISLQTALRGAISPEAVYLYLSELLTLHGSNNDELIKNLFDKLIEKIVVHDDRIELHLVVFPFAHTGDCASSGQPYVCLSAEISRKDLRNRA

SEQ ID NO: 10159 - protein, 523 aa, Unknown
  Description of Unknown: Integrase B10160 sequence
  IPR038109,IPR006119,PS51737,PF00239,G3DSA:3.40.50.1390, PTHR30461,IPR025827,SM00857,G3DSA:1.10.10.2600,SSF53041, IPR011109,IPR015967,PF07508,PS51736,cd00338, PF13408,Coil,IPR036162,PS01300
MKRAVFYGRYSSDRQTEQSIEGQRRVCEEFAKAEQIQIVGEYIDRATSGTSTEHREQFQKMLKDSKNGGWDYVLVYKLDRFARSRYDSAISKQQLKKNGVKVLSATERITDSPEGILIEGLLESMDEYFSRELSRKCKRGIRESIIKGHNFGGRVLYGYDRKDKRFVINEEQAVNVRRIFKSYLSGCTIQSIADQLNADGYRTNYGNEFKRYTVSDILHNDKYTGIHYIDGIEEPETCPAIISQTTFERVKEKLNQSAHRSREHTTGHTYALSGLLQCGVCGRYVCGSSVERKYFYYACRSREHAENSVHIHADKLEQVVIDALQTFFTEEQVSTLAERLYQIYTTDMDGKPDRSKRLNEIEKQVQGTVNALIACPSSKALQEKLTQLEEQKAEIEKMPILQPQLKKEHFENYFHWLALRLEHIEDRQTFFHTVIHKVLVYPEKAVIILNMTDEMADPPKREQVEAFMSNVGEVSLYPCPNCTIVKPSPSRFCDICTAPQRSNAISLIWNFCPSSSMKFSIKP

SEQ ID NO: 10160 - protein, 523 aa, Unknown
  Description of Unknown: Integrase B10161 sequence
  cd00338,PF13408,IPR011109,IPR038109,PF07508, Coil,PS51736,IPR036162,IPR006119,G3DSA:3.40.50.1390, PTHR30461,PTHR30461:SF3,PS51737,IPR025827,PF00239, SM00857,G3DSA:1.10.10.2600,SSF53041
MPKTKKTACRPKTAVAYARYSSAGQRDVSIEQQLRDIRAFADREGYTLVHEYADHAKSGFHNTAARSDFLAMLAAASSGQFDTVIVWKVDRFGRNREEAAIFKSQLRRSGVSVLYAMEPIPAGAAGVLTEGMLEAIAEWYSRNLSENVTRGHRDNAMKCISNGCPIFGYRRGPDGRYILQQDEAAAVRSIFTRYAQGFSAAAIAADLNAAGMKTVRGCAFSPQAIIRIISNERYVGTYIWSDIRVPGGMPAIVTSKEWEAAQRMKEKTGRHVEQGQTDFLLTGKAFCGHCGAAMIGDSGTSKNGATHYYYTCQGHKSRKGCRKRSLRKEYLEETVLRFIVDQCLTGPEREKIADAIIEAQKQQEKKSPLASMEKELHETQKKIDNVNRAIESGIWNSSTAVRLKSLEDAAADLILSIDKLKFSQSQLLTRDRLLFFLDKMAHYDLSSPARRKQLIDTFLNSVYVFDDYAHVVINCVEGNATITLADLNDLDLPPAPWCSDSVTDGAPFVTHPNTRMVIYTIAV

SEQ ID NO: 10161 - protein, 523 aa, Unknown; identical to SEQ ID NO: 9632
  Description of Unknown: Integrase B10162 sequence
  cd00338,PF13408,IPR011109,IPR038109,PF07508, Coil,PS51736,IPR036162,PTHR30461,IPR006119, G3DSA:3.40.50.1390,PTHR30461:SF3,PS51737,IPR025827,PF00239, SM00857,G3DSA:1.10.10.2600,SSF53041

SEQ ID NO: 10162 - protein, 523 aa, Unknown
  Description of Unknown: Integrase B10163 sequence
  cd00338,IPR011109,IPR038109,PF07508,Coil, PS51736,IPR036162,IPR006119,G3DSA:3.40.50.1390,PTHR30461, PS51737,PF00239,SM00857,G3DSA:1.10.10.2600,SSF53041
MKAIAVLRVSTETQQIEDQKRELVAFARDNGYEEKDLVYVEAIGASAIKLDQKYMDMADKIKALILQGGIDCVFVWEISRLGRNEVILMGFKEFFIKHKVQFICKNPSLRLLDDDGRVNTGTELAFSLFSTMSKQEMEEKKARFKRAKDSLRKKGMYAGGNTIRFGYKVGDDQHFIVNEEEAGVVRLIYDLYSTGNYSAWTLSEELKERGLFLDTCKILRILKSVAYIGDEVSESGVHYPPIVPRELWEKCSKIRGENRLYMKRGERIVLCAKLVRCFNCGAICSSNSRHYACCRHANKRGCTNGTVLRQDVVDDLAWRIASMLHMDYLMDLNENKVQEYKKELSVTQEKLREAERKMQDYVAKKDRIVDTFLEGLIDRNKRDLALLKLKDDISAHQSHLSSLQAKERAILGMIESAENPDALTNFVAALDKMDSEKKFDIIHRHIESITGEPISYGKRDPRTKKGNAIRIEIKSIYGKTYQFMYFPKYYENHNLYIYNGERWVPDYVTKVGHLKPFSSHETQ

SEQ ID NO: 10163 - protein, 523 aa, Unknown
  Description of Unknown: Integrase B10164 sequence
  PF13408,IPR011109,PF07508,Coil, PS51736,G3DSA:3.40.50.1390,IPR006119,IPR036162, PTHR30461,PTHR30461:SF3,IPR025827,PS51737, PF00239,SM00857,cd03768,SSF53041
MRFFSYGRKSVFSDKSDSIDNQFRMNREYCESKFSGQVDSWQQFSDEDFTGANTSRPDLQRMLSFIKGGFCDVLVVYQLDRLSRDVRDFANIYALLEEHGVMFISIKENIDTTTPIGRAMMYVTVVFAQMERETIAARVTDNMLGLAKKGYWTGGNPPVGYVRKHIVVNGKKHCSIEVDPDGARYVTQIFDTFLAYNCSLQGMETRFKNQGIRTQSGKFFSTTQLHKMLTMPYCVEATPEVYDFYAAKGCIMDPGSPREMWDGSVGVIIYGRSTEKNKKHQAQPPEKWTVCLGKHKPFMPAEKWLAVQSRFTQNKCIKDAKWPVPLLKGVLRCKCGNLMQVSRKKKVDGTCSSWYYCRKRMRQGVDACDMGQIKCDLLDEEVLELFRGITADPALIQKFVKAEAPADVTDLKAAQARVSACERKIGRLAASLALAEDSAASKYIIAEMERLDVELGALKREASLAEMESHRAAASAKDAKATAVEIAKLIHGLEGFDDKEKNAIARAVIQECTWDGERLFITL

SEQ ID NO: 10164 - protein, 523 aa, Unknown; identical to SEQ ID NO: 9629
  Description of Unknown: Integrase B10165 sequence
  cd00338,PF13408,IPR011109,IPR038109,PF07508, Coil,PS51736,IPR036162,G3DSA:3.40.50.1390,PTHR30461, IPR006119,PTHR30461:SF3,PS51737,IPR025827,PF00239, SM00857,G3DSA:1.10.10.2600,SSF53041

SEQ ID NO: 10165 - protein, 504 aa, Unknown
  Description of Unknown: Integrase B10166 sequence
  cd00338,PF13408,IPR011109,IPR038109,PF07508, PS51736,G3DSA:3.40.50.1390,IPR006119,IPR036162,PTHR30461, PTHR30461:SF3,PS51737,IPR025827,PF00239,SM00857, G3DSA:1.10.10.2600,SSF53041
MPTIKKIKPRAAIPTARKRVAAYARVSVGTEMLLHSLSAQVSHYSSLIQNNPEWEYAGVYADEGVTGTSTAHRDGFNRLMDDCNAGKIDLILTKSISRFARDTVDCLNAIRHLKDIGVEVRFEREGISSFTADGELLLTLLASFAQAESESIAANVRWAVRKGFEEGIPNGHKAPYGYVWDNGMFRVIPVQGEVVKHIYRRYLAGDSAYKIAKDLKAHGIVGQSGNPMCDSTIKDIVTNISYTGTMILQKNYFTENHGRRRNKGELPRYAVEDMYEPLVSMEDYEKAQAIRRHRAEESPNANAHLTKFSGIVRCGNCGCGVSRRTSGGAKKWVCNTRERKGIDVCDMRPVMENELETAAESAVGVRDDAEFRRIVSAVFIYGDRIEFRLTNGKSKTIAREYGCRTGFSGKLVCSECGAKLTRDTWRKRGRGTVAKIKVWICTAPRSSCSLRRVTEEELRRAAVSILDSDECEPAFAEQVRRAVISNRDIRFELKNGEVRTWQRE

SEQ ID NO: 10166 - protein, 523 aa, Unknown
  Description of Unknown: Integrase B10167 sequence
  cd00338,IPR011109,IPR038109,PF07508,Coil, PS51736,G3DSA:3.40.50.1390,IPR036162,PTHR30461,IPR006119, PTHR30461:SF3,PS51737,PF00239,SM00857,G3DSA:1.10.10.2600, SSF53041
MSDLDPRGLYCAYLRKSRRDEELEALGQGETLARHEHALKDLAARLGITIGHFYREIVSGDTIAQRPQVQQLLADISAGRWDGVLAMDVDRFGRGDSIDQGIIMQSFIYSGVPIITPDKIYDPTSEADSEFFEIKLFFSRREYAAIKKRMQRGRLASVMDGCYQSPRAPYGYERYKLPGRKGWSLRPVPEKAAIVRSVFAWYADGMDGQDAGSGVIAAHLNAMGLRTDLGRPFEPSYIRGMLQNPIYIGKVRWNQRKTQYKIIDGRRVATRPHSQDVILADGLHEPIVDADLFTRVQAIFAAHEKCPKNTQRQQVNPLAGLVFCAVCGRALQLTPSPDRADFLKCPSTGCPTARTYVHVVEAAILSELSRWTVEFTPADVPADPDPDAAARAAALKQLTDQRAQLSGQLTRLYDLLEQGIYSADLYRQRHADLSARLADLDATLAQLSAAPRPDPRASLVPRLRTVLDAYQAAPDPATKNALLRTVLDRVVYHKTQRCYRNDPPGAHLTLEIYPRQPSDDDDF

SEQ ID NO: 10167 - protein, 446 aa, Unknown
  Description of Unknown: Integrase B10168 sequence
  cd00338,PF13408,IPR011109,IPR038109,PF07508, PS51736,IPR036162,IPR006119,PTHR30461,G3DSA:3.40.50.1390, PTHR30461:SF3,IPR025827,PS51737,PF00239,SM00857, G3DSA:1.10.10.2600,SSF53041
MNRVVRKLKPKIPAIPQRMRVAAYARVSNDKESMVESLVAQVGYYSAHIQRNPQWIYVGVYADEGLTGTKDNRPEFQRLIADCYAGKIDMVITKSLSRFSRNTLDTLKILRELKQKGVDVFFERENIHSNSGDGELMLTILSSFAQEESRSVSENCKWRIREKMKQGELVGLRDMYGYVIERDSVSIEPRQAEVVRQIFNWYISGDSSVVIARCLNTAGELTLNHAAWSAKHVREILANEKYTGNALLQKSYITDYLSKRKKRNHGQVPQYYVEHSHPAIVDTDTFETARELLKSAGERNKPNSPVNARYPFTGKIICGNCGKSFQRKTTKGRVGWLCATYLERGRSACPVKQIPEAALLDACAQTLELPSFDEVEFRNKISRIEVTGVNSLSFVFTDGTIRTAAWKDRSRSESWTDEMKQAARKKSLAIKEALNGGSNTETGNEN

SEQ ID NO: 10168 - protein, 523 aa, Unknown
  Description of Unknown: Integrase B10169 sequence
  IPR011109,PF07508,Coil,PS51736,G3DSA:3.40.50.1390, PTHR30461,IPR006119,IPR036162,PTHR30461:SF3,PS51737, PF00239,SM00857,cd03768,SSF53041
VRFFCYGRKSVFSDKSDSVDNQLHMCLDYCESKFHGKIDSWECFSDEDFTGANTDRPQLQLMFSRIRENAADALVVYQLDRLSRNVRDFSNMYAVLEEHGVMFISIKETIDTTTPIGRAMMFVTAVFAQMERETIAERVSDNMLGLARKGYWTGGNPPVGYVRKSIVEHGRKHVTIVPDPEGVDYVNRIFDTFLSSNRSLQVIETQFKNSGIKTLSGKFFSSTQLYKILTMPFCVEATPEVYDYYANKGCIMDPDSPREKWDGSVGVMVYGRTTGKNKKHQLQPPEKWTVCLGHQEPFMKADKWLLVQSRFSEHKCIKDAKWPVPLMKGVLRCKCGSLMSVSRKKRVDGSCSSWYYCRKRMRQGVSYCDMGQTACDKLDSRLISIFRDIAADPKLINQYLQKTEDKPLRDPKAILSSITSCDGKIGRLTASLALAESSSISKYIIAEIKRLDSEKSRLQKELTDIEHESKRKMAREKDSLKAIAEISRLMSGLDGFNDKERNEIVRSVVKTCTWDGVNLFITL

SEQ ID NO: 10169 - protein, 436 aa, Unknown
  Description of Unknown: Integrase B10170 sequence
  cd00338,IPR011109,IPR038109,PF07508, Coil,PS51736,IPR036162,IPR006119, G3DSA:3.40.50.1390,PTHR30461,mobidb-lite,PS51737, PF00239,SM00857,G3DSA:1.10.10.2600,SSF53041
MPKKVRKMPQKPRLEQPKKVAAYARVSTGKDAMLHSLSSQVSYYSSLIQNHAGWLYAGVYSDEALTGTKDSRSGFQNLLSDCRAGKVNLVLTKSISRFARNTVTLLETVRELKVLEVDVFFEEQNIYTMSAEGELMLTILASYAQEESLSASENQKWRVRKGFENGELLNWRFLFGYSISKDGIEIDTATAPIVREIFARVIDGETFGAISKNLNSRGVPGALGGKWCAQRIRETVGNEKYTGNAMLQKHYRNNHLEKKKCRNTGELPMFFAEKTHPAIIDMDTFNAAQVVLQRMKEAAQGRPRPQKSEFTGKIYCPFCGKYYKRNTCNGSVGWNCSTFLTEGKAYCHGKKIPEATLQAVCAQVLGTETYNSTVFDMQVDHIEVPEGNRLRFVFKDGSTVERTWADRSRRESWTSEMKQAAAERTRIQRREKQCQE

SEQ ID NO: 10170 - protein, 445 aa, Unknown
  Description of Unknown: Integrase B10171 sequence
  cd00338,PF13408,IPR011109,IPR038109,PF07508, PS51736,G3DSA:3.40.50.1390,IPR006119,IPR036162,PTHR30461, mobidb-lite,PTHR30461:SF3,IPR025827,PS51737,PF00239, SM00857,G3DSA:1.10.10.2600,SSF53041
MNRVIHKVQPTIPAIPQRMRVAAYARVSNDKMAMVESLAAQVSYYSAHIQRNPQWIYVGVFADEGLSGTKDNRPEYQRLISDCYAGKIDMVITKSLSRFSRNTLDTLNILRELKQRGVDVFFERENIHSNSGDGELMLTILSSYAQEESRSASENIKWRIRKKFEQGEISGWCQLYGYTIRRGKVAIDAYKADIVRRIFSEYLAGDSATVIAKRLRLEGVHCEQGGQWKQFTVSEILRNEKYTGNQLLQKTFTKDHLSKRAKKNQGELPLYLVENAHPAIIDAETYQRAMRRMEGNQKTAKRPEPKMDNQLFRRKIICSHCGRHFIRKNTNGTPGYVCSTYSAEGKDFCLSKKIPESTIVEFSLKALGIPEFDKELFDKEIDHIVARYPNDLVFVFRDGHTCEYTWEDRSRAESWTEEMKIAAAEKTRSRKRSNSHGSHQESHED

SEQ ID NO: 10171 - protein, 523 aa, Unknown
  Description of Unknown: Integrase B10172 sequence
  IPR038109,IPR006119,PS51737,PF00239,G3DSA:3.40.50.1390, PTHR30461,IPR025827,SM00857,G3DSA:1.10.10.2600,SSF53041, IPR011109,PF07508,PS51736,mobidb-lite,cd00338, PF13408,Coil,IPR036162,PTHR30461:SF3
MKAVIYARYSSDNQREESVEAQINAIEEYANKNNHIILKHYIDRELTGTNDNRPSFQSMIKDSKTGLFDLVLIHKTDRFSRNKADSAIYKRMLLENGVKVIPVAESFISDSPFGVVMEGMLEGWAEYYSLNLSTEVKKGQNSNIRKFDTIGKVKHNGGKPPFGYVIDSEGYYVIDDHEAIAVRKIFDMYLNGYVYKDVMEWLDQLGYRTKYGKPFGKTSIHGILHNPKYCGVYTYRNKKRVYVGGRYKDIENPDKIVIDGGIPAIVSKEDFERIQLIMAENNKNSKRSASKEIFILSGKVFCSKCGSKLESNSYMGGRDRKHQYRNYRCSGRKKGLECDLKPYDKETLEMDVCLQLEKDVFNDDQIDILSKEIYEAFKKQSSTSVSTLKSYNTKKASLERQIENLTTALANGAAFNSVYSKLSDLEHQKDMLEFEIKREQYSSDRIMSLESIRDILLVGKDMHLKTDKEKTTLINMFVERIVLGDTLEVRLNFKPDRYMDSGGEGNRTPVRKPVHESFSHQSH

SEQ ID NO: 10172 - protein, 523 aa, Unknown
  Description of Unknown: Integrase B10173 sequence
  cd00338,PF13408,IPR011109,IPR038109,PF07508, Coil,PS51736,G3DSA:3.40.50.1390,IPR006119,PTHR30461, IPR036162,PTHR30461:SF3,IPR025827,PS51737,PF00239, SM00857,G3DSA:1.10.10.2600,SSF53041
MALAQNITVIPARRTIGTQKPAAKVQKTRVAAYCRVSTEYEEQESSYEVQVEHYTNYIKSNPEWEMVEVYADDGISGTNTAKREGFNRMIEDCKAGKIDMILTKSISRFSRNTVDCLKYTRELKDMNIAVFFEKENINTLDAKGEVLMTIMAALAQQESESLSANVRLGIQFRNQQGKVQINHNWFLGYTKDEDGKLVIVPEEAAVVQRIYAEYMDGKSFLQIKRGLEADGVLNGAGHKKWHESNIKQILTNEKYIGDALLQKTYTVNTLEKKRVANNGIAPKYYVEGSHEAIIDKDVFLRVQAEIARRANILADGKKRIYSSRYALSSIVFCGHCGDIFRRIKWNNRGCKSTVWRCVSRVLKKSSGIDCPARTIKEEVLQAAVVTAVNDAWSRKESILPELRENIRSVLEEDTDQKIAEVDAAVKLKQAELLDAGRDQEKIDEIGDAIMQLREERQQILTQAAMRKDVKDRIEDLATFLDEQTQAVTEYSDALVRRLIERITVYDEMLVVEFKSGLEIEVDA

SEQ ID NO: 10173 - protein, 523 aa, Unknown
  Description of Unknown: Integrase B10174 sequence
  cd00338,PF13408,IPR011109,IPR038109,PF07508, Coil,PS51736,G3DSA:3.40.50.1390,IPR006119,IPR036162, PTHR30461,PTHR30461:SF3,PS51737,IPR025827,PF00239, SM00857,G3DSA:1.10.10.2600,SSF53041
MEVVLYLRYSSDRQNEQSIEGQRHVCEKYCADMGYTIVGEYADRAMSAMKDTDKRLNFQRMIKDSEKHLWQGVIVYKLDRFARNRYDSATYKTRLKKNGVKVISATEAISDNPEGIILESVLEGMAEFYSKELSQKITRGMHESALKGNSCGGHISLGYKIENKKIVIDPKTAPIVRQAFEMYANGHTVAEICQTLNAAGYRTKSGAAFNKNSFHSMFRNKKYIGQYKFMEVVIDGGVPAIIDEETFNKVQAILAKKAQAPARGKAIIDYMLSGKVFCGHCGMPMVGTASTSKTGRKYFYYSCQGRRGHNGCEKTPVRKEFLEKAVVEDTLEMLTPEFIDYLADLAVKASEQERKENTLIPSLKAEISEYEKSIERLLRLVENGAESPTLSKRLNELEKAKRSAERNLAKEDSSYFLLEKEQIVFFLNQFVSGDKSDPEFQSRIIDMLVNSIIVWDNKENDDGTQDITITYNLTPKKERKITIKDLSKIECVFHPDKSTITSKYAPYIVGRMSFAINVKHRFE

SEQ ID NO: 10174 - protein, 523 aa, Unknown
  Description of Unknown: Integrase B10175 sequence
  cd00338,Coil,G3DSA:3.40.50.1390,PTHR30461,IPR006119, IPR036162,PF00239,SM00857,SSF53041
MASPFQQGDKVVAYCRYSEGDEQGLKNTSTEEQADAIRKFCDENRLQLVTIYADPFASGRSVHGRDHYLEMLSDLLHKKRTDIAGVVLWDYERYGRNYDQATLDAARLRMTGYKIYSLQQPITDNSPFAKVMEAMYMASAQNQSDMISADVRRALQNNFQKYKVIPRSCIPEGWIAVPVDMGTYSNGEPRIGYKAEPDPVLAPRIAKAIVMRMKGATLDEMKTIIGGIFSNKQRIYMKRLMARPLLFGQMTYGGTTLDDYCTSIIDKETFDKLQIYNKYAPREHERPQGHFSKNRPLLSDLLYCGVCGKKAFLNRRTAKGKLYETYYCNDKHVGFRRVILDKLVIEKGIELLSDEQYQKDVEDIIAGLQSPFSSNPNNNTLTTEIAKIDRKIERISSAIEDSDEPPATLVKRLSELEKERAELSSQLNAVDNEKAHENILKEFDTIRKSIIEILKNEKSTTDELRNALSLFIHSVVIYPENKVLIRHTLPGMASVASTASEKLQRPQSVLYCYSQLLETLCIL

SEQ ID NO: 10175 - protein, 522 aa, Unknown
  Description of Unknown: Integrase B10176 sequence
  cd00338,PF13408,IPR011109,IPR038109,PF07508,Coil,G3DSA:3.40.50 .1390,PTHR30461,IPR036162,IPR006119,PTHR30461:SF3,IPR025827, PS51737,PF00239,SM00857,G3DSA:1.10.10.2600,SSF53041
MKKPTTPTCSPKTAVAYARYSSAGQRDVSIEQQLADIRAFAKREGYTLVHEYADHARSGFKNTSARTAFQSMMAAAESGSFDTVISWKVDRFGRNREESALFKGRLRRFGVKVLYAMEPIPEGSAGVLLEGMLEATAEWYSRQLSENVTRGMTDNAHRCLYNGTRILGYKRGPDGRYAIDPEEAGVVRHIFDLYSRGYSAARICRILNNEGLKTSRGKPFQLEGMLRIIRNERYTGVYIWGDIRVPDGMPAIIDRSTFEEAQRMIKKTARHIEQGVGDYLLTGKAFCGYCGAAMIGDSGTSKDGTRHHYYSCQGHKARKGCKKKSIPKDRLESIVINYVMDSVLAEENIQATVDLIMALQAEEMKSSPLAAMESEYAEITKQIDNINNAIAAGIWNSSTSAKLKSLEDSADNLRVSIEMMRFSQAQLMDRDRVEFFLRQFTKGDRDDPDFRRHVIETFVNSVYVYDDHLKIVTNNHEGNQRFPLEALPDDSGPDLSCSDKLNCSVPIVTHPNTAVTIFRIAI

SEQ ID NO: 10176 - protein, 522 aa, Unknown
  Description of Unknown: Integrase B10177 sequence
  cd00338,IPR011109,IPR038109,PF07508,Coil, PS51736,IPR036162,PTHR30461,IPR006119,G3DSA:3.40.50.1390, PTHR30461:SF3,PS51737,PF00239,SM00857,G3DSA:1.10.10.2600, SSF53041
LTVFEKNNAIEAAFSKDIYAMYLRKSRSDDPDESVEETLDKHKRILTDLAARKGLFIGKIYAEVVSGAESVDARPEIQQLIQDCYAGLYRGIIIKEVTRLSRGSQGDAQKIMDCLKYSRMNNGVLVVTPTKTYDIAHNSDDEEYMEFELFMSRREYKMINRRMQSGKDQCIVDGEYMASYRPYGWNIIREGKKRTLTPNPEEYDIGKMMYAWKIEGVTCYKIAQRLTTMGVPTYTGESQEWSKETVKTFLQNPVNMGKVRWNDRMQIKVMQNGKLKTSRPRTSHSDHYMLYDGIHKDKAMVTEEEWKLANKDFKPDRTKANLKLTNILAGLLCCPKCGKMMHYQSNAHRPGTAARFCHPPVQSCKVKSALAEDVLKAVAHSLRMYIEDFELKINGLPSVSADSVILQIEALNKELRKIQRKLDKLFDDYEDEIYSANEFVERKAKHNERIVAIKEQIAALEDTIPEKEEYEDKVMKLTDALNSLEDDSIEAEDKNRYLKEIVDKIEFSRENGLEFILDVYLK

SEQ ID NO: 10177 - protein, 522 aa, Unknown
  Description of Unknown: Integrase B10178 sequence
  cd00338,PF13408,IPR011109,IPR038109,PF07508, Coil,PS51736,IPR036162,IPR006119,PTHR30461, G3DSA:3.40.50.1390,PTHR30461:SF3,IPR025827,PS51737,PF00239, SM00857,G3DSA:1.10.10.2600,SSF53041
LISLKSQREAIQKYCKEQGWVVVQDIISDTASGAILNRPGLHKLRKLMRDKALDTVIAYAVDRLSRNQNHVGILLDEAETHGVTLDFVTEKFESNPMGRMVLALRSFMAELEREKISERTGRGKIERAKAGKIPHGTNIGCYGYIYSKDTGVRTINEEQAVVVRWMFEQSASGKSTHYIANQLAERGVTSLSGKLWNPRTVLNILRNDVYTGRTYTGRREWIKVDGKRSRTMKTDPATWVEIIGASPRIVSDELFAAAAQRLDNPHFRPVSRKGRDFLVTGFLSCAFCSSPMSGHTVKGKYGPHHYYRCAGTLGAHYRPKICKAKELPAIPIEEHVWGDIKTILDNPDLILLQLASQDGVNESLTAEIKLKEKRLDRLDAEQVLIIRAYRDPNLDKAKIEQETALLKKQKEMLSKDVTELRLRQRGLKRSAENQAAAVEHVRAMRQALGSFDYEMKRLALAALDVKVVITPGEVPSIQVQTSLRTEKFTTIGQTSACSSHGSETVTLITGQASWITRKWLPA

SEQ ID NO: 10178 - protein, 522 aa, Unknown
  Description of Unknown: Integrase B10179 sequence
  cd00338,IPR011109,IPR038109,PF07508,Coil, PS51736,G3DSA:3.40.50.1390,PTHR30461,IPR006119,IPR036162, PTHR30461:SF3,PS51737,PF00239,SM00857,G3DSA:1.10.10.2600, SSF53041
VGGRAAIYARFSSHNQRGESIEIQVEKSRAYCAENDLRVVATYCDFAQTGTNTDRAEFQRMMADAKRGLFDFVVIYKVTRIMRNRDEMAMARIMLRRCRVEILYAGEDISDGSAGVLQLGMLEVLAEYESALDGERIRDGIQKNAERCMANGCVRYGWDIVDGRYVVNEEEAAAIRLGVRMVLSGKSVADVVRAWEPYRTKRGGKWRFQTVRRILMRRENGGEYRYAGVVVPGGMPAIVPMDDEERVIRMLEDSHRPRAKTEAWDFPLTGKLYDGRDGGLMTGTSGTGKSGRPYHYYRCRSCGRTVRRDVVEKRVADAVREALGSAGSRERIARMLADAEEERADEKPLSETIKGELTKIETAFSNIWAAIESGIAPPGGKERIDALKQRQALLKDELRTAEALEAARLDYDRALFWLEGMAAAEVDDAQLLRTFVARVVLGGPDDDDGLRVAFTFDDSAGLGDNPSLPDAIGPGGEVFDRMNASSTNSYRQVDTYIYLPFYSQSVPRRIELCAGRGRKENA

SEQ ID NO: 10179 - protein, 522 aa, Unknown
  Description of Unknown: Integrase B10180 sequence
  cd00338,IPR011109,IPR038109,PF07508,Coil, PS51736,G3DSA:3.40.50.1390,IPR006119,PTHR30461,IPR036162, PTHR30461:SF3,PS51737,PF00239,SM00857,G3DSA:1.10.10.2600, SSF53041
VTVFETNDIIETSMPKMDVYAIYLRKSQSDDPSETVEEVIKRHKDILSQHAARRGLYIGEIYQEVVSGENIDARKEFQRLIKDCYAGKYRGILVIEITRLSRGNQGDAQVVLDMLKFSNNNRGVLVVTPTKTYDVANNSDDEEYMEFELFMSRREYKMITRRMLRGKEQAIVEGQFMNSHRPYGYNIVKTKKFRTLEPNPEEAPIIKQIFEWTVKDNMTAYEIAKRLDAMGVPTYTRSAEWSRETIKAFLTNPVYVGRVRYNDRMEVRKMVDGKIVKSRPRSNHTDRYMEYEGLHKAHALVDEETFKAASSRFYSDRTKGELELKNPLAGILYCPNCDKAMVYQGFDKRPNVAPRFRHAQSNNCKVKSVIVTDVLDAVIHSLKLYIEDFEMQSDNTQTIDEAAIAAQVDTLNKELRKSERILAKLFTSWEDETISDNEFVQRKAVHNERIASIKQQIEALEDTIPQHEELEDRIIQFREVMDALKDDTLSAEAKNMALKSIIERIYFSRENNAEFFLDIQTK

SEQ ID NO: 10180 - protein, 522 aa, Unknown
  Description of Unknown: Integrase B10181 sequence
  cd00338,PF13408,IPR011109,IPR038109,PF07508, PS51736,IPR036162,IPR006119,G3DSA:3.40.50.1390,PTHR30461, PTHR30461:SF3,IPR025827,PS51737,PF00239,SM00857, G3DSA:1.10.10.2600,SSF53041
MGNVMLIPARRQVGNTARKQEDEKPKLRVVAYCRVSTDSDEQATSYEAQVEHYTEFIQKNADWEFAGIYADDGISGTNTKKREEFNRMIDDCKDGKIDMIITKSISRFARNTLDCLKYIRQLKDMNIPVQFEKESINTMDAKGEVLITIMASLAQQESQSLSQNVKLGLQYRYQQGKVQINHNRFLGYTKDADGNLVIDPEQAEIVKRIYREYLEGLSMDKISAGLEADGILTGAGKPKWHTSTINKILRNEKYIGDALLQKTYTTDFLNKTRVKNNGIVPQYYVEGNHEAIIPKDIYLQVQEELVRRRVVKTSANGKKRSYSCNHCFSQMIICGECGEMFRRLHWNNRGCKSIVWRCISRLEPTGQECHARTVNELVLQDVVVAAINQMLGDKSGYQAQLQLNIAAVIRASQATSLDNIDSKLMALQQELLQKANSKEAYDEIADEIFRLRELRQQTTVDTAARDEQIKRINDLQDFIAQQTAHLTEFDESLVRRWVKQITVWDDHFTIELKSGVSIDIDA

SEQ ID NO: 10181 - protein, 521 aa, Unknown
  Description of Unknown: Integrase B10182 sequence
  cd00338,PF13408,IPR011109,IPR038109,PF07508, PS51736,IPR036162,PTHR30461,IPR006119,G3DSA:3.40.50.1390, PTHR30461:SF3,IPR025827,PS51737,PF00239,SM00857, G3DSA:1.10.10.2600,SSF53041
VVRITKIEATQSFATQQKTRVAAYARVSTDSDEQLLSLETQKEHYETFIKDHQDWEYAGLYYDEGISGTKIEKRDGLLRLLKDCEDGKIDRVITKSISRFSRNTTNTLEMVRNLSKLGVYIFFEKENIDTEHMSSELMLSILSSIAESESRSISENSKWSVKRRFEEGTFIISYPPYGYANIDGEMVVVPEEAEVVREMFCMALSGMGSHIIANTLNERGIKSKKNCRWHASTVKGILRNEKYTGDVIFQKTFTDESFNRHTNYGEENMYLCKNHHEAIISHETFDMVADAMARRGQEKGNGGDTDRYQNRYSLSGKIICGECGSTFKRRNHYKPSGDYIAWSCRGHLDDKDSCSMLYVKDDVIKLAFVRMMNKLQVGRQQIMKPFVDGLRGFNNRDRLHQINELESKIESNSEQQQVLVNLMNAGYIEPDIYHAEHNVLVLEADALVKEKQQLSQSISGDLNHLTEAEKLQRFLAKMEDITEYDADLFAEYVENITVQDRETFTFNMKCGLKLTERVVLE

SEQ ID NO: 10182 - protein, 522 aa, Unknown
  Description of Unknown: Integrase B10183 sequence
  PF13408,IPR011109,PF07508,PS51736,G3DSA:3.40.50.1390, PTHR30461,IPR036162,IPR006119,PTHR30461:SF3,PS51737, IPR025827,PF00239,SM00857,cd03768,SSF53041
MRIFIYARKSVFSDKSDSVDNQLRMCREYCDAHFPDAERTYCEYSDEDFSGKNTDRPDLKRMMDRISEADMLIVYQLDRLTRSVRDFSNIYQILNDNSVSFVSVKEAIDTSTPIGRAMMYIIVIFAQMERETTAARVADNMLGLAKKGWWTGGNPPIGYIRTRVEQDGRRHVLIVPEEEGAKYVRWLFSFFLRGGYSLQGCETALKHQGVRAPGGGFLSTVQIYQILTSPVYAPATQEVYDYYAARGCRMDDGSPRELWDGSVGVMVYGRTSEASGKHRKMPPEAWTVCLGHHEPIIDAETWLAVQAQMGHNKIERKKKHPIRLLKGTLRCGCCGTLMQVSYKQKADGYSAWYYCLKRMRQGPEACPMGHIKCELLDEKILDVFRQYEADAATIRAAVIREDEEREAIDPEPIRAKLRGAETRLARLTAMLGECSSEAQEKAVFAEVGRQAEKVEALKAELSDVLRAETRRAMDEADIDRRVREIQEMIRGLDGFDAEERNAIVRKVFRVCTWDGETLRLGI

SEQ ID NO: 10183 - protein, 521 aa, Unknown
  Description of Unknown: Integrase B10184 sequence
  cd00338,PF13408,IPR011109,IPR038109, PF07508,Coil,PS51736,IPR036162, IPR006119,G3DSA:3.40.50.1390,PTHR30461,PTHR30461:SF3, PS51737,IPR025827,PF00239,SM00857,G3DSA:1.10.10.2600,SSF53041
VKKITKIDGVQNNSTIKKELRVAAYCRVSTGSDAQLESLETQKIHYERYINSREDWKFAGLYFDEGITGTKAEKRPELLRLITDCEARKIDFVITKSISRFSRNTTDCLALVRKLQSLNIPIFFEKENINTGSMESELFLAILSSMAEGESASISENSKWSIKRRFQNGTFKLSYTPYGYDWDGANMIINPAQAAVVKRIFADILSGKSTNAIADELNAEKIPSKKNTNWTSSTIRGILANEKYTGDVIFQKTYTDENFNRHTNYGEVDQYMASDHHEAIISHADFEAANALVSQRALEKGVKKGSDKYQKRYAFSGKIICGECGDTFKRRIHTCTTYKYVAWACNTHLKDKSTCRMKYVRDNDIKAAFVTMLNKLIYGHRLVLVPYLKALENFSGDEALQRIQHLELLLDQNSEQRETLTKLMAQGYIDQILYNQETNALLLQAETYRSDIEAITICMTGDSAKVTETNLLLHFVSHADMLTTYSEELFESYADHVEITGRNEIKFVMKCGLTFTERIGD

SEQ ID NO: 10184 - protein, 522 aa, Unknown
  Description of Unknown: Integrase B10185 sequence
  cd00338,PF13408,IPR011109,IPR038109,PF07508, Coil,PS51736,IPR036162,G3DSA:3.40.50.1390,IPR006119, PTHR30461,PTHR30461:SF3,PS51737,IPR025827,PF00239, SM00857,G3DSA:1.10.10.2600,SSF53041
MADTPKLNAAFYGRYSAGPNQTESSIEGQRRECYARAKSQNAVIRKDYIDRHISGQTDQRPQFQQLMKDVKKGLYNVVYVYTIDRFSRNKYDIAKYKNEMRKAGCRLISAKEYVPAGPEGIILESVLEGMAEYYSKELSRKVSRGMYESALKHRHIGGVVPFGFVLNKNKKYKADPVKAPIVREIYERYVKGEPAVEICKSLNNRGIATSLDKKFNKSSLNRILSNPKYIGTYTYKRAYIDEITQEKKTELIEFKNVIEPIISEELFIKAGQRMELNKRTSKRNKNKPQVEFLLTGKLFCSKCHAPYTGDSGTSKNGNSYYYYTCANKKSKRGKEACRSKSFPKDKLEEFVAQYTRDDILSTEVINWLAEQIVSLQGEQKDDLQIRTLIQQKKEVESKIQNIMLAIENGIFTPTTKDRLEALEESKRNLEYNIDVERFKNDAPMETKDSIIFYLNQFKNGDIKDLDHQRQIINSFIETIILDEEQMIIQYRYSDAANGTREIAIKNTFDVFECVLNGGRYVT

SEQ ID NO: 10185 - protein, 522 aa, Unknown
  Description of Unknown: Integrase B10186 sequence
  cd00338,PF13408,IPR011109,IPR038109,PF07508, Coil,PS51736,IPR036162,PTHR30461,IPR006119, G3DSA:3.40.50.1390,PTHR30461:SF3,PS51737,IPR025827,PF00239, SM00857,G3DSA:1.10.10.2600,SSF53041
MKKSAAPACNPKTAVAYARYSSAGQRDVSIEQQLQDIRAFAQREGYNIVHEYADHARSGFKSATTRDAFQAMIRAAKTGTFDTVLIWKTDRFSRNREDSARYKGQLKRLGIRTIAAMEPIPEGSAGILLESMLEATAEWYSQTLSENVSRGMYDNARRCLHNGVRVLGYSFGDDGHYVIDPEGASIVRRIFDRYVAGYSAAMIARELNGQSLTNINGRPFTTTNILWTINNERYIGIYHWGDVRIPDGMPAIISNQQFEEAQRMKTKTSRHIEQGTVDYLLTGKAFCGHCGAAMIGDSGTSRTGDRHYYYSCQAHKARKGCDKKSIGKEYLEDAVINFILDHVLQEPEINRIADAVTKAQAEAVKSSPLAALKSDLAEVKKKIANVNGAIAQGIYTSSTLDMLRDLEAEAADIQKSIDFVSFSESQLIDHDRVIFFLRQSVKGDRSDPGFRKYIINTFVNAVYLFDDHFKLVINNVDGNLRYPLDALPDGSDSESFGPPNTTYPNHRITIYVIPLEPDKKRA

SEQ ID NO: 10186 - protein, 522 aa, Unknown
  Description of Unknown: Integrase B10187 sequence
  IPR038109,IPR006119,PS51737,PF00239,G3DSA:3.40.50.1390, PTHR30461,IPR025827,SM00857,G3DSA:1.10.10.2600,SSF53041, IPR011109,PF07508,PS51736,mobidb-lite,cd00338, PF13408,Coil,IPR036162,PTHR30461:SF3
MPRKKKLQEVGGLRLVAYYRYSNGGQQTEQSIEGQRRDCEAYAKAHGYKIVHEYIDRHISGKSDSRPAFQQMISDSDSHLFDAVICWKTDRLARSRYDSIIYKTRLRRNGVKILYAAETVVDGPEGIIIEGLMESLAEYYSAELAQKLRRGQRESALKCIALGGNRSFGYDIGPDKHYCINEKQAPAVRYIFEQYAAGATAADIVRELTARGYRTSRGNPFNKNSICRIITNEMYLGVYKYADIRIEGGVPAMIDRELFNRCQTQLAFNRAHGGGKGAPRADYVLVGKLDCGLCGHAMKGASATGHTGSKHYYYTCTQHVEKKCPKTSIEKNYLEQIIVDGVAKYVLTPEKISQIVDCMMELQAKEQEPKGNPEKDALEAELAECRRKQNNILEAIEEGGSARLAARLRTLEEQEAQLTFALGEINNAPTPPQFSREALTFMFEQFRREEDEVDEEYRRRILDTFVSSILLYEDLAEVKFNITDQKTGDFERVILPISANKKPPEDDDITSNSEGSTALRLV

SEQ ID NO: 10187 - protein, 521 aa, Unknown
  Description of Unknown: Integrase B10188 sequence
  cd00338,PF13408,IPR011109,IPR038109,PF07508, PS51736,G3DSA:3.40.50.1390,IPR036162,IPR006119,PTHR30461, PTHR30461:SF3,PS51737,IPR025827,PF00239,SM00857, G3DSA:1.10.10.2600,SSF53041
VKKVTKIDGVQKNTAINSKLRVAAYCRVSTGSDAQLESLEAQKSHYEQYINSREDWQFAGLYFDEGITGTKAEKRPELLRLITDCEAKKIDFVITKSISRFSRNTTDCLALVRKLQNLDIPLYFEKENINTGSMKSELFLAILSSMAEGESASISENAKWSVKRRFQNGTYKLGYTPYGYDWYGKNMIINPEQAAVVKRIFADILSGKSTNAIADELNAEKVPSKKNNHWTASTIRGILANEKYTGDVIFQKTYTDENFNRHTNYGEVDQYMAPDHHEAIISHSDFDAANALVNQRAAEKGIEKGSDKYQQRYAFSGKIICGECGDTFKRRIHTCNTYKYVAWACNTHLKDKKSCHMKYVRDDEIKVAFMTMLNKLIYGYRLVLIPYLKVLENSSGDEAIQRIQHLELLISQNSEQREALTKLMAQGYIDQILYNQETNALLLQAETYRSDIEAITIGMTGDAAKVTETNLLLHFVSHTDMLTAYSEELFENYADHIEVISRNEIKFAMKCGLTFTERIGD

SEQ ID NO: 10188 - protein, 522 aa, Unknown; identical to SEQ ID NO: 9746
  Description of Unknown: Integrase B10189 sequence
  cd00338,PF13408,IPR011109,IPR038109,PF07508, Coil,PS51736,G3DSA:3.40.50.1390,IPR006119,IPR036162, PTHR30461,PTHR30461:SF3,IPR025827,PS51737,PF00239, SM00857,G3DSA:1.10.10.2600,SSF53041

SEQ ID NO: 10189 - protein, 522 aa, Unknown
  Description of Unknown: Integrase B10190 sequence
  cd00338,PF13408,IPR011109,IPR038109,PF07508, Coil,PS51736,G3DSA:3.40.50.1390,IPR036162,IPR006119, PTHR30461,PS51737,IPR025827,PF00239,SM00857, G3DSA:1.10.10.2600,SSF53041
MDVVLYMRYSSDRQNEQSIEGQHRVCKQFCDANGYNIVDVYIDRALSAFHDTTKRVEFQRMITDSEKHQWQGIVVYKLDRFARNRYDSAIYKAKLKKNGVRVISATENISDNPEGVLLESVLEGMAEFYSKELSQKITRGMYESAHKCHSIGGHIPLGYKIVDKKLAIDPLTAPIVREAFEMYAEGATVSEICDVFNNKGYKTAKGSEFNKNSFRAMFKNERYIGVYTYKDLRIEGGVPAIVDNDIFETVQKRLKTNAKAPARGKAVVDYVLSAKLFCGHCGKPMNGESGTSHTGKRHHYYACSSRKTFHNCDKKSIQKDYIEYVVAQKVQELLTPETIDYYAECAVKACQDEIANSTLLPSIRNQIKEIDKSINRLIRMVEQGAESHTLTARLNELEKEKKAAEKRLLKEQSTIIELDKEIVVYWLSKFLQGDIEDADFRRHLIDTLVNSVFVYDNPDGTTNLDIACNLTSGKHLKVTLSDVKSNGFGFGVLESTIKKRTPSGVLFWCVIRGDLNPMRVFA

SEQ ID NO: 10190 - protein, 522 aa, Unknown
  Description of Unknown: Integrase B10191 sequence
  cd00338,PF13408,IPR011109,IPR038109,PF07508, PS51736,G3DSA:3.40.50.1390,PTHR30461,IPR006119,IPR036162, PTHR30461:SF3,IPR025827,PS51737,PF00239,SM00857, G3DSA:1.10.10.2600,SSF53041
MIVALYARYSSDNQREESIVAQLRACREYCKRKGYSIVHEYADEACTGTNDNRPQFQQMLADAEAGLFEIVVAHKLDRIGRNAYDFYKNSHRLQAAGVKMEFAAQEIPDTPEGGMMKAVMAGMSEWYSANLSREVKKGKRENLLAGKAAGGVPLYGYDIGPDKRYIINEAEAVAVRTMFDMYAGGSSYGEILEWLNSHGYRTKRGKPFGKNSLYDLMKNRRYIGWSVGGRHRRTGKPRNSHAPDDDGVVIVKDVCPVIIDEKLFERVQKRMEANRHKNGGRQKAKVPYLLSGYVFCDVCGGAMVGGATTNTKGVRTRYYRCETHMRKGKTVCANRAVNADDLERDVLDQLRAVLYDEGVLDTLVEKVQVEYAKLQKNEKASVDMMTEARDKARKQLDNFYDRIRAGVPFDEIDEAEFQRTKDAFRTAEHNLKQIETRGHLPKMPPAKIKEYIQTTFGGMVNEKSTINYRALLENLVDSIRVAPSTVTVKLKVRCSWCARSDVGSIAFIIDFVISRPASRRSA

SEQ ID NO: 10191 - protein, 522 aa, Unknown
  Description of Unknown: Integrase B10192 sequence
  cd00338,IPR011109,IPR038109,PF07508,Coil, PS51736,G3DSA:3.40.50.1390,IPR006119,IPR036162,PTHR30461, PTHR30461:SF3,PS51737,PF00239,SM00857,G3DSA:1.10.10.2600, SSF53041
MKAIGYIRLSDEDQSNYSIEGQERQIKEYCNKNNLELLKIYQDNGENSYTFDRKAFGTLEKEIKQAQFLIVYHLDRFSRNMAEAMLKVSQYLERGIRIRDVTEELTMDDYDPNVFMMRTLKFMQAEMELHNIRRRTRKGMVDAALAGRHANVAPVGYNNARDERNKPILTIDEEKGFIIRIIFREYLNGMGVEELRRMASRYGFKHKGNSAIQRILANPVYAGFVKVPATKTQPAHLVKGLHTPLISEQDYWLVQERLQGKTMSIQNREDVPLRGVLQCSCGRKFTAGNSKGKTRYYWYYVCHECRQNLSAKCLHKQFDELLDNLSFDPKDLQLLKQKLSAKLNDYIKNRGDKIRQAEKQLKLVEEKISSVEIKWLTKPDVSEASYNKVISELRADQSRLYKEITKANTNQQAYWDKMNNLLLILSDLRSHFEKLELEKKHQFINWVFDSSLSHDGEIYRTPFINDLFAHNTLTLKEKGLLEIVAPVIKLGETPIRTRDGSSIEHFPDILTHLDRLLAIFAA

SEQ ID NO: 10192 - protein, 522 aa, Unknown
  Description of Unknown: Integrase B10193 sequence
  cd00338,IPR011109,IPR038109,PF07508,Coil, PS51736,G3DSA:3.40.50.1390,IPR006119,IPR036162,PTHR30461, PTHR30461:SF3,PS51737,PF00239,SM00857,G3DSA:1.10.10.2600, SSF53041
MTNLHMPIGSARVYQDRNRPRKAVFYGRVSTEHEAQLSALENQMQWYDDQLRYHPNWMLVERYIDEGITGTQAKKRPAFLRMIEDARAGKFDLIVTREVCRFARNTVDTLVTTRELKNIGVEVYFVEDNIWTMDGDGELRLTIMATLAQEESRKVSERVKAGQHVSREKGTLYGSGNILGYDRAGDTYVINEDQAETVRMIFDMYLHEGIGTGKIAQRLTELGRLNASGLNKWSHAVISRILNNQTYMGVMAYGKSYSNNYLEQKRINNRDKTTYICVEGNYPAIVNQEDWYKAQEIKAGRMMESFNPETGKKVRHAVPEKRDLWGTRLRCSCGCSFRKNRWHRNINAPNSYGYQCYNILNNGSAKQRRAAGADDTGYCDQPMIADWKLELMGKAILEKYLGQHQELIQYTIDLIQQCGRNRKPRESNIANIHARMEQIRIRKERLLDMRTGGELTKEEFLAQRRKLDAELQKLTMKAESVNVIQPQERLIEEALQEMLDFSHPKPNPALIRKFVSKIVPDG

SEQ ID NO: 10193 - protein, 519 aa, Unknown
  Description of Unknown: Integrase B10194 sequence
  cd00338,PF13408,IPR011109,IPR038109,PF07508, Coil,PS51736,IPR036162,PTHR30461,IPR006119, G3DSA:3.40.50.1390,PTHR30461:SF3,PS51737,IPR025827,PF00239, SM00857,G3DSA:1.10.10.2600,SSF53041
LKKVTKIAETASSKVKLKKIRVAAYCRVSTDSDAQLESLEAQKTHYENCITSRDDWEFAGLYYDEGITGTKKDKRPELMRLIGDCKAGRIDFIVTKSISRFSRNTTDCLELVRKLLDLNIPIFFEKENINTGSMESELFLAILSGMAESESVSISENSKWSIQKRFENGTFKCSYPPYGYDWDGEQMVINPEQAAVVKEIFASLLSGKGTHAIADDLNRRGVSSKRGGRWTATTIRGMLSNEKYVGDCLFQKTYSDSQFVRHNNHGEQTQYMVTDHHEPIISRDDFEAAKAFISQRASEKGVTKGTDKYQNRYAFSGKIICGECGDTFKRRIHSCTDHKYIAWCCNTHIKDMDRCHMLFVKDDALKQAFTTMLNKLIFSHRQILKPYLESLKTSSSDDSLHRIQQIQTLLAQNTEKRETLTMLMTQGIIDPVLYSQETNELLSQADSFRDEIEALKNEVSGDVNKVTETTALIHFAEKSAMLQEFDKDLFDRYVKRIIVHSRNDIRFELKCGLTLRERK

SEQ ID NO: 10194 - protein, 520 aa, Unknown
  Description of Unknown: Integrase B10195 sequence
  cd00338,PF13408,IPR011109,IPR038109,PF07508, PS51736,G3DSA:3.40.50.1390,PTHR30461,IPR036162,IPR006119, PTHR30461:SF3,PS51737,IPR025827,PF00239,SM00857, G3DSA:1.10.10.2600,SSF53041
LTTITKIEAKKQKTDCKLRVAAYCRVSTSTDEQLESLDAQRKHYDQLIRRNREWTYVGIYYDEGITGTKKDKRPELLRLLEDCREGKIDLVLTKSISRFSRNTTDCLEMVRALSSYGVGIFFERENINTLTMEDEFILTVLGSLAENESISISENEKWSIQKRFEKGTFRQGMAPYGYRQEGTTLVINDDEAKVVRFIFDEAYRGIGAHKIAKELNEKGIPSMLRDRWHSGTIKQMLQNERYVGDALYQKTYADENFVRHANHGERGMYLHQGHHEAIVPREEFDRVQELIAQHRSERGIGIDTDKYQNRYVFSGKLICGECGGHLKRKIIQGRVEGPLIAWVCQTHIQDKTKCSFISIEDASIRAAFTTVTNKLIFSQNELLVPFVQGIQGINQSDVGDEIAKINKKLEENTEKSQKMAILASEQLLDPLVFRKAQAELSAERADLNSRKAVLGVQLQQNYHGISESGKLLKKIRGMRITEDFDEEFFTEFIKAVHVYSRTELGFEFTCGLVFREEVNR

SEQ ID NO: 10195 - protein, 520 aa, Unknown
  Description of Unknown: Integrase B10196 sequence
  cd00338,PF13408,IPR011109,IPR038109,PF07508, Coil,PS51736,G3DSA:3.40.50.1390,IPR036162,PTHR30461, IPR006119,PTHR30461:SF3,IPR025827,PS51737,PF00239, SM00857,G3DSA:1.10.10.2600,SSF53041
LKKVTKIAQNTANLTEQTKLRVAAYCRVSTDSDEQLESLDAQIKHYESYVNANPEWEFAGLYYDEGISGTKKEKRPELLRMIADCEDRKIDLIVTKSISRFARNTTDCLELVRKLLDLDVFIYFEKENINTGSMESELMLSILSGLAESESVSISENNKWSIKRRFQNGTYKISYPPYGYDNVDGEMVINKSQAKIVRFIFAEILSGKGTHKIANELNRRKVPTKKGGRWTSTTIRGMVSNEKYTGDAIFQKTYTDEHFNRHRNDGEKEQYLVRNHHEPIVSHEIYEAAQLAIEQRCKEKRIEKQSEKYQSRYPFSGKIICAQCGGTFKRRTHTSGKHPYAWCCFTHIQDKQKCSMKYIPEPDLEYAFVTMMNKLVFGHEAVLKPLLVSLRGMNSDDTLENIRVIDIKLEENEKQRNVLVGLMTKKYLEPAVYNKSNNELLQEAERLRRQKESITRFLNNDFQSLNAVSALLQYVSKESMLTSFDGELFTRFVERIHVYSRTEIGFELKCGITLKERLVR

SEQ ID NO: 10196 - protein, 520 aa, Unknown
  Description of Unknown: Integrase B10197 sequence
  cd00338,PF13408,IPR011109,IPR038109,PF07508, Coil,PS51736,G3DSA:3.40.50.1390,IPR006119,PTHR30461, IPR036162,PTHR30461:SF3,IPR025827,PS51737,PF00239, SM00857,G3DSA:1.10.10.2600,SSF53041
LKKVTKIAQNTTNLTEQTKLRVAAYCRVSTDSDEQLESLDAQIKHYESYVNANPEWEFAGLYYDEGISGTKKEKRPELLRMIANCEDRKIDLIVTKSISRFARNTTDCLELVRKLLDLDVFIYFEKENINTGSMENELMLSILSGLAESESVSISENNKWSIKRRFQNGTYKISYPPYGYDNVDGEMVINKSQAKIVRFIFAEILSGKGTHKIANELNRRKVPTKKGGRWTSTTIRGMVSNEKYTGDVIFQKTYTDDCFNRHNNNGEKEQYLVKNHHEPIISHDDFEAAQSIIEQRGKEKGLEKQNTKYQNRYPFSGKIICGQCGGKFKRRSHSSGRHRIAWCCSTHIADIKKCSMKYVPESDFEYAFVTMMNKLIFGHAVVLKPLLVSLRGMSSDETLESIQAIDKKLEENVEQRNVLVGLMTKKYLEPAVYNKSNNELLQEAERLRRQKESITRFLNNDFQNLSEVSALLQYAAKASMLKGFDGELFARFVERVLVYSRTEIGFELKCGITLKERLVR

SEQ ID NO: 10197 - protein, 522 aa, Unknown
  Description of Unknown: Integrase B10198 sequence
  cd00338,IPR011109,IPR038109,PF07508,Coil, G3DSA:3.40.50.1390,IPR006119,IPR036162,PTHR30461,PF00239, SM00857,G3DSA:1.10.10.2600,SSF53041
MVLGMKTQAIATHRQAIIWGRFSSAKQEDGDSEASQNRYNRECAKRKKIQVIAEHFDRGISVKAGPTPNFRKILKDLPTGVGIICRDLDRISRGHVIDAMAYLKNEIVSKGHFVITSTDDIEYNEETINQTSTLVVGSTKATIAYGENEKRIRGVRDAKKAAYQLAREGKPAPLGPWIPPHLKYDFETKQYVQRHDKGSPLPNKQVIEKIFNAYVKDNGVVAICKMLNDENIPTFRFKKAKGWSQATIWQLLRYEGLIGVLNIKGERIPKAFPPAISEDLFYKVQRILGTHKHGNYSAENVRNVFRGICHCKKCGVSMRVLNGDYLQCRGSMLGKCDINQVVKWTEMEMALLYWFVEEAGPSLLKRDNDTQSAIQTLDAKKNTLARRIGATIDLLDAGLAVNEVRKRLERLEAEKRDIEAAITTQKAKASDEKAMPETFGALYDYVERAMDGDKAVRKEIAAIVPTIVKDVRVDLSDKWFPSFDVELVNGTIHEWQYDVQEFAIDTKGKYHVTEGGYVGKAE

SEQ ID NO: 10198 - protein, 452 aa, Unknown
  Description of Unknown: Integrase B10199 sequence
  cd00338,PF13408,IPR011109,IPR038109, PF07508,Coil,PS51736,G3DSA:3.40.50.1390, IPR006119,IPR036162,PTHR30461,PTHR30461:SF3, PS51737,IPR025827,PF00239,SM00857,G3DSA:1.10.10.2600,SSF53041
VRTRINKIDADEQILKLQRVCAYARVSSEKEAMLQSLSSQVSHYNKMISSNPKWQFIGVYADEGISGTKEDRPEFKRMVDDAKAGKIDLIITKSISRFGRNTETVIRTIREMNALGVDVYFESQNLHTLSTDGEFMLTLLASFYQEEARSVSENMKWRIKKDFEKGISWGARDFYGYKVVNKNFIVVPEQAEVIQRIFNLYIGGLGILAITKQLNQDGIKPMHSKLWSYGSILQILKNNSYTGDLILQKTYLENHLTKKKVKNNGEFHQYHVEDNHESIISKETFKETQTIRNQRANRFKTNVKRTTNAYPFTNKIKCGCCGGGYQHKTTPKHDFWICTTYNTQGKAFCSESRRIPEKSLYETLNEYLGTTSFDERKFNKKVNYMVAQKDNKIELHLLNGTVDEITWKEISRKDSWTPEMKEKARKNTKKANENRRVLKWEKLESYHQPSIH

SEQ ID NO: 10199 - protein, 522 aa, Unknown
  Description of Unknown: Integrase B10200 sequence
  cd00338,PF13408,IPR011109,IPR038109,PF07508, PS51736,IPR036162,IPR006119,G3DSA:3.40.50.1390,PTHR30461, PTHR30461:SF3,IPR025827,PS51737,PF00239,SM00857, G3DSA:1.10.10.2600,SSF53041
MAHARIYIRRSDDDQSTYSPEAQARECRRWCAEHGHEIVEPLYVDDDLSGKREDRPRFQQLLADAKADPGSLIVAHKFDRIARDTEALLRIIYKELLPRRVQVESVMERIDPYTPLGKMMLTVSGGVSTYHIDNLSTEVKKGLHEKAARGGWIGLPPYGYCSQYDYDRRGERVRGSDRLVPSDDADTARLIFNLYASGNHSDSSLRDELNERGVTLLHPKTGMRVPFQRDSIGGILRNPAYIGVVRCGRQWYDGAHAPLIDRSLWDRCQAIRARRTAQRGGRAPVRGTGGLLSEIAFCGLCGARLRWWMAGNHSKGRQGYYRCAAHVAYGRLACDAPMIQAKRIEALVLALIGDLDIPAHMRDQVIFEVNRRVIARATPVSPDQARTRRQLERLKADWRAGDRDDLDEATYRAERRRLEHVLMDVAPASQVEFDVPRALALLKDAPALLAASAMEQRRGILQQVVEVVWLQKDEVTAVRPSPLLLPLLVAADHLRVTSTGIEAAPRRSALWLAYGVSALSPV

SEQ ID NO: 10200 - protein, 522 aa, Unknown
  Description of Unknown: Integrase B10201 sequence
  cd00338,PF13408,IPR011109,IPR038109,PF07508, Coil,PS51736,IPR036162,PTHR30461,G3DSA:3.40.50.1390, IPR006119,PTHR30461:SF3,PS51737,IPR025827,PF00239, SM00857,G3DSA:1.10.10.2600,SSF53041
VRKVTRIDGNNALQAFKPKVRVAAYCRVSTDSDEQMASLEAQKDHYESYIKANPDWQFAGIYYDEGISGTKKENRTGLLRLLADCENKKIDFIITKSVSRFARNTTDCIEMVRKLTDLGVFIYFEKENINTQRMEGELVLTILSSLAENESLSIAENSKWSIRRRFQNGTYKISYPPYGYDYVDGKLFINKEQAEIIKRIFSEALDGKGTQKIADGLNSDKIPTKRGSHWTATTIRGILNNEKYTGDVLLQKTYTDENFKRHYNHGEKDQYMIKDHHEAIISHEEFEAAQEILRQRGKEKGVIKGSSKYQKRYPFSGKIKCAECGSSFKRRIHGSGNRKYIAWCCTKHIKDASSCSMKFIREDAIHQAFVVMINKLIFGHKFILRPLLQSLKKTNYSDNITKIQEMETKIKENTERVQVIMGLMAKGYLEPALFNTQKNELLKEAAILKEQKEAIKRAIDGSQTILVEVEKLLKFATKAEKQINAFESEIFENFIEEIIVFSQEEIGFKMKCGLNLREMLVK

SEQ ID NO: 10201 - protein, 522 aa, Unknown
  Description of Unknown: Integrase B10202 sequence
  cd00338,IPR011109,IPR038109,PF07508,PS51736, IPR036162,IPR006119,G3DSA:3.40.50.1390,PTHR30461,PTHR30461:SF3, PS51737,PF00239,SM00857,G3DSA:1.10.10.2600,SSF53041
MIAVGYARLSDKDSSSNSIKSQMRRIEEYCERNKLTLLKIFVDDGKSGWTFDRPGFIDLENFCKKEKSVQYLIIPHFDRFSRTDPIDAMVKERYFRDKLNVKVLQVSEPIDLDTNNPTYVIVRFMQAFASNEERNRIVDRTMTGMRYSLTQGRYCSMAPYGYKNSRDENGKPLIIPDEERAHLIKFIFREYLRGNGIEEVKRMAKVNGYTQGGKSAIARVLTNPVYAGMINVPAYKHTPARLVKGIHAPLISENDYWMTQEKITGKNHRTHNRDEVPLRGVLRCHCGRYMTAAPSKGKSGKHYWYYFCESHRKINLSANRLHAQFEDILDHLSIPENDLIILRDSAIQELNNYISDRTGELMRIGIQIEHIQKAIEAIEEKYLLQADITPAIFNKLVKVKRIELSELQAKQAALKTDTVEHYNRLYFLFSKLSDLKSQWLSLDLTAKQFFIKQVFGLNLTYRDGVYRTPFIHPLFALKGLSDRGLPLVIETKTATEVAVNLECAPGGNLLEHLLSLANVFAA

SEQ ID NO: 10202 - protein, 522 aa, Unknown
  Description of Unknown: Integrase B10203 sequence
  cd00338,IPR011109,IPR038109,PF07508, G3DSA:3.40.50.1390,PTHR30461,IPR036162,IPR006119, PS51737,PF00239,SM00857,G3DSA:1.10.10.2600, SSF53041
MDVNSTSPTAVTKIDVMLVVLYLRLSDARNETTSFADREAKLREHADRRGWTVLRVEVENDVTRGSSKSASAFKRRRVLQPDGTYAMRVWRPGFQAVLEDLKAGRAQALLTEDLDRAMRDPRDLEDLIDVVERHKCSADSLSGSLRFTAGGTDSEITMARIMVSMANKSSRDTARRVAAARERKATAGEWGGGIRPFGFLADGVTIDPVEAAEIVKACEQVTADVPLRQIAADLRRRQIPTVKGTRWTAEALRDILMRPRNAGILVYRPEADRRREGTTKRYYTRENEVGRAPWEPIVPEDTWRAVVAKLTDPNRAMKPGPANRWLGSGIYLCVCGTAVEVLQGTKRPPAYRCRNTGSGDGGKHTVRRVAIVDEYVIKTVVHILSRPDAADLFDSPMPADVNLGELRSQLTVLRERKKSFATDYADGLIDREAMLAGTARITHRMEEIQGVLASHTDRSPWASLIGIDDVRAVWDELSLGMQRQIVRTLITVTILPMPSRGRVPFDPASIRIEWVATRGARK

SEQ ID NO: 10203 - protein, 522 aa, Unknown
  Description of Unknown: Integrase B10204 sequence
  cd00338,PF13408,IPR038109,Coil,G3DSA:3.40.50.1390, IPR036162,IPR006119,PTHR30461,PTHR30461:SF3,IPR025827, PF00239,SM00857,G3DSA:1.10.10.2600,SSF53041
MQVSNNHPFSLNSPVVAYLRDSGHEDQELSVAQQEAAIRAWCEQNGLILTRVFIDEAAPGSSTVGRETFQALIGHFHNPACREAGVILWKYNRFARDIDDAQFYKADLRRRGYIIHSLNDSVPAGLDGRFFESAIDWMNARYLEDLSTDTKRGLHHIMDQHGALGGVPPRGFMREPVEIGLRRDGRPHIVHRWVPYPDLIDQVRLAFELRAMGASYAEITRQTKLYKNKNSWPTFFCNKIYIGVMEFGDRLIEDYCDPIVPKAVWDAVQARQKVLSRRNTMSVKSHPRRVASRFLLSGLAQCGLCGSPLNGDTATAKGIYRYDYYTCSRANRRGDCPATKIPRQALENSVLDSLSDYILEPNHIQELTTELENNASHAVEQVEQRKQDLNKKLSSVRRKIDNLVDVIADQGRSAGALHTKLTELEAEEGQLLAERVQLTPRAKKLRPTEEIQDLVNEIRGLRAENNTTRLRDILRGLIDRVEIKRDEDRISGTIWYFTPVLALGECPRRSPLHSLNFDFVLT

SEQ ID NO: 10204 - protein, 521 aa, Unknown
  Description of Unknown: Integrase B10205 sequence
  cd00338,PF13408,IPR011109,IPR038109, PF07508,Coil,PS51736,G3DSA:3.40.50.1390, IPR006119,IPR036162,PTHR30461,PTHR30461:SF3, IPR025827,PS51737,PF00239,SM00857,G3DSA:1.10.10.2600,SSF53041
MKKITKIEGNTANSFIKPKTRVVAYCRVSTGSDEQLVSLQAQKAHYESYIKANPEWEYAGLYYDEGISGTKKENRSDLLRMLSDCETGRIDLIITKSISRFARNTTDCLEMVRKLIDLGVHIYFEKENINTSSMESELMLSILSGLAESESISISENTKWAIQRRFQNGTFKISYPPYGYQNIDGQMIINPKQAEIVKYIFAEVLSGKGTQKVANDLNQKGIPSKRGGRWTATTIRGILTNEKYTGDVILQKTYTDSHFNRHTNYGEKNMYLVENHHEAIISHEDFEAVDAILNQRAKEKGIEKRNSKYLNRYSFSSKIICSECGSTFKRRIHSSGRREYIAWCCSKHISHITECSMQFIRDEDIKTAFVTMMNKLIFGHKFILRPLLNGLRSQNNAESFRRIEELETKIENNMEQSQMLTGLMAKGYLEPAMFNKEKNSLEAERESLFAEKEQLTHSVNGIFTKVEEVDRLLKFTTKSKMLTAYEDELFKNYVEKIIVFSREVVGFVLKCGITLKERLVN

SEQ ID NO: 10205 - protein, 521 aa, Unknown
  Description of Unknown: Integrase B10206 sequence
  cd00338,IPR011109,IPR038109,Coil,G3DSA:3.40.50.1390, PTHR30461,IPR006119,IPR036162,PS51737,PF00239, SM00857,G3DSA:1.10.10.2600,SSF53041
MWGRHSRYRLPMSTLADTTPGTQEQPLRAGIYGRASQDRSKRGRSVRDQIADCRRECSTRGWTVVDEYIDLDRSASRHARKVREDYTRLVADIQAGKLDMLVSWESSRVSRDLDVYVKLRNLCTDTGVLWCYNGTIYDMRKGADRTTTAIMAMMAEAEADSMQERSARTTRLSAGRGTPHGRIPFGYARRYDPDDGHLLGQVPHPVHADVVLDLFQRAADRETVRSLTATLCQHVPRASTRGLTYLLQNRTYIGLRSHFGQHVKATWEPIVPEALFWRVQEIIVNPERRTSRDTRALHLLSGIAMCGVCKENTPPDQPLPGLRLVRPGAQPRRVSRYCCKPGSHVATGAERLEAYVEEHLMVWFKSPEAATAFASRDDGALEEARGRAARIRVQLQEARAMAAEFDDTTGMPLLSIASLADMERRLAPMAARAEEDLRRLAAVGDPVLDQLLADPERAEAVWERLGMEKRRHAVRNLVNVTLHKAAAQGIRSLDESRVTLTFVSQPGFTSRPTIRRPPVEG

SEQ ID NO: 10206 - protein, 521 aa, Unknown
  Description of Unknown: Integrase B10207 sequence
  cd00338,PF13408,IPR011109,IPR038109, PF07508,Coil,PS51736,IPR036162, IPR006119,PTHR30461,G3DSA:3.40.50.1390,PTHR30461:SF3, IPR025827,PS51737,PF00239,SM00857,G3DSA:1.10.10.2600,SSF53041
VKKVTKIESVQNAKTVKQKLRIAAYCRVSTGSDAQLESLDVQKSHYERYITSRDDWQFAGLYYDEGITGTKTEKRPELLRLIADCEAKKIDLVITKSISRFSRNTTDCLELVRKLLSLNIPLFFEKENINTGSMESELFLAILSSMAEGESASISENAKWSIKRRFQNGTFKLSYAPYGYDWDGTNLTVNPEQAKTVKRIFSDVLSGKGTNTIADALNAEAVPSKKNGRWTSSSVRGILANEKYTGDVIFQKTYTDDNFNRHKNHGEVDQYMMANHHEAIISHEDFEAANALVDQRALEKGIQKGNDKYQQRYAFSSKIICSECGNTFKRRIHSCATYKYVAWTCNTHIDDKNACSMKYIYDEELKAAFITMMNKLIYSHKFLLKPYLKVLENSSGEEAVQRIQHLERLLEQNSEQRETLTKLMAQGYIDQILYNQEMNALLLQADSYRSDIETITTSMTGDAAKVTETAMLLQFVSHSEMLTEYSEELFEEFADHIEVQSRNEVRFILKCGLTFTERMGD

SEQ ID NO: 10207 - protein, 433 aa, Unknown
  Description of Unknown: Integrase B10208 sequence
  cd00338,PF13408,IPR011109,IPR038109,PF07508, Coil,PS51736,G3DSA:3.40.50.1390,IPR006119,IPR036162, PTHR30461,PTHR30461:SF3,PS51737,IPR025827,PF00239, SM00857,G3DSA:1.10.10.2600,SSF53041
MPRAITIVPKPPKLEQKKRVAAYARVSSGKDAMLHSLSAQVSYYSDLIQNHDDWLYVGVYADEAKTGTKESRADFQRLIADCRAGKIDMVITKSISRFARNTVTLLQTVRDFKAWGVDIFFEEQNIHTMSGDGELMMTILASYAQEESRSASENQKWRIKRNFEEGMPWNGAMLGYRLKNGRYEIIPEEADLVRRIYNEYLSGDGYLTIAKRLNEDGIPSRFGKQWGQSVISKILSNYTYTGNLILQKTFRENHITKKTIINNGELPKYHAENAHDAIIDMETFQAVQAEKTRRAARFLKKPAPKKAYPFTSLLVCDGCGKNYRRKVTKTGPVWVCGTFNSMGKAACASKQIPEETLQAVTAEVLGQVDFSEELLRRLIKSILVCNGNVLIFRFFDGSEITRIWKDRSRRQSWTVEMKATARQKALERRNQNA

SEQ ID NO: 10208 - protein, 521 aa, Unknown
  Description of Unknown: Integrase B10209 sequence
  cd00338,IPR036162,PTHR30461,IPR006119,G3DSA:3.40.50.1390, mobidb-lite,PTHR30461:SF3,PF00239,SM00857,SSF53041
MSKRNIEKLTESFEKNTIKKSNAIIYLRSSTQKQNEETNNQHSIKTQFALCKEYVLRNNFNIYRVIQDVHRANDIKTLKINDIPNKYSNVHLIVADPSRICRDFEQGAIFMNKCRNSNIIIHSVRDQSTSDTSLGKRKIMDLLMVANDESETFSKRIKTTMQLKKRNGSFIGGNPTYGYKLYNISNKDGFSIQKMIPNENEQLIIDLIIKLHIGSDIASFYTLFRKITGNDKKLYHNGKQWTDIKKYECTYAYIANFLNENNILKRGKEWKSTMIGYIIYQNGSKVQKQLNADISSYESSKNESSESESSESESSESESSENESSENESSENESSESEIEIKRKVYSPNNNIKRVITKNNTKSTEAFDSSDEEFLSKNAPIKKCVQSNSSNIKKKVPKPITKTSIELSSESSSEEEFLSKNAPIKKCVQPNSSNIKKEVPKPITKTSIELSSESSSEEELLSTPIKKCVSKKTIEMETESSEEEKVVTKKASTESRLNLLDIKVNRIYDMIMKMNKNSKNK

SEQ ID NO: 10209 - protein, 521 aa, Unknown
  Description of Unknown: Integrase B10210 sequence
  cd00338,IPR011109,IPR038109,PF07508,PS51736,IPR036162,IPR006119, G3DSA:3.40.50.1390,PTHR30461,PTHR30461:SF3,PF00239,SM00857, G3DSA:1.10.10.2600,SSF53041
MQTLIGAYNTSNASTAAMAAAYVRMSTEHQQYSTENQLDTIRLYAATHALEINKVYTDAGKSGLRLEGRDALKQLFFDVEKGLANYSTVLVYDVSRWGRFQDPDVSASYEVRCRQAGVSVQYCAEQFTNDGSPVSNIVKSVKRMMAGEYSRELSVKVFAGQSRLIQLGYRQGGQAGYGLRRQLVDGHGSPKNELDLGEHKSIQTDRVILVPGPPAEIEMVHNIYRLFVEEGRSEREIADWLNSQRVLNDRGRAWSRGTVHQVLINEKYIGNNVWNHTSFKLKQTHTQNPPEEWIRANEAFCPIVSVILFKAAQSIIQTRSYRMPDEEMLHALKAIYQRTGYLSGIVIDESEGCPSSSAYQQRFGSLLRSYSLIGYSPARDYRYIEANKRLRQMHPLLLQQTTQKIADVGGKVTVDPCTDLMVVNQEISISLVLSRCHVSPTGSKRWNVRFDYGLSPDLTIAVRMKEQEEAALDYYILPTIDIETPRLRLAESNQANLEIYRFDTLEILSELARRSEFRRVA

SEQ ID NO: 10210 - protein, 403 aa, Unknown
  Description of Unknown: Integrase B10211 sequence
  cd00338,PF13408,IPR011109,IPR038109,PF07508, PS51736,IPR036162,IPR006119,PTHR30461,G3DSA:3.40.50.1390, PTHR30461:SF3,IPR025827,PS51737,PF00239,SM00857, G3DSA:1.10.10.2600,SSF53041
MMTPQKPKLRVAAYARVSDSRLHHSLSTQISYYSRLIQSHPDWELVGVYYDEGISGKEQVNRQGFQNLLQACDEGKVDRIITKSIARFGRNTVDLLSTVRELRLKNIGVTFEKESIDSLSSDGELMLSLLASVAQEESQNISQNVKWRITKKFEQGIPHTPQDMYGYRWNGENYVIEESEAAVIRQVFEWYLNGDSVPTITKRLNDQGVLTRLGNPFTVASVREFFKQEAYFGRLVLQKTYRSDFSRNPKRNKGQRNKYIIEDAHEPIVSKVYFDRVLAEKKRRYELSHKESHIHKGICREMIRCAHCHELMITRVDSKRVHRTVRYCCRTRDRFGKDSCISKTLSEKRLLATLESHLGFTPDKEWVTSNIKELTYDSEANQLKVNPLEGRNYVLEVRKEHFL

SEQ ID NO: 10211 - protein, 521 aa, Unknown
  Description of Unknown: Integrase B10212 sequence
  cd00338,PF13408,IPR011109,IPR038109,PF07508, Coil,PS51736,IPR036162,IPR006119,G3DSA:3.40.50.1390, PTHR30461,PTHR30461:SF3,PS51737,IPR025827,PF00239, SM00857,G3DSA:1.10.10.2600,SSF53041
MMRSGAMIRKVFRYMRVSTDQQAEHGYSLEAQDQVLRDYAAGHQLEIAASFVESESAFTSGKRPEFARMCAALRVRSDVNAVLVYKLDRLARNMTDFALLTEDLGATLISMTEGEVSDRDSGTSLIGGIHAVVARHYSQQLSQRVALGLKTKARRGEWPTYAPTGYVNKRDGRDAWIEPDQSSAPIITKLFTMYAHTQMSVAEVAAWARAAGLRSRYGGKIYKSAVHKMLQDPIYRGAVVWHGEEYPGKHEAIVDPQTWRAVQDKLHGRTGPRRQHRHFPFRDTFTLTCAYCGGQITASRITNRHGGEYVYYHCTRSTRCKGGKCEQPFWREDVLSERLRCIVEGIHVPGPVVSRLLREFRENAEQAERTRKAKLIQLKAEQRRLEEMRNALLLEKIEQIIEPKQWADVDRDLAARGAVVADEIEGMSGGARCPNDVAATFKLLKLAPIRYNKWGHEERAELLQALASNCVLSRENVLPNYRPPFDAVASAVETGDWLGVMDVVQTHARGAEPAARLVGVA

SEQ ID NO: 10212 - protein, 521 aa, Unknown
  Description of Unknown: Integrase B10213 sequence
  cd00338,PF13408,IPR011109,IPR038109,PF07508, Coil,PS51736,G3DSA:3.40.50.1390,IPR006119,PTHR30461, IPR036162,IPR025827,PS51737,PF00239,SM00857, G3DSA:1.10.10.2600,SSF53041
MPTAYSYARFSSDRQHESSIEAQQDATRKWAEAHGVTIVHEYCDRGISGTTDERPEFQKMIAACRIRKVDFVLVHKHDRFARNRYDAVIYGRIIEQTGARLVAVAQDFGETPEAVIMEGLMQAWSEYYSRNLSTETKKGLRVRAMKGLSLGGFVPFGYQLAEDGSMEIADDEAIWVRAFFDAYLSGGFQDAVRRANMAGVRGRKGVRLTPHGVMKMIRNPVYRGAYRVTVGGEETLIEDHHPAIVSPEIWKEAKTIMEARIKVRSEEDKTYLLTGMVRCGICGKRIRAQTQLHGGKEYVYYGCRESGSHPDGKALRSIQAAALDDAARQYVRAILTPEARQAAAAALAEYIDGRKKDAKQRGPDAKKRIRALEKKIDSIVENMSSGVLPPSVLKRLGEQVTELETEIEAQRELMNAPPDPDMPSIEEFFAGAAAIDENMPIDEQQRIIRRFISVITLTNDEIAIESTFADWLKDRGITIYTKKPLPDPARILGINLARQSLSAPSLFDIMIINLCKLRKAA

SEQ ID NO: 10213 - protein, 521 aa, Unknown
  Description of Unknown: Integrase B10214 sequence
  cd00338,PF13408,IPR011109,IPR038109,PF07508, PS51736,G3DSA:3.40.50.1390,PTHR30461,IPR036162,IPR006119, PTHR30461:SF3,PS51737,IPR025827,PF00239,SM00857, G3DSA:1.10.10.2600,SSF53041
MAAVIYARFSTEHQSESTIVDQLRRCRDYARARGLEVVAEHTDEGISGAAIGNRPGVRAALEALASGDVLLVVDTTRLSRSQDLAPLLARLRHRGVRVVGVLDGFDSESKTARMQAGLSGIMSEEFRASIAARTHSALDMRAREGRATGGRCYGFDRAGAVVEAEAEVVREIFRRVAEGETQKAIAAELNLRGVPAPGASWSRRVRRSDGVWMTPTLNAMLANERYVGRVVWNRSLWRRDPDSGVRQRVERPESEWVVRPGPAIVDDETFRRVRERAAPRKIYGGRPGGGPRYLLSGLLVCGDCGGRLVATGRGGSHYYCGTHRQGGPAACPNATGARRAVAERVLLEPIERELLSPEAVELAVGLIRGWSRAARARAASPPEVSEVEGRIARLEAQIAAGTIEREDVLPALAALADRRRSLISGGWRRASGRPGVDAAEAGAAYARAVQAMREVLTDGPVDRARAALSRLLGDVVCSREGGVLVARVALSARPLVEAAGLSWSGSGGALLLREKAVRLAA

SEQ ID NO: 10214 - protein, 501 aa, Unknown
  Description of Unknown: Integrase B10215 sequence
  IPR038109,IPR006119,PS51737,PF00239,IPR037285, G3DSA:3.40.50.1390,PTHR30461,IPR025827,SSF140560,SM00857, G3DSA:1.10.10.2600,SSF53041,IPR011109,PF07508,PS51736, cd00338,PF13408,Coil,IPR036162,PTHR30461:SF3
VAVSRNVTVIPAIKRIGNNKNSESKPKLRVAAYCRVSTDSDEQASSYEIQIEHYTNYIKRNKEWELAGIFADDGITGTNTKKRDEFNRMIEECMAGNIDMIITKSISRFARNTLDCLKYIRQLKDKNIAVFFEKENINTMDSKGEVLLTIMASLAQQESQSLSQNVKLGIQYRYQQGEVQVNHKRFLGYTKDENKQLVIDPEGAKVVKRIYREYLEGASLLQIARGLEADGILTAAGKAKWRPETLKKILQNEKYIGDALLQKTYTVDFLSKKRVKNNGIVPQYYVENSHEPIIPRELFMQVQEEMVRRANLRGGKGGKKRVYSSKYALSSIVYCGQCGDIYRRVHWNNRGYKSIVWRCVSRLEEKGSECTAPTINEETLQAAVFKAINELLANKEPFLSTLQKNIATILNEENDNTTDDIDRKLEELQQQLLIQAKSKNDYEDVADEIYRLRELKQNALVENAEREGKRQRIAEMTDFLNEQSCELEEYDEQLVRWLIER

SEQ ID NO: 10215 - protein, 521 aa, Unknown
  Description of Unknown: Integrase B10216 sequence
  cd00338,PF13408,IPR011109,IPR038109,PF07508, Coil,PS51736,IPR036162,IPR006119,G3DSA:3.40.50.1390, PTHR30461,PTHR30461:SF3,PS51737,IPR025827,PF00239, SM00857,G3DSA:1.10.10.2600,SSF53041
MPKITKIPASISRYTSAPIDAPVKRKVAAYARVSTDSEEQLTSYAAQISYYTEYIKGREDWEFVGVYTDEGISGCSTKRREGFQRMISDAMAGKIDLIITKSVSRFARNTVDSLTTIRLLKENNVECYFEKENIWTFDGKGELLLTIMSSISQEEARSISENVTWGHRKRFADGKVSVAYSRFLGYDKGSDGKMVVNPEQAEIVKLIYRLFLEGMTPHTIAIHLTEKGIKTPGGKDKWNATTIRRILTNEKYKGDALLQKEFTVDFLTKKTKKNCGEIPMYYIEDDHEAIIDPAVFDMVQQEMERRKTGASRYSGVSIFSSKIKCGECGGWYGAKVWHSTDQYRKVIYRCNNKYNDERCTTPHIMEEEVKTVFLKSLNKLLANRDELIENVKLICDKLTDTSELEAEKEKYAEEMSLVADMVQAAMLENARIALDQEEYRQKNDVLSARFEAAKKKHDELAMQIEEIETRGQNLRHFQETLESLNGQVTEFDSTLWGSLVDYITVYENGEKTVTFRDGSVI

SEQ ID NO: 10216 - protein, 521 aa, Unknown
  Description of Unknown: Integrase B10217 sequence
  cd00338,PF13408,IPR011109,IPR038109,PF07508, Coil,PS51736,IPR036162,IPR006119,PTHR30461, G3DSA:3.40.50.1390,PTHR30461:SF3,IPR025827,PS51737,PF00239, SM00857,G3DSA:1.10.10.2600,SSF53041
MPKITKIPASISRYTSAPIDAPVKRKVAAYARVSTDSEEQLTSYAAQISYYTEYIKGREDWEFVGVYTDEGISGCSTKRREGFQRMISDAMAGKIDLIITKSVSRFARNTVDSLTTIRLLKENNVECYFEKENIWTFDGKGELLLTIMSSISQEEARSISENVTWGHRKRFADGKVSVAYSRFLGYDKGPDGKMVVNPEQAEIVKLIYRLFLEGMTPHTIAIHLTEKGIKTPGGKDKWNATTIRRILTNEKYKGDALLQKEFTVDFLTKKTKKNCGEIPMYYIEDDHEAIIDPAVFDMVQQEMERRKTGTSRYSGVSIFSSKIKCGECGGWYGAKVWHSTDQYRKVIYRCNNKYNDERCTTPHIMEEEVKAVFLKSLNKLLANRDELIENVKLICDKLTDTSELEAEKEKYAEEMSLVADMVQAAMLENARIALDQEEYRQKNDVLSARFEAAKKKHDELAMRIEEIETRGQNLRHFQETLESLNGQVTEFDSDLWGSLVDYITVYENGEKTVTFRDGSVI

SEQ ID NO: 10217 - protein, 521 aa, Unknown
  Description of Unknown: Integrase B10218 sequence
  cd00338,PF13408,IPR011109,IPR038109,PF07508, Coil,PS51736,G3DSA:3.40.50.1390,IPR036162,PTHR30461, IPR006119,PTHR30461:SF3,PS51737,IPR025827,PF00239, SM00857,G3DSA:1.10.10.2600,SSF53041
VRSVIYARFSTEHQSESTILDQIRRCREYADARGWPIDGVFTDEGISGAALGNRPGARAALERLETGDVLLVVDTTRLSRSQDLAPLLTRLRHRGVRVLGVLDGFDSNSGTARMQAGLSGIMSEEFRASIAARTHSALDMRARDGRATGGKCYGFDRGGGIVEAEAEVVREIFRRVAAGEAQKAIAGDLNARGVPAPGASWSRRVRRADGVWMAPTLNAMLANERYAGRVVWNRSAWRRNPDSGVRERVERPEAEWIVRDGPELVDRETFDRVRAIAAPRRLFGGRPGGGPRYLLSGILVCGECGRRLVATGRGGSHYYCGTHKSGGAAACSMSVGARREVAERVLLEPIERDLLSPAAVELAVEVIRRLDREARVRAVEPAEVAEVERRIARLEGQIAAGSIEREDVLPALAALEDRRRAARAGAWRRSSGRPGVDAAAAVAAYTRAVVSMRDALTAGPVARAREALHRILGDVVCRPVDGALVASVGLDPRPLLEAAGISWSGSGGALCHREIALRLSA

SEQ ID NO: 10218 - protein, 521 aa, Unknown; identical to SEQ ID NO: 10181
  Description of Unknown: Integrase B10219 sequence
  cd00338,PF13408,IPR011109,IPR038109,PF07508, PS51736,IPR036162,PTHR30461,IPR006119,G3DSA:3.40.50.1390, PTHR30461:SF3,IPR025827,PS51737,PF00239,SM00857, G3DSA:1.10.10.2600,SSF53041

SEQ ID NO: 10219 - protein, 521 aa, Unknown
  Description of Unknown: Integrase B10220 sequence
  IPR038109,IPR006119,cd09865,PS51737,PF00239,G3DSA:3.40.50.1390 ,PTHR30461,IPR025827,SM00857,G3DSA:1.10.10.2600, SSF53041,IPR011109,PF07508,PS51736,cd00338, PF13408,Coil,IPR036162,PTHR30461:SF3
MPVVTKIPARLHPATFVPLESTAKRKVAGYARVSTDSEEQQTSYAAQVSYYTDYIQKRPDWEFVGVYTDEGISATNTRHRDGFNRMIADALDGKIELIVTKSVSRFARNTVDSLTTVRKLKEKGVEVYFEKENIYTLDSKGELLITIMSSLAQEESRSISENVTWGQRKRMADGKVSLPYSRFLGYRKGEDGLPEIVPEEAEIVRFIYRSFMHGSTPHHIAETLTFKNIPTPGGKEVWTTSTIESILTNEKYKGSALLQKKFTVDFLTKKTKVNEGEVPQYYVKESHPAIIPPEEFELVQAEYLRRKRLGRKYNSKSIFTARLVCACCGGYYGSKVWHSTSKYRRVIWQCNHKFQNGEKCTTPHLYEEHIKDKFILAMNQILENKDEIIENCLLLSEHFTVSDDTAIEAVTQEMDVVAELTRNLIQQNSVKPMKQELYKSEYEKLVQRYESLKAKRDALVSKKEAMESKLKFILHYAETLRGQDVITEFSEDLWLKAVDHVTICKDGGMVFLFKDGSKITV

SEQ ID NO: 10220 - protein, 521 aa, Unknown
  Description of Unknown: Integrase B10221 sequence
  cd00338,PF13408,IPR011109,IPR038109,PF07508, Coil,PS51736,G3DSA:3.40.50.1390,IPR006119,IPR036162, PTHR30461,PTHR30461:SF3,PS51737,IPR025827,PF00239, SM00857,G3DSA:1.10.10.2600,SSF53041
MPKTEEKQAVKAVIYARYSSDRQREESIEGQLRVCEDYARRNNITIVHTYADRAMTGRSDQRPEFQMMIRDAATMSFNIVLVYKLNRFARNRYDSARYKHKLKQYGIRVVSAMENIADDPSGILLESLIEGMAEYYSAELAENVTRGMTENALEGKWAGGIVPLGYKLDEKHHLVIDEPKAAIVRQIYQLALEGHNQKYIIDELNKHHYTNSAGRPFSYNTLRVILKNERYTGTFIWRDIRKENAIPVIIDKMTFEAVQKHMQFRKKNHIRSCSKDFHLTGKLFCGRCSSKMVGVSGTSKQGVLYYYYACTSHLKKKCPSKNIRQDALENLICKITTQILSKPEAIKAIAKQAMKMQKDKKESLEIQSLQNQIADINKKLKNCIQAVENGLISETMTNHIKNYENRLQGLKDEVSRQKLLEGSIHLTEQHIEFFFYSISQKLKTADKYKSILLSSLVRCVIVHENYIEIQFNYKNELPILQNPVKVESSYLNQMVTIPIEHTNMRLFMYSDYFSVRIRRIA

SEQ ID NO: 10221 - protein, 429 aa, Unknown; identical to SEQ ID NO: 9549
  Description of Unknown: Integrase B10222 sequence
  cd00338,PF13408,IPR011109,IPR038109,PF07508, PS51736,G3DSA:3.40.50.1390,PTHR30461,IPR036162,IPR006119, IPR025827,PS51737,PF00239,SM00857,G3DSA:1.10.10.2600, SSF53041

SEQ ID NO: 10222 - protein, 519 aa, Unknown
  Description of Unknown: Integrase B10223 sequence
  cd00338,PF13408,IPR011109,IPR038109,PF07508, Coil,PS51736,G3DSA:3.40.50.1390,IPR006119,IPR036162, PTHR30461,PTHR30461:SF3,PS51737,IPR025827,PF00239, SM00857,G3DSA:1.10.10.2600,SSF53041
VKKVTKIDKIQPSKAAKRKLRVAAYCRVSTDSDAQLESLETQKMHYENYINSRDDWEFAGLYFDEGITGTKADKRPKLMRLIDDCKAKKIDFVITKSISRFSRNTTDCLSLVRTLLNLNIPVYFEKENINTGSMESELFLSILSGLAEGESTSISENNKWGIKKRFENGTYKLGYVPYGYRWENGEIIVDPEQAVIVKRIFSELLAGKGTDAIAKSLNSENVPTKKGGRWTSTSIRGILTNEKYTGDCIFQKTYTDSNFNRHRNDGQLDQYYVTDHHEAIISHEDFDAAAALIEQRANEKGILRGSDKYQQRYAFSGKIICGECGDTFRRRIHSSTYGKYPAWVCNTHLADTSKCSMLYLRDDDIKLAFATMMNKLIYCHKLVLKPYLESLQANTSDEAFLRIQQLEILLEQNAEQRETLHKLMAQGYIDQILFTQENNALLTQANDFRSDIEALNRSVTDDTSKVYETERLIHFCERGEMLPEYNEDLFELFVDHIEVYSRKSIGFVLHCGLTFKERI

SEQ ID NO: 10223 - protein, 521 aa, Unknown
  Description of Unknown: Integrase B10224 sequence
  cd00338,PF13408,IPR011109,IPR038109,PF07508, Coil,PS51736,G3DSA:3.40.50.1390,IPR006119,IPR036162, PTHR30461,PTHR30461:SF3,PS51737,IPR025827,PF00239, SM00857,G3DSA:1.10.10.2600,SSF53041
MTTAVIYARYSSSNQREESIQGQIRDCLAYAERNGITVLREYTDSALTGKTDKRPSFQQMIKDSERHSFQVVLVWKLDRFARNRYDSAMYRNVLKKNGVRLVSVMENISDSPEGIILEGLMESLAEYYSANLSENVKRGLYDSALERKIISQPTFGYKRGADGRYEIDELTAPIVRRVFHEYANGKPYMAIVEDLNRDGIRTLRGNKFNRNSLRKLLRNEKYIGVYRYRDILDENGIPPIVSKELFDSVQHEVKRRTFTKKRITREESDPYLLTGKLFCGHCGSQMVGESARSKTGKTYHYYTCAGTRHQSRNGCKKRRVHRDWLEHEVIRIVNEYILTDEFIQTLTKRIMEIQKQDMESEILKLLKSELTATEAKIANLMKAIEAGAGFSESIRTRLSELESLRDDQNRRISLESHRQPQFTAEQISDYLTRLRRADKTDSDSQRLIINALIKRIYLFDCDDPAEQKISIEINYGDISDPVTHDEIVRIMRPLLCVSVDRRTMNVRRSILIIDSIKKDRT

SEQ ID NO: 10224 - protein, 521 aa, Unknown
  Description of Unknown: Integrase B10225 sequence
  cd00338,PF13408,IPR011109,IPR038109,PF07508, Coil,PS51736,G3DSA:3.40.50.1390,IPR006119,PTHR30461, IPR036162,PTHR30461:SF3,PS51737,IPR025827,PF00239, SM00857,G3DSA:1.10.10.2600,SSF53041
MPKTKKATCSPKTAVAYARYSSAGQRDVSIDQQLADIRAYAEREGYTIVHEYADRAKSGFKNSSARVEFQAMLSSAPLGGFDTIIAWKVDRFGRNRRESAIFKGQLADHGVRVIYAMEPIPTGPAGVLTEGMLESIAEWYSRNLAENVSRGMRDNARRGLSNGYRILGYKRGPDGHYIIDPDNASVVRRIFERYNQGYSAAAIAKELDAAGLRTAFGARFSPVHILRIITDERYTGVYIWSDIRVPGAMPPIIDSDTFERAQEMRQKTGRHIEKSPADFILTGKVFCGLCGRPMVGDSGTSKTGAAHYYYSCTGHKSRAGASRTCDKKSVRKDDLENQVINFVYDRCLSGPEREKITDAVITAQKEYDKASPRAAMEAELKETEKKISNLNDAIEQGIWNSSTSIRLKSLEDSAETLRRSLAEMDFSRSQLLNRDRILFFLDKMAKYDRDNPDRRKQLIHTFINSVFVYDDKLKIVINAVEGNTTLTLPDIPESSGNDTNGVLIVTHPNLRIIIYTIPLAG

SEQ ID NO: 10225 - protein, 521 aa, Unknown
  Description of Unknown: Integrase B10226 sequence
  cd00338,PF13408,IPR011109,IPR038109,PF07508, Coil,PS51736,G3DSA:3.40.50.1390,IPR006119,IPR036162, PTHR30461,PTHR30461:SF3,PS51737,IPR025827,PF00239, SM00857,G3DSA:1.10.10.2600,SSF53041
MTTAVIYARYSSSNQREESIQGQIRDCLAYAERNGITVLREYTDSALTGKTDKRPSFQQMIKDSERHSFQVVLVWKLDRFARNRYDSAMYRNVLKKNGVRLVSVMENISDSPEGIILEGLMESLAEYYSANLSENVKRGLYDSALERKIISQPTFGYKRGADGRYEIDELTAPIVRRVFHEYANGKPYMAIVEDLNRDGIRTLRGNKFNRNSLRKLLRNEKYIGVYRYRDILDENGIPPIVSKELFDSVQHEVKRRTFTKKRITREESDPYLLTGKLFCGHCGSQMVGESARSKTGKTYHYYTCAGTRHQSRNGCKKRRVHRDWIEHEVIRIVNEYILTDEFIQTLTKRIMEIQKQDMESEILKLLKSELTATEAKIANLMKAIEAGAGFSESIRTRLSELESLRDDQNRRISLESHRQPQFTAEQISDYLTRLRRADKTDSDSQRLIINALIKRIYLFDCDDPAEQKISIEINYGDESDQVTHEEVVRIMRPLLCVRIDRRTQMIRRSILIIETIKKDRT

SEQ ID NO: 10226 - protein, 519 aa, Unknown
  Description of Unknown: Integrase B10227 sequence
  cd00338,PF13408,IPR011109,IPR038109,PF07508, Coil,PS51736,IPR036162,IPR006119,PTHR30461, G3DSA:3.40.50.1390,PTHR30461:SF3,IPR025827,PS51737,PF00239, SM00857,G3DSA:1.10.10.2600,SSF53041
MKKVTKIDKIQPAKNAEDKLRVAAYCRVSTATDAQLESLEAQKNHYENYINSRDDWCFAGVYYDEGITGTKASKRPELMRLLADCKAKKIDFVITKSISRFSRNTMDCLKIVRTLLNLNIPVYFEKENINTGSMESELFLSVLSTMAEGESASISSNNKWSIKKRFENGTYRLSSAPYGYELESGGLQVVSEQADIVKRIFRELLSGKGMYSIAKELNAEQVPTQKGGRWTSTSVHNILTNEKYTGDCIFQKTYADSNFNRHINNGELNRYLIQNHHEAIISHEDFKAATALIEQRATERRIESGSDKYQQRYAFSEKIICGECGNTFRRRIHKGKYNSYVAWVCNTHLSDTNRCSMLFVRDEALKLAFATMLNKLIFSYRLLLKPYLAAMQSNTADEALLRIQYLENQLDQNAEQRSTLHKLMAQGYIDQILYTQECNELLLQARDFRSEIEALNNTVAGDTTKVYETERLINYCKRGEMLTDFNESLFELFVDHILIYSRQKIGFVLRCDLTFEEMI

SEQ ID NO: 10227 - protein, 521 aa, Unknown; identical to SEQ ID NO: 10183
  Description of Unknown: Integrase B10228 sequence
  cd00338,PF13408,IPR011109,IPR038109,PF07508, Coil,PS51736,IPR036162,IPR006119,G3DSA:3.40.50.1390, PTHR30461,PTHR30461:SF3,PS51737,IPR025827,PF00239, SM00857,G3DSA:1.10.10.2600,SSF53041

SEQ ID NO: 10228 - protein, 521 aa, Unknown; identical to SEQ ID NO: 10187
  Description of Unknown: Integrase B10229 sequence
  cd00338,PF13408,IPR011109,IPR038109,PF07508, PS51736,G3DSA:3.40.50.1390,IPR036162,IPR006119,PTHR30461, PTHR30461:SF3,PS51737,IPR025827,PF00239,SM00857, G3DSA:1.10.10.2600,SSF53041

SEQ ID NO: 10229 - protein, 521 aa, Unknown
  Description of Unknown: Integrase B10230 sequence
  cd00338,PF13408,IPR011109,IPR038109,PF07508, Coil,PS51736,IPR036162,G3DSA:3.40.50.1390,PTHR30461, IPR006119,PTHR30461:SF3,IPR025827,PS51737,PF00239, SM00857,G3DSA:1.10.10.2600,SSF53041
MKKITKIEPTVVQTAASKIRVAAYCRVSTEADAQLISLETQKSHYEELISANPNWVFAGLYYDEGVSGTSKEKRPALMRMIEDCEAGKVGRILTKSLSRFARNTTDCLELTRKLLDLGVTIYFEKENLDTGSMESELLLSIMSNLAESESVSISENNKWGIRHRFENGTFKIGYAPFGYNVKDGQMTINEKEAKWVRWIFAEALKGTCSAAIARRLNEMKVPTRRKGNWRGNTIRGVLTNEKYVGDCLFQKTYSDFRFRRHKNHGEYDQFYVTDHHDAIISREDFEAAGALLQQREREKRIKKDELRINNKYPFSGKVVCGQCGSKLQRHINSTGSLKYPVWVCRQHLADARSCSMKYVRECDLEYAFTTMMNKLIFAKREVLDALLDGIRGENHKENLRRIDEIDRKLEQNVDRRQTLTIIMTRGYLEPALFTQESNDLAAEADALTAEKEQLVKEITGSYHKTDALADLTRYAGHAQPCATFDGTLVERFLDHAELRTRNEIVFQLKCGLRLTERIGEI

SEQ ID NO: 10230 - protein, 521 aa, Unknown; identical to SEQ ID NO: 10229
  Description of Unknown: Integrase B10231 sequence
  cd00338,PF13408,IPR011109,IPR038109,PF07508, Coil,PS51736,IPR036162,G3DSA:3.40.50.1390,PTHR30461, IPR006119,PTHR30461:SF3,IPR025827,PS51737,PF00239, SM00857,G3DSA:1.10.10.2600,SSF53041

SEQ ID NO: 10231 - protein, 521 aa, Unknown
  Description of Unknown: Integrase B10232 sequence
  cd00338,PF13408,IPR011109,IPR038109,PF07508, Coil,PS51736,IPR036162,IPR006119,G3DSA:3.40.50.1390, PTHR30461,PTHR30461:SF3,PS51737,IPR025827,PF00239, SM00857,G3DSA:1.10.10.2600,SSF53041
LKKITKIERNTSVASEQPKLRVAAYCRVSTDDEDQLFSLDAQIKHYDSYIKQNPEWEFAGLYYDKGITGTKKEKRPEFLRLITDCESKRIDLIVTKSISRFSRNTTDCLEVVRRLIDLHVFVYFEKENIHTGSMESELMLSILSGLAANESTSISENNKWSVKQRFQNGTFRLSSPPYGYDSIEGKLVINEDQAKTIRMIFSMTLAGFGVGKIAKELNRLKIPTKRSQFWNSSTILGILQNEKYVGDALFQKTFTDACFKRHLNTGERDFYQIKDNHPAIISRADFDAVQTILLQRRKEKSIEKQNPKYQNRYPFSGKILCFECGGKFKRRIHAQCQERIAWCCSTHLFDSDMCSMKFILESNLEYTFVTMMNKLIFGHTIMLKPLLISLRGMSTAEEKAKRKKLEKQLDEITEQRNVLLGLMSKGYLEPAAYTKGNNQLISDAKHLQSQCEQINRLISSGQEYLSELNALLHFVSKASMLEHFDAELFSRFVKQIHVYSRCEVGLELKCGLILRERVVEE

SEQ ID NO: 10232 - protein, 521 aa, Unknown
  Description of Unknown: Integrase B10233 sequence
  cd00338,PF13408,IPR011109,IPR038109,PF07508, Coil,PS51736,IPR036162,PTHR30461,G3DSA:3.40.50.1390, IPR006119,PTHR30461:SF3,PS51737,IPR025827,PF00239, SM00857,G3DSA:1.10.10.2600,SSF53041
MSENAVVYARYSSRGQNEQSIEGQLAAAREYASKKGYTIIKEYCDRAKTGRNDNRAEFQQMLADCAKRKFSVIIVWKVDRFGRNRYEIAINKTKAKKYGVRVEYVAENISPGPEGVILESVLEGLAEYYSLQLAQNVSRGKLESAKKHQAFGGFLPYGFRTGPDKQYELDPERAPIAREIFRRYADGETISQLLKWLNDSGYRTKRGTPFTKTVLPRMLKDERYIGTYIFKDIIHDEDAIPAIVDKLTFQRVQIMLKKNKRMPSHSWDYSEYLLTGKLFCGHCGSMMIGMSGINRHGVKYGYYACANRRKGEGCKKKNVRQDWIEPLVVSEIMKLLRDDALFQQIVDAAWAYYQEERKAQDETVSLRSELGGVNSGIRNLVRAMESGAVSDALIGRLQELEKQKADLEKAIAQAGIAMGPELTRDHIEYFLLHFRTSNVDDVEDRKALVEAFVNAIYLYDDKMTIVFNYRPDGQSMKQVTLEELEGFDSCPAYSSGRVTVELRFRLYRHVVIFTVDLLHTV

SEQ ID NO: 10233 - protein, 521 aa, Unknown
  Description of Unknown: Integrase B10234 sequence
  cd00338,PF13408,IPR011109,IPR038109,PF07508, Coil,PS51736,IPR036162,IPR006119,PTHR30461, G3DSA:3.40.50.1390,PTHR30461:SF3,IPR025827,PS51737,PF00239, SM00857,G3DSA:1.10.10.2600,SSF53041
MIAALYARYSSDNQRAESIVAQLRAGREYCQRRGYTIIKEYADEAYTGTNDRRPQYQQMLADARHGLFEVVIFHKVDRSARNEYDYYRHKRDLMACGVMVEYSGQSIDMSTPEGALMENQMVGLAAYYSRNLSREVKKGLKENVLAGKLTGGKPPFGFTTDAGKHLIPDAGEAAAVQHIFSMYADGHGYSDILAYLNGHGFRTRTGRPFGKNSLHDIFRNRRYIGVCILGKNQKYADGHRNSHRADHSGMIIVEDGCPAIVSRDLWQRVQKRMDHNRHRPGAFRAKHTYLLSGFIHCGLCGGTMAGTGTLSHGHVLRYYRCSAKTNHGKAACANRGVSADRLEPFIVKYLRRVMLSPNILMRIAARVAAIIRESVGTVDDARHRLQQQEAKLSRALERLYDMVEYGEPDEYDRERMAKVKAELTAVRADLRDIKQRKQQETTPADVVAYIRQTFLPLLEQSDKLHIILSALVHDIIVTPSKVRVQFSMAPFECGGFTPERTSKLKLPIVERSWPRWIFDAA

SEQ ID NO: 10234 - protein, 521 aa, Unknown
  Description of Unknown: Integrase B10235 sequence
  cd00338,PF13408,IPR011109,PF07508,Coil, PS51736,G3DSA:3.40.50.1390,PTHR30461,IPR036162,IPR006119, PTHR30461:SF3,IPR025827,PS51737,PF00239,SM00857, SSF53041
VYCRQSIEKRDSLSIDAQAEKCIQYCNYKGLGYEVYKDAGYSGKDIRRPDFERLLDDVKDGKIKTIITYRLDRISRNIADFGSLITLFEKHGVDFISVSENFDTSTPMGRAMVMIVMVFAQLERETIAERIKDNCYYRAKLGRWTGGPVPFGYESSKITESGKEKSVLVVDSDESIIINKIFDMYLNSKSVRKVVADLNGSGIKTKKGSNWTQKTLSCVLRNVLYATNTPDVYNYFTDTGINIVNDITDFDGSLGCMFYGRTKGAGEKQDKYHIIVGEHKGIISGEKWIEAQTIMSKNKAVAPRTGKGTSILSGLIKCGICGYGMLVTQSLMYSRKRADKYPAENITYRYFKCGAKLHQGTCVCDNTAMRVDELEKRVLIGLKKDIKKYINKNIVPIDKTSKFAEEKLRIQNSIYKIDKDISNLIDNLSKSTSSILIAKVEEKLLELESQRNVLNKEIDKLSINISMSKKSQGNIEYLISIMNDFDNIFYNSTSEEQKQILRIFIKQVIVTRGSITLERYF

SEQ ID NO: 10235 - protein, 521 aa, Unknown
  Description of Unknown: Integrase B10236 sequence
  cd00338,PF13408,IPR011109,IPR038109,PF07508, Coil,PS51736,IPR036162,IPR006119,PTHR30461, G3DSA:3.40.50.1390,PTHR30461:SF3,PS51737,IPR025827,PF00239, SM00857,G3DSA:1.10.10.2600,SSF53041
MTNAVIYARYSSSGQREESIKGQLRECNSYAKRNGFTVIKEYTDSALSGTNDKRPAFQRMIADAKSGSFSVVIVWKLDRFARNRYDAAMYRNELKKAGVRIVSAMENISESPEGIILEGLMESLAEYYSANLSENIKRGIYDSALERKKTTRILGYRRGPDGKYEIDPVSGPIVRRAFEEYAAGKSMPEIVEGLNADGLRTKDGTPFKRNTLRTVLRNEKYKGVYRYRDIVDPHGIPAIVSPDLFDKVQKELANRSKNYTKRKTKTGATYLLTGKLFCGHCLAPMAGDSARSRSGEVYHWYTCPHNRYNPKTCNKKRVPKDWLEAEVLRILNTEILTDEFIEHAADAAVEYEKHFDNNSELDGLRLELKQTENKIRNVSAAIATGVITKTLPEMLAELEKQREQIETAIVKKSAGVHEFSRDAIVAYLHELKALSHKDAGSQRHLINACIKSIYVFDTDDPDSLRLVINMNYFDNDAEINHEEIVRIVSSPLHFAVTSRTTVHGRRLLLVRTIKKPAMLMG

SEQ ID NO: 10236 - protein, 521 aa, Unknown
  Description of Unknown: Integrase B10237 sequence
  cd00338,PF13408,Coil,PS51736,G3DSA:3.40.50.1390, IPR036162,PTHR30461,IPR006119,PTHR30461:SF3,IPR025827, PF00239,SM00857,SSF53041
VTDLPWAIYTRVSTDDQAKKGISLDAQLESCRCYAKARGWTVGKECIEPGITGSTMKRPALQDLLAEVKAGKLGGVIVWKLERLSRIMDDVKAMHRLLAEANTDLCSVTENIDTTTPSGRLFFHMLASFNEYDRDNIRERIKAAMTHLRAQGFWTGGHVPPGCQLVAAGERRKLVEDPAVAPLVRPLWSWILGGDGLNVSARRLQDAGVPAPGYVGKASRRGWTPAQAWNLVRSPQVTGILVDAATQASAIQALAGRKTPVRRGSTPKPGARASVASIVAGLLRCPMCGSSMVQATVKQKYRYFRCCLANKNRSLCRQKDPRVELVEAAVVDALEEAINGGRYRDSLLAAKHVSIGQVQEARQAKGRLTVAREQLAGRIAHLARTGQVGTAGFNAALEALGEDAKAIDRRLAEAEAILAVRGVDADNIELALDTIGRALVRFQAADCSPVERAAILREWIQKVEVHPDRVRLFMWGMPENKEPQPFGRGFAPETGLGTPKRTGCKPVLVEIPRGSPANVLR

SEQ ID NO: 10237 - protein, 521 aa, Unknown
  Description of Unknown: Integrase B10238 sequence
  cd00338,PF13408,IPR011109,IPR038109, PF07508,Coil,PS51736,G3DSA:3.40.50.1390, IPR036162,IPR006119,PTHR30461,IPR025827, PS51737,PF00239,SM00857,G3DSA:1.10.10.2600,SSF53041
MPTAYSYARFSSDRQHESSIEAQQDATRRWAEAHGVTIVHEYADRGISGTTDERPEFQKMIAACRIRKVDFVLVHKHDRFARNRYDAVIYGRIIEQTGARLVAVAQDFGETPEAVIMEGLMQAWSEYYSRNLSTETKKGLRVRAMKGLSLGGFVPFGYQLAEDGSMEIVDDEAIWVRAFFDAYLSGGFQDAVRRANMAGVRGRKGVRLTPHGVMKMIRNPVYRGAYRVTVGGEETLIEDHHPAIVSPEIWKEAKTIMEARIKVRSEEDKTYLLTGMVRCGICGKRIRAQTQLHGGKEYVYYGCRESGSHPDGKALRSIQAAALDDAARQYVRAILTPEARQTAAAALAEYIDGRKKDAKQRGPDAKKRIRALEKKIDSIVENMSSGVLPPSVLKRLGEQVTELETEIEAQRELMNAPPDPDMPSIEEFFAGAAAIDENMPIEEQQRIIRRFISEITLTNDEIAIESTFADWLKDRGITIYTKKPLPDPAMLLGINIARASLSDPNLFDIVIGILCNMRIAA

SEQ ID NO: 10238 - protein, 521 aa, Unknown
  Description of Unknown: Integrase B10239 sequence
  cd00338,PF13408,IPR011109,IPR038109,PF07508, Coil,PS51736,IPR036162,PTHR30461,IPR006119, G3DSA:3.40.50.1390,PTHR30461:SF3,PS51737,IPR025827,PF00239, SM00857,G3DSA:1.10.10.2600,SSF53041
MKKVITIEPAKQVTHKVDLPSFTKRRVAGYARVSTDHEDQTTSYEAQMTYYTDYINSRSDWEFVKMYSDEGISGTNTKKRLGFQEMVEDALVGKIDLILTKSVSRFARNTVDSLSTVRKLKEAGVEIYFEKENIWTFDSKGELLITIMSSLAQEESRSISENVTWGRRRQLAEGQVTFSYSQVLGFKKSDTGGFEIDQEEAKIVRYIFHQVLLGNNPNKIARELTAQGIPTPQGKRQWSYGTVKRMLRNEKYKGDALLQKSFTTDFLTKSTKPNEGELPQYYVENNHEAIIKREVFDLVQVELDKLEKKRQTNNIFTGRLFCGDCGSAFGSKVWHSTSKYKRTIYQCNAKYKGEHKCQTPHVTEEEIKGWFLSAMNQLLSNREEIVANTELLIDLAKDTSPLENKIDDLEQQLETIRQDIEDLVDRNARKAQNQDLYQEQYDTLVTAYQERQKELQEATSSLEEQKSKQLSLDGFIQQLKQQEDLITDFNQELWQTSVERLDIKEGKKISLTFKNGVRIDL

SEQ ID NO: 10239 - protein, 520 aa, Unknown
  Description of Unknown: Integrase B10240 sequence
  cd00338,IPR011109,IPR038109,PF07508,Coil, PS51736,G3DSA:3.40.50.1390,PTHR30461,IPR006119,IPR036162, PTHR30461:SF3,PS51737,PF00239,SM00857,G3DSA:1.10.10.2600, SSF53041
MFLLPELKPEEILIYLRKSRTDDPALTVAETVAKHEQMLDDYSMRTFGQLVPEENRFREVVSGETIAARPEMQKVLHLIEQPKYKAILIVEPQRLSRGDLEDIGRLSKLLRYTRTVVITLQYSYDLEDERDRDYFERELKRGNEYLEYSKRIMANGRALSAERGNYTGSRDPYGYKRVFRKDGKRKFPTLEIVPEEAEIVRMVFSMYADGIGATKICSQLNAIGSVPKIGKLWSPPAIYSMLDNPVYNGKIRHGERRTVKTVEDGEIIVRNPHRKDFQVYDGKHEEIISDTLWSAVRKRRDARDLPKVKVSKKLQNPLSGLVFCSCGRMMIRRPYSGRCADRYQCPNQTYCDNASCTMQEMLDAVTSALLNALHDFEASVTADDAGAVDRQSELRKVLTTRLAELENKERALWEKYAEGMPNKIFDDLIAKNEKQKEEVTNMIDQLDSEPEPINYEERVVLFSETLDALRDPDAPAAEVNALLKTCIRRITYSRERGQRKSGTRDGWDVKPMNLQIELNL

SEQ ID NO: 10240 - protein, 520 aa, Unknown
  Description of Unknown: Integrase B10241 sequence
  cd00338,PF13408,IPR011109,Coil,PS51736, G3DSA:3.40.50.1390,IPR036162,IPR006119,PTHR30461,PTHR30461:SF3, IPR025827,PS51737,PF00239,SM00857,SSF53041
MYTLQALYTNKKGSRDQRLPLQNVKQNISRKTAHDDIMSFYILSYQAFFRYQKEGFYMSFFTPNPQLFGLRVVKYIRCSHDDQVLHGDTLEAQDLILEDFIKVNRMILVDTFIDEALTARKKFNKRKEFVRLLSGVKAHAFDLIIFTKLDRWFRNIGDYHKIQEILEANGVQWKAVTENYDTTTTNGRLHINIRLSVAQDECDRDSDRIKDVFAYKLKNKTYVSGSLPRGLKLDAEKHVIIDPEWNCFALDMFDRFEATCSKRDTQLFLQEKYNIRVCYDTVARYLKNPLFKGQYRDDPDFCPATISPERFERIQKLAIRNVRIRHTQQFYIFSGLLICSSCNHYMCGTVTYRRMADGSEKMYKNYRCNFKAQSKLCDRGKTYREADLEEYMLAHIRPALSDYIVKYEVTAASTVQKNPVTEIAKIERKMKKLYDLFMDDLIDKEAYRSEYDKFKAQIEELQKCSTAAPMRSLDSVKKLLSEDWEAVYHTFSDQEKNTFWKSFIESVLVYEDGSMDIRFL

SEQ ID NO: 10241 - protein, 520 aa, Unknown
  Description of Unknown: Integrase B10242 sequence
  cd00338,PF13408,IPR011109,IPR038109, PF07508,PS51736,G3DSA:3.40.50.1390,IPR006119, PTHR30461,IPR036162,PTHR30461:SF3,PS51737, IPR025827,PF00239,SM00857,G3DSA:1.10.10.2600,SSF53041
MKRITKIEENRALSVKKKTRVAAYCRVSTASDEQLISLDTQKAHYEDYIKSNNEWEYTGVFYDEGITGTKKECRDGLNSLIDSCEKGLVDLIITKSISRFSRNTTDCLELVRKLIGLNVTVIFEKENINTDSMESELMLSILSSLAESESVSISENNKWSIQKRFQNGTYIISYPPYGYENADGEMIVVPKQAEVVKKIFEDTLAGKSTHIIAKELNDSGVASKKGRKWTPGAINAIIRNEKFTGDVIFQKTYTDSQFSRHTNDGELNQYLCENHHEPIVSHEIFEKANEVLNQRGKEKGNGERTERYQNRYGFSGRIKCGQCGGVFKRRSHYKPSGSYIAWCCTHHIEDRYSCSMKYITDDGIKAAFLTMMNKLVFAHQRILKPLLHSLQGFDDKNRLLQIQEYETKLEKNMEQRQVLTSVMASGLLEPALFSKKITALILEEKQLQEGKKQMINTVSGDRTKIEALEKLMKFVLGSEMLTEYSDEIFLSHVEGIIVLSREEIVFELKCGLKLKERLVG

SEQ ID NO: 10242 - protein, 520 aa, Unknown
  Description of Unknown: Integrase B10243 sequence
  cd00338,PF13408,IPR011109,IPR038109,PF07508, Coil,PS51736,IPR036162,IPR006119,G3DSA:3.40.50.1390, PTHR30461,PTHR30461:SF3,IPR025827,PS51737,PF00239, SM00857,G3DSA:1.10.10.2600,SSF53041
MKKAVIYARYSSSSQTEQSIEGQIRVCTDFAKQHDFLIVDTYIDRAMTGTNDRRPEFQRMLRDSSEHNWEFVIVYAVDRFGRNDEDYAINKRTLSKNGVSLLSATQITSKNIDGTDNINGILSEGILVALAKYYSAELSQKVKRGQKESLAKGNFLGSFVPYGYDVVDKKYVINETEAEIVRMMYVDYAKGLTAKEIAENLKERGIRNKFGRYFVVNSIMNMLKNEKYNGTLIYGDNVLRNYIPVIIEDSLFEKVQARIVANKRSPARMKAKEEYLLSSKLYCGYCGSLMTGESGTSKTGAIHHYYKCFGKKKGSDCKKKNYKKDALEDLVVNLTIRHILNEKNQCPIIDRIVTIYNNNLKNSAITTSIKKQIDAKHKEIDNILKAIKLGIFTDSTKNELLALENEVKELEEKFELQLAIEEKPLDSYRIKYWFSRFNDIDNADKKRVIIGSFVRKVILYDDKIIIIYNHDGDNQKEYHEDELEEIECSNLTQLAPPQSCPDVLYCMSGFFNEIKSFFNN

SEQ ID NO: 10243 - protein, 520 aa, Unknown
  Description of Unknown: Integrase B10244 sequence
  cd00338,IPR011109,IPR038109,PF07508,Coil, PS51736,IPR036162,IPR006119,G3DSA:3.40.50.1390,PTHR30461, PTHR30461:SF3,PS51737,PF00239,SM00857,G3DSA:1.10.10.2600, SSF53041
MEKVVIYLRKSRADAEAELMGEGETLARHERLLLEVAKKQRINVVDIYKEVVSGETIASRPVMQKLLTEVEHCMWSGVLVIEIDRLARGDTVDQGIMAQAFKYSNTKIITPNKIYDPANEFDEEFFEFGLFMSRREYKTINRRLQAGRIASVKEGKYVGNIPPYGYIRQKLEKEKGFTLLPHPEQAEIVRLIFDLYTGKNEKQIGVSLIVRKLNNLKIPAVNGVWVPATIQGILRNPVYIGKIRWNCRPQIKKVIDGKIKKERPRKKPDECIIANGKHEAIIEIETFELAQQLMSKNKAPCPTGTSVKNPLAGIVKCAKCGRNMVRRPYSNRGQEDTLMCPVTSCDNVSSVLRIVEEKILKYLKKWNNGLMVKIKKQTKTNINISILEKSRDKIEFEIESSKKQLDKTYDLLEKEIYDTDTFLSRSKIIAEKIKELKKDYNKINNEIKKNKNEIQARTQIIPMVSHVVDIYYKLDDPAEKNELLKKVLDKVEYIKTEKGNYNKKEIPTFEITLYPKFPSV

SEQ ID NO: 10244 - protein, 520 aa, Unknown
  Description of Unknown: Integrase B10245 sequence
  cd00338,PF13408,IPR011109,IPR038109,PF07508, Coil,PS51736,G3DSA:3.40.50.1390,IPR006119,IPR036162, PTHR30461,PTHR30461:SF3,PS51737,IPR025827,PF00239, SM00857,G3DSA:1.10.10.2600,SSF53041
MIYIVKGDYMKAAIYARYSSDNQREESIEAQIRAIQEYSQRNQIHIVKIYTDEAKSATTDNRPQFLRMVNDSKLGLFEAAIVHKLDRFARNRYDSAHYKKMLKDNGVKLISVLENLDDSPESIILESMLQGMAEYYSANLSREVMKGMRETAYKGKHNGGIPPLGYGINLDKTYHIIENEAKTVSIIFERFLLGQGYQSIANELNGSGKTTKQGKQFKKNTIRDILLNEKYTGTYVFNRRADGKTLNKIKPDEEIIRVENALPAIITKEQFEKTQNRINGQKTGRRIRVMHYLLTGKLFCGECNKHYTGAGHVKGRDRSDDNPTKYYRYACTGKKGGCQNKPVRKETIEDAVINEIKDKILNDEKIPMWVEQLLEKIKESKSENTNRISEIGKEITKLKNQIDKDFQLYYDDLMDKTILAEKVNTKKEKISLLENELIILNTRNYAPNKDMIIAYLHTMKNNLESGDVNRQQKVIDTLVQCVVVYPDRIDIDIGIDDSGDSDKGTGGEPLLTLSLSILRP

SEQ ID NO: 10245 - protein, 520 aa, Unknown
  Description of Unknown: Integrase B10246 sequence
  IPR038109,PS00397,IPR006119,PS51737,PF00239,G3DSA:3.40.50.1390 ,PTHR30461,IPR025827,SM00857,G3DSA:1.10.10.2600, SSF53041,IPR011109,PF07508,PS51736,IPR006118, cd00338,PF13408,Coil,IPR036162,PTHR30461:SF3
MTNKAIIYARVSSKEQETGGFSIPAQLDFLRNYAQQKGFDIIKTFTESVSAKDKNSRIEYDNMIKFARAQKGGCHILVEKTDRLLRNEFNSAEIIELARTTDISVHLAKESLVLDKNSPPTTFFIFTMFSANSSLYPRNLSNEVKKGMNKKAELGFYPGKTPVGYKNIRIGKQPPQIVVDEEKAPFVIKAFELYSTGNYSFSQIAEILSKENFKMRSRLVKKNNIDVILKNPFYTGDFLYKGMYYSGKHTPLISKELFFQCKKIMEQGKTPYKNKYEFLFNNIIQCADCGQYLTADIKKGKYVYYRCFGNKNNDFRCKTKLLPQTKVEEAVIECLNNIHITQEQKSELLAKIKMCFKSDSQNFANLFEKNSKKIIELKNKIDKLYTDKLDGIIPNEFFIEKYNSWSAEVSQLNEQNNSLMQDADDIIQKCELILELLNQAPSLYLRLDYDNKRLLLKTLFSHFSWDGETLTLHTKKVFELLFKHNFSKMVGDIGQISKFKKDINSENIVLFKNIKKLLVA

SEQ ID NO: 10246 - protein, 515 aa, Unknown
  Description of Unknown: Integrase B10247 sequence
  cd00338,PF13408,IPR011109,IPR038109,PF07508, Coil,PS51736,G3DSA:3.40.50.1390,PTHR30461,IPR036162, IPR006119,IPR025827,PS51737,PF00239,SM00857, G3DSA:1.10.10.2600,SSF53041
MIPAKRRVGNTVKEEDRPKLRVAAYCRVSTDSDEQATSYDAQVEHYTDYIQKNPEWEFAGIFSDDGISGTYTKKRDGFNHMIDECMDGKIDMIITKSISRFARNTLDCLKFIRQLKEKNIPVYFEKENINTMDAKGEVLLTIMASLAQQESQSLSQNVKLGIQYRYQQGLVQVNHNRFIGYTKDNDGQLIIEPEGAKVVKRIYREYLEGSSLLEIGRGLEEDGILTGAGKGKWRPETIYKILHNEKYMGDALLQKTYTINFLNKTRVKNKGLVPQYYVENNHEAIIPRDIFMRVQEEMVRRANLHSGKNRKKRVYSSKYALSSIVYCSKCGEIYRRIQWQAHGKKYIVWRCCNRVENGPGACDAGAIREVDLQSIVIKAINKAFGKRESMKAALVANIESVITDVGGISIDEIDLRLEELQKELLKVANSKVNYDEMADEIFKLRELKQSAMVDSAEREGLKLRIDEMNKFLDEQTEVITEYDEQLTRRLIEKITVYESYFTVEFKSGASVDIYK

SEQ ID NO: 10247 - protein, 520 aa, Unknown
  Description of Unknown: Integrase B10248 sequence
  cd00338,PF13408,IPR011109,IPR038109,PF07508, PS51736,IPR036162,IPR006119,G3DSA:3.40.50.1390,PTHR30461, PTHR30461:SF3,PS51737,IPR025827,PF00239,SM00857, G3DSA:1.10.10.2600,SSF53041
MPRKKAPAAEAPRLVAYYRYSGGSRQTEQSIEGQRRDCEAYARAHGMTILREYVDRHISGKTDDRPAFQQLVADSAAHTFDAVICWKTDRLARNRYDSAVYKKKLRDNGVEILYAAESNISGAEGIIIEGLMEALAEYYSAELAEKARRGMRESALKGKALGSSRPLGLTVDADKHYIIEPTGAEAVRYIFEQYAAGLSSSSIVERLNAMGLRTSHGGPFNKSSINRIIQNEMYRGVYVSKKFDVRIEGAIPAIIDNDLWERAQKMFERNRQSRTPHASRADYILSGKLYCGECGCLMKGVCGRSSGNGQMYHYYACPGRSIGRACTRKNIPQDELEAMVVNSVADLLLEPELLEQIADAIVELQQAEAARPDPEKQALEKSLSDVRSKIQNILTAIENGTSSAALSARLADLEQQESTLSYQLSSLTAKKPLTFTRDQILFLLQQFRVSPSERTKAYCRRLVDTFVDHIELTNTELILYFNLSDETIDKNKKAPRSNPSKESSTEKRLVRVARIELTAS

SEQ ID NO: 10248 - protein, 520 aa, Unknown
  Description of Unknown: Integrase B10249 sequence
  cd00338,PF13408,IPR011109,IPR038109,PF07508, Coil,G3DSA:3.40.50.1390,IPR036162,IPR006119,PTHR30461, PTHR30461:SF3,IPR025827,PS51737,PF00239,SM00857, G3DSA:1.10.10.2600,SSF53041
MKRVLCLYRVSTIGQVDHDDIPMQRIACREFINQHPDWVLVEEISEKGVSGYKTKTEDRDALTRIKEKALAKKFDILLVFMFDRIGRRDNETPFVVQWFVENGIEVWSTKEGEQRFDNHVDKLLNYIRFWQASGESEKTSMRIRTRHLQMIQEGLYRGGLIPFGYKLEFMGRTNKKGQPVRDLVIDEAESKIVKEIYHKSVSDGWGANRIANWLNERGIPTKRQKTFWRATSIRALVRNPIYTGRIRFGGDLSEPFDHLRIIDDDLFGLCDQTIEGRCPRHPDKRVGHLRSTSNGLLTGILYCGSCGERMCFNHNTTVRILADGTKRSYERDVYRCYRKIHSRRTCQGRSTYSAERIEKDILAVVHTYFENIRSKPTLQMLAAAGNRKRSIQQDAIAQAEAALKKAQIELAALEDAITGETNMDLELINSLFPKRRMNLDKAMQEVERLRAELADSEKLESAANHELNMILSWADTFDAASRETQRSIIAMLIDKVVVNTNYHLDIHFRITAQQYLGKAS

SEQ ID NO: 10249 - protein, 520 aa, Unknown
  Description of Unknown: Integrase B10250 sequence
  cd00338,PF13408,IPR011109,IPR038109,PF07508, Coil,PS51736,IPR036162,IPR006119,PTHR30461, G3DSA:3.40.50.1390,IPR025827,PS51737,PF00239,SM00857, G3DSA:1.10.10.2600,SSF53041
MAFCAYVRRSRLDYEAERISHEDTLARQRAILTDLAAANRHVISEYYEEVVSGDTIQDRPRCQQLIADLIAGKWEGVYCTNISRLARGDTSDQGTILRVLQLTGAKVITPEKTLDPANADDQFMAEVSLFLARQEYKSSTKRQQAGKDRSLEEGKCIASKAAYGYRRVKLTGQRGWSLEIQPEEAVVVQSVASWYLYGRNGAPMGITAIATHLTDTGVLPGENGTRWTACRIHRMLTNPVYAGWIRYGYEKVEKTPTLSGYSKRRVINNDCKLRKGIHQAILPQETFDAIQQKLHGYKKHLPVRKGTPLSNPLAGLVFCGECGHVMSHLPSCGRQEAIIKCRTRGCPTVQSYREPVEAAILSTLRQWLDDPGALSAFSTPKPEQDASALPAMETELEKLRRQLDRVQDLFEQDVYTLDDYRSRRSKLDARMQELQSSIAAEKQLLADQPVYATHQELAPAILRLFDGYENATPQQKNDMLKSCISSVVYRKSKTGLVLRGHVYSDPNAFELDVYPLLKKE

SEQ ID NO: 10250 - protein, 520 aa, Unknown
  Description of Unknown: Integrase B10251 sequence
  cd00338,PF13408,IPR011109,IPR038109,PF07508, Coil,PS51736,G3DSA:3.40.50.1390,IPR006119,IPR036162, PTHR30461,PTHR30461:SF3,PS51737,IPR025827,PF00239, SM00857,G3DSA:1.10.10.2600,SSF53041
MYEDIKTACLYVRFSSHNQTEQSIEGQTRVCRDFCKRHNIRIVEIYADRATSASKDIEKRVQFLKMIKDSEKGLFDAVIVYKLDRFARSRYDSATYKYRLKRNGVQLISATENISNDPEGIILESVLEGMAEFYSAELSQKINRGMRESAYKHNSIGGAVPLGYKIEDKKLVIDPKTAPIVKEAFEKYADGETVAEICRQFNARGYKTSKGTAFGKSSFTKIFRNERYIGVYSFHDYRAEDAIPAIIDKDLWDRVQLRVGKIKNAPARNKAKVVYLLSGKIFCGHCGSKMNGNCNAGNYYYYQCYGKKNGNVDCKKKNIRKEFIERLVAQDALSLLTDEYIEQIATIACEKNQHEIELDSALPTIRDRIHQVDLSLNNLLKAIESGSAPDMLVKRIGELEKEKKDLQVQAKKESEDIVELDKAQVIYWLEQFRGGSIEDEEFCRMLIDLFVNSVTVWDEDDNTYKVTVAYNLTSLPTKTYRLNKGGTLSDFTSNAPHQPPDEEKDRHVLRQVISARRRGD

SEQ ID NO: 10251 - protein, 520 aa, Unknown
  Description of Unknown: Integrase B10252 sequence
  cd00338,PF13408,IPR011109,IPR038109,PF07508, Coil,PS51736,G3DSA:3.40.50.1390,IPR036162,PTHR30461, IPR006119,PTHR30461:SF3,PS51737,IPR025827,PF00239, SM00857,G3DSA:1.10.10.2600,SSF53041
MPTVIAIPATRREVRKTNSVQAIRRKVVGYARVSTDHDEQLTSYEAQMEYYTRYIKEHDGWEYAGMYSDEGITATNTKNRDGFNQMVTDALAGKFNLIITKSVSRFARNTVDSLVTVRKLKEAGVEVYFEKENIWTLDSKGELLITIMSSLAQEESRNISENTTWGQRKRFADGKVSVPFGRFLGYDRGENGGLVVNPGQAAIVRKIYSLFLQGKTLHGIKRILEGEGILSPGGKKSWSLTTIRSILTNEKYKGDALLQKSFTVDFLTKKKKKNEGEVQQYYVEGAHEAIVTPAIFEMVQREMERRKGVKGNKYNCTTFLSGKIKCGECGSWFGPKVWHSNDKYRRTVYQCNHKYNGEYKCSTPTITEDDVRCWFVDAVNKIYKNRNDILVDMGAAMSALDHQDELVTKQEELESWLEQKHLEIDALILHNASQTINQDSYQKKFDRLTKEYEKGRDELDSIAAKLGENRSRKEMLHEFIDTIRDKATLVEDIDENLWMALFDCLVVNSMDDVRFILKDG

SEQ ID NO: 10252 - protein, 520 aa, Unknown
  Description of Unknown: Integrase B10253 sequence
  cd00338,PF13408,IPR011109,IPR038109,PF07508, Coil,PS51736,IPR036162,IPR006119,PTHR30461, G3DSA:3.40.50.1390,PTHR30461:SF3,PS51737,IPR025827,PF00239, SM00857,G3DSA:1.10.10.2600,SSF53041
MIPAVIYARYSSTNQREESIEGQLRECHRYAERVGLSVIHEYTDAAISGTSDKRPAFQQMIRDSKKKAFEVVIVWKLDRFARNRYDAAIYRKQLQDNGVRIVSAMETFSDGPEGIILEGLMEAMAEYYSANLSENIQRGMYDSALQRKFLGQPVLGYKKGSDGKYEIDPLTAPIVRRIFEEYASGKSQPEIVASLNADGLRTVRGNRFMRNSLRAVLTNEKYIGMYRYKDIADPKGIPPIIDKPLFDKVQQMIGKRKYQKKTPEGTPRYMLVTKLLCGECGKMMTGESARSKNGSVFFYYSCAGTKSKPKECHKRRVPRDWIESEVIRIITQEILNDEFIDLIADGFMEQQKKDRSGQKLDGLNQQLKVVQKKMDNINRAISEGIWSESTGNMLRELEKQKSELSNAIQKEKLSASASVSRDEVLVILREMRDAATRSEDVAQAMIDAFVFRIYLFDHEDEDKQRVLVEYSPTGYIENALKYVEVISVRAKHNRLHIMGLTRTQWTYGRSVFVEYVITKK

SEQ ID NO: 10253 - protein, 520 aa, Unknown
  Description of Unknown: Integrase B10254 sequence
  cd00338,IPR011109,IPR038109,PF07508,Coil, PS51736,IPR036162,IPR006119,PTHR30461,G3DSA:3.40.50.1390, PTHR30461:SF3,PS51737,PF00239,SM00857,G3DSA:1.10.10.2600, SSF53041
MYKYLMYLRKSRADRDFSDEPVMHTLQRHKKRLDEYCLAHDIIVPESNILYEVAGADSIASRPKMMELLSLVETGEYEGVLCVDMDRLSRGSGADQALVINTFKYSNTKIITPNKTYDFANDMDEQFAELGLFMAKNEYRQIKRRLRQGKIDAVKEGKYPSANPPYGYETYKLKGQKGFSLRIVPEEAEAVRLMFKMFTEDNLGGHRIAKWLNENGYRARNGNVWLAAHVNKILRDPTYTGKVRFAHRVTAKQMKNGKMVTVERNNDENQLICNGLHEAIISEDAFKSAETVRETHFIPHVRKSYSTQNPFAGLLVCAFCGKTLALRSPDPYGRAVFCPTPGCPTKSTYVKYIEEEVLEWLDDWLQEYRMLPDEADHAEEIKARETALKKAEAELKAETAKQNRIYSLLEDGIYSTDEYKARMVESKKRISQIEERISQEQNLISELKQYAAQRDIIAPQLETVVDRYRSLPSAEEKNKLLKGIFVKIVYTKTVGGKTHGKDYELEVFPRIPKHPDLTEE

SEQ ID NO: 10254 - protein, 520 aa, Unknown
  Description of Unknown: Integrase B10255 sequence
  cd00338,PF13408,IPR011109,IPR038109,PF07508, Coil,PS51736,G3DSA:3.40.50.1390,IPR006119,PTHR30461, IPR036162,PTHR30461:SF3,PS51737,IPR025827,PF00239, SM00857,G3DSA:1.10.10.2600,SSF53041
MKKAVIYARFSSHSQTEQSIEGQLRVCEEFAKRNDILILDTYIDRKKTGQNDIRPNFQKMLRDSSNRQWDYVIIYAIDRFARDDGDYGADKKLLRQNGVKILSATEITGTNADGSENLSGILTEGLLVSLAKYYSRELSKKVKRGQFESIQKKLFLGGAVLYGYVVVDKEIKISPPEAQVVREIFDAYANGLTAKNIAFDLKERQITNNKGRYFCVNSIMNMLKNKKYNGVFEYGDYYVEDYYPKIIDDKTFDIVARKIEKNKRSPARMKAYENYRLSGKLYCGHCKSLMTGEAGTSKSGIVHHYYKCFGKKKHNGCKKLSVRKDELENLVASLVLNHILAPDKILDTIENIVISYNEDIKEDCEITILKKELAENNKFINNIITAIKNGIITESTQKELVELEDKKKALNEAIAKKEAEEDFVLTKERVLFYFDEFIKDSLSDEEAKDIIIERLVNKVILYDNKITIVLYNKDDHSFDADIDMVEDLCSDLTQSAPPKSHNPNTIYTKHFIVLDYTFTQ

SEQ ID NO: 10255 - protein, 520 aa, Unknown
  Description of Unknown: Integrase B10256 sequence
  cd00338,PF13408,IPR011109,IPR038109,PF07508, Coil,PS51736,IPR036162,G3DSA:3.40.50.1390,IPR006119, PTHR30461,PTHR30461:SF3,PS51737,IPR025827,PF00239, SM00857,G3DSA:1.10.10.2600,SSF53041
MRAKKKPAMLEPDMQDAVIYTRYSSHNQRDCSIEQQVADCEIFARQNNLRVVKVYADRHLSGTTDNRPQFQQMLKDAAHGHWAYVICWKIDRFARNRYDSATYKFRLKKAGVRVLYAKESIPDGPEGILLESVLEGSAEYYSAALAQNIRRGMKYNAEQCKVNSGSIPFGYCKGPDGRFAIHEANAEVVREIFRKAAAGMPFVDIANDLNSRGLKTSRGGRWNKGSFRLLMNEAYIGVYHFSDTRIEGGMPALIDQGTFWAANERLKANSSVRGRHQDGGDYLLTGKLKCAHCGSYMIGFSGTGKSGELHYYYGCQKRRRERACKKANVPREWIERVVVKAALDYVLRPDVMEWIADAVMEYQEREAASAQLAALTAELEENQKATDNVMKAIEAGIITSTTKQRLLDLEAKAQDLKRAIELEKLSHVRLERDQVLFWLDRFRGGSLQSQEFRRKVIDAFVSVVYLSDDHLRIAFNYSGGSNAEADFDLVMDAEAAVKGRGYLVLLFSDSIGYSRLYFCC

SEQ ID NO: 10256 - protein, 520 aa, Unknown
  Description of Unknown: Integrase B10257 sequence
  PF13408,IPR011109,PF07508,Coil,PS51736, G3DSA:3.40.50.1390,IPR006119,IPR036162,PTHR30461,PTHR30461:SF3, PS51737,IPR025827,PF00239,SM00857,cd03768, SSF53041
MRFFTYGRKSVYKDNSDSIDNQFRMCREYCEMRFPNEIESWQQFSDEDFTGANTNRPGFQSMMALLREDACDVLVVYQLDRFSRDVRDFSAAYAEMQAHHVRFICLDLNIDTSTPIGEAMMYVSAAFGQMERKNIALRVADNMNGLAKKGYWVGGNPPVGYERSRIIVNGRKHVTIVPVPEGVEYMNWLYDYFLSGSYSLQGLETEFRKKGIKAQGGSFFSTTQLHQLLTSPYCCEATPEVYDYYAAKGCKMESPRELWDGSVGVMVYGRTTQKGKSHQKQPPAEWTVCLGYHKPFMPAEKWLAVQGRMTHNACFHKPKYPVPLLRGVLRCSCGALMAVSTKKKTKGVSRWYYCEKRMRKGAEACACSQIKCDLLDEKALEVFREIEADPKLIERYVEKSEKKKGEDPRKLQAKISSTEEKIGRLAASLALAENSTASRYIIAEMESLDSQLRELKHKKADAEADRRKEVSEEKKNSEKVKEIFRLLKGMEGFTAEEKNEIVRSIVKECTWDGETLFILL

SEQ ID NO: 10257 - protein, 520 aa, Unknown
  Description of Unknown: Integrase B10258 sequence
  cd00338,IPR011109,IPR038109,PF07508,Coil, PS51736,G3DSA:3.40.50.1390,IPR006119,IPR036162,PTHR30461, PTHR30461:SF3,PS51737,PF00239,SM00857,G3DSA:1.10.10.2600, SSF53041
MNRPTHLDVFVYLRKSRKDVEEERKALENNTPFDTLAKHRRELLELIRREGHSVIDIFEEVVSGEYISERPEMQELLRRVDDGEIEAVVVMDLDRLGRGDMVDAGTIFRTFRDSETLIVTPTEVIDCTAEGAELLFGFKSMIAREELKLINKRLQGGRRRSAKDGKSITRKPPYGYSRDENLKLFPHPEEAAIVRKIFEMIASGHGRQAVVKHLDSLGIKPPEGGLWEQSTISSIVKNEVYLGHIIWGKEKHLKRNGKRVRKKVPPEQWIRHENAHEAIVRQELFDDANAALRERWRAPTKAGVGLSNPLAGIIKCGICERALYLSRTADRPNPQLRCINPRCQPIQKGVLLPLAEQRILLALDLLAQKSSVSEKELTQSLDDDTDDVIEAKQKQIAQLQQTIEELHSMRETAFEMLEKKVYSEEIFLQRHKSISDKLKEVELAISRLQGEIEEDLRKKKYQKTIVPKVRALLENYNSLPTAEQKNHLLKTIIEKALFIRKKEWTKKDHFEIEIIPRFPV

SEQ ID NO: 10258 - protein, 520 aa, Unknown; identical to SEQ ID NO: 10251
  Description of Unknown: Integrase B10259 sequence
  cd00338,PF13408,IPR011109,IPR038109,PF07508, Coil,PS51736,G3DSA:3.40.50.1390,IPR036162,PTHR30461, IPR006119,PTHR30461:SF3,PS51737,IPR025827,PF00239, SM00857,G3DSA:1.10.10.2600,SSF53041

SEQ ID NO: 10259 - protein, 520 aa, Unknown; identical to SEQ ID NO: 10195
  Description of Unknown: Integrase B10260 sequence
  cd00338,PF13408,IPR011109,IPR038109,PF07508, Coil,PS51736,G3DSA:3.40.50.1390,IPR036162,PTHR30461, IPR006119,PTHR30461:SF3,IPR025827,PS51737,PF00239, SM00857,G3DSA:1.10.10.2600,SSF53041

SEQ ID NO: 10260 - protein, 520 aa, Unknown; identical to SEQ ID NO: 10196
  Description of Unknown: Integrase B10261 sequence
  cd00338,PF13408,IPR011109,IPR038109,PF07508, Coil,PS51736,G3DSA:3.40.50.1390,IPR006119,PTHR30461, IPR036162,PTHR30461:SF3,IPR025827,PS51737,PF00239, SM00857,G3DSA:1.10.10.2600,SSF53041

SEQ ID NO: 10261 - protein, 520 aa, Unknown
  Description of Unknown: Integrase B10262 sequence
  cd00338,IPR011109,PF07508,Coil,IPR036162, IPR006119,G3DSA:3.40.50.1390,PTHR30461,PS51737,PF00239, SM00857,SSF53041
VTALHEARLGAAGMSGVRMPPRRLRVVIYARVSQDSHQGRSVGQQLKIGRERAEEFGWEIVGEFSDNDTSVSEYAGAGMDREDWPKVEAMIRAGGVDIVWLWELSRSTRDRLVWAHLVKACQANNVVIGLNKKLWDVNDPDDMAYLDNLMIRSIHESGTTRKRVLRDIDAHAEEGKPHGYAHYAYTREYDPDTGELVQQVIHPQRAALIVEIADRLLEDKHTPTSIAADLNRRRIRTPRGQLLGETRELKNGRQVRSKGWTHKTVRQLMSSPTLKGKRGYHGRVIEQGGWPAVLAPPRWQAVQEALTPKENNNGRLPREESAMEMLSGIVVCDECGAVVYAVPIKRENVRLYRCAGLGQGAPVHGSRRVKILDEAFESFLFARLEHPDVRTALVPRENRDVLTAAEKQVGELEQELAELYEAVEQGRVSWQMGERAEKPLLKRLEAARVAARPVMVDPLLVELTAGPAVRVWRGWTMAQRRAAVRLLVKEVRMLAVGPVGRRKLPPEQHVKVEWVGVFAE

SEQ ID NO: 10262 - protein, 520 aa, Unknown
  Description of Unknown: Integrase B10263 sequence
  cd00338,PF13408,IPR011109,IPR038109, PF07508,Coil,PS51736,IPR036162, IPR006119,G3DSA:3.40.50.1390,PTHR30461,PTHR30461:SF3, IPR025827,PS51737,PF00239,SM00857,G3DSA:1.10.10.2600,SSF53041
LKKVTKIDENKADITERSKLRVVAYCRVSTDSDEQLVSLDAQIKHYESYINANPEWGFAGLYYDEGVTGTKKEKRSELLRMIADCENKKIDFIVTKSISRFARNTTDCLELVRKLLDLGIFIYFEKENINTGSMESELMLSILSGLAESESVSIAENNKWSIQRRFQNGTYKISYPPYGYDNVDGEMVVNKQQAEIVRYIFASILSGKSTHKIADELNNRKVPTKKGGRWTATTIRGMVGNEKYTGDAIFQKTYTDVHFNRHNNRGEKDQYLIKNHHEAIISHEDFEVAQDIIEQRGKEKGLERQHKKYQNRYPFSGSIICGQCGGTFKRRIHSSGRHRIAWCCSIHIADIEKCSMKYVPESEIEYAFITMMNKLVFGHEFVLKPLLISLRGMSSDDTLESIQAIDKKLEENVEQRNVLVGLMTKKYLEPAVYNKSNNELLQEAERLRRQKESITRFLNNDFQNLSEVSALLQYAAKASMLKGFDGELFARFVERVLVYSRTEIGFELKCGITLKERLVR

SEQ ID NO: 10263 - protein, 520 aa, Unknown
  Description of Unknown: Integrase B10264 sequence
  cd00338,IPR011109,IPR038109,PF07508,Coil, PS51736,G3DSA:3.40.50.1390,IPR006119,IPR036162,PTHR30461, PTHR30461:SF3,PS51737,PF00239,SM00857,G3DSA:1.10.10.2600, SSF53041
MSYCIYLRKSRADSEAEMRGEGETLARHEKALTDFASGAGLTVTKIFREIVSGETIAARPQMQLLLSEVSEGLWDGVIVMDIDRLARGNSIDQGIISQTFLYADTKIITPTKTYDPKNEFDEEYFEFGLFMSRREYKTINRRLQRGRVASVKEGKYVSNKAPYGYERVKIQNDKGFTLRPVPEQAEIVKCIFRWYTDGIILPDGSKKQLGVSLIARELNARKLKAPTGSVWTSQTIRDMLINPVYAGKIRWNWRPTKKKMTNGKIQIERPRSTDFIIYEGLHEAIIPDGTFELATKRMKKNKSRPVRGDKKANNPLAGLVICEKCGRKMQRRPNIKCPDLLICPEPTCNNHASYIHLIETHIIDIISKWSEGQILQGKGSYVIFSEPVDLSGELDTLKKSEATVYSQLNKAYEAFETGIYDATTFRSRSNVLKEKLQQLKQKTDELQNSINQAEESNRIISDFIPKVKKVVEVYNELTDPKTKNDMLSEIIDRILYSKEVRGHGHEEDFSITVYPKLPKV

SEQ ID NO: 10264 - protein, 412 aa, Unknown
  Description of Unknown: Integrase B10265 sequence
  cd00338,PF13408,IPR011109,IPR038109,PF07508, PS51736,G3DSA:3.40.50.1390,IPR036162,PTHR30461,IPR006119, PTHR30461:SF3,IPR025827,PS51737,PF00239,SM00857, G3DSA:1.10.10.2600,SSF53041
MAVSKNVTVIPARKHTRKSKDEEKPKLRVAAYCRVSTDSEEQATSYDTQIEHYTAYIQGHPDWMLAGIFADDGISGTNTKKREEFNRMIDECMAGNIDMIITKSISRFARNTLDCLKYIRQLKDKNIPVFFEKENINTMDSKGEVMLTIMASLAQQESQSLSQNVKLGLQYRYQQGEIQVNCARFLGYTKDENKRLVVVPEEAEIVKRIYREYLEGASMLKIARGLGADGILNGAGNERWHTSNINNILRNEKYIGDALLQKTYTVDFLTKKRVKNNGIVPQYYVENSHEAIIPREVFMQVQEELIRRRIVHTSPNGKTRTFSSNHVFAQIIICGKCGEVFRRVHWNNRGKKSIVWRCVSRLENTGLFCDARTVLESTIEQVLVTAINQTLCDKDSFLTTLRDNIATVINRE

SEQ ID NO: 10265 - protein, 520 aa, Unknown
  Description of Unknown: Integrase B10266 sequence
  cd00338,PF13408,IPR011109,IPR038109,PF07508, Coil,PS51736,G3DSA:3.40.50.1390,IPR036162,IPR006119, PTHR30461,PTHR30461:SF3,PS51737,IPR025827,PF00239, SM00857,G3DSA:1.10.10.2600,SSF53041
MKAASYARFSTDMQREESIEAQLMENRKYAEKHGIIIVKEYIDEAASGQTDNREAFQQMMEDAKKKLFDVIIVHKVDRFARNRYDAAIYKSMLMKYGIKVVYSAQPIDDTPEGSLLEGILEAFAEYYSKNLATEVLKGQKQNAFKAQFNGGFAPLGYDIVNKQYVVNEKEAQIVKEIFDLYLQGYGYKKVAEILNSKGYRNKFGKTFVANSIQPILTNEKYAGIYVFNKTQRKYHGGKRNMKRKKPEHEIIRIENAIPAIVSKETFEAVQREMKRRAPERGKPQTIREYLLSGLVYCSCGNKMSGYSQKRSKDSENYYFYYRCTKCQNSIRAEDVERKVLNVIQTEIFNDIDGLMAKIVDYVSQKEAGIPEELKYLQNELKNTETQINNIVNMITNGIASIQLGKKLQELELYAEGIKNRISEIDVKEKLPTDAIKKWLLELKEKFEKNEDLKQILPIFIDKVIVNKDNILVQTGIKKNLSNANSSSVVPSAPEKSRNVAVSTLLTAFCFLYHFANILQT

SEQ ID NO: 10266 - protein, 520 aa, Unknown; identical to SEQ ID NO: 10194
  Description of Unknown: Integrase B10267 sequence
  cd00338,PF13408,IPR011109,IPR038109,PF07508, PS51736,G3DSA:3.40.50.1390,PTHR30461,IPR036162,IPR006119, PTHR30461:SF3,PS51737,IPR025827,PF00239,SM00857, G3DSA:1.10.10.2600,SSF53041

SEQ ID NO: 10267 - protein, 520 aa, Unknown
  Description of Unknown: Integrase B10268 sequence
  cd00338,PF13408,IPR011109,IPR038109,PF07508, Coil,PS51736,G3DSA:3.40.50.1390,IPR006119,PTHR30461, IPR036162,PTHR30461:SF3,IPR025827,PS51737,PF00239, SM00857,G3DSA:1.10.10.2600,SSF53041
MKKKQSPSCRPKTAVAYARYSSAGQRDVSIEQQLQDIRAYAAREGYTIVHEYADHAKSGFKNTSARVEFSSMLAAAETGTFDTVIAWKVDRFGRNRRDSAIYKGQLRDHGVNVVYAMEPIPTGAAGVLTEGMLESIAEWYSRNLAENVTRGLRDNAAKGLSNGASIYGYQRGADGRYILNPDQAPLVRKVFEKYLAGYSAAVIAKEMNGAGLKGVRGGQISASVINRMISNERYTGVYIWNEYRIPDAMPAIISREDWERAQRMKEKTGRHIENSPADFLLTGKIFCGLCGRPMVGDSGTSKTGSKYYYYSCTGHKARGGYKRVCEKKSVRKDDIEKAVLDFIYDRCLTGPEQEKIADAILEAQKAYDQSSPRAAMQEELKATEKKINNINDAIAEGIWNSSTSIRLKALEDSAEKLRATLAEMEFSRSQLLDRDRILFFLQKMAKYNRDNPDRQYQLIQTFVNAVFVFDDGRLKIAINAVEGQATVQLSDVIESSDNDPIGVLSGSHPNPRVLIYTIAV

SEQ ID NO: 10268 - protein, 520 aa, Unknown
  Description of Unknown: Integrase B10269 sequence
  IPR038109,IPR036280,IPR006119,PS51737,PF00239,G3DSA:3.40.50.1390 ,PTHR30461,IPR025827,SM00857,G3DSA:1.10.10.2600, SSF53041,IPR011109,PF07508,PS51736,SSF48695, cd00338,PF13408,Coil,IPR036162,PTHR30461:SF3
MTKDLIPAVAYCRVSTLSDDQENSFENQKSFFHRECERLGYYLVEDVGTNGIFADRGISAKSMIKRPEFLKMVDSSKTRLFQMILCSNISRFSRNVSDLTDTIRQLKKNNVYVHFIKENLQTNDSNDDFVIGILSQIAQQDIVEMSKKIQFGMREAQQKGIYTSMPPYGYNKIDGYLQINEDEKEVVELMFYLYTNKGFSIDKIVRELNAICIPSKKNKKWQHTTIRHIIVNPIYIGLQINHKSEVKDIFINLVEKINEHEQIKNYFDHLQIIDKEVFIKAQEIKKERSKMADNNKKYSSTNILSNIYTCGNCHASMKRMQRSDKKGVFFYVCGNCHKDRAICPHYNYVTEIEIFKYIADEVEKIDKDEVRRLYQYYIDTNLGLEFRNSLPEIEFKIDKLENRKKNFQVMKADGDISKNDFRDRMNEVENELKDLHRNKDRILNIEREINKIWDTCRKLIDILENFDINNINNDILRILIKELTTATINGKKVNNIKLNTKMDKDFSIIVKEYALQNADL

SEQ ID NO: 10269 - protein, 520 aa, Unknown
  Description of Unknown: Integrase B10270 sequence
  cd00338,IPR011109,IPR038109,PF07508,Coil, PS51736,G3DSA:3.40.50.1390,PTHR30461,IPR006119,IPR036162, mobidb-lite,PS51737,PF00239,SM00857,G3DSA:1.10.10.2600, SSF53041
MADAVIYARYSSERQRDESIEDQIRVCTAEIEAQGDRLVGVYADRALTGTTSQQRAEFLRMVSDASRGGFSKVYVYKLDRFARNRFDSAIYRRELQRHGVALVPVAEHIPDGPEGIILESLMEGMAEYYSANLSQNVRRGLEGNALKCMHNGVKVLGYRNMPDGRYEVDEEKAALVRGIFGMYAQGMSLGRIAEELDAAGERTIFGKRYTPAFISRILHNDKYIGIYRFREVEVEGGMPRIIDDALWDAVQARLGAIHMRSPGRGRCPDPYILTGKLFDRKGRPYRGESGRSRSGRKYCYYQCAETGDAVRKDLIEGVVAEAVSDLLSSGSELSEELADSILACQDKMDERDVQDMERIRKRIESVEKGIGRLVDLVAEGVDPARTAGKISDFEEERAALQAELRELERRCPRLTREMVEFFLIKLLEGDAPLPVVDGFVSMVVIDGGNDPDDDPGGGGPGGGGGGRGVTVYFTVPAGGGRPRIGSSNPSHFERIRTPYELGRWRVVAVKDGFGLSSCFG

SEQ ID NO: 10270 - protein, 520 aa, Unknown
  Description of Unknown: Integrase B10271 sequence
  cd00338,PF13408,IPR011109,IPR038109,PF07508, Coil,PS51736,G3DSA:3.40.50.1390,IPR006119,IPR036162, PTHR30461,PTHR30461:SF3,PS51737,IPR025827,PF00239, SM00857,G3DSA:1.10.10.2600,SSF53041
MKKKQSPSCRPKTAVAYARYSSAGQRDVSIEQQLQDIRAYAAREGYTIVHEYADHAKSGFKNTSARVEFSAMLAAAETGTFDTVIAWKVDRFGRNRRDSAIYKGQLRDHGVNVVYAMEPIPTGAAGVLTEGMLESIAEWYSRNLAENVTRGLRDNAAKGLSNGASIYGYKRGPDGRYILNPDQAPLVRKVFEKYLAGYSAAVIAKEMNGAGLKGVRGGQISASVINRMISNERYTGVYIWNEYRIPDAMPAIISREDWERAQRMKEKTGRHIENSPADFLLTGKIFCGLCGRPMVGDSGTSKTGSKYYYYSCTGHKARGGYKRVCEKKSVRKDDIEKAVLDFIYDRCLTGPEQEKIADAILEAQKAYDQSSPRAAMQEELKATEKKINNINDAIAEGIWNSSTSIRLKALEDSAEKLRSSLAEMEFSRSQLLDRDRILFFLQKMAKYNRDNPDRQYQLIQTFVNAVFVFDDGRLKIAINAVEGQATVQLGDVIESSDNDPIGVLSGSHPNPRVLIYTIAV

SEQ ID NO: 10271 - protein, 520 aa, Unknown
  Description of Unknown: Integrase B10272 sequence
  PF13408,IPR011109,PF07508,Coil,PS51736, G3DSA:3.40.50.1390,IPR006119,PTHR30461,IPR036162,mobidb-lite, PTHR30461:SF3,IPR025827,PS51737,PF00239,SM00857, cd03768,SSF53041
MRFYTYGRKSVYKDNSDSIDNQFRMCREYCELKFPNEIDSWDCFSDEDFTGANTDRPGFQHMMSLIREDLCDVLVVYQLDRFSRDVRDFSAAYSELQAHHVRFICLDLNIDTSTPIGEAMMYVSAAFGQMERKNIALRVADNMIGLARKGYWVGGNPPMGYTKRRVDVEGRRHVSLAVDPEGADRVMSLFDYFLSSGLSLQGLETDFRKRGVKAERGGFFSSTQLHQLLTSPYCCEATQDVYDFFAAKGCKMESPRELWDGSVGVMVYGRSTQKNDVHQKTKPEDWIVCLGLHKPFMPAEKWLAVQGRLNRNKNFHAKKYPTALLRGVLRCSCGALMAVSSKKRLHDVGHWYYCERRMRMGAEVCPRIQIKCELLDNKVIEVLKSIEADPKQIEKFVAASSKRPAADPKKIQTKINAIEGKIGRLASSLSLADNSPAARYIIAEMEKLDAEKRTLQAAKQAADSERRGDMRRERENAQKVKEIAQLLKEIDGFTADERNEIIRSVVKECTWDGETLSLLL

SEQ ID NO: 10272 - protein, 519 aa, Unknown
  Description of Unknown: Integrase B10273 sequence
  cd00338,PF13408,IPR011109,IPR038109,PF07508, Coil,PS51736,IPR036162,PTHR30461,IPR006119, G3DSA:3.40.50.1390,PTHR30461:SF3,PS51737,IPR025827,PF00239, SM00857,G3DSA:1.10.10.2600,SSF53041
MNAVIYARFSSHSQREQSIEGQLRDCYEYARRYDINIVGEYIDRAISGTTDDRPDFQRMIADAPKKQFERIIVWKLDRFARNRYDSALYKHKLKQYGIRVISAMENVGDGDESILLEALLEASAEYYSLDLKKKIKRGQRESIAKGRWCGGPVPYGYKPVDGKLIADEKTAPIIRYVFEQYAAGVPMKEIIDELKRRGVRSSRGGELTYTTFSRALTNPVYIGNFMYKGELVPGVAETLIDEDTFNKVQILVKANAHAPAANKAKVEYLLQGKAFCGHCGSHMVGESGKSRNGDMYYYYSCSARKKKHSCSKKNEKKDFIEWYVVEQTLQYVLTPARMRDIAKAVVAEYDKEFSGSKVEEYEKAVKQYERELDKLVDALVDAPKVAHKRIYEKMEALEQQKTSMENELVKLRIASEIRFTEEEVRAWLRRFCTGDLFDPEFRRNIIDTFINCVYLYDDRIIIFYNIKGGKQVSYVDLAESLESNSEGSGSDLNANAPRKDLQRCKSFFVFTAFFCRIRV

SEQ ID NO: 10273 - protein, 519 aa, Unknown
  Description of Unknown: Integrase B10274 sequence
  cd00338,PF13408,IPR011109,IPR038109,PF07508, Coil,PS51736,IPR036162,IPR006119,G3DSA:3.40.50.1390, PTHR30461,PS51737,IPR025827,PF00239,SM00857, G3DSA:1.10.10.2600,SSF53041
VAAKPSDRYAIYLRKSRADVEAEARGEGETLARHRRALTELAVRRGYNVTMVYEEIVSGDTIASRPQMQALLQAVESGLYTGVIVNDADRLARGDSIDQGIVKQAFYATGTLIITPYKTYDPANESDEDFFDFSLFMARFEYRKIKQRMQTGRARSAAEGNWIGTRIPYGYIRVSRTDRRGYTLAPNPDTAPIVQMIFRWYAYGDDNSGAQMSSNAIANRLHSMGVKTTFGLDFDAGGIRNILKSPVYIGQTSWAKRVKRVHSSNGVRTETREVNPAPIIVENAHPPIIDAQTWDRVQQLFKSHKPLPKNKDAPCVNPLAGLIYCSECGRSMLRKPGVSGRPDHVWCQTRGCPTTGIYIPTLESIILDVLRSWCSMYSEPDAPKSDVTDSRATAAETLRRRVESLEKQLEKMYDLVEQGIYTPAEFIQRSGEVKRRIADAQDQLAALESTPTREEIIRMQLPQIQYVLEAYTMTDDAMSKNQMLKSVILRVIYHKTKKCTRADNPAEHMTLDVYPAYPS

SEQ ID NO: 10274 - protein, 519 aa, Unknown
  Description of Unknown: Integrase B10275 sequence
  cd00338,PF13408,IPR011109,IPR038109,PF07508, Coil,PS51736,IPR036162,G3DSA:3.40.50.1390,PTHR30461, IPR006119,PTHR30461:SF3,PS51737,IPR025827,PF00239, SM00857,G3DSA:1.10.10.2600,SSF53041
MARKKNIAAGQDAVIYARYSSHNQREVSIEQQVSECMKHAAELGLHVVGTYEDRAISGKTDKRPNFQRMMRDAEKGRFQAVVAWKSNRIGRNMLQAMVNEAKLDDYGVKVFYAEEDFDDTAAGRFALRNMMNVNQFYSENMAEDITRGLYDNASKCMANGRQPLGYKRGEDGRVVLDEANAAVVREIFTRVAAGDLFVDIARDLNAQGIKTSKGANWNKGSFQSICQNERYRGIYIYGDVRVVDGIPRIVSDDLWYRVQEAMRMKKNPVGTRHRVGAEDYLLTGKLRCGHCGSYMTGVSGTSRNGELHYYYTCQKRRTEHACDKKNIRRDVIEPAVAQAIKMYCLTDDVIAWIADRTVEYWEKHDNDLQIEALEQQLEENKKATSNMLKAIEMGIITEATRTRMVELETEQSRLSVQLNVAKEDVVKIDREQIISYLELLQQGDIHDRDFQMELFKNFLVAVYVYDDNRMKLVFSCMGDQNSVEIPLETGEDPPDGGLSPDAKMFVLTPDSSTRTKALH

SEQ ID NO: 10275 - protein, 519 aa, Unknown
  Description of Unknown: Integrase B10276 sequence
  PF13408,IPR011109,PF07508,Coil,PS51736, G3DSA:3.40.50.1390,IPR036162,IPR006119,PTHR30461,PTHR30461:SF3, PS51737,IPR025827,PF00239,SM00857,cd03768, SSF53041
MQVAIYTRKSIYTDNSESIHAQISMCEEYCNNNFKNYTVVKFNDEGYTGANTKRPAFKQLLEQIELNTIDIVVCYRIDRISRSVLDFSKFFNLIEEKGIKFVSVTEKIDTTTPSGRAMMYMSSVFGQMERESIAERVKDTMLDMAKNGYWCGGRAPLGYKIANVTIDNKTHKALEFDPKTLFFYKRLVKLFVEENLSLNGVLTRLKHDGILRTPLGGRISTTVIWQILSNPVYAQADEVTYNYFKSKGCNMIADKNKFDGSKALIRYGRTVGSRGKKHQVKKIEDWNISVGLHNYVITSDVYMQIMSKFGVNKINKERKHEIGIVHGILRCKCGSVMRAKVKYDKKYSVSYKHYICRKRYAYGKEACDMPYQNLELIDKAIIDILKSISLDKKLIDAYEEKPATNIASESELKREIVATKTKIENLTKNLALSSTASKYLIEEIERLDTQLNSLNLELSKVEQNKALVNINAKAKEKKYEQICELLENLEELEYKDLQDMLRKLLKECWFDGENLHIKI

SEQ ID NO: 10276 - protein, 519 aa, Unknown
  Description of Unknown: Integrase B10277 sequence
  cd00338,PF13408,IPR011109,IPR038109,PF07508, Coil,PS51736,G3DSA:3.40.50.1390,IPR036162,PTHR30461, IPR006119,PTHR30461:SF3,IPR025827,PS51737,PF00239, SM00857,G3DSA:1.10.10.2600,SSF53041
MSAVQPNKYAIYLRKSRADLDAESRGEGETLARHRIALTQLAERRGLNVVHTYEEIVSGESIQSRPQMRMLLAAIEAGEYAGVIVNDVDRLTRGDSIDQGTVKQAFYSTGTLIITPVKTFDPADEADEDFFDISLFFTRYEYRKINKRMQTGRARSAAEGNTLGARVTYGFNKVKRTDRKGYTLVPDPEKAEIVRMIFRWYADGENGVPMGADLIARRLNDMGLRTSLNVLFTGGGIRNMLKNPAYIGVASWNKRVKRVRVIDGARTVVRENNPEPIIVEGAHEAIVDRALWDRVQKMFSTHAKLPKNTDAPVSNVLAGLIKCSICGKSMQRKPGVSGRPDAIHCNTYGCPTTGIYIPLLEDALLDALRGWLVQYSNPESKPARESGVSSAAAALKKQLDALDGQMSRLHDLLEQGIYTPSVFIQRRDELSCRIANVKAELSRLNTTPTPEEIIVMQLPQIRHVLESYPRTTDLAERNQLLRSVISHVSYSKTRTCYRNDNPTDYMSIDIYPAIPSENR

SEQ ID NO: 10277 - protein, 519 aa, Unknown
  Description of Unknown: Integrase B10278 sequence
  PF13408,IPR011109,PF07508,Coil,PS51736, G3DSA:3.40.50.1390,PTHR30461,IPR006119,IPR036162,PTHR30461:SF3, PS51737,IPR025827,PF00239,SM00857,cd03768, SSF53041
MQVAIYTRKSIYTDNSESIHAQISMCEEYCKNNFKNYTVVKFNDEGYTGANTKRPAFKQLLEQIELNTIDIVVCYRIDRISRSVLDFSKFFNLIEEKGIKFVSVTEKIDTTTPSGRAMMYMSSVFGQMERESIAERVRDTMLDMAKNGYWCGGRAPLGYKITNVAIDNKTHKTLEFAPKTLFFYKRLVKLFVNENLSLNGVLTHLKHDGILRTPLGGRISTTVIWQILSNPVYAQADDVTYAYFKSKGCNMIADKNKFDGTKALIRYGRTVGSRGKKHQVKKIEDWNISVGLHDYVITSDVYMQIMSKFGVNKINKERKHEIGIVHGILKCKCGSVMRAKIKYDKKYSVSYKHYICRKRYAYGKEACDMPYQNLELIDKAIIDILKSISLDKELIDAYEEKPTTNVASESELKKEIVATKTKIENLTKNLALSSTASKYLIEEIERLDTQLNSLNLELSKVEQNKALVNINAKAKEEKYNQICELLENLEELEYKDLQDMLRKLLKECWFDGENLHIKI

SEQ ID NO: 10278 - protein, 519 aa, Unknown
  Description of Unknown: Integrase B10279 sequence
  cd00338,PF13408,IPR011109,IPR038109,PF07508, Coil,PS51736,IPR036162,IPR006119,G3DSA:3.40.50.1390, PTHR30461,PTHR30461:SF3,PS51737,IPR025827,PF00239, SM00857,G3DSA:1.10.10.2600,SSF53041
MYEDIKTACLYVRFSSHNQTEQSIEGQTRVCRDFCKRHNIRIVEIYADRATSASKDIEKRVQFLKMIKDSERGLFDAVIVYKLDRFARSRYDSATYKYRLKRNGVQLISATENISNDPEGIILESVLEGMAEFYSAELSQKINRGMRESAYKHNSIGGAVPLGYKIEDKKLVIDPKTAPIVKEAFEKYADGETVAEICRQFNARGYKTSKGTAFGKSSFTKIFRNERYIGVYTFHDYRAEDAIPAIIDKDLWDRVQLRVGKIKNAPARNKAKVVYLLSGKIFCGHCGSKMNGNCNAGNYCYYQCYGKKNGNVDCKKKNIRKEFIERLVAQDALSLLTDEYIEQIATIACEKNQHEIELDSALPTIRDRIHQVDLSLNHLLKAIESGSAPDMLVKRMGELEKEKKDLQAQAKKESEDIVELDKAQVIYWLEQFRGGSIEDEEFCRMLIDLFINSVTVWDEDDNTYKVTVAYNLTSLPTKTYRLNKGGTLSDFASNAPASLADAAVCRGSFHAVLGGEAGE

SEQ ID NO: 10279 - protein, 519 aa, Unknown
  Description of Unknown: Integrase B10280 sequence
  cd00338,PF13408,IPR011109,IPR038109,PF07508, Coil,PS51736,G3DSA:3.40.50.1390,IPR006119,IPR036162, PTHR30461,PTHR30461:SF3,IPR025827,PS51737,PF00239, SM00857,G3DSA:1.10.10.2600,SSF53041
LKKITRIEQASKGKTEPKKLRVAAYCRVSTDSDEQLESLETQKAHYESYITSRDDWQFAGIYYDEGISGTGKSRRPELERLMQDCKAGKIDMVITKSISRFSRNTTDCLELVRKLLAQNIPIWFEKENINTGSMESELFLSILSSMAADESLSISLNSKWSIKKRFENGTFKISYPPYGYDWDGETMVINPEQAQIVRRIFSETLAGKGTAAIATELNREQIPTKRGGNWSPSVVRGMIANEKYCGDCLYQKTWSDSAYKRHLNHGEQTQYLQQNHHEPIVSREDWEAAQKLISQRADEKNISKGDEKYQNRYAFSGRIICGECGATFKRRINYTTDGSYAAWSCKTHLANKSKCSMLFIRDNDLKLAFGAMMNKLIFAHRLILKPYAESLKRSSTSQTLSRIQHLETGLAENADKRKTLTKLMAQGFIDQVIYSQQTAELLSQADDIRKQIDALKNTTSNEATVLVQAEDLLRFTEKSPMLEAFDDQLFTRFVERIVIRSRHEAVFHLKCGLTLTERM

SEQ ID NO: 10280 - protein, 519 aa, Unknown
  Description of Unknown: Integrase B10281 sequence
  cd00338,PF13408,IPR011109,IPR038109,PF07508, Coil,PS51736,IPR036162,PTHR30461,IPR006119, G3DSA:3.40.50.1390,PTHR30461:SF3,PS51737,IPR025827,PF00239, SM00857,G3DSA:1.10.10.2600,SSF53041
MADTPKLNAAFYGRYSAGPNQTESSIEGQRRECYARAKSQNAVIRKDYIDRHISGQTDQRPQFQQLMKDVKKGLYNVVYVYTIDRFSRNKYDIAKYKNEMRKAGCRLISAKEYVPAGPEGIILESVLEGMAEYYSKELSRKVSRGMYESALKHRHIGGVVPFGFVLNKNKKYKADPVKAPIVREIYERYVKGEPAVEICKSLNNRGIATSLDKKFNKSSLNRILSNPKYIGTYTYKRAYIDEITQEKKTELIEFKNVIEPIISEELFIKAGQRMELNKRTSKRNKNKPQVEFLLTGKLFCSKCHAPYTGDSGTSKNGNSYYYYTCANKKSKRGKEACRSKSFPKDKLEEFVAQYTRDDILSTEVINWLAEQIVSLQGEQKDDLQIRTLIQQKKEVESKIQNIMLAIENGIFTPTTKDRLEALEESKRNLEYNIDVERFKNDAPMETKDSIIFYLNQFKNGDIKDLDHQRQIINSFIETIILDEEQMIIQYRYSDAANGTREIAIKNTFDVFECVLNGGG

SEQ ID NO: 10281 - protein, 519 aa, Unknown
  Description of Unknown: Integrase B10282 sequence
  cd00338,PF13408,IPR011109,IPR038109,PF07508, Coil,PS51736,G3DSA:3.40.50.1390,IPR006119,PTHR30461, IPR036162,PTHR30461:SF3,PS51737,IPR025827,PF00239, SM00857,G3DSA:1.10.10.2600,SSF53041
MTPAVIYARYSSSNQREESIEGQLRECHRYAEAHGFRIVKEYTDAAISGRSDARPAFQRMIREAESGAFSALIVWKLDRFARNRHDAAVYRYQLKKSGVKIYSVMEAISDGPEGIILEGLMESLAEYYSANLSQNIKRGCYDAALKRQVFGKPPLGYVKGPDGRYAIDPETAPIVRRIFEEYVSGRSLHQIREGLNADGIRTARGNSFTENSFHRMLKNEKYIGVYEFQDVRDEHGVPPIIDRNLWDAAQAMLSRVTPRRRHHKAETVPETYLLTTKLYCGHCGSPMTGESGTSKTGQIFRYYSCNGTKSRYRNGCKKKRVPKDWIESEVVRVLMEEILTDEFIEDLADHFVTAQRDETISPELEALRLQLSEVSKKINNINAAIAAGVWSSSTRDMLIELEASRDALAQKVAELEVRPPELPRSLIVDYLYSVKNGDVSDLRDKLIDLFVRRIYLFDADEGRTRAIFELSMDGADGDPVSREVILKFEQSVHSSTSRHLNEHLAVPDRRSVLVAVLLN

SEQ ID NO: 10282 - protein, 519 aa, Unknown
  Description of Unknown: Integrase B10283 sequence
  cd00338,PF13408,IPR011109,IPR038109,PF07508, Coil,PS51736,IPR036162,PTHR30461,G3DSA:3.40.50.1390, IPR006119,PTHR30461:SF3,PS51737,IPR025827,PF00239, SM00857,G3DSA:1.10.10.2600,SSF53041
MLRAVAYCRYSSDNQREESIDAQIRAIKEYCLRNDYSLVRAYTDEAKTGTNDNRKGFLDMIDDSSNGTFDICIVHKLDRFTRSKYDSAIYKKLLKDNSVRVVSVLENLDDSPESIILESVLEGMAEYYSKNLAREVMKGMKETALQAKHNGGMAPTGYDVAPDKTYIINDGEAGIVRKIFKMYIAGNGYGIIAQDLNDNGQCTKLGRLFTKGSIRDILLNEKYTGTYIFNKRLSKKDNHKYKEDSEVIRIEDAIPMIISKEDFIIVKSKMDGKKVGPRMNQKRFYMLTGKIECGECGASYVGAGYVPGRNGKKYPIYSCTNKRSHTCSNKNIRQELLENYVIAQLKENIFNIESIEKITSGIYEKLKEINSSADKEKKSLNIQKKSVQTKIDMAFDMAFDGTISKPLLAKKTNELELQLNAIVQKQYQLENKDYSWLNEKKIKKFLLASMENLEDEDPEVKRKVIETFVHRVIIYADHIVVTYKVEPSESNKTMDSDMVGGGEPYLTISLSIERSELYK

SEQ ID NO: 10283 - protein, 519 aa, Unknown; identical to SEQ ID NO: 10226
  Description of Unknown: Integrase B10284 sequence
  cd00338,PF13408,IPR011109,IPR038109,PF07508, Coil,PS51736,IPR036162,IPR006119,PTHR30461, G3DSA:3.40.50.1390,PTHR30461:SF3,IPR025827,PS51737,PF00239, SM00857,G3DSA:1.10.10.2600,SSF53041

SEQ ID NO: 10284 - protein, 519 aa, Unknown; identical to SEQ ID NO: 9683
  Description of Unknown: Integrase B10285 sequence
  cd00338,PF13408,IPR011109,IPR038109,PF07508, Coil,PS51736,G3DSA:3.40.50.1390,IPR006119,PTHR30461, IPR036162,PTHR30461:SF3,IPR025827,PS51737,PF00239, SM00857,G3DSA:1.10.10.2600,SSF53041

SEQ ID NO: 10285 - protein, 519 aa, Unknown
  Description of Unknown: Integrase B10286 sequence
  cd00338,PF13408,IPR011109,IPR038109,PF07508, Coil,PS51736,G3DSA:3.40.50.1390,IPR006119,IPR036162, PTHR30461,PTHR30461:SF3,IPR025827,PS51737,PF00239, SM00857,G3DSA:1.10.10.2600,SSF53041
MTPAVIYARYSSHNQTEQSIEGQLHDAHAYAEKNEYRIIGEYIDRALTGTKDSRPDFQRMIRDAERRQFEVVIVWKLDRFARNRYDSAIYKARLKKYGVRVVSVMENITDSPEGIILEGLLESMAEYYSANLSENVKRGQKESVSKGWFLGSHVPYGYRVQDHRLIARENEAPVAREIFRRYAAGEQLTAIAADLNARGLRTRAGTSFRASSFDSMVRNSAYAGHLMYNGQEVVGCADALIDQDTFDRAAARRLANRRAPAAAKAKTRYLLQGKIYCGHCGAPMIGESGHGHGGVYNYYTCAARKKTHTCKKKNEKKDLLERYVCEQTLQYILQPDRADHIASAVVVRYNAEFGQDQTADLERRIRKLDADLERLVDDLLALPRSARPRIAARMEQLEAQKADLETDLAKLRVASGIRLTEPHVRAWLRTFQSGSLDDPSFCQRLIDTFVNSVYVYDDRIVIFYNLSGAPPVEQKRVYETLSGEMADGSDLSGYGLPTQVKSEPGLVFVHGLIGLVIGR

SEQ ID NO: 10286 - protein, 519 aa, Unknown
  Description of Unknown: Integrase B10287 sequence
  cd00338,PF13408,IPR011109,IPR038109,PF07508, Coil,PS51736,IPR036162,IPR006119,PTHR30461, G3DSA:3.40.50.1390,PTHR30461:SF3,IPR025827,PS51737,PF00239, SM00857,G3DSA:1.10.10.2600,SSF53041
VKKVTKIKAKQTPAAEKAKLRVAAYCRVSTDSDAQLESLEAQKQHYESYIACRDDWTFAGLYYDEGITGTKKDKRPELMRMIRDCEAGKIDYVITKSISRFSRNTTDCLEMVRKLLALNIPIYFEKENLNTGSMESELFLAILSSMAEGESVSISENSKWSIQKRFKNGTFKISYPPYGYDWDGEQMVVNPEQAENVRWIFDQVLAGRGTQDIAKDLNAKGICTKKGNRWTAHTVRTLIVNEKYTGDVIFQKTYTDSQFNRHVNYGERDQYALTDHHEAIVSREVFAAAGDVIRQHSKEKGIVKGCGKYLNRYCFSGKIICGECGDVFKRRTHYCSEYKYIVWTCSTHLDDKSKCSMKFIHDDALKVAFVTMINKLIFARKLILKPYVQALRKGNNDDSLHRIQELQTLLMENSQQKERLTGFMAQGYIDQILYNEEMNTLLAQADRYNAEIEMLSNSVKGDASHIQAATSLLRFTEKSSMLDFFDEELFEEKVSCIRVLSREKIAFELKCGLTLTERM

SEQ ID NO: 10287 - protein, 519 aa, Unknown; identical to SEQ ID NO: 10222
  Description of Unknown: Integrase B10288 sequence
  cd00338,PF13408,IPR011109,IPR038109,PF07508, Coil,PS51736,G3DSA:3.40.50.1390,IPR006119,IPR036162, PTHR30461,PTHR30461:SF3,PS51737,IPR025827,PF00239, SM00857,G3DSA:1.10.10.2600,SSF53041

SEQ ID NO: 10288 - protein, 519 aa, Unknown; identical to SEQ ID NO: 10193
  Description of Unknown: Integrase B10289 sequence
  cd00338,PF13408,IPR011109,IPR038109,PF07508, Coil,PS51736,IPR036162,PTHR30461,IPR006119, G3DSA:3.40.50.1390,PTHR30461:SF3,PS51737,IPR025827,PF00239, SM00857,G3DSA:1.10.10.2600,SSF53041

SEQ ID NO: 10289 - protein, 519 aa, Unknown
  Description of Unknown: Integrase B10290 sequence
  cd00338,PF13408,IPR011109,IPR038109,PF07508, Coil,PS51736,G3DSA:3.40.50.1390,PTHR30461,IPR006119, IPR036162,PTHR30461:SF3,PS51737,IPR025827,PF00239, SM00857,G3DSA:1.10.10.2600,SSF53041
VKKPVSPSCSPRTAVAYARYSSAGQRDVSIEQQLADIRLFALREGYTIVHEYADHARSGFKNSSARTAFQTMLSAAEKGNFDTVISWKVDRFGRNREESAIYKGKLRKFGVKVLYAMEPIPEGSAGVLLEGMLEATAEWYSRQLSENVTRGMTDNAHRCLYNGTKILGYFRGADGRYALQPEEAAVVRNIFDLYISGFSAARIARQLNSQGVKTARGFPFAPEGILRIISNERYTGVYIWGDIRVPDGMPAIIDLKTFEEAQCMKKKTARHVEQGAVDYLLTGKAFCGHCGAAVIGDSGTSKDGTRHYYYTCQARKARKGCRKKTLTKDYLESRVVDFVLDVVLSDEQIEKTASAILALQAEELKSSPLAAMEAEYSETLKKIANINNAIAAGIWNSSTSAMLKTLEDSAEQLRQSVEMLRYSQTQLLDHDRVIFFLHRFTKGDRNDPLLRRHIIDTFINAVYVFDDHLDIVTNNCEGNQRFPLESLPDPSDECSDCDSSGVPTVLHPNTQVTIFRVAI

SEQ ID NO: 10290 - protein, 518 aa, Unknown
  Description of Unknown: Integrase B10291 sequence
  cd00338,IPR011109,IPR038109,PF07508,PS51736, G3DSA:3.40.50.1390,IPR006119,IPR036162,PTHR30461,PTHR30461:SF3, PS51737,PF00239,SM00857,G3DSA:1.10.10.2600,SSF53041
MPPTDPSEGSTPLTPAAQYVRMSTEHQQYSTENQRDAIAEFAKARGYEIVKTYADDGKSGLRIEGRESLRQMLADVQSGAAPYRAILVYDVSRWGRFQDSDESAYYEYACRRAGIHVEYCMEQFANDGSPVSTIIKSVKRAMAGEYSRELSNKVFKGQCRLIQLGYRQGGPAGYGLRRMLIDVNGTPKGELKRGEQKSLQTDRVILVPGPADELQVVQSIYEQFVKHGKRERAIAESLNEAGIASGCDRPWTRSMVHQILTNEKYIGNNIYNRVSFKLKKKRVVNPPDMWVRVDGAFDAIVDPESFYMARGIIQERNRHFTDAEMLDRLKTLLAVHPELSGALIDETDGMPSSSAYRQRFGSLVNAYRLAGYTPERDFEYLEINRHLRRAHPQLLGDMIQDLQTMGATVERDEASDVLVINGLYSASLYLARCRSTPAGSHRWRFRVPGERSSDIHIIVRMDAANEQPADYFLLPALDIEMPELRLSAFNGASIDTFRFESLEFFFGMAKVVQIEVAA

SEQ ID NO: 10291 - protein, 518 aa, Unknown
  Description of Unknown: Integrase B10292 sequence
  cd00338,IPR011109,PF07508,Coil, IPR036162,PTHR30461,IPR006119,G3DSA:3.40.50.1390, mobidb-lite,PS51737,PF00239,SM00857, SSF53041
VTRRTAVLNPVATARIAELVATLRERDTDPAYATAPRLDTYARISPSADPTAVKVERQTTDVLEMLLRGNYRLGETLIDWNLSAWKPRGKRPAFLSGLARVASGESNGIAAWNSDRLTRQLSEAEQLIAVATVNRAVFLSYSGEFDLSTSDGRMMLRLQTMFAQQESDRKSERLARKYAAQREGEGRSDGLGGYQSTDVFGHGGRDEATLTAERDAIAWAIPEVTNGATWQAVADEWNRRGLSSRGGQRFNVTKVSTILQQPRHAGYLTLGDHGSRTIVGEAHNAVAIVDKATWSRFTAVLASRAERSGGRPAGTTQTHLLGGLLRCAECGNTLLVSGPSYRCNGAIGCRRVTVNAAVLDAVVGEYVVETLSDPRNGHRIAARNSERGRIEVELERVRERKRRFTALYQAGSLDDDEYVRVTTDNATMVRELESRRDALTDDGQPARVHSRDEAEREWSKSEGNREERRELVLSAFPLGIAVRLPTVARVKSTAANTRDRLSRILPGWLESITAQRAA

SEQ ID NO: 10292 - protein, 518 aa, Unknown
  Description of Unknown: Integrase B10293 sequence
  cd00338,PF13408,IPR011109,IPR038109,PF07508, Coil,PS51736,G3DSA:3.40.50.1390,PTHR30461,IPR036162, IPR006119,PTHR30461:SF3,PS51737,IPR025827,PF00239, SM00857,G3DSA:1.10.10.2600,SSF53041
MKKAVIYARFSCGRQTEQSIEGQLRKCHSYAKEHDLVVVKEYIDRARTARNDNRPYFQKMLSDSEDSEWEYVIVYSIDRFSRDDGDYGADKRILRNNGVTLLSATETIGMNADGTENLGGILTEGLLVALAKYYSRELSQKIRRGQYESLQKGQTLGSSAVYGYFVKDKRYHINEDQAVVVREMFELYSKGKSAIDIAEIFAKRGLRNAQGRPFKPNGIMKMLKNPKYIGTYTFGDKVYEDYHPAIVEKNLFYLVQERIEKNKMNPARLKARDEFILTGKLYCGYCKHTMVGESGTSHTGQSYYYYKCSHRKNRKGCEKKNIKKDVLEDIVIEETLKHILNGSIIDDITTEILALQEEQRDLSELVLLKKQLSEISGYINNLLTAIKRGIITESTQAELQKLEEDKKLIEERIVQEEFKDSQKLTKEKIEFWFEQFLHFDKTDKGAREYLVNYFINRIFLYDDRIVIIYNHDGDNRTDLSNEEIEEALSSDLTHDRPPKAHNPNLYITKKFVALVIGL

SEQ ID NO: 10293 - protein, 518 aa, Unknown
  Description of Unknown: Integrase B10294 sequence
  cd00338,PF13408,IPR011109,Coil,IPR036162, IPR006119,G3DSA:3.40.50.1390,PTHR30461,IPR025827,PS51737, PF00239,SM00857,SSF53041
MAKPPRPSDDIDYGSEIQQLVAALRLRDADPAFADAPVIDVYARISKVTDAHDSEKVPRQLVECLRNLMGRTARLGEMFSDAGKSAWKIEGKRPEFDRLMTRIAKGRNNGVLCWHIDRLSRQPWDMEQMIRLVELRKATTNDRYVFASCHGDHLLSNLLELRIKMAFSAEESRRKSERIRNLNAHRRAAGIVKGGPSPFGHRYVDDTHISDAQLDAERMAIKWGIETISAGRSLGAVAREWERRALTTRAGKTFNALNVRAVLMHARHGGLLEHDGKILRSMSNVDAIVSEETYRLMRKVFEGRKRGRQPAEAVHYLSGWVHCDECGGPMVGSTSPGTYSDGTQRRQYRCTPRGCSNVSVDARAAEHYAALHVVKELSDPRNTVLIAARSSALAEMDRRISQLERIRSTLHDKAMANIDSYDFYAEKVEETEKMLAPLWQERRELALAGAMQSSTVQDVESVAQNWSDADPAQRRVMVEQAMPDGFWVAKVGRTRRLRGDDILVRFGRTRGEATSRLC

SEQ ID NO: 10294 - protein, 518 aa, Unknown
  Description of Unknown: Integrase B10295 sequence
  cd00338,PF13408,IPR011109,IPR038109, PF07508,Coil,PS51736,G3DSA:3.40.50.1390, IPR006119,IPR036162,PTHR30461,PTHR30461:SF3, PS51737,IPR025827,PF00239,SM00857,G3DSA:1.10.10.2600,SSF53041
MLKKPRISCQPRTAVAYARYSSAGQRDVSIEQQLKDIRAFADREGYTIVHEFADHARSGFKSASTRAEFQAMISAASSGSFDTVLCWKVDRFGRNREDSAIYKGQLSRLGVSVVYVMEPIPTGAAGVLTEGMLEAIAEWYSRNLSENVKRGMSDNASKCLYNGTTVFGYDGIRNQRYQINEEQAAVVRQIFHLYAEGYSMTSICRLLNDAGQRTESGRPFVYNKVHNILNQERYLGIYIFGDYRIPGGMPAIIDPDLWEAAQRMKQKTSRHYEESPVEYLLTGKAFCGHCGKPMVGDSGTGKSGSTFYYYSCQSKKRRAGCNKKSVRKEYLEDTVISFLLDHVLAGPEVEKIADAILEYQKKRADSSPLRSMESELRNTERKISNTNRAIAEGVFTSSTLEMLRSLEETASNLRISIEARKYAEGQLLDRSRIIFFLGQFSHLDRNDPHDRRFLINTFLNSVYVYDDHLRILVNATESSATIAFSDLPPDSGCSDSDCCRLLLQSHSNTIVILYDVRL

SEQ ID NO: 10295 - protein, 518 aa, Unknown
  Description of Unknown: Integrase B10296 sequence
  cd00338,PF13408,IPR011109,IPR038109,PF07508, Coil,PS51736,G3DSA:3.40.50.1390,IPR006119,PTHR30461, IPR036162,PTHR30461:SF3,IPR025827,PS51737,PF00239, SM00857,G3DSA:1.10.10.2600,SSF53041
MPKEKAVVYARYSSHNQTEQSIEGQLAAARKYASLHDYVIVQEYCDRAKTGTNDNREAFQKMLSDCSKKQFSVIIVWKVDRFGRNREEITFNKYKAKKNGVRVEYVAESISEGPEGVILESVLEGMAEYYSLQLSQNVKRGLLESAKKYQVIGGHTPLGYKTGPDKRYAIDPDTALVVKQIFEKYASGLTMAQLTRWLNDSGYRTPKGKKFTKNSLPRILSNEKYAGVYVYKDLIRQPGEIPAIVDQDLFDQVQNMLKRNKRMPSHSWDYSDYLLTDKLFCGKCGKQMVGKSGYGRHGGKYEYYCCKGRLENSGCDKSHVRKDWIEEKILKEVLFVLNDDVFMNFLIDTIWEYYLKQDTESKEIENMTRKLETVNTAIENLVRSVEDGMPYKLVKNRMVELEEERTAIQKYVAEAELKRGLRLTKEHIAFFLEQFRDLKYKDRKCQTKLIETFVNSIYLYDDELTIAFNYSGENNTITLTDIEKANTCFVRTCSQEQGITHSMRTSVYKTVFLIKVKI

SEQ ID NO: 10296 - protein, 518 aa, Unknown
  Description of Unknown: Integrase B10297 sequence
  cd00338,PF13408,IPR011109,IPR038109,PF07508, Coil,PS51736,G3DSA:3.40.50.1390,IPR006119,IPR036162, PTHR30461,PTHR30461:SF3,IPR025827,PS51737,PF00239, SM00857,G3DSA:1.10.10.2600,SSF53041
MKKPAAPQCSPTAAVAYARYSSAGQRDVSIEQQLKDIREYARRQGLTIVHEYADHAKSGFRHIEARTEFNRMMNAARAGKFAVVIVWKTDRFARSREDAAVFKGHLRRAGVRVLSAMEPIPEGSAGILLEGMLEATAEWYSKTLSENVIRGLADNARKCLWNGNRVYGYGHAADGTYVINEEEAAIVRQIFALYCAGWSAANIAKQLNGQGVTNARGHKWALSGVLNAVGNERYTGVYIYSGHRIEGGMPAIISREEWEEAQKMRKKTSKHYETGAVDYLLTGKAFCGHCGAAMVGDCGTSKTGARYYYYTCQAHKARKGCDKHSVPKQYLEDTVMNYIMDHVLTPEEMDRIADVLMEQQKKRLADSPLPALKAELKEVDDQIDALNDAIAQRIWSKTTVVKLKSLEEQADALREHIEELKYSQDQLLSKKRILFFLHRFAAGDREDPVHREFIIRSFVNAVYVFDDYIKLVVNEVEGNARIPLESLSSDDDQMAGQTVQYPNSATAVYRIELHKKRA

SEQ ID NO: 10297 - protein, 518 aa, Unknown
  Description of Unknown: Integrase B10298 sequence
  cd00338,IPR011109,IPR038109,PF07508,Coil, PS51736,G3DSA:3.40.50.1390,IPR006119,PTHR30461,IPR036162, PTHR30461:SF3,PS51737,PF00239,SM00857,G3DSA:1.10.10.2600, SSF53041
MGAYKNTGALWEYYLVYLRKSRQDDPRETVEEVLEKHETQLQEFALREFGGRIPEGNIYREVVSGESIDDRVEMQKVLARIEDPNVKGVLVIEPQRLSRGDLEDCGRLISDFRYTHTKVVTPMMTYDLENKMDRRFFQDELLRGRDYLEYTKEILRRGREAAVKRGCFIMQNAPYGYNKIKIGKDHTLEPNEDADVVRMIFDWYVNEGLSGYRMAQRLDEMGVPAPKGGKWHKEVISRMVRNPHYIGKVVCNSRPTVTVIENGERRTRRLKAAPEDTIIAEGKHPAIISRDLWDRAQEKVRNTPRLRNGEELSNVLAGLLRCSSCGYMMDRRPLPSGARYFCPARGHKQCFKSVKCDRVLDALRITLEEAELPALRSKVANDEGNARKMQERIIAKLQKQMSDYRDQEDHQYELLETKKYTQELFDRRNAQLRAKMEECEKQLYLARSAMPKSVDYAERVVALEAAIKALHDPDASTTEVNKVLKAIIERIEFTGEPGRGKYGPREGEGIKLEVFLRL

SEQ ID NO: 10298 - protein, 518 aa, Unknown
  Description of Unknown: Integrase B10299 sequence
  cd00338,PF13408,IPR011109,IPR038109,PF07508, Coil,PS51736,IPR036162,IPR006119,PTHR30461, G3DSA:3.40.50.1390,PTHR30461:SF3,PS51737,IPR025827,PF00239, SM00857,G3DSA:1.10.10.2600,SSF53041
MRVVLYMRYSSDRQTEQSIEGQQRVCKAFCESQGYDIVDMYIDRATSAFKDTDKRTEFQRMIKDSEKQLWDAVVVYKLDRFARNRYDSATYKARLKKNGVRVISATENISDNPEGVILEAVLEGMAEFYSKELSQKITRGMYESAHKCHSIGGHIPLGYKIVDKKLVIDEAGAAIVREAFELYANGATVAEICEIFNKKGYRTAKNAEFNKNSFRSMFKNERYIGVYTYKDMRIKGGVPAIVDRETFEIVRKRLVSNAQAPSRGKAKVDYLLSQKLFCGHCGSLMPGESGTSKTGIVHNYYTCGQRKRQHSCDKKPLRKEFIERAVVEDAISILTPETIEELAEMAVKAAEDEINNNSIIPSLRAELAEIQKSINNLIKMVEKGVESDTLADRLKDLEKQKRATEKRLVEAEDDYIILEKDHIVFWLSKFCDGDIEDEDFRRHIIDLLVNSVTVWDEPDGWYKITSVYNLTSNKTKTFRIPKEKSSDLTNLAPPLEDYPNTFFIGVVFGQTRKHRVEP

SEQ ID NO: 10299 - protein, 518 aa, Unknown
  Description of Unknown: Integrase B10300 sequence
  cd00338,PF13408,IPR011109,IPR038109,PF07508, Coil,PS51736,IPR036162,IPR006119,G3DSA:3.40.50.1390, PTHR30461,PTHR30461:SF3,PS51737,IPR025827,PF00239, SM00857,G3DSA:1.10.10.2600,SSF53041
MNAVIYARYSPGPRQTDQSIEGQVRDCMAYAEQNDIKVLKVYADRHISGTDFEKRAEFNKMLRDSEKGQFEAIIVWKIDRFGRDREEIALNKIKLKRHGIKLLYAKEVIPDGPEGIILESLMEGLAEYYVADLRQKVKRGQRESALKGLAVSGMAAYGYKISDEKKYIENEDESWVVKYVFEHYAAGKTATEILDELTKMGVKNRKGSPITKNGIYSMIRNEKYIGKCTYDGIDIPIPALISEELWDAVQSKIIRRPHSSAVYKAPERYLLSLKAFCGECGAMLVGESGYGKQGNKYLYYKCSTRKKKGHSHDCSLKTIRKEQLEDFVVQHTISDVLQDDVIYYIADKVIEINKKHTVNQLLSQLKSALRKAENGRNNLLKAIEDGIYTPSTKERLLELENECEELKVQIAKESIKKPEITKDHVVYWLEMFRKGNIKDEGFKQRLLDVFVHSVYVYNEKVVIAYNYTDNNHDNSIDVPGILEGSDTFVKVRDGVLYPNLSILNEYNIFVLIVNSPAA

SEQ ID NO: 10300 - protein, 518 aa, Unknown
  Description of Unknown: Integrase B10301 sequence
  cd00338,PF13408,IPR011109,IPR038109,PF07508, Coil,PS51736,IPR036162,G3DSA:3.40.50.1390,IPR006119, PTHR30461,PTHR30461:SF3,PS51737,IPR025827,PF00239, SM00857,G3DSA:1.10.10.2600,SSF53041
MRAAIYARFSSHNQTEQSIEGQMRDCLNYANTNGIRVVAEYIDRALSAKTDNRPQFQKMIKDSEKGLFDVILVWKLDRFCRNRYDSATYKARLRRNGVKVISVMESISDEPEGILVESLLEGMAEYYSAELAQKIRRGMRESALKCKVTGSLPLGYKSDADKNIILDEERAPIVRKIYELYADGWCAKDIIEYLNSRGLTTQKGQAFNKNSLPRILSNPRYKGIYIYGDRVVPDAIPRIVDDELWDKVQKMLNKNKKSGATHKARADYLLTTKLFCGHCKSMMIGESGTGKYGEVYHYYKCAAKKNHTLPCDKKNIKKDYIENLVVENIYYNILGNDELIERIADKAMEIQASEKSDGILEALKAELSEKKKALNNLLSAIESGVVTKSTKKRLEELEETVEDLEFEIEKEKAEKPKLERDVIIFLLDQLRDGDLSDVEYRKRLINTFVHKIYLYDDGRLLLVYNFTNREPKLCEEELLALVEGESSDTDASAPPIVTVSETVFFYGLALCQLLNLKK

SEQ ID NO: 10301 - protein, 518 aa, Unknown
  Description of Unknown: Integrase B10302 sequence
  cd00338,PF13408,IPR011109,IPR038109,PF07508, Coil,PS51736,G3DSA:3.40.50.1390,IPR036162,IPR006119, PTHR30461,PTHR30461:SF3,PS51737,IPR025827,PF00239, SM00857,G3DSA:1.10.10.2600,SSF53041
MTNAVIYARYSSHGQTEQSIEGQLHDAYAYAEKNGYNIIGEYIDRALTGTRDARPDFQRMIREAERRQFELVIVWKLDRFARNRYDSAIYKARLKKYGVRVVSVMENITDSPEGIILEGLLESMAEYYSANLSENVKRGQKESIMKGWFLGGHPPYGYRVEDHKLVINEREAPVAQEIFRRYAAGDPISQIAADLNARGYRTRSGTPFRASSFDSMVKNSAYMGRCQYGDQVIDCISVPLIDQETYETALQRRERNRRAPAAAKAKVRYLLQGKVFCGHCGSPMIGESGYGRRGAVYNYYTCSARKKSHSCRKKNERKDPLERFVCEQTLRYILDPERLDDIAQAVVAAYDQDFNGDKIADLERTAARLEAELNRLVDSLMEVPASARKRIGEKMEQLETQKADVETDLAKLRLANGIRLTYDQVNTWLSSFHAGDLDDESFRQKLIDTFVNSVYVYDDRFVIFYNIRGGKSVSPRELHETANKLAGSDLARDGLPNTVKSEPGLVIVHGLIGLVIGR

SEQ ID NO: 10302 - protein, 518 aa, Unknown
  Description of Unknown: Integrase B10303 sequence
  cd00338,PF13408,IPR011109,IPR038109,PF07508, Coil,PS51736,IPR036162,G3DSA:3.40.50.1390,IPR006119, PTHR30461,PTHR30461:SF3,PS51737,IPR025827,PF00239, SM00857,G3DSA:1.10.10.2600,SSF53041
MAKAKRPTCRPKTAVAYARYSSAGQRDVSIDQQFRDIRAYAKREGYRIVHEYADHAKSGYKNASARTGFSAMLSDAEDGRFDTVIVWKVDRFGRDREAAAVSKGTLRRLGVSVVYAMEPIPSGAAGVITEGMLEAIAEWYSRNLSENVSRGMNDNARNCLYNGTKVLGYHRGADGHYAITKEEAGVVRDIFHRYCDGFSAATIAGELNASGLKTPRGCAYTPQTVLRIIANERYLGTYIWGSVRVPGGMPAIVSPDEWEKAQALRKKTTRHYEETPVDFLLTGKAFCGMCGEGMVGDSGTSKSGVTHYYYTCHGKKARKGCRKISLRKEYLENAVIDLIRERLLTGEEKEKIADAIISAEKEEMKSSPLAAMEAELKDVNRRIDNINGAIENGIYNASTSARLRSLEDIAADLLSSIEELRFSQSQLVTRDRVLFFLDQMAAFDTTDPLRRRQLIETFINAIYLFDGYMHVVINCIDGNIRVPLSDLPDLPPCSDNGANAPPVVSHPNTRIVIYTVAV

SEQ ID NO: 10303 - protein, 518 aa, Unknown
  Description of Unknown: Integrase B10304 sequence
  cd00338,PF13408,IPR011109,IPR038109,PF07508, Coil,PS51736,G3DSA:3.40.50.1390,PTHR30461,IPR036162, IPR006119,PTHR30461:SF3,PS51737,IPR025827,PF00239, SM00857,G3DSA:1.10.10.2600,SSF53041
MNAVIYARYSPGPRQTDQSIEGQVRDCMAYAEQNDIKVLKVYADRHISGTDFEKRAEFNKMLRDSEKGQFEAIIVWKIDRFGRDREEIALNKIKLKRHGIKLLYAKEVIPDGPEGIILESLMEGLAEYYVADLRQKVKRGQRESALKGLAVSGMAAYGYKISDEKKYVENEDESWVVKYVFEHYAAGKTATEILDELSRMGVKNRKGSPITKNGIYSMIRNEKYIGKCTYDGIDIPIPALISEKLWDAVQSKIIRRPHSSAVYKAPERYLLSLKAFCGECGAMLVGESGYGKQGNKYLYYKCSTRKKKGHSHDCSLKTIRKEQLEDFVVQHTISDVLQDDVIDYIADKVIEINKKHTVNQLLSQLKSALRKAENGRNNLLKAIEDGIYTPSTKERLLELENECEELKVQIAKESIKKPEITKDHVVYWLEMFRKGNIKDEGFKQRLLDVFVHSVYVYNEKVVIAYNYTDNNHDNSIDVPGILEGSDTFVKVRDGVLYPNLSILNEYNIFVLIVNSPAA

SEQ ID NO: 10304 - protein, 518 aa, Unknown
  Description of Unknown: Integrase B10305 sequence
  cd00338,PF13408,IPR011109,IPR038109,PF07508, Coil,PS51736,IPR036162,PTHR30461,IPR006119, G3DSA:3.40.50.1390,PTHR30461:SF3,PS51737,IPR025827,PF00239, SM00857,G3DSA:1.10.10.2600,SSF53041
MEVVLYLRYSSDRQNEQSIEGQRRVCEKYCESMGYTIVGEYADRAMSAMKDTDKRVNFQRMVKDSEKRLWQGVIVYKLDRFARNRYDSATYKARLKKNGVRVISATENISDNPEGIILESVLEGMAEFYSKELSQKITRGMYESALKCNSCGGHISLGYKIENKKLVIDPKTAPIVRKAFDMYANGHTVAYICQVLNEAGYRTKTGSLFNKNSFHSIFRNRKYIGEYKFMDVVVEGGVPAIIDKETFEKVQVILNRKAQAPARGKALVDYMLSGKVICGHCNKLATGTASTSHTGRKYFYYTCSGRRGHNGCTKTPIRKELLEEAVVNDTVEMLTPEVIEYLADLAVKASEKERQDYTLISSLQAEISEYEKSIERLLKLVENGADSPTLSKRLNELEKAKRSAERSLVKEEAEYFLLDKDQVVFFLTQFTQGDKADPEFQRRIIDLLINSVIVWDDEDDGDGTHKITITYNLTPRKSKTITVKDLSKVGCVFQPDKPTTTSGQGCFVHRCYCNGLTY

SEQ ID NO: 10305 - protein, 518 aa, Unknown
  Description of Unknown: Integrase B10306 sequence
  cd00338,IPR011109,IPR038109,G3DSA:3.40.50.1390,PTHR30461, IPR036162,IPR006119,PS51737,PF00239,SM00857, G3DSA:1.10.10.2600,SSF53041
MSKKCIIWVRCSTERQEIESQKKETIEYAKSLNFDDFVVVGKLGASAYKVNKLYLEMLDEMKSKIIADPDIKAVVCWHLNRMARQEKMAMDIKDFLIEHKVQLYVREPGIKLLKDDGSVDDGAELVYNIFSTMNKQQISELRMKIKRAKKRDKALHKYIGGPVVAYGYKVDENTKQVVPDVKQAEIVNTIYDLYGTGEYSYTTLVKEVNERYGTNFKWNYMKRILDTTRYYDEEKYPPIITELQYKKAEQQRKNCTSRPAQSKHFHFANRLIKCPICGRGYTGNIRDYRCTRVLEHKDRATTISIPNLDGLLWTIAQHLESGKLLKASAKDEYLQNKAVLSAKIEGVAQSLTRLEKRAERGKKMALEGLIEVEEYKAILKECEAAGAEIHSKVDNWKAQIADLDRLINEDTIGMKRILEISDNITELDEKEMRTIVRRWIRRITFDNKGIFEITTLTRVYRCKYNRYGFESRWYTLSGNPIAVKPYIRDKDGAHFGKNRCTVKDLPITLAWLTGSEVV

SEQ ID NO: 10306 - protein, 511 aa, Unknown
  Description of Unknown: Integrase B10307 sequence
  PF13408,IPR011109,IPR038109,PF07508,Coil,PS51736,G3DSA:3.40.50 .1390,IPR006119,PTHR30461,IPR036162,PTHR30461:SF3,IPR025827, PS51737,PF00239,SM00857,cd03768,G3DSA:1.10.10.2600,SSF53041
MGNEKRGEETGPSRVAFYTRISTDEDHQKYSLDAQKDRLEAYCKSQYDDDWRLFKIYRDTESGTHMNRPGLEEMLYDASNKAFDVLLVFRVDRLSRKVRELALMVDELTKYHIALKSITEPFDTANAAGKMMLQMLGVFAEFEHATIVERTKVGMEKKAKGGDFVGGYVPFGYRLEPEKGLVVREEEALLVRKIFQMYALGLEGTQTVVNKLNASGIRKRSGQKWEKHGLLQILRNPLYVGKLRWRECIYDGKHDPIISEDIFKKAQEILKERATEVNGRQWHNGEERLLSGVIMCGKCGTHMVGVSTQKKDRKFPYYLCNKRWKTHDCDQAYVRADLLEKAVMMDITGMFQDEQFMARIWAEANRRLGAEKPDVERELGRVEAQMDRTQKSLDRYFQAFEAGSMKPALCNEKVAGLTARLAELDAERAALNARRQRLSLPALDRDMLAKWLKEFEEVFAAGTNPQRKHLLQRVVKKVLIHDRRTVEVWYGLPNSPSVRTTGGLAPRTQPS

SEQ ID NO: 10307 - protein, 518 aa, Unknown
  Description of Unknown: Integrase B10308 sequence
  IPR011109,PF07508,Coil,PS51736,IPR036162, IPR006119,G3DSA:3.40.50.1390,PTHR30461,PTHR30461:SF3,PF00239, SM00857,cd03768,SSF53041
MRIAIYARKSAFSDKSESVHNQDRMCREYCALHFPGEHIFLNYTDEDKTGANTNRPALQKMMRDVHTGIIDLLIVYQLDRLTRDVRDYCNLSAELNDCGVHFTSVKESVDTSTPIGEALTTLSAVFAQMERKTLSNRVYDNMMGLARSGWWTGGNLPCGYTTRRVVENGKPHTLLVPDPEKAEQLVTVFKLFVERGSSFHSFASFALTNDCFDIFGIPSTSQVRRVITSPYGAPANKDLRNYYLSIGANVIGAESDWDGAHGVMRYGVTDQRNGTTTNPRESWIVCPGRHEPILPADLWLAAQDQVKSNMFCKQAKYPPVLLKGILCCKCGRMMSPVRSRYKDKMYISYRCTRTGEVGRKSPDCVSACRDYVLDEKVLSVFREIERDPEVIKKYSPAAPATDQDALHKKEKEIESLQKKIGNLSSALAINPESTAAKYIIADMESLDSQIQKKQMELAGLRANRLTAAQAEKELAAKQKEIARLVRNLDDLPPEEQNKIARSVLRKCVWDGDTLFLEF

SEQ ID NO: 10308 - protein, 517 aa, Unknown
  Description of Unknown: Integrase B10309 sequence
  cd00338,PF13408,IPR011109,IPR038109, PF07508,Coil,PS51736,G3DSA:3.40.50.1390, PTHR30461,IPR006119,IPR036162,PTHR30461:SF3, PS51737,IPR025827,PF00239,SM00857,G3DSA:1.10.10.2600,SSF53041
MKKTLTACPPRTAVAYARYSSAGQRDVSIEQQLADIRSFADREGYTIVHEYADHARSGFKDLSARQEFNAMIASAAARGFDTVLCWKVDRFGRNRADSATFKQQLALLGISVVYVMEPIPAGAAGVLTEGMLEAIAEWYSRNLSENVTRGMHDNARKCLFNGTRILGYRRGSDNHYEIVEEEAAIVRRIFARYAAGYSAAVIGRELNAAGLRTPRGVPYTEQTLLRIIGNERYSGVYIWGDIRVPDGMPAIISRKEWEEAQRMRTKTARHVEQRATDFYLTGKAFCGRCGKAMIGDSGTSRSGTTHYYYTCQGHKSRSGCDKKNVRKDDLENAVIDFIRNTCFTEPEINRIADAIMEEMEKRKKKSPLAGMEQELSDVEKKISNINKAIAAGVFGDSTLIMLQDLEETAKDLRTNVAMLRFEESKLVERDFVIFNLHKFAQLDPSDPESRRKLINTFLHSVYVYDDHLKIVINAIENAATIPIDPSIIDSLGSDNLSSGVLIVTHPNQILFWYISRM

SEQ ID NO: 10309 - protein, 517 aa, Unknown; identical to SEQ ID NO: 9782
  Description of Unknown: Integrase B10310 sequence
  cd00338,PF13408,IPR011109,IPR038109,PF07508, Coil,PS51736,IPR036162,IPR006119,PTHR30461, G3DSA:3.40.50.1390,IPR025827,PS51737,PF00239,SM00857, G3DSA:1.10.10.2600,SSF53041

SEQ ID NO: 10310 - protein, 517 aa, Unknown
  Description of Unknown: Integrase B10311 sequence
  cd00338,PF13408,IPR011109,IPR038109,PF07508, Coil,PS51736,G3DSA:3.40.50.1390,PTHR30461,IPR006119, IPR036162,PTHR30461:SF3,PS51737,IPR025827,PF00239, SM00857,G3DSA:1.10.10.2600,SSF53041
MSIKTKKPSCSPRTAVAYARYSSAGQRDVSIEQQLADIRAFAKREGYTLVHEYADHARSGFKNTSARTAFQSMIAAASEGSYDTIIAWKVDRFGRNREDSAIYKGKLRRFGVRVLYAMEPIPEGSAGVLLEGMLEATAEWYSRQLSENVTRGMTDNAQRCLYNGTRILGYSRGPDGRYALNPEEADVVREIFRMYASGMAAARICRQLNSMGLRTSRGKPFAPEGLMRIITNERYTGVYIWGSIRVPGGMPAIIDRTTFEEAQRMRGKTSRHIEQGAVDYLLTGKAFCGHCGAAMIGDSGTSKDGTRHYYYTCQSRKARKGCAKKSLPKDYLESAVVDFVLDTVLSEDQIQRTADAVMALQEEELKHSPLAAMEAEYAETQKKISNINDAIMAGIWNTSTSARLRELEDAADTLRVSIETLRYSQSQLIDRDRVLFFLHRFTKGDRSDPLLRRHVIETFINSVYVYDDHLKILINNLEGNQRFPLSDLPPDCSDNVSSGVPIVTHPNTRVTVYLVAV

SEQ ID NO: 10311 - protein, 517 aa, Unknown
  Description of Unknown: Integrase B10312 sequence
  cd00338,PF13408,Coil,PS51736,IPR036162, IPR006119,G3DSA:3.40.50.1390,PTHR30461,PTHR30461:SF3,IPR025827, PF00239,SM00857,SSF53041
MPKGTRAAIYARFSSHNQRSESIDIQVEKSREYCSQNGLDVVRVYSDYAQTGRDVQRVEFQRMMADAKLGLFDYVVIYKVTRIMRNRDEMALARIRLRKAGVEILYAGESLGEGSTRVLNLGMLEVLAEWESAIDSERIRDGINKNAQRGMANGRTHYGWDIVNGYYEVNEREAAVMHRMKNMLFAGSTVAEIKRAVAGERGKRGRPLTHGVITKLLRREQNCGVYDYAGVRIEDGMPALWSREDQDMINSILGSNGRKHNKTRDTNDYPLSGKMWCPECGQYYVGTCGTSKTGRVYHYYKCKKCKRTFRRDAVEEAVLDTVLETIKKPDIRQRIVDVMALYNEMNEEKEEPESKRIEREIKRIDTAFERIWQAIEDGIAPPGGKERVAMLREQKAALEADLRQAQANEGANLSGEAIAAWLDHIAQEPDAAEIIETFVRLIEVDGDELKLYFAFDYWGDDFQPKQKKANPEKGSPNNPMVEPQKIFANPTIAANGREIKVSTNWFCIITLFSSKKS

SEQ ID NO: 10312 - protein, 517 aa, Unknown
  Description of Unknown: Integrase B10313 sequence
  cd00338,IPR011109,IPR038109,PF07508, Coil,PS51736,G3DSA:3.40.50.1390,PTHR30461, IPR006119,IPR036162,PTHR30461:SF3,PS51737, PF00239,SM00857,G3DSA:1.10.10.2600,SSF53041
VAPVNRNLYAIYLRKSRTDLELEAMGEGETLARHYNMLMNLASKHEIHPDQITVYKELVSGDSISERPEMQRLLTDVYTKKYKGVLVVEVERLARGNTKDQGEVADAFTFSGTHIITPSKIYDPNNEFDQEYFEFGLFMSRREYKTIKRRLEAGKLQSVMEGNYILSHKTFGYDIVRESKKVRYLVENPEQSKYVHMIFDWWTEEGKSCDWIAKQMTLMGVTPMKKGKEWSRNTIRDMLKNVIYVGKLKWNDMKTVKKFDSATGQMSKGRVKSAPEDVIIVEGKHKGIISEEQFAKAQARFGTQSHKKTETKLNNPLAGLLRCKDCGKVLAWLEYPDNRTTRLQHKRSFVCNKKSLPAYQVLDSFVEALKEIIADFEIKMESGNDNTELIRHQDIISDLEKELASQEKRKQRLFDSWEADDGTYTKEEFIERKQKYTATIEAIKSKIQEMKKAVPVPVNYAEQIVTLHQMIDCLNDTNLDAQAKNDFLKQYIDRIDYDVIDFGQAKGGQAVLDVYLK

SEQ ID NO: 10313 - protein, 517 aa, Unknown
  Description of Unknown: Integrase B10314 sequence
  PS00397,IPR038109,IPR006119,PS51737,PF00239,G3DSA:3.40.50.1390 ,PTHR30461,IPR025827,SM00857,G3DSA:1.10.10.2600, SSF53041,IPR011109,PF07508,PS51736,IPR006118, cd00338,PF13408,Coil,IPR036162
MKTAVIYARVSSGRQEREGFSIPAQIEFLTEYARQNNFSIEAQFVEAETAKKAGRKQFNNMLKYISEHNIDAILAEKTDRIYRNLKDYLTLDEFKQLEVHLVKENMVISEHSSSHIKFMHGIKVLMAKQYIDNLSEEVKKGKNRKAKEGYYPQQAPVGYINTDGPEGKRIIVPDPANGPFIAKLFTMYNHGTYSIAALRKLLYEEGFNHKGKPYSKARLLAILHDPFYIGKFMYNGALYQGKHEPLVPDEIFYSVQRSFNQSKARKHDTEFLYTGLLKCGHCGCQLTAELKKGKYVYYHCTGKRGGDCKKDYIREEQIDEVFMDLIKKIPNPDSKLFDLIRAGIKETRRLKGEYEEHSVEEIEKQIKRLQARIDNLYTDKLDGRITEEFWKEKHNLWYEEKDQLIEKLKSINNAARTFDEGTNLLENFCKHAPRLYERACPKTKQEILKIIGSNFTYKDKKVSVELTSVFELLLNNPFSKNGGIYKPKLEPLQFIYKLKKALSQEFISSLKALDLAA

SEQ ID NO: 10314 - protein, 517 aa, Unknown
  Description of Unknown: Integrase B10315 sequence
  cd00338,PF13408,IPR011109,IPR038109,PF07508, Coil,PS51736,G3DSA:3.40.50.1390,IPR006119,IPR036162, PTHR30461,PTHR30461:SF3,IPR025827,PS51737,PF00239, SM00857,G3DSA:1.10.10.2600,SSF53041
VEFYRVCAYARVSTKAEKQESSLTSQITYYNNLINSNPQYINMGVYAERKSGANQKKRSQFLAMIQECKNRNIDIIYTKTVARFGRNASQLLKTLEELTRIGVRVIFEMEDIDSIRDQKTIKTAIKSYFAEEELVRDSEAVRFGIQRRFEQGQVSIGNPYPLFGYEYDENRVLKLVPEKAKIVKEIFERFCNNERTCDIIRWLNNNNITTSAGRKWNYNNLSYLLRQEKYTGDAYLQKYYRENGSRYINKGEKPMYVVERWCEPIITHEMFEKAKERRERNSKYERPKGYVPKHDIFRGIIKCGMCGASFNKASERIRKTNAGERLDIAYNCQTRKTKGVRACRNHGINRNTLEDAFIKAFNSMRELLGQQQKMKIKNEEITKIDIKIQELLNKEKVYLQMEVRGLMTDEFKEKYEELITQVMKLEDRKKEIYKYNQSVREKCEYVDKFDKIFKEQQEMKEFNEEICGFMVEQITIVNRNKLLYKFRNGYIADVEVIDYYLERDEIGDVNFYVSTKC

SEQ ID NO: 10315 - protein, 517 aa, Unknown
  Description of Unknown: Integrase B10316 sequence
  cd00338,PF13408,IPR011109,IPR038109,PF07508, Coil,PS51736,G3DSA:3.40.50.1390,IPR006119,IPR036162, PTHR30461,PTHR30461:SF3,PS51737,IPR025827,PF00239, SM00857,G3DSA:1.10.10.2600,SSF53041
MDQIKAVIYARYSSSGQREESIEGQIRECTAYAKKHDMVIVGEYSDHALTGRTDKRPDFQRMIKDSDKHLFDVVICWKMDRFARNRYDSATYKHRLKKNGVKVVYAMEYVPEGPEGIILESVMEGYAEYYSENLAQNIRRGYYENALAGKVLTSPCYGYRKDERGMFAVDPDASLIVKRIFEEYLSGKGTRQIAEDLNAEGWRNSKGRPFGLNTIRYILTNKKYIGHYQYRDIILEDVIPPLVSKEDFEAVQRKLDKKKEAPAAKMAVYALTGKLYCGICGDTVAGEYGTSRNGSQHYYYTCHNRKASHACKLKRQRRDYLEKLISDELIRLIFDDAFIEEVADLVVEFEEKEEASGLLPVYEARRAEIARQVGNITNALALAPTSPALVAKLTELERQLTEVETAIAKESIVTPSLTKDQIIYFFERQRRGDVDSPEFRRTVIDTFMQSAYLYDDHIVINLNYSGTKTPISKALIDDLESSDSQRVSPVRVSPVKSRLCSQTRTLPVLLVTLSLAA

SEQ ID NO: 10316 - protein, 517 aa, Unknown
  Description of Unknown: Integrase B10317 sequence
  cd00338,IPR011109,IPR038109,PF07508,Coil, PS51736,IPR036162,IPR006119,PTHR30461,G3DSA:3.40.50.1390, PS51737,PF00239,SM00857,G3DSA:1.10.10.2600,SSF53041
MAKVILLVRVSTAQQEVEAQRSELVELALADGFKHEDMVIIEGVGASAIKLNELYLQQMDELYQTIESGDIDAVYAWEISRIGRDEVVLMKFKNFLIEHKVQLVVKNPSLRLLNNDGTVNNGIELAFSLFATMSKQEMAVKKERFKRSKARNKAEGKFTGGKIKFGYKLSSSKYFEIDPEKSAVIVEVFNRYVNGASQYELVEDMISRGYLVKNYNRITTSKTVGYWLRDTAYIGQNNYPRIIDDETFNKAQERLQMRHKEHHSKHILFAKGIVKDRNTNATLVAQVPSLTYGCYYVDKFRSVNLNVMEYVAEYSTNILLAERNADEMERNMIAYNDKIADNEKLINVHNEAIKRLENVIERAIEMNINQPKYFPTEKMQAKIKQTEKQIENEKRAIEDLRIENANMRAYLDGNATFINSIKNFSDEKKSEIIHNTIKTIWVDGLDDQKRQIKIEVNNKIGYPVNLKFIYRRHGNELLLWQVWNWDDEHPLELTQGLKSHTRFIRKRYNAKGVSQNG

SEQ ID NO: 10317 - protein, 517 aa, Unknown
  Description of Unknown: Integrase B10318 sequence
  cd00338,IPR011109,IPR038109,PF07508, Coil,PS51736,G3DSA:3.40.50.1390,IPR036162, IPR006119,PTHR30461,PTHR30461:SF3,PS51737, PF00239,SM00857,G3DSA:1.10.10.2600,SSF53041
MRAVGYCRFSSENQRDGFSIEAQKAAIREFCSKNKIELLDFYIDEALTGTNDKRPAFQRMIDDSSDHLFEAVIVHKLDRFSRSVTDTAIYKNHLAKNGVRLISVVEQFGNSPESIILEQVIIGMNAYYSQNLSREVKKGMTQAALNGYVYHKIPFGYKKGDDHKFQINEDEAEVVRLIFNLYAKGYCQKDIIEECFKIAPFRTYTYQFINRVLMNRFYIGEIIVNGKAYRNITPAIISEDLFNRCNDGIKRHSYRRRKEVKGEEFKKTDFILSGLVFDKNGHAFTGSSATGKLGKTYYYYATTKKPIIRYQKEALEHLVLDGICSYIENGMNLEYLASLINEKINQRINKKQMSELARKIKILKNKRSRMQDAYIDGVIELEELKEKNYALVNQINSYQNQLDLLTNSSTVSPEILKKAFKNISDQIKSKNIDSKKLRRLITSFLKKAIIDDDTVRLHLIIQHGDIKVKKLKEKLEQSDFSECSSNHSNGEPYGSQLEIVVMLRKNLNLINQSLLFS

SEQ ID NO: 10318 - protein, 517 aa, Unknown
  Description of Unknown: Integrase B10319 sequence
  cd00338,IPR011109,IPR038109,PF07508,Coil, PS51736,G3DSA:3.40.50.1390,IPR036162,IPR006119,PTHR30461, mobidb-lite,PTHR30461:SF3,PS51737,PF00239,SM00857, G3DSA:1.10.10.2600,SSF53041
MHKAYSYLRFSTADQIHGDSLRRQTTLAKNWCQKNGIPLVENYRDLGVSAFRSKNADKGALKAFLSRVESGAIEPGSYLIVESLDRLSRTDITYALQMFLGIINAGIVVVTLADERVYDKKRINDGNFTDLIISLTILSRANEESRIKSMRSTQAWEAKRGRATTEKITALCPGWLKLSADRKKFEVIPEKAKIVKRIFQMAAQGKGGLHIAQVFQKEKVARMGKGSRWYPTGIKNILDSRAVIGEFQLARTVDGKRVLCDPVPGYYPAVVPMDLYSTVQRIRRIRSSYRGRGQGNPIAGLLYNVMTGRKMIRLVSNEARGYSYLVDAAAPVGAAPRITWHYGRFLEALMGACEAITTCPPSAKKQNQELEDALKRKDEIEAKIPRLVDFISDGFSAGAHEKLRLLEAEKKELESRIAEMKVDNAAPDMDLEQVDWRDASKLKENARAIIERIEVHPQERWFTVKTFDGREVRYTEEGGSIEVLSSEPVSRRKMDKPGRVKKTSPAKNRKRGKARTR

SEQ ID NO: 10319 - protein, 517 aa, Unknown
  Description of Unknown: Integrase B10320 sequence
  cd00338,IPR011109,IPR038109,PF07508,PS51736, IPR036162,IPR006119,PTHR30461,G3DSA:3.40.50.1390,PTHR30461:SF3, PS51737,PF00239,SM00857,G3DSA:1.10.10.2600,SSF53041
MSGLLETTILSPVRRAAAYVRMSTERQTYSTANQMQRIQEYAAEQQITIVAVYEDAGKSGLTMRGRPGLQQLLADVQTKDDFTCILVYDVSRWGRFQDVDESAHYEYICRLNGVQVTYCTEAFQNDDSPYTSIIKAMKRIAAADYSRELSSKVFLAQCRIIKMGYKLGGMAGYGLRRALLDSNGDFIRIMEKGEWKAVQTHRVVLVPGPKHEIEVVNLIFHWYAVDKVGDRRIAIVLNEQNVASESGRPWTGALIRGMIRNEKYIGNLIFNKGSYKLRKTAVRNPPALWVRCDAAFPPIVPLQLFHAARIERSDRNYRYTTEELMQTLQRIYKAHGGVTSALIDRDPDGPACQLFCRRFGSIYAAYELAGIPGPFNAEAIVTRSRTLSIKAEFLDSVKGAIIAAGGTWQATNMPHTLRINDAVTASIRVVRCALDKKWGYHRWRINKRLATGYDFLIAAVLDRHNEEIEAYLLVPAREFENRDISFTELTRASLGKTIRAKLTDFFPPPVELSEQSG

SEQ ID NO: 10320 - protein, 517 aa, Unknown
  Description of Unknown: Integrase B10321 sequence
  PS00397,PS51736,G3DSA:3.40.50.1390,PTHR30461, IPR036162,IPR006119,PTHR30461:SF3,PF00239, SM00857,cd03768,IPR006118,SSF53041
MSTYIYARVSTFDQYVNGNSIDAQCEMCLKHAVNHGMEMGTESNCDLPGVFLDGGKSAYTKKLAERPGGLRLLTVLQPGDVVIATATHRLFRRMGDMVATMDHWVQNKISVRFTDYPMLNTDTANGKAMLYIFAVIAQMKSELTSSRVKEARAMSREKPKVPVQVQPSVPLDTAEHLMTKDVGSIMQEMRREETQSQFKGTVRAYIRVSTKEQTVEQQRQCIERMMPDDLRGAPIEWYSDEGVSAFKTKMVKRPSGSKLLEDLEPGDIVVTWRPDRMFRSLLDMANTTELIHRKGAFLLTVEGGIRTDSPFGKTMVSLLSLLAEVESQEISRSTKQGFFVAVGVSAKARAVFMPKFLSSMKDHHTQKHFCFNRFFTQEDKFNMHVQLSLTGKHYHSLSSACRVISNKWLRRKGLPSMTGIESESVGSYLAKVREMQQQRFSERREALIRVLRRRKGSDRVVYPINVTSSRRVIPNQDRFLRASRRISGRIKNKQALIAIAIRGSDLESNLDLIRRVS

SEQ ID NO: 10321 - protein, 517 aa, Unknown
  Description of Unknown: Integrase B10322 sequence
  cd00338,PS00397,PS51736,IPR036162,IPR006119, PTHR30461,G3DSA:3.40.50.1390,PF00239,SM00857,cd03768, IPR006118,SSF53041
MRTWIYARVSTFDQYLTGHSIDAQVQACLTHVKNHGMTLGLETNSGLPGVFIDGGKSAFTKKFMQRPGGTALASLIRPGDTIVATATHRMFRRTSDLLNMMEGWVAMGVSVVFTDYPMLSTNNANGRAMLSLFGIIAQLKSELTSARMKEAFALSKGKSKKVAPVKPLPPSLAPLPDTNYVEVMLQIAKDRDVSNLRFTGKIRAYVRVSTKDQTVEQQKQCILQQLPEDMRGSEIIWYSDEAVSAFKTNMTKRPAGSKLLADLQEGDILVAWRPDRVFRSLLDMANTTELIHSKGAFIFTVEGGMRTDTPFGRTMVSLLSMMAEVESQEISRSTKQGLMVALATNPAAQRQRLPKYLRESTDTSDQIHFSFNQMFSRQDRMHMYLQLSLTGKQYRDRKMACRVISNKWLKMKGLPQLTGLLSDTHRLYTHKVKQMQKEEFSERRKKLLEVLEGYDKGSNVNYPLNVDTIAWVMRRQEVFLKTARKMAGRIKDKQTLVSLASQCVSADAAVELMEVLK

SEQ ID NO: 10322 - protein, 517 aa, Unknown
  Description of Unknown: Integrase B10323 sequence
  cd00338,PF13408,IPR011109,IPR038109, PF07508,Coil,PS51736,G3DSA:3.40.50.1390, IPR006119,IPR036162,PTHR30461,PTHR30461:SF3, IPR025827,PS51737,PF00239,SM00857,G3DSA:1.10.10.2600,SSF53041
VIYARYSSHNQREASIEQQIEMCTALAKRMGLMIVDTYADKAISGKTDKRPSFQRMMAAATEDQFDFVLSWKSNRMGRNMLEAMMNDAALLEYGIKCVYVEEDFDDTAAGRFALRNMMNVNQFYSESMAEDVRRGMLDNAKKCMVNGRCPYGLRKGKDGKYEIDPEQAEIVREIFSRVIEGWQHRDIMDDLNARGIKNRDGNIWQRTTFDKLLRNEQYIGVYKFSGIRTEGGIPAILDRETFEEVQTILTTKKHPRGRRRNVEDYLLTGKLFCGHCGNPMVGICGTSRNGERHYYYLCQGKHRHECNKKNERKEKLEGKVIQALKMLILDEATIDRIMVGFDQFMLDLRGQSTLAAKEAELAEVEKALGNIMKAIESGLPFTETTKGRLMELEDSKKVLAGEIEREQKFFTRVDPEQIRFSIEYYRDKNLNNREYIRELLATFVRAIYVFDDHLKIVLNNGLGEDIEIPLSDLQDDLSDADFSEADVRINDTKPHQIDNVRTTLIFRNYGIIVVVPY

SEQ ID NO: 10323 - protein, 517 aa, Unknown
  Description of Unknown: Integrase B10324 sequence
  cd00338,PF13408,IPR011109,IPR038109,PF07508, Coil,PS51736,G3DSA:3.40.50.1390,IPR006119,IPR036162, PTHR30461,PS51737,IPR025827,PF00239,SM00857, G3DSA:1.10.10.2600,SSF53041
MYCMYLRKSRADLEAEQRGEGETLKRHEKILLDLAKKMNISISKIYKEIVSGETIAARPVMQQLLSDIEKGMWKGVLVVEVERLARGDTIDQGIVAQAFKYTNTKIITPMKIYDPSNEFDEEYFEFGLFMSRREYKTINRRLQQGRIQSVKEGKYLGTVAPYGYKRKKLENQKGYTLEIIPEEAKIVELIYNWYTGPNRIGISIISNKLNKMKIPARKGGDWTTSTIRGILSNPVYIGKIKWNSRPEKKKIVDGEIVVERPRTNKEDWIIVNGLHEPIIDNETFNLAQKYLSKNPALPVPTRHKVMNPLAGLIVCGVCGRKMKRRPYNNGYPSTLMCDGPTCNNISSPLYIVEEKLLNTLKTWLENYKFELKQLEEQGNNIEIDLINQSISKIDADLITLNKQLNSLHDFLEQGVYSIDMFLERSKILNEKINTLKSHKLELQTKLDNITSLNNTKKDIIPKIEKVFEVYWKINSPKEKNDLLKEVIDKVIYIKKEGGRWSGKIDSFTLILYPNLPN

SEQ ID NO: 10324 - protein, 517 aa, Unknown
  Description of Unknown: Integrase B10325 sequence
  cd00338,PF13408,IPR011109,IPR038109,PF07508, Coil,PS51736,G3DSA:3.40.50.1390,IPR006119,IPR036162, PTHR30461,PS51737,IPR025827,PF00239,SM00857, G3DSA:1.10.10.2600,SSF53041
MERLPHGEYVIYLRKSRADLEAEARGEGETLAKHKKALFKLANHYKLNIAEVYEEIVSGERLTDRTEMLRLLDRLNDDPPAGVLVMDLDRLSRGSMQEQGFILETFRSNNVLIVTPTKVLDLNDESDEFQADISSLFARRELKMITRRLQRGKDLSAESGNFVSARPPYGYDIHFLEDGSRTLKPNDQADIVRLMFQWADEGISTRDIAERLTKMNIPTYFGRKEWNFNVVLQILHNPVYIGRIQFRKTSRRKINRPDKKYDIKKRPADKMIDVQGKHPAIIDESLFRRVQKRLSDNVLVRTKKSLAPVNALAGIVKCGKCGFTMVYKRHPLNKELGYLRCNNLHCNARLSRYDLIEEKILNFLNEWLKGMKIDIKSRKPRTPNTIIVKEKLINELKDQLKTYEEQRMKQFDLLEQGIYTQEVFLERSRTLAERIEETTKRLNQLTEEIEIERTRQKNQKEIVPKVEQAIKYYKTSKDVQKKNLVLKGIIHEVKYWKEKNQTGDDFTIEITPKFPGE

SEQ ID NO: 10325 - protein, 517 aa, Unknown
  Description of Unknown: Integrase B10326 sequence
  PF13408,IPR011109,IPR038109,PF07508,Coil, PS51736,IPR036162,PTHR30461,IPR006119,G3DSA:3.40.50.1390, PTHR30461:SF3,PS51737,IPR025827,PF00239,SM00857, cd03768,G3DSA:1.10.10.2600,SSF53041
MRKSKPAPSDAKRCAVYTRKSTAAGLEMEFNSLDAQRESCVSYVQRQPGWVLVDESYDDGGFTGANMERPAFQRLMQDVDSGRVDVVVVYKVDRLSRSLLDFAKVMERFNAAGASFVSVTQNFSTADAMGRLTLNMLMSFAEFEREMISERTRDKVAAARRKGKWTGGRAPLGYEVKDKRLVVNEYEAVVVREAFELYLQHQQASVVSRLLNETGRKTKRYEAQSGATRAARKWTTQDVLRLLRSPLYAGFVPYGDEAHPGEHSPIVDRATFHQVQDILEGRGPGIQYHGRNPDYVLRGLLRCGMCGEAMTPGSTRKGTREYRYYRCVTRDKQGKEGCRASPLPAAALEDFVVARLREVSVGGGFATQVHARLTSRLEEKHKALRAERIQLPKDLAKRAGESAKWVDSLAKLEGPARRLLEEKLTAAEEESAGMRRRLTEVEHALDAMEREKLEAAWVAQALADFDAVWDALTAANRGRLLQALVGRVVVDEETDRVDVHLAQAGEPAASEGEEVAA

SEQ ID NO: 10326 - protein, 517 aa, Unknown
  Description of Unknown: Integrase B10327 sequence
  cd00338,PF13408,IPR011109,IPR038109,PF07508, Coil,PS51736,G3DSA:3.40.50.1390,IPR036162,IPR006119, PTHR30461,PS51737,IPR025827,PF00239,SM00857, G3DSA:1.10.10.2600,SSF53041
MERLPHGEYVIYLRKSRADLEAEARGEGETLAKHKKALFKLANHYKLNIAEVYEEIVSGERLTDRTEMLRLLDRLNDDPPAGVLVMDLDRLSRGSMQEQGFILETFRSNNVLIVTPTKVLDLNDESDEFQADISSLFARRELKMITRRLQRGKDLSAESGNFVSTRPPYGYDIHFLEDGSRTLKPNDQADIVRLMFQWADEGISTRDIAERLTKMNIPTYFGRKEWNFNVVLQILHNPVYIGRIQFRKTSRRKINRPDKKYDIKKRPADKMIDVQGKHPAIIDESLFRRVQKRLSDNVLVRTKKSLAPVNALAGIVKCGKCGFTMVYKRHPLNKELGYLRCNNLHCNARLSRYDLIEEKILNFLNEWLKGMKIDIKSRKPRTPNTIIVKEKLINELKDQLKTYEEQRMKQFDLLEQGIYTQEVFLERSRTLAERIEETTKRLNQLTEEIEIERTRQKNQKEIVPKVEQAIKYYKTSKDVQKKNLVLKGIIHEVKYWKEKNQTGDDFTIEITPKFPGE

SEQ ID NO: 10327 - protein, 516 aa, Unknown
  Description of Unknown: Integrase B10328 sequence
  cd00338,PF13408,IPR011109,IPR038109,PF07508, Coil,PS51736,G3DSA:3.40.50.1390,IPR036162,IPR006119, PTHR30461,PTHR30461:SF3,PS51737,IPR025827,PF00239, SM00857,G3DSA:1.10.10.2600,SSF53041
MPVRALRLLRAAIYARVSKDEQAEHGYSLPTQLDNCRQYAVANDMHVVGEETDDYTGMRLDRPGLIRVRDLITRRQIDALVVHSSDRLTRSLAHVLLLREELKRAGVELHYVRRGKSDDTPEARMTENIEGVFNEYWREKIIEASMRGMGAKAKAGGWVGGHISYGYRIAGSKHEAKIEIHEPEAATVKRIFEWYIRDLLPLAEILKRLTAENVPSPRPADGTISRWYRGSLRRLLRNPLYVGDYKWNSHLSAHPELAIVSRETFDEAQSRLHRNRQLAKRNRKYDYLLSGMIRCSCGAAMVGAALHVSRKSDAKTLYYYCSSRMADRHLSQCTERHIRAATADALAWKWMEELLLDPDRLERGVTEYVKDIRSESDSRRMRISELSDKIEDAEHRMILLANDLASLGSQKGRGAILERIDALAGEISDMEQERDTLASELSRVNISGEMRTQIAAMSDDVRHAIENDLVSYEVKRRTFDRLGVTIALERRGEKGGLLLATDPAVLPVKPQWIALD

SEQ ID NO: 10328 - protein, 516 aa, Unknown
  Description of Unknown: Integrase B10329 sequence
  PF13408,IPR011109,IPR038109,PF07508,Coil, PS51736,G3DSA:3.40.50.1390,IPR006119,PTHR30461,IPR036162, PS51737,IPR025827,PF00239,SM00857,cd03768, G3DSA:1.10.10.2600,SSF53041
MPEKHSIRCAIYTRKSTEEGLEQEFNSLDAQRESAEAYIASMKHEGWLCMPDRYDDGGYTGGNMERPAVKRLMADIDAGKVDCVVVYKVDRLSRSLLDFAKMMETFDKRRVSFVSVTQHFNTTNSMGRLTLNILLSFAQFEREIISERTRDKIAAARRKGKWSGGRPILGYDVAPGGGKLLVNEAEAARVRSIFELYLDHQSLIETVKALDARGWTTKHWVTKEGHESGGRRFDKNNLIHLLTNVLYLGKITLKKEVFDGEHTAIVDAEVFRRVQAMLHRNGQSGGKHVRNRFGALLKGLLHCVPCNCAMIHTHTLKNGNKRYRYYVCLNAQKRGWHDCPSKSVPAAEIERFVIEQIRGIGKDSSLVAETIRQTRTQSDKRIKELETERAGLEKDLLRHNTDLRKLVGKVSRDGTAADRMADVQERIRVAERRATEVREELIALGRNLVDEKDAVRALALFEPVWDALSPREQVRVMQLLVERVDYDGEKGTVSITFHPTGIRSLADEMKRKEAIA

SEQ ID NO: 10329 - protein, 516 aa, Unknown
  Description of Unknown: Integrase B10330 sequence
  cd00338,IPR011109,PS00397,PF07508,IPR038109, PS51736,IPR036162,PTHR30461,IPR006119,G3DSA:3.40.50.1390, PS51737,PF00239,SM00857,G3DSA:1.10.10.2600,IPR006118, SSF53041
VKRAVVYVRVSSQDQVHNLSLDTQEKHCRDLCARQGWQVARVFREEGESAKTADRTELRVLLSHIAEARPRVDFVVMYDTKRFMRNWVEYAILKDSLKKLGAELRYVALEVDDSTPQGVLLEGFNALLAHVDNLERSKRTRDGMREALERGRWPWLAPLGYRNRVSEDGRKKWIEPDPATAPLIRWAFEQAATGLKSKDELRAELAGRGLEVKRETFYRILRNRIYLGRVAAPQWGIDLPGEHEPLVDWPTFRAAQRAITQRRAYVTGPTSEFPFRQVVRCCGCGRGLAGYFARGRRGNRYPFYRCQGCKVNASAARVETDFARLLDRMAVPPRALDLLERIVRDVVNQRQARQSEIAEAANRRLAMERTKRERLFEAFAYKDAIDEREYHARRAVLDERIATLEHEASASASPIVNFEPVLAASRQLLQLPLMEWDRVKPHSRPALLRGLFPRGLGWEPAGTFRTPDKSLLRLPLPAVSRPDVAGGTPDSADFESIGEWFQELEAVLPLLGEQRA

SEQ ID NO: 10330 - protein, 516 aa, Unknown
  Description of Unknown: Integrase B10331 sequence
  cd00338,PF13408,IPR011109,IPR038109,PF07508, Coil,IPR036162,IPR006119,G3DSA:3.40.50.1390,PTHR30461, mobidb-lite,PTHR30461:SF3,PS51737,IPR025827,PF00239, SM00857,G3DSA:1.10.10.2600,SSF53041
MKKNSVPSCAPRTAVAYARYSSAGQRDVSIEQQLADIRAFAKREGYTLVHEYADHAKSGFRHVSARTAFQSMMASADSGTFDSIICWKVDRFGRNREESALFKGRLRRFGVKVLYAMEPIPEGSAGVLLEGMLEATAEWYSRQLSENVLRGMADNARRCMYNGTHTFGYTSDSEGRYIIQPEEAAVVRDIFSLYRSGWSAAMIARDLNARGLHTWRGNPFCAQGILKIISNERYTGVYIWGNVRTPGGMPVIISPAEFEEAQRMKKKTARHVEQGAVDYLLTGKAFCGLCGGAMVGDSGTSKTGVRHHYYSCYHRKHDKACTKKSVSKNLLEDAVVSFVLDYVLSDAEIEKIVDAVMALQAEEMKSSPLAAMEAEYKDVQKKIDNINDAIAAGIWNSSTSAKLKELEDAAENLRVSVETLRYSQSQLLDRDRVLFFLHRFTSGNRNDPLLRRSIIETFINSVFVYDDHLKIVINNVEGNTRIPLSDLPPESSDNDKSGLPTVTRPNPRITIYRIAV

SEQ ID NO: 10331 - protein, 516 aa, Unknown
  Description of Unknown: Integrase B10332 sequence
  cd00338,PF13408,IPR011109,IPR038109,PF07508, Coil,IPR036162,PTHR30461,IPR006119,G3DSA:3.40.50.1390, PS51737,IPR025827,PF00239,SM00857,G3DSA:1.10.10.2600, SSF53041
MKKYSVASCAPRTAVAYARYSSAGQRDVSIEQQLADIRAFAKREGYTLVHEYADHAKSGFRHVNARTAFQSMMASADSGTFDTIICWKVDRFGRNREESALFKGRLRRFGVKVLYAMEPIPEGSAGVLLEGMLEATAEWYSRQLSENVLRGMADNARRCMFNGTHTFGYTSDSEGRYVIQPDEAAVVRDIFTMYRNGYSCSMIARDLNARGLRTWRGNPFCAQGILKIISNERYTGVYIWGDVRTPGGMPVIISQSEFEEAQLMKKKTARHVEQGAVVFLLTGKAFCGLCGSAMVGDSGTSKSGTRHYYYSCIHRKRDKACSKKSVSKDYLEDLVVSFVLDHVLCDPEIEKIADTVMKLQAEEMKSSPLASMEAEHKEIVKKIDNINQAIAAGIWNSSTAVMLKDLEDSAETLRVSIETLRYSQAQLMDRDRVLFFLHQFTKGDRNDPSLRRKIIGTFVNSIYVYDDHLRIVINNMEGNERIPLVDLPDECSDNGNSALPTVSRPNPRITIYRIAV

SEQ ID NO: 10332 - protein, 516 aa, Unknown
  Description of Unknown: Integrase B10333 sequence
  PF13408,IPR011109,PF07508,Coil,PS51736, G3DSA:3.40.50.1390,IPR036162,IPR006119,PTHR30461,mobidb-lite, PTHR30461:SF3,PS51737,IPR025827,PF00239,SM00857, cd03768,SSF53041
MRVATYNRKSVYSDHSDSVKNQERMCREHAQMRFGDKMESFTVYQDEGFSGANTARPGLKNLLADIDVGKIDALVVYQLDRISRSVKDFSDIWDRLEKKNVSFVSIKEQIDTETPMGRAMIFITMVFAQMERETIAERVTDNARGLAMKGLWPHGAPPLGYVAEPILLDGKKHYRLAPDPEKAAYVKGLYADMLSLGKSVQALAKRYAAAGKTSATGKYPERSVLYRYLTSPYYCAATPDVYDFWEAKGCRIVGSGRDEWDGSKGVMAYGMGTNSRTKRDYSEWVVTKGLHEPLVSAEDWLAVQAIFQANIFDKTAKYPPTLLKGILRCAKCGRLMLVGRSHGIPRYTCSTRQSRGVDYCDMPSLRVSDADPEVEEKLREAVIDEDILRSFHHSNIPSGAKERATALMKEKKDVEAKLENLAAALAEAGASSARKYILAEMDKVEAGLISIIEELEKTSAEARKEEASKKEFEEVKSALADVMGKFQSLSAEEKNRLMKKLLKTCTWDGAKVTLIV

SEQ ID NO: 10333 - protein, 516 aa, Unknown
  Description of Unknown: Integrase B10334 sequence
  cd00338,IPR011109,IPR038109,PF07508,Coil, IPR036162,IPR006119,G3DSA:3.40.50.1390,PTHR30461,PTHR30461:SF3, PS51737,PF00239,SM00857,G3DSA:1.10.10.2600,SSF53041
MDAVILARVSSKEQEDGLSLDAQSARLTEYATRRGFNIVKTFVLIESSCRGNRRGFHDCIKYLKHTSAPTCLIADAVDRVQRTFSEIGMLDELRKKKNIELHFCRENLVINNTASSQDIMRWEFAVLAAHSYVLSLSENVKRSIGHKYANGEISGHAPLGYKNVRVGNTSDIVPDETTAPYVVKMFETYARGGQSYKSIAHLANTIWGLRTARFGKRLDGNKVQYVLSNRFYYGEYERNGKIYPLRYQPIISRDLWEQCERIRLGRAAIRPKKQKIDSPYRGLIKCVNSGRLCQIETHKGRLYLVSYTTDGKRKYTQMDDINEQIAQILDTIKPTPECLAYAMETLKTTAHSERDWHKSEILRLRDEQDMTQKRINGLLDLLIDQKITQDAYNTKYEQLTARANEIKNMLNAHKTADDTFNQTVVNLLNLANSAGDLFRKSSNVRSRSDILKLVIRTLEFDGVNIGYYLNFPFSEMQNLTDLNRWGTLLCNIRTSKAAEIRRYQAANWDFNTLLAA

SEQ ID NO: 10334 - protein, 516 aa, Unknown
  Description of Unknown: Integrase B10335 sequence
  cd00338,IPR011109,IPR038109,PF07508, PS51736,G3DSA:3.40.50.1390,IPR006119,IPR036162, PTHR30461,PTHR30461:SF3,PS51737,PF00239, SM00857,G3DSA:1.10.10.2600,SSF53041
MRAILYARVSGDDRGSEDRNLNSQLEMGRKYAQEHDYTVVAELAEDDRGASGYAIDLPQLDRARKMARAGEFDVLVTREIDRLSRNLAKQLIVEQELKQAGVEIGYVLGEYPDTPEGRLNKHVKATIAEYEREKIAERTMRARRDKARDGYVITRSRPPYGYRAEDGEKSLVVYEPEARIVRLVFTWYVAGDGTDGPVGTRIIAKRLTDMRVPTWNDVHGLCSKPRSAEGEWAPSTVARLLSNETYIGRWKYGGVEVPIPAITDTPTWESACARRVYNRQMSSRNRKYEYLLAGRIRCGLCGLAVCGTSKVTPKQVYLYYRCSSWRADCALPTVRADYADTATWGWIGQFLTDPAALASGLQAEQEERKGASRPLQDRLAVVDSLLAERQNQLEKLLDLYLDGNFPRDVLTGRQKQLEDGIAALARERVVLVDQLEQESLTEDQVYSIIEYAGEVARGLEVAEQSYEARRRVVDMLDVHVTLTAEGGEKVAYASMLCGSKSFPILPTTTGRTGWRS

SEQ ID NO: 10335 - protein, 516 aa, Unknown
  Description of Unknown: Integrase B10336 sequence
  cd00338,PF13408,IPR011109,IPR038109,PF07508, Coil,PS51736,IPR036162,IPR006119,PTHR30461, G3DSA:3.40.50.1390,PTHR30461:SF3,IPR025827,PS51737,PF00239, SM00857,G3DSA:1.10.10.2600,SSF53041
MARKKKVSPGNRLVAYYRYSGGSQQTEQSIEGQRRDCEAYARQHGLTIVHEYIDRHISGRGVESRLAFQQMIADSSKHLFDLVICWKTDRFARNRYDSAVYKKKLRDNGVRILYAAESSVEGPEGIILEGLMESLAEYYSAELAQKMRRGMRESALKGRAINPSRPLGLTTDEHKRFIIDEKNAPTIRFIFEHYAAGESSAFIVEQLNAAGLRTSKGNAFNKCSIPRIIQNEAYHGVYICKAYDVRIDGAIPAIIDDDLWKRAQKMLTLNKQHRAPHSSHADYLLSGKLFCGCCHSLMRGISGHNCRNDVYYYYACGNKADDGTCKKKNIPKDVAENLVVNAICENVLRPDTLEDLADAIAAAQQADVNQPDPERAMLEQNLADVHRKINNIIESIENGTASSRLSARLADLEQQESTLNYQLESMKEIHPPVLDRERILFLLEQFLISPNERTEDYNRRIIDTFVNRIEITDTEMLIYFNLSEASASEKQKNSQPNSCSTGNHLVRVARIELTAS

SEQ ID NO: 10336 - protein, 516 aa, Unknown
  Description of Unknown: Integrase B10337 sequence
  PS00397,IPR038109,IPR006119,PS51737,PF00239, cd03768,G3DSA:3.40.50.1390,PTHR30461,IPR025827,SM00857, G3DSA:1.10.10.2600,SSF53041,IPR011109,PF07508,PS51736, IPR006118,PF13408,IPR036162,PTHR30461:SF3
MRAALYVRVSTDEQAKEGFSIDAQLNILSAWSLVKGYEIADRYVDDGYSAKNLNRPAIKRLLDDCEAGLIDAVVVWRLDRLSRSLRDILSIVDDVFRAKHIEFISATESIDTSSTAGRLTLNILASVAQNEREINEERVRMVSMELASQCVHMGGVPLYGYSVGEDRHYLINEAEAPAVRMAFEMRFNRCGYGEIITALTDAGYRTRKGQVFTKNALHDMLTNEKYAGAYVYNRAAPASRDGRRNSHASKPADQIIRIPGGMPAIVSQEIFDGVQLIMKADKHSGGGRAHAKRIYPASGLVYCAVCGSSMIVDAVGRNRNGTYQYSYGCRNKCVKRIRNEKLLTHIFDFLDELTADPQIIAQAAKIANETAMLEHADIQACAEAASAQLADIDAKIASIIEFIKVAGAAAPASLAAELRALEAKKDACKYDVSLASKKAKAADADSIYQRLAAVALLRNAAPSEQRAAIQRVIHAIHVHNDAIWIDVSPGTGELMVEATHHQSFPCPTLTFSINRS

SEQ ID NO: 10337 - protein, 516 aa, Unknown
  Description of Unknown: Integrase B10338 sequence
  cd00338,PF13408,IPR011109,IPR038109,PF07508, Coil,PS51736,IPR036162,PTHR30461,IPR006119, G3DSA:3.40.50.1390,PS51737,IPR025827,PF00239,SM00857, G3DSA:1.10.10.2600,SSF53041
MSPAPTSKYAIYLRKSRADLEAEARGEGETLARHRIALTQLAERRGLNVVQIYEEIVSGESIQSRPQMRMLLAAVEAGEYAGVIVNDADRLARGDSIDQGIVKQAFYSTNTLIITPIKTFDPQQDADEDFFDFSLFFARFEYRKIKQRMQTGRARSAAEGNYLGTRVTYGYNKVRRMDRKGFTLVPDPDKAEIVRMIFRWYADGDNDETMGSDSIARRLNDMGLRTDLGHVFTGDYIRRILRNPAYIGTSSWNKRVSRVRSAGGVRSITRETNPEPIIVEGAHEPIIDRALFDRVQRMFDAHAKLPKNTYAPVTNVLSGLIKCSICGKTLQRKPGANGRPSALRCPTQNCPTTSIYIPTLEETLLEALKSWVVEYSSPAMRQQSGKPENTAAATIQKQIDALNGQMSRLHDLLEQGIYTPTVFVQRRDELTARIESAKVELSRLHSMPTTSDIIIMQLPNIQHVLEAYPLTTDLQKRNQLLRSVISRVVYYKTHRCTRNENPAEYMSLDIYPAMPE

SEQ ID NO: 10338 - protein, 516 aa, Unknown
  Description of Unknown: Integrase B10339 sequence
  PF13408,IPR011109,IPR038109,PF07508,Coil, PS51736,G3DSA:3.40.50.1390,IPR006119,IPR036162,PTHR30461, PS51737,IPR025827,PF00239,SM00857,cd03768, G3DSA:1.10.10.2600,SSF53041
MANVKLKNILTLSPYMKIAIDNKVELDEHGNYLINIGYERVSTDRQAELGFGLEIQEKEIVNYCQRNELTNLVLFIDDGYTGTNMDRPALQAIIDLITSFNDGYIKVRINNMIVPRIDRLGRTLLGTLQFIQDYIVARNDSKSLINKNKEDINFISIAENYCRIERNNPQGKFLLMLFATLAEFDRDVIVDKLKKGRQARVASGKWMGGGNAPYGYRYDKEQGQLIVIPEQAEKIREIFRLYIEEKMSPQKIADRLGFKGEKIIVQILQRKSLTGCITYLEQEYEGQHEAIISLERWLEAQEEFKKRSVVRGDSNYLLTGLVYCGECGARMRYQKWGKTGECKFVCYSHQKSKKYMVKDENCDNLLFWQHDIEKVVVESLFQLSHKVNDETVKMEQQINPLESLKKQLEIEKRKLSKLYDFDDGSDDDILTEKILNCRKKITDLQQQIMTVQDNEITINQTNKINDITKNLQNTWSLMTDKEKQSICRELIDRVVINKTGIVDIYFKSDFIFDTRK

SEQ ID NO: 10339 - protein, 516 aa, Unknown
  Description of Unknown: Integrase B10340 sequence
  cd00338,IPR011109,PF07508,IPR036162,IPR006119, G3DSA:3.40.50.1390,PTHR30461,PTHR30461:SF3,PF00239,SM00857, SSF53041
MPRQPPAGDLIPAIGYVRVSTWNEEKISDEIQKSVIEDAARRAGRRIVGWIPDLDATGRNFKRRIMEAIEAVENRSMHGAREIWVWKFSRFGRSRHGVIINLARVEHVGGQLISATEQIDATTATGRFTRGMLFEIAAFESERAGELWCETHEWRRKNGLPATGGHRFGYLWTPRLDPFGKPQEESYDPVEEPGDALDEAYVRYVEGEGYYPLAVDLNGIGLFNPHKRCKGPWSAQSLQQYMDSGFGAGMLHVHQRDIACGNRQQCPEKKEHYHYIPGAHPPVVKDEETWLAYLERRAQRKKLPPRSRIPTYPLSNRMRCDLCSGSSIATMANGVLGGAWRCARHVSAAKSCPGCYVTTKRVMADLWIWLDGVEAQVDAIACGEWAERAPVKRPDKSAARARFSQQVQAAAMALDRASDSLARGVMPEESYLRLKDKLTSEQLQAEQKLLALNTGDVEEPGRPTEAHAAVVRQLRREWDVMSVQGKHDLLGKVIREVRISPAGVEPRCNFVPVWAN

SEQ ID NO: 10340 - protein, 516 aa, Unknown
  Description of Unknown: Integrase B10341 sequence
  cd00338,PF13408,IPR011109,IPR038109,PF07508,Coil,PS51736,G3DSA:3 .40.50.1390,IPR036162,IPR006119,PTHR30461,PTHR30461:SF3,PS51737, IPR025827,PF00239,SM00857,G3DSA:1.10.10.2600,SSF53041
MARKKKVSPGNRLVAYYRYSGGSQQTEQSIEGQRRDCEAYARQHGLTIVHEYIDRHISGRGVESRLAFQQMIADSSKHLFDLVICWKTDRFARNRYDSAVYKKKLRDNGVRILYAAESSVEGPEGIILEGLMESLAEYYSAELAQKMRRGMRESALKGRAINPSRPLGLTTDEHKRFIIDEKNAPTIRFIFEHYAAGESSASIVEQLNAAGLRTSKGNAFNKCSIPRIIQNEAYHGVYICKAYDVRIDGAIPAIIDDDLWKRAQKMLTLNKQHRAPHSSHADYLLSGKLFCGCCHSLMRGISGHNCRNDVYYYYACGNKADGGTCKKKNIQKDVAENLVVNAICENVLRPDTLEDLADAIAAAQQADVNQPDPERAMLEQGLADVRRKINNIIESIENGTASSRLSARLADLEQQESTLNYQLESLKEIHPPVLDRERILFLLEQFLISPNERTEDYNRRIIDTFVNRIEITDTEMLIYFNLSEASASEKQKNSQPNSCSTGNHLVRVARIELTAS

SEQ ID NO: 10341 - protein, 516 aa, Unknown
  Description of Unknown: Integrase B10342 sequence
  cd00338,PF13408,IPR011109,IPR038109,PF07508, Coil,PS51736,IPR036162,PTHR30461,IPR006119, G3DSA:3.40.50.1390,PTHR30461:SF3,IPR025827,PS51737,PF00239, SM00857,G3DSA:1.10.10.2600,SSF53041
MNAVIYARYSSSNQREESIEGQLRECHEFAQKNDIIIVGEYCDHAISGKTDKRPQFQKMIKDSEKGKFDTLLLYTIDRFARNRYDSAMYKAKLKRNGVKVIYVKQPISAEPEGIILESVLEGYAEYYSENLSRAVKRGLKENALHGIVVSSRPPLGYYTDETRHYAIDPVGAKIVKEIFELYADGRSIPEIVAHCNAHGYKTSRGKPFVKNSIPTILRNDKYIGMYRYMDVEIAGGMPQIIDKDLWDTVQSKLRHNFSARAKNKAKEDFLLTPKLFCGHCGSLMTGETGTSHTGKIHRYYKCNCRKYKHGCTKQNEKQQPIEDFVVRHTVETVLTDENIDRIADKAMEIIEKEYADSSYLSGLKANLSETEKRINNLMKAIEQGILTETTKSRLEELENDKRTLVSEIAGEELKKPLLTKDHIVYWLQSFRNGDIDNEDYRRRIVDTLVNSVYVYDTPDGGRKVTLTFNVSGQNTSTVEGSSIEGFTALNQSNLNPVEFFFTDHVFGFVLTVERIE

SEQ ID NO: 10342 - protein, 516 aa, Unknown
  Description of Unknown: Integrase B10343 sequence
  cd00338,PF13408,IPR011109,IPR038109,PF07508, Coil,PS51736,IPR036162,PTHR30461,IPR006119, G3DSA:3.40.50.1390,IPR025827,PS51737,PF00239,SM00857, G3DSA:1.10.10.2600,SSF53041
MNVVIYARFSSSAQRDESIDGQVRVCTDFARRNDMTVVEVYADRALSGRSDARPEFQRMIRDSARGRFDAVLCYAVDRFARNRYDAATYKARLKANGVRVYYATSPLNDSPESILLESVMEGLAEYYSENLSRSIKRGLMESALEGKSLGGVVPLGLRLNSEHRFEIEPAEAEVVLEIFKLYAGGSSALEICNLLNARAIRTRRGGQWNKNSLRSILTNTRYIGRYTYGDVVLEHAIPQIIPNDLFDQVQAQLKIVHAARAHKKGKANPFLLTAKCVCGCCGEMMIGESGTGRGGATYYYYKCGGRKRGSGCKKANEHKDALERLIVEEVRARILRDEVIDRIATEAAELMRREAEDNTQLTSMKAELSQVGSGIRNLLRAIEMGILDDDTRARMEELQQRKAELMAQIAREEIRKPVLTADQIAFWLSRFKTGDVDSPAYRAQVIDTLVNTVIINDSPDGGREYIITCNLSENNSFKISVSDIDADGVPLREYPNTVLLISRLCFGLILHYKTPA

SEQ ID NO: 10343 - protein, 516 aa, Unknown
  Description of Unknown: Integrase B10344 sequence
  cd00338,PF13408,IPR011109,IPR038109,PF07508, Coil,PS51736,IPR036162,IPR006119,PTHR30461, G3DSA:3.40.50.1390,PTHR30461:SF3,IPR025827,PS51737,PF00239, SM00857,G3DSA:1.10.10.2600,SSF53041
MNAVIYARFSSTAQQEQSIDGQVRHCTEFAEKNGYKIINTYIDKALSGRNDNRPAFQQMISDSSKGTFQYVLVWKFDRFSRDRFDSAIYKSKLRKNGVRVISITENVGDGIDGNLIEAIYEAMAENYSRQLSQNVVRGMRESALQCKSVGGSVPFGYKIEDKRYVIDEEAAKIVRYIFEAYASGKRKCEIAEELNSKGFRNSKGEPFKMQSLSKMFTNRKYIGVYKYGDIVIENGFPAIISKELFEKCADRAVKNKHTSGHANARVTYHLAGKAYCGHCGAPLTGDAGTGRSNMYYYYSCSGKKRHLEGSSKCPKKRESKDILEAYVAEQAIKYFTDREKIFEIAEKVVKAFDRSKDEKEKISEVEKEIRTIDTEINNLVNSLLNITAPALIRKVNERSEQLEKQRAELSEKLVMLKLNSKVSSITADEFAEWILTFCDGDLDDKSFVAKILDKLVHKVFIYDDKLLIYYNIKDSEEVTYSKMLLDISGSTIDASGRPKNAAPLFSETASFVIYKL

SEQ ID NO: 10344 - protein, 516 aa, Unknown
  Description of Unknown: Integrase B10345 sequence
  cd00338,PF13408,IPR011109,IPR038109,PF07508, Coil,PS51736,G3DSA:3.40.50.1390,IPR006119,PTHR30461, IPR036162,PTHR30461:SF3,PS51737,IPR025827,PF00239, SM00857,G3DSA:1.10.10.2600,SSF53041
MTGVIYARYSEGPHQTDQSIEGQVADCKAYAARNGIEILGVYADRHISGKSAATRPEFQRLIEDAQAGRFECVVVWKIDRFGRNREDIALYKLKLKRAGVKLFYAAESVPEGPEGIILESVLEGIAEYYSEDLRQKVIRGRRETLKKGILAGEVLPIGYKRDENRHVIIDEEKAPLVREVFRKYAAGDGLKSCVAYLNDHHVTGARGAKMSTGVVGRMLRNRRYLGIFDECGVELRFDPIIDPQTFEEAQKMHKTSRNRNINASGKAKEAYLLSCRCFCGYCRTMIVADCGTGKMGKVYRYYACPKHKRGGDPCELKPIPRDVLEDLVVSATVEDMLTDETIKALTDEVMDIQTEGAKESPAVPLRAALDGNKKKQANLVRAIELGNAPDILVSRLQELTDEAAELEQKIRQAEYERPTIPRDVIEGWLRSFKNGDKKDPEFRKRLIETFVARVDVYNDKAVIYYNITEKKPKNKAASGVRIRPVSWSSRNGIRTPGKPFVYGKYYILIVPFSHAA

SEQ ID NO: 10345 - protein, 516 aa, Unknown
  Description of Unknown: Integrase B10346 sequence
  cd00338,PF13408,IPR011109,IPR038109,PF07508, Coil,PS51736,G3DSA:3.40.50.1390,IPR006119,IPR036162, PTHR30461,PTHR30461:SF3,IPR025827,PS51737,PF00239, SM00857,G3DSA:1.10.10.2600,SSF53041
MNAVIYARYSSSNQREESIEGQLRECHEFAQKNDIIIVGEYCDHAISGKTDKRPQFQKMIKDSEKGKFDTLLLYTIDRFARNRYDSAMYKAKLKRNGVKVIYVKQPISAEPEGIILESVLEGYAEYYSENLSRAVKRGLKENALHGIVVSSRPPLGYYTDETRHYAIDPVGAKIVKEIFELYADGRSIPEIVAHCNAHGYKTSRGKPFVKNSIPTILRNDKYIGMYRYMDVEIAGGMPQIIDKDLWDTVQSKLRHNFSARAKNKAKEDFLLTPKLFCGHCGSLMTGETGTSHTGKIHRYYKCNCRKYKHGCTKQNEKQQPIEDFVVRHTVETVLTDENIDRIADKAMEIIEKEYADSSYLSGLKASLSETEKRINNLMKAIEQGILTETTKSRLEELENDKRTLMSEIAGEELKKPLLTKDHIVYWLQSFRNGDIDNEDYRRRIVDTLVNSVYVYDTPDGGRKVTLTFNVSGQNTSTVEGSSIEGFTALNQSNLNPVEFFFTDHVFGFVLTVERIE

SEQ ID NO: 10346 - protein, 515 aa, Unknown
  Description of Unknown: Integrase B10347 sequence
  cd00338,IPR011109,IPR038109,PF07508,IPR036162, IPR006119,PTHR30461,G3DSA:3.40.50.1390,PS51737,PF00239, SM00857,G3DSA:1.10.10.2600,SSF53041
MTTKCVILARISSEKQDKEYSLPAQVSRLSDYATRRQMTVLREFVLVESSTTGDRKKFLECLNYCVANHAALLIDTIDRAQRSFMEIPLLEKYRRAGELEIHFCRENIVINAESSGTEIIMWHQGVLMAESYSLHFKENVKRSISVKVARGEYPGRGPLGYKNIRTADNRSDIVPDNNADLVCQLFAKYASGDVSLSGLVDYAYNLGLRTETGGKLAKSHIHKIISNPFYYGVARWGKYTFPHRYAPLIEKSVWDKCNALLSGKNQHRATRWGSKDYLYRGLVRDFYSRRIVTTERKKNRYNYLMTWDESGRHVAVNEDVVTAQIYKILKMIQVPRDVIDDVREYLKSAKEIESEYAARAIAELQNDLNIAVKRQSALVNMYLDGKIADDMYSVKDAELKTQIADIQSKLNANVSADSGVNDTIVQIFSAASCAADLFIESSEVTPKRDILKSIFRTLELKDTTLCYDLNFPFNLFITKGQRTIWRALADDFRTLHYEKLRNLAANWNWALPMAA

SEQ ID NO: 10347 - protein, 515 aa, Unknown
  Description of Unknown: Integrase B10348 sequence
  cd00338,IPR011109,IPR038109,PF07508, Coil,PS51736,G3DSA:3.40.50.1390,PTHR30461, IPR036162,IPR006119,mobidb-lite,PTHR30461:SF3, PS51737,PF00239,SM00857,G3DSA:1.10.10.2600,SSF53041
MYRPKGLDVDIYLRKSRKDIEAEKSAADDSSDRDTLSKHRNQLFAIAKKEEHNIINIHEEVVSGETISERPEIQNLLRRVESGVVEAVLIMDLDRLGRGDMLDQGLLDRAFRYSGTKLITPTEYYDPEDDSWELVFGVKSLVARQELKAITRRMQGGRRNSVTEGKSVSKKPPYGYMRDKNLRLYPDPDTAWVVKKMFEMMKNGHGRNAIADELDKLGIKPSFKDTWSPSTITAIIKNEVYLGHMIWGKMKHTKKHGKYIRTKMPKESWIIKENAHEAIVSQELWDAANRAHSGRFRPSTIETKKLSNPLAGILKCEVCGYTMLFQPRKDRPNPVIRCTQSSCKGIQKGSLLPLVEERILESLKRYIEDFFIEGDGPEKSDAKSVIPLKEKAIEKMQKELDELSAQKNNMHDLLERGVYSIDTFMARQQNVTERMNVLQDNIQDLQRDISRERMQEKNIHEFIPKLKSVLEAYRQTDDIEKKNQLLKSILEKVTYLRKQDWKQKDQFKIQLFPKI

SEQ ID NO: 10348 - protein, 515 aa, Unknown; identical to SEQ ID NO: 10246
  Description of Unknown: Integrase B10349 sequence
  cd00338,PF13408,IPR011109,IPR038109,PF07508, Coil,PS51736,G3DSA:3.40.50.1390,PTHR30461,IPR036162, IPR006119,IPR025827,PS51737,PF00239,SM00857, G3DSA:1.10.10.2600,SSF53041

SEQ ID NO: 10349 - protein, 515 aa, Unknown
  Description of Unknown: Integrase B10350 sequence
  cd00338,PF13408,IPR011109,IPR038109,PF07508, Coil,PS51736,G3DSA:3.40.50.1390,IPR006119,IPR036162, PTHR30461,PTHR30461:SF3,IPR025827,PS51737,PF00239, SM00857,G3DSA:1.10.10.2600,SSF53041
MNSLKAVIYARYSSDKQRDESIEGQIRECRAFAEREGIIITNIYTDKALSARTDNRPEFLQMIEDSKKHLFDYVLVYQLDRFSRSREDSAVYKAILKKNGVKVVSAKENITNDPAGIILESVLEGMAEYYSAELSQKVRRGMTDNALQGKVNGTPTPLGYDKTEDKHLIINEREARIVRSIFDLYIKGHSIPSICSHLDSKGYLSKHGSKFSYAVVRRILSNEKYIGTMRWNDIVIENAIPSIISKEIFDKVQHEKGHRIKKKGARSEFYNLCGKLYCGKCGGHYTGNTATSHTGAKHHYYSCTNRRKHKTCTGKNIERDILEDIIINKTIHILNEPNTIAQLAKMTTEASSTMLGDAELELKRIDARIKELQSELENYMKAIAKGFISDTLQKQIENAEAELQDHMTRKTNHEIKAHPIKITAEHIEFFLYKMAKENPTTNTGRARILDTFIHSATIYDDRVEITFNYNNDLPQFKGQVIDGSFSVDVVVQMTQKANLFQFLNHRYPLRLIIPL

SEQ ID NO: 10350 - protein, 515 aa, Unknown
  Description of Unknown: Integrase B10351 sequence
  cd00338,PF13408,IPR011109,IPR038109,PF07508, Coil,PS51736,IPR036162,G3DSA:3.40.50.1390,PTHR30461, IPR006119,IPR025827,PS51737,PF00239,SM00857, G3DSA:1.10.10.2600,SSF53041
MKHNPSCALRTAVAYARYSSAGQRDVSIEQQLRDIRAYAEREGYAIVHEYADHARSGFRNVAARSEFQAMIAAAASGSFDTILCWKVDRFGRSREDSAIYKGQLSRLGVSVVYVMEPIPTGAAGVLTEGMLEAIAEWYSRNLSENVRRGMSDNAAKCLYNGVTVYGYDGIRNERYRINEEQAAVVRQIYSLYIDGYSIAEIVRLLNDAGQRTESGKLFCINKIHNILKQERYTGVYLFGDYRIPDGMPVIIDPDTWQRAQRMKSKTSRHHQKNPVDYLLTGKAFCGCCGKPLVGDSGTGRNGTHYYYTCQSRKRRAGCAKKSVRKDDLEDFVINFLLDHVLSGPEMERIADAIMEYQRKESDSSPLRAMERELQETERKISNTNRAIAEGIFTGSTVAMLQQLEKTAADLRLSIESRKYAEGQLLDRDRVFFFLTAFSTMDRTDPHDRRTLVHVFLNSVYVYDDHCRILVNTSDDDSIIPFADLPPEPSGSDIVCSVLPPATHPNHVLIQYVVRM

SEQ ID NO: 10351 - protein, 515 aa, Unknown
  Description of Unknown: Integrase B10352 sequence
  cd00338,PF13408,IPR011109,IPR038109,PF07508, Coil,PS51736,G3DSA:3.40.50.1390,IPR006119,IPR036162, PTHR30461,PTHR30461:SF3,PS51737,IPR025827,PF00239, SM00857,G3DSA:1.10.10.2600,SSF53041
VACYCRYSSDNQREESIHAQRRAIEDFCEKNNMTLVNVYIDEALSATNDDREQFLKMIEDSASRRFGAVIVHKLDRFARNRYDSAFYKKRLKDNGVKLISVLEPLDDSPESIILESVLEGMAEYYSKNLSREVRKGMGENAQNAVHNGGIPALGYDIDENKKHVLNEREAESIRFIFEKFLEGWSYRRIAEELNAMGYRSKLGRPFKAGSITDLLINEKYTGVYVFNKRAKKGTNRIYKDDSEIVRIDGAVPQIVDKETFQKVQEKLKANRRGPRIKQDRVYLLTGSIYCGLCGKTYNGNSYVYGRGNVKNYTYACSTHQKSRHDCTGKTVRKDLIEAFVLDQIKEHVLNDTAIEKIAAAIKENLIKKYKSLSANLKTYEDNKISIEARLNKLVDLYLDGSLDKSLYNSKSSELKTQLADIDLKIKDASRINLNMYSLDKISDFIRSYDLDNADNETKVKLIQTFVDRVTVYPDKITVDIKIDMDRGLGGGGEPLHRIPLSIPTEEFYNKKAAWA

SEQ ID NO: 10352 - protein, 515 aa, Unknown
  Description of Unknown: Integrase B10353 sequence
  cd00338,PF13408,IPR011109,IPR038109,PF07508, Coil,PS51736,G3DSA:3.40.50.1390,IPR006119,PTHR30461, IPR036162,PTHR30461:SF3,IPR025827,PS51737,PF00239, SM00857,G3DSA:1.10.10.2600,SSF53041
MNSLKAVIYARYSSDKQRDESIEGQIRECRAFAEREGIIITNIYTDKALSARTDNRPEFLQMIEDSKKHLFDYVLVYQLDRFSRSREDSAVYKAILKKNGVKVVSAKENITNDPAGIILESVLEGMAEYYSAELSQKVRRGMTDNALQGKVNGTPTPLGYDKTEDKHLIINEREARIVRTIFDLYIKGHSIPSICSHLDSKGYLSKHGSKFSYAVVRRILSNEKYIGTMRWNDIVIENAIPSIISKEIFDKVQREKGHRIKKKGARSEFYNLCGKLYCGKCGGHYTGNTATSHTGAKHHYYSCTNRRKHKTCTGKNIKRDILEDIIINKTIHILNEPNTIAQLAKMTTEASSTMLGDAELELKRIDARIKELQSELENYMKAIAKGFISDTLQAQIENAEAELQDHMTRKTNHEIKAHPIKLTAEHIEFFLYKMAKENPTTNTGRARILDTFIHSATIYDDRVEITFNYNNDLPQFKGQVIDGSFSVDVVVQMTQKANLFQYVNHRYPLRLIMPI

SEQ ID NO: 10353 - protein, 515 aa, Unknown
  Description of Unknown: Integrase B10354 sequence
  cd00338,PF13408,IPR011109,IPR038109,PF07508, Coil,PS51736,IPR036162,PTHR30461,IPR006119, G3DSA:3.40.50.1390,IPR025827,PS51737,PF00239,SM00857, G3DSA:1.10.10.2600,SSF53041
MPRAKKQASCPPRTAVAYARYSSAGQRDVSIEQQLRDIRLFAAREGYNIVHEYADHARSGYRHTSARTAFQAMLSAADRGTFDTLIVWKVDRFGRNREESATFKGRLRMRGVKVVYAMEPIPEGAAGVMLEGMLETTAEWYSVNLSENVKRGLYDNASKCMYNGAHIYGYCCGPDHKYAIVPEEAAVVRNIFKMYTDGMTITQISDHLNASGLKTNRGKPFCYSRVFNILHQERYLGVYIFADVRIPDGMPQIIDRKTWEDARAMAKKLMRHHDTRPTDFLLTGKAFCGHCGKPMVGDSGTSKTGTSHYYYSCQSKKRRAGCDKCSVRKDYLEDKVIDFLFDHCLTGEMMEEIANAVVKAQKEALLSSPVPAMEAELKEALKRQDNINNAIAEGIWNSSTKEKLDELAVTINDLKESIAVLKFSQGELQDHDSVIQYLKRLAAGDRQDPEHRRHIINTFLNSVYVFDDHLKIAINAVEGNSQIPIDLSQSSDNDSDGLPTRFHPNSQTMVFTVLL

SEQ ID NO: 10354 - protein, 515 aa, Unknown
  Description of Unknown: Integrase B10355 sequence
  cd00338,PF13408,IPR011109,IPR038109,PF07508, Coil,PS51736,G3DSA:3.40.50.1390,PTHR30461,IPR006119, IPR036162,PTHR30461:SF3,PS51737,IPR025827,PF00239, SM00857,G3DSA:1.10.10.2600,SSF53041
MDNTHLNVLSTDAYIIYLRKSRADNPSESVEEVLEKHEAMLQELAERDLGGRIPDDCIFREVVSGETIEERPEMSKVLSKIENPDVRAVLVVDPQRLSRGDLMDCGQIVNAFRYTKTEIITMNMTYDLTNKMQRKFFEQELVRGNDFLEYTKEILLRGRIASVKRGSYIGNTPPFGYDKIKDEIGPTLIPNEQAEAVKMAFDLYVNEGRTFYEIGRYLDSIGVKPMKTKRWDKTAIRWMLQNHHYAGFVRFGFKHTVREYVDGQIEKRRSRPGDPDEMIIIKGRHTALVSEELFNAAQEKMDNNPRAKRDAPLQNPLAGLFYCAKCGKAMIRHPYKRAQARYSCKDQTFCESRSIAVAEIVDAVRFALLNEKLPELEAKLKNNDGNAAAIQKKQIEKMNAELGELLQQENKQYDLLEKGIYSEDVFTKRNKKLHAEIEELKSRIFTAKQTMPVEIDYKDKIIKLQTAIEALTDESLSALEKNKLLKTIIKRIEYDYIRHEGKGKIVYELNIFLLL

SEQ ID NO: 10355 - protein, 515 aa, Unknown
  Description of Unknown: Integrase B10356 sequence
  cd00338,PF13408,IPR011109,IPR038109,PF07508, Coil,PS51736,IPR036162,IPR006119,G3DSA:3.40.50.1390, PTHR30461,PTHR30461:SF3,PS51737,IPR025827,PF00239, SM00857,G3DSA:1.10.10.2600,SSF53041
MRAFIYCRFSSHKQQELSIEGQRDICQEYADKHNITVVGQYADRARSGKTENRADFRRLMRDAATGVVDCVLVWRYDRFFRNRAESALYRKQLEAAGVHLISVTEYIPEGSAGIITQGMIETVAEYFSAKLSEDVSRGMNKAAQHCQIVGRAPLGYRAGPNKRWQIDPVGAELVRRIFEWYASGKAMGQLAAQLNEEGHRTTNGTLYTRSSFNSILRNEKYIGVYSYGGKVRIEGGCPRIIEDELFFTVQRRLSANRHRPGAYKAEVPYLLSGKLFCGLCGAPMTGTAGTSHTGARHYYYICNNRRAKTCKKKNVRLDLIEEAVLQSALDILTDENIAYISTEVERRCAENSDSAALLASLNAQLEEVQRRLKNIGNAIAQGIITETTKELLEEAEADRTALRQQIDRAKVQAALVVKAEAVACWLDGFRRGDRTDPDFRRQVFGALVHSVFVYDDYLKIIFNVDSAGAAVVPYEAAQAATSSEAPPGSYLDTLGAPKKAAMLIAAFSFICLSII

SEQ ID NO: 10356 - protein, 515 aa, Unknown
  Description of Unknown: Integrase B10357 sequence
  IPR038109,IPR006119,PS51737,PF00239,G3DSA:3.40.50.1390, PTHR30461,IPR025827,SM00857,G3DSA:1.10.10.2600,SSF53041, IPR011109,PF07508,PS51736,mobidb-lite,cd00338, PF13408,Coil,IPR036162,PTHR30461:SF3
MQQALNAVIYARYSSHSQQEQSIEGQLRDCYAFAEREGLHVVGEYIDRAITGRTDERPDFQRMIDDASKKQFQRVIVWKLDRFARNRYDSAHYKAKLKKYGVKVISATENISDEPEGIILEGLLESMAEYYSANLSKHVRRGQRESIINGTYLGGVPPIGYKVENKRLVIDERTAPTIRYMFEQYAKGVSKRQIIDELNARGIRNKKGKPLTLSSMQAALRNEKYIGIYRYNGQEVTGGCDALIDEATFRKVQERLDKVKHAPAAAKAKIDYLLQGKAFCGYCGTRMVGESGRGKMGSTYHYYACGKRKKEHTCKKKNEKKDFIEWYIVEQTVEYVLTPDRMDYIAAALVAQYEKDFGDNRITDYEKQLERINGEIRSLVDTLAVCPPSARQPIFDKMELLDVQKTDLEIDIAKLRVAARVRPSEEQIKAWLKQFCKGDLDDMEFRERIIDVFISSVYLYDDKVIIYYNIEGGKQVSYMEMIESTEEPPFADDPQGSSGVRISNDTPRHVAMRDA

SEQ ID NO: 10357 - protein, 515 aa, Unknown
  Description of Unknown: Integrase B10358 sequence
  cd00338,PF13408,IPR011109,IPR038109,PF07508, Coil,PS51736,IPR036162,PTHR30461,IPR006119, G3DSA:3.40.50.1390,PTHR30461:SF3,PS51737,IPR025827,PF00239, SM00857,G3DSA:1.10.10.2600,SSF53041
MEAKVIRAVAYARYSSDNQREESITAQLRAVKEYCQQKEYILTNVYTDEAKTATTDNRAGFQQMIADSGLDLFDVVIVHKLDRFARNRYDSASYKRKLRINKVRLESILERLDDSPESVILESMLEGIAEYYSKNLAREVRKGLSENARAGIHNGGRAPYGLKVNPITRKYEIDETQYKAVQMYFNGVVAGVPLAEIARRINAEGFRTYTGDKFKITSFDTWAYNRKYKGDYAWDVSTKKDAEGKRNGHTKKPIEEQTIIPGVIPAIIEPELWERVNSLMKKRQRIGGSMTAKEVYLLSGKVECGVCGSNYFGERYNSRGNHYAYYKCSGKCGNKGVDKYALEKLISEKLEEICFSEDGMNKIAEEVKRLYAERKKTVNSEIEPLKKEIKSLELKIDKWLDILGDGTPQKQVYMQKISEADDHKKLLELELAKMNVLANVQSVDEAILMKVLNAKKDQLFSANDEDRKQVFQEYVDKVIVNSIQDDVVNIELTVRCFNGGGELTLLKHLTFPYQK

SEQ ID NO: 10358 - protein, 515 aa, Unknown
  Description of Unknown: Integrase B10359 sequence
  cd00338,PF13408,IPR011109,IPR038109,PF07508, Coil,PS51736,IPR036162,IPR006119,PTHR30461, G3DSA:3.40.50.1390,IPR025827,PS51737,PF00239,SM00857, G3DSA:1.10.10.2600,SSF53041
MKAVIYARYSSHAQREESIEGQLRVCYDYALREGIQVLREYIDKAISGTTDDRPAFQRMIKDSASHSFDAVLLYSVDRFARDRYAAATYRHELKRNGVRIISVTQPLDDSPESILLEALLEGLAEYYSANLSRGIKRGMYENALKCQYTGGAYSLGYTVDPVTKHFVEDPVSANTVREIFSMYADGKTIMEIVRYCNQQGYRTSKGQPFSRNSLSKMLRNKRYVGYYIYKDIEIEGGMPAIVDPELFESVQRRLKMNHKARSRAKSDVDFILTGKLYCGHCGRPMVGTSGTSKSGEKYYYYSCRNHGQQCIKQNEKKDVIEDAIMDYITCQFLTDENIDKIADKIIEMLGSDSEKAIIAGIKNERKEVERKAHNIVDMIADGKGTDMLVENLRDLERRIDDLDMQLAKAEFEQNYITKDMIVFFFRQFQDGEADTIGLRRRLINALVQSIHIFDTNENQNDSKSSDRGLYGLGRKLVIAFNTTADVENPVTLECSDLTAMVERRGIESRRSACKP

SEQ ID NO: 10359 - protein, 515 aa, Unknown
  Description of Unknown: Integrase B10360 sequence
  cd00338,PF13408,IPR011109,IPR038109,PF07508, Coil,PS51736,G3DSA:3.40.50.1390,IPR006119,IPR036162, PTHR30461,PTHR30461:SF3,PS51737,IPR025827,PF00239, SM00857,G3DSA:1.10.10.2600,SSF53041
MNAVIYARYSSDSQREESIDDQIKECMSYADRTGLTVISTYTDKALTGKTDKRPGFLKMIDDSKKEIFKYVICYKTDRFCRSRKDAAKYKSILKNNGVNVVYAKMDIPKGPEGIILEGVMEALDEYYSANLSQNIKRGQLGNALKCKSNGVNVFGYKRDDNDMYVVDDREAEAVKKVFEFVCDSYPDTYIINWLNENGYRNTLGKKFTKTSINRIIRNRKYIGEYKFGDVIVKDGIPAIIDENTFTKANEMKNKRRSRRVINNEYLLTDILYCGECGSGMFGKSGTSRNKTKHYYYSCSNRIKHTCDMPYIQKDVIENAIINILNKLLFDDAVLSDLTDMIYEAINNKDHYLLDQLKSEYDEKSKQLENIVDAIADGAYTKSMIARMKELEKELESLETSISREKLNNKPIEKDFITFILHKFKTNELSSNEQKKRLINTFVSKAFIYKNGKLVLMFNYKKDGEIASYSEILEHISTKSPVLQISFGGEKNTQLEHSINISLINSCITVYTDIMH

SEQ ID NO: 10360 - protein, 515 aa, Unknown
  Description of Unknown: Integrase B10361 sequence
  cd00338,PF13408,IPR011109,IPR038109,PF07508, Coil,PS51736,G3DSA:3.40.50.1390,PTHR30461,IPR036162, IPR006119,PTHR30461:SF3,PS51737,IPR025827,PF00239, SM00857,G3DSA:1.10.10.2600,SSF53041
MTTAVIYARYSSSNQREESIAGQLRECRQYASKNGMKIIHEYTDSALTGTSDKRPAFQQMVKDSEKHAFTVVIVWKLDRFARNRYDSATYRNILKKNGVKVISAMENISDSPEGIILEGLMESLAEYYSANLSENIKRGLYDSALERKVLSNPVFGYQKGMDGRYELHPINAPAVKRIYTDFANGKPYAQIIDELNRDGFKTSQNRPFTRNSLRTILRSEKYIGVYRYRDIVDEHGIPPIVDRDLFDRVQKEIKRRSFTKVKKKNDTQENFMLTGKLYCGHCGEMMTGESARSKGGTYYHYYSCSGMKAPKKNGCRKKRVSKEKIEDEVIRIINTEILTDDFIDDMVPRVMKYQESDQAFATIRNLEEMKKQEQKKLDNIMKAIESGIWSDSVNSRLNELEHNMMRLEQRIQEEKLSMVQFTADDIKAFLYALKNAQKTDSDAQQYLINACINRIYLFDEDDGQKLVIHVNMSDQETEPITLQSVVRSMSDSLHLNVHTRTLTDGVVLLSIMFRP

SEQ ID NO: 10361 - protein, 515 aa, Unknown
  Description of Unknown: Integrase B10362 sequence
  cd00338,PF13408,IPR011109,IPR038109,PF07508, Coil,PS51736,G3DSA:3.40.50.1390,IPR006119,IPR036162, PTHR30461,PTHR30461:SF3,PS51737,IPR025827,PF00239, SM00857,G3DSA:1.10.10.2600,SSF53041
VIYARFSSHNQREASIEQQVEWCTDLAKRYSLTILDTYADKAVSGRTDNRPRFQKMMADAKTGKFDVVLAWKSNRMGRNMLEAMLNDSVLLEEGVRTIYVEEDFEDNAAGRFALRNMMNVNQFYSESMAEDVRRGMMDNAAKCMVNGRTPFGYKKGKDGKYEVVPDQAEIVREIFSRVIEGWPHVDIMADLNARGIKNRDGNIWQRTTFDKMLRNEQYIGVYKFSGVRTEGGIPPILDRETFEEVQLLLTTKKNPRGRRRNTQDYMLTGKLFCGQCGNPMVGICGTSRNGERHYYYLCQGKHNKTGCTKRNEKQEKIEQAVVNYIKKLIMDDATIDWLLAGLQEFKATLRAQSTITAMESELAETEKAIGNLMKAIEMGIITDTTKGRMMELEEQKRDLQQRIRIENKMLVELDPEDLRFVLVKYRDTNLNDRKYQRELINTLIKAVYVYDDHLTFVGNRGTNDTAEVEFDDISSIDVAGDSDVRTNDTKPHQVNTVRTTVRFREYGIVAVVPYN

SEQ ID NO: 10362 - protein, 515 aa, Unknown
  Description of Unknown: Integrase B10363 sequence
  cd00338,PF13408,IPR011109,IPR038109,PF07508, Coil,PS51736,IPR036162,IPR006119,PTHR30461, G3DSA:3.40.50.1390,PTHR30461:SF3,PS51737,IPR025827,PF00239, SM00857,G3DSA:1.10.10.2600,SSF53041
MKAVIYARYSSSNQREESIEGQLRECHEFAKNNDIVIVGEYCDHAISGKTDKRPQFQKMIKDSEKHKFDTLLLYTIDRFARNRYDSAMYKAKLKRNGVKIIYVKQPISQEPEGIILESVLEGYAEYYSENLSRAVKRGLKENALHGIVPASKPPLGYCVDETRHYAIDPVGAKIVREIFEMYNEGHSVPEIVAYCNSHGYKTSRGKNFVKNSIPNILRNDKYIGMYRYMDVEIPGGLPQIIDNDLWNSVQSKLRHNYTARAKNKAKDDYLLTTKLFCGHCGSLMTGETGTSHTGIVHHYYKCNCRKYKRGCNKANEKKKPLEDFVVKHTVETVLTDENIEKIAVKAMELIEKDFADTSYLSGLKIQYSDTEKKINNLMKAIEQGILTETTKSRLEELENDKRTLAGEIASEEMKKPTLTKEHIIYWLESFRQGDLNDEDYRRHIVDTLVNSIYLYDTPEKGRKIVFTFNVSGENTSVVEGSSIDGFSALNESNSNPVFFFIDHVFGFVLTVEKIG

SEQ ID NO: 10363 - protein, 515 aa, Unknown
  Description of Unknown: Integrase B10364 sequence
  cd00338,IPR011109,PF07508,Coil,PS51736, G3DSA:3.40.50.1390,IPR006119,IPR036162,PTHR30461,PF00239, SM00857,SSF53041
MDPKTLYLYSRKSRALGDPDDPALLDAHKEALLALARRRNTEVPAPNIRLEIGSGETISERPTFQQLLKEWEALPPDTGGAVLVTMIDRLSRGDHADQGRIQRALSRADIHVWTPGRIYDLRDVNEGFFFDVEALFARRELSLFKQRMLLAREKLTRDGRSPNLVAPFPYTVDRLAKQWVPHPDRFAIAQHWCREVERDSLQVIAQRWSVPYHVVWWTLRNPAIAGWPCKRSHMTADRKRWRESDPGNWEWPERQGSYPPVVSLEEWRRIQAIIDRRRIERSKRGGRENGWCREVLRFVGHEDRTPRLSVQNAGNARGPTRDRLATYEIVTPTGHRLYIARAQVHAAALDALQALFRRPEKIRRLADEYTAARVLEASQPPQEADRAETEKKLAMVRRKLVRIEDELLGSDDSERLLALSTLRDLLTAQAQALSRQLQAKPDLLPASHAMDQLLPMLEEFAPHLGDMLEVLVDEGDGEKLYILTTALLSRIWVDVVKLGEKARYRREVVAVEARW

SEQ ID NO: 10364 - protein, 515 aa, Unknown
  Description of Unknown: Integrase B10365 sequence
  cd00338,PF13408,IPR011109,IPR038109, PF07508,Coil,PS51736,G3DSA:3.40.50.1390, IPR006119,IPR036162,PTHR30461,PTHR30461:SF3, PS51737,IPR025827,PF00239,SM00857,G3DSA:1.10.10.2600,SSF53041
MNNLKAVIYARYSSDKQRDESIEGQIRECRAFAEREGIIITNIYTDKALSARTDNRPEFLQMIEDSKKHLFDYVLVYQLDRFSRSREDSAVYKAILKKNGVKVVSAKENITNDPAGIILESVLEGMAEYYSAELSQKVRRGMTDNALQGKVNGTPTPLGYDKTEDKHLIINEREARIVRTIFDLYIKGHSIPSICSHLDSKGYLSKHGSKFSYAVVRRILSNEKYIGTMRWNDIVIENAIPSIISKEIFDKVQHEKGHRIKKKGARSEFYNLCGKLYCGKCGGHYTGNTATSHTGAKHHYYSCTNRRKHKTCTGKNIKRDILEDIIINKTIHILNEPNTIAQLAKMTTEASSTMLGDAELELKRIDARIKELQSELENYMKAIAKGFISDTLQAQIEKAEAELQDHMTRKTNHEIKAQPIKLTAEHIEFFLYKMAKENPTTNTGRARILDTFIHSATIYDDRVEITFNYNNDLPQFKGQVIDGSFSVDVVVQMTQKANLFQFLNHRYPLRLIMPL

SEQ ID NO: 10365 - protein, 515 aa, Unknown
  Description of Unknown: Integrase B10366 sequence
  cd00338,PF13408,IPR011109,IPR038109,Coil, G3DSA:3.40.50.1390,PTHR30461,IPR006119,IPR036162,PTHR30461:SF3, IPR025827,PS51737,PF00239,SM00857,G3DSA:1.10.10.2600, SSF53041
MRPSSAFPPGASVVAYLRDSGHEDQELSVDQQEHAIRSWCADHGLILTRVFTDAAAPGSSTIGRAEFRAMISHFHAANCADRGVIIWKFNRFARDIDDAQFFKADLRRRGYIVHSLHDSVPDGLDGRFFEAAIDWMNARYLEDLSADIKRGLHHLVDQYGGMPGNPPKGLKRQIFELGRHRDGRVRQAARWVPDTDMLETIRLAWRMRAGGFGYGSIHQATKLYTTRQSYANFFRNRIYIGELEYGGRLITGYCEPIIDRDTWEVVQTVMDANHSSYLHLRQNHPRRARSNFLLSGLVQCAICKTQMYGNVVMPRGQRYGYYDCANRRNGACPDAKPIPQVVLEDAVIDNLVNHILQTDNLTQLLKTYRQDTDDLRRSTQQQIDALNRQLGKVRRQLGNLADLLAEDGLRSRALMNKVRTLEAKESELVLQIGELAVPVQPVELKPIDEIMPTVEEIKTRLLTPERNADTKNILAGLIDHIEVRREGKNQLVGVIYYYLPPAGKNIFMPKCQTPG

SEQ ID NO: 10366 - protein, 515 aa, Unknown
  Description of Unknown: Integrase B10367 sequence
  cd00338,PF13408,IPR011109,IPR038109,PF07508, Coil,IPR036162,IPR006119,G3DSA:3.40.50.1390,PTHR30461, PS51737,IPR025827,PF00239,SM00857,G3DSA:1.10.10.2600, SSF53041
MKKIKAPSCAPRTAVAYARYSSAGQRDVSIEQQLADIRSFAKREGYTLVHEYADHARSGFKNSAARTAFQSMMAAAESGSFDTVISWKVDRFGRNREESALFKGRLRRVGVKVLYAMEPIPEGSAGVLLEGMLEATAEWYSRQLSENVTRGMTDNAHRCLYNGTRIIGYTRGPDGRYALDPDGAAVVRFVFKRYIEGFSAARICRELNATGARTSRGCAWQPESLLRVISNERYTGVYIWGDIRVPDGMPAIIDRNTFEKAQNMKRKTARHVEQGAVDYLLTGKAFCGHCGAAMIGDSGTSKNGARHFYYTCQSRKARKGCSKKSLQKDYLEDRVISFVLDNVLSDERIEATADTVIRMQQEELKTSPLAAMEAERKEVLKQIENINNAIAAGVWSNSTVDKLRELEASAENLRISCDTLRFSQSQLMNRNQVLFFLHRFTQGDRSDPLFRRHIIDTFINAVYVFDDELKIVTNNCEGNQRVPLEALPDCSDYDNSGVPIVIHPNFRVTIYHLAI

SEQ ID NO: 10367 - protein, 514 aa, Unknown
  Description of Unknown: Integrase B10368 sequence
  cd00338,PF13408,IPR011109,IPR038109,PF07508, Coil,PS51736,IPR036162,PTHR30461,IPR006119, G3DSA:3.40.50.1390,PTHR30461:SF3,IPR025827,PS51737,PF00239, SM00857,G3DSA:1.10.10.2600,SSF53041
MKAVIYARYSSSNQREESIEGQLRECHDFANKNNIVIIGEYCDRAISGKTDKRPEFQKMIKDSEKHKFDTLLLYTIDRFARNRYDSAMYKAKLKKNGVQIIYVKQPISQEPEGIILESVLEGYAEYYSENLSRAVKRGLKENALHGKAAGSVPLGYAKGEDKRYIIDPVGAKIVKEIYELYAEGHSIPEIVSYCNAHGYKTARGKAFVKNSLRTILTSDKYIGVYRYMDVEIEDGIPAIIDKDLWNTVQSKIKHNYSARAKNKAQEDYLLTPKLFCGHCGSLMTGETGTSHTGKIHRYYKCNCRKYKHGCTKENEKKEPLEDLVVKTTVEKVLTDENIDLIATKAMELIEKDFADTSYLSGLQDELKETDKRINNLMEAIEQGIITETTKSRLEELENDRKKLTEEIGIEELKKPLLSKERIAFWLYSFKNGSIDDENYKRTIVDTLVNSIYVYDTQDGGRKVVFTFNISGNNTTTVEGSSIAGLTALKGSNLNPQFFFVGHIFGFVLVVSRIG

SEQ ID NO: 10368 - protein, 514 aa, Unknown
  Description of Unknown: Integrase B10369 sequence
  cd00338,IPR011109,IPR038109,PF07508,Coil, PS51736,G3DSA:3.40.50.1390,IPR006119,IPR036162,PTHR30461, PTHR30461:SF3,PS51737,PF00239,SM00857,G3DSA:1.10.10.2600, SSF53041
MDTTTNAVIYARFSSHSQQEQSIDGQLRYCRDYAAQHGYTIIEEYIDRAITGTSDQRPDFQRMIRDAAGRGFQYILVWKLDRFSRNRYDSAIYKRQLAKHGVRVLSVTENVGAGDETLLLEAILEAMAETYSRQLSQNVKRGMAESARKCQSNGGRGILGYKVDANKQFVIDPDAAAIVQRIYSMYAAGSSKAEIVETLNAAGLRNNLGKPFTFNGITKTLQNIRYTGVYKYGDIEVPGGMPQIIPQELWDACQARQQAKPPRIREKAEYLLLGKVYCGYCGKALIGTSGHGKSGNVWRYYAHRSGTKDCHKKPEKKAWLEWYVTDRACRYVLNPDNTEYIAQRVCAAWQAENGGNADAMQGRIKAIDRELDRIAISYTTAVPAIQAALNARASDLQTERNQLQAEYGRMQARRPLVLDDVKQYLQQLCVGDPSDPAVQKQVIDTFINCVYVWDDKIVVYFNVSDGGQIEYAKAKEHAAGVRAECTSAHHNAVGTNAYIVFVGGYIGIVCPREL

SEQ ID NO: 10369 - protein, 514 aa, Unknown
  Description of Unknown: Integrase B10370 sequence
  cd00338,PF13408,IPR011109,IPR038109,PF07508, Coil,G3DSA:3.40.50.1390,IPR006119,IPR036162,PTHR30461, IPR025827,PS51737,PF00239,SM00857,G3DSA:1.10.10.2600, SSF53041
VGVFGLLRGLFCVSQSVVQYVYADTLCGMTIHAVVGARVSHVQGEEKTSHISQRGKGQAYAESQGWEVVGSFEDLDVSAIKLSPWERPDLKDWLTDRSDEWDALIFAKTDRVFRSANDCVKLAEWCKENRKILVLVDDGIKLDYYNPEDAKDAFAGAMSKVFLILASVFAEIEGQRFVQRARDRVSFLRDTDRWGYGTPPYGFQIAPHPSGKGKTLVHDLEAQKVIQEAAKRFLAGSSLTRIAKQFNEEGIPTQRGSRWVTSTVRRLLSHPGMQGLKTYKGKVVLDSEGEPIRVGPPSFDDTTWHRLQQELAQRGLEPRKRRHTTNPLLGVAKCAFCGGNLAQRTHVSKGREYRYYACGRAPQGCPGVSVSAVDAEELVEQEFLRTHRHRKVRDRVWQDGSDHSVELEQAKRTIESLREDRAMGLFTTPEDELMFRQQMKALVAKRDSLEEMPVKKAGWVEVVTDKTYGEVWPTAMVEERRKMLQDAGVTVTVTSPRVLHIHVESLLGVSSQTG

SEQ ID NO: 10370 - protein, 514 aa, Unknown
  Description of Unknown: Integrase B10371 sequence
  cd00338,IPR011109,IPR038109,PF07508,Coil, PS51736,IPR036162,IPR006119,G3DSA:3.40.50.1390,PTHR30461, PTHR30461:SF3,PS51737,PF00239,SM00857,G3DSA:1.10.10.2600, SSF53041
MAPVNKKYAMYLRKSRADLELEAMGEGETLARHQHMLENLAAKHEIHPDQITVYREVVSGDSIDERPEMQRLLADVYANTYDGVLVVEVERLARGNTKDQGEVADAFQASSTNIITPAKVYDPNNEFDQEYFEFGLFMSRREYKTIKRRLEAGKKASVMEGNYLLPQRVFGYDIVRRSKKERTLVIREDESKIVQMIFDWHTEEKRATGWMARKLTLMGIPTIKGKPEWNRGTIRDMLANPTYIGKVWWGKRRTIKEFNAELGKLVKVTKEDGIPEVFEGKHKGIISEAQYKKAQYVTQTMKNPSAKTSTELVNPLAGMIECCDCGRKMIATRFKDGRKTRMSHARDTICQKKSLPLDEVLDAFVDALKVTISDFEMKMEADDNKAERAKHQAVLDAMESELAKMERKRKKLFLDYEDEVYSRDEFIERKQHYNQAIDEIKKQIQEAQSAVPEPVDYSEQIVNLHAMIECVKNPDLSAKKKNDFLRQFIDRITYDSIDYGQRKGGKAVLEVFLK

SEQ ID NO: 10371 - protein, 514 aa, Unknown
  Description of Unknown: Integrase B10372 sequence
  cd00338,IPR011109,IPR038109,PF07508,PS51736, IPR036162,IPR006119,PTHR30461,G3DSA:3.40.50.1390,PTHR30461:SF3, PS51737,PF00239,SM00857,G3DSA:1.10.10.2600,SSF53041
MSDVENSQLIRAAAYVRMSTEHQQYSTNNQMDVILEYAARRGMEIVRKYSDEGKSGLNIQGRDSLGLMISDVQGKTANFTCILVYDVSRWGRFQDADESAYYEYICRRAGISVHYCAEQFENDGSPVSTIVKGVKRAMAGEYSRELSSKVFQGACRLIQMGFKQGGTAGYGLRRMLIDQNGQHKGVLKIGEQKSLQTDRVILVRGPEEEVAAVQWMYDAFVQQGLQESEIAKSLNARGLITDFGREWNRATVHQVLTNEKYIGNNVYHRTSFKLKKKHVNNPPDRWIRTEGAFEGIVDPTIFFAAQGIIIERSRKFTNEEMLEKLRGVLQQRGRISGILIDECDDMPSSAAFRHRFGSLVAAYSLIGYTPQTDYGFIEVNRRLRRQHPAIVAEVIAQIEAMGGSVTTHEQTDLLIVNREFRASIVLCRHQTTMRGSSRWIIRLDESLRPDITVAVRMDTMNEGIQDYYLLPAIDMTWEKLRIAEDNGIYLDAYRFQTLDFFFHMTARTTIQQTV

SEQ ID NO: 10372 - protein, 514 aa, Unknown
  Description of Unknown: Integrase B10373 sequence
  cd00338,PF13408,IPR011109,IPR038109, PF07508,Coil,PS51736,IPR036162, PTHR30461,IPR006119,G3DSA:3.40.50.1390,PTHR30461:SF3, IPR025827,PS51737,PF00239,SM00857,G3DSA:1.10.10.2600,SSF53041
MPKKNPSGGKRLVAYYRYSGGSHQTEQSIEGQRRDCETYARIHGMVILHEYIDRHISGKTDDRPEFQQMIADAGKGMFDYVICWKTDRIARSRYDSIVYKKKLRDNGVELLYAAEANVEGSGGIIVEGLMEALAEYYSAELAEKVRRGMRESALKGKAIGSSRPLGLTVDKDKKYIIDPAGAAAVRYIFEQYAAGAASSAIVAHLNEQGLCTSRGNPFNKSSVVRIIQNEVYRGVYVSPKFDVRIEGAVPAIIDDDLWERAQKMFIRNRQSRSPRNDRADYILSGKLFCGECGTAMKGVSGHSSNGEVYFYYNCPCKDCHRRNIPKDELEGLVIRTVCNDVLQPDVMNRIADSVIEAQTAELNQPNPEKEALRHELADVQRKAKNLLSALENGTAGAMLTNRLAELEQQANTLSYQLSSLESDPKFPVFSKEEVLYLLEQFLIAPSEKTKAYRRRLIDTFVSKIEVSNTELTIYFNIAEEDCGKMKKASQSNQPEGCSTEKQMVRVARIELTAS

SEQ ID NO: 10373 - protein, 514 aa, Unknown
  Description of Unknown: Integrase B10374 sequence
  PF13408,IPR011109,IPR038109,PF07508,Coil, PS51736,IPR036162,PTHR30461,IPR006119,G3DSA:3.40.50.1390, PTHR30461:SF3,IPR025827,PS51737,PF00239,SM00857, cd03768,G3DSA:1.10.10.2600,SSF53041
MLKVAIYSRKSVETDTGESIKNQITICKQYFKRQNEECKFEIFEDEGFSGSNINRPSFQRMMELAKIKQFDIIAVYKIDRIARNIVDFVNVYDELDKLNIKLISITEGFDPSTPVGKMMMMILASFAEMERMNIAQRVKDNMKELAKMGHWSGGTPPKGYKPKRIKENGKNITHLELIEEDAKDIKEIFKEYALGLSMYKISQNFKAQGKKYPNKTISNILINPTYLKSTKRSVQYLKNEGYTVYGKPNNCGFLPYNRRPKTNGKKSWNNINKFVSISIHKPIVDLDLWIKVQEKLKEKTVAPHPHESSYSFLSGGLIKCKCGGHMLLKPGAPRKKVPQKYYFVCSNKWNGIGCPSKHLRVDYAEEDFLLFLEKFLDKNYLREYLSQSNNTKIVGQETKSINKKIKSNDTSISNLIDKLALMSNEASKLLMGKIEELTRINNNLKERLLELQREKLLNDLNKNNVDILYNNIKKILNTPNNDLRRTYIKSIVKEIIYDYDTGSLNIILLKTGVI

SEQ ID NO: 10374 - protein, 514 aa, Unknown
  Description of Unknown: Integrase B10375 sequence
  cd00338,PF13408,IPR011109,IPR038109,PF07508, Coil,PS51736,IPR036162,IPR006119,G3DSA:3.40.50.1390, PTHR30461,PTHR30461:SF3,IPR025827,PS51737,PF00239, SM00857,G3DSA:1.10.10.2600,SSF53041
MAKRKFNKGGEVRLVAYYRYSGGSGQTEQSIEGQRRDCETYARLHNMTIQKEYVDRHISGKTDDRAAFQQMIADSDKGAFDMVICWKTDRFARNRYDSAVYKKRLRDNGVEIVYAAESNIAGAEGIIIEGVMEALAEYYSAELAEKMRRGMRESALKGQAISRCRALGLKTDERKRFVIDEKTAPTVRFIFEHYAAGESAMSIVEQLNAKGLRTSQGNPFNKSSIPRIIQNEAYRGVYVSKSYDVRIEGAIPAIIDNELWERAQTMLKLNRQLKAKNEPKADYILSGKLYCSCGSLMRGMSGHSATGEVYRYYTCPNKDCHLRNIPKDDLEGKVIQSIVDHLLQPESMEALAEAMVEVQKADAEKPNAERVAIEQSLADVRRRSKNILDAIENGTANAQLCARLNDLTEQEQTLSFQLSSLEKEKPVAFTKEQYLFLLEQFLVEPSERTPEYGRRLVNAFVTSMVVSDRELVINFNVSDETVNKNKKASQTNLQKESSSGMRLVRVARIELTAS

SEQ ID NO: 10375 - protein, 514 aa, Unknown
  Description of Unknown: Integrase B10376 sequence
  cd00338,IPR011109,PF07508,Coil,IPR036162, IPR006119,G3DSA:3.40.50.1390,PTHR30461,mobidb-lite,PF00239, SM00857,SSF53041
MRNEYNPIIIKYVAEYLRKSRGETTEDLIKHKTILEELCKSRGWVYVVYEEVETGESLFARPVMQQLLRDVEDNIYDAVVCVDLDRLGRGDLVDWGQIKRVFQKTNTYMVTPSSLYNLNDDNEEFAVDLQTLFARREYKKITHRLSMGKKVGAKLGAWTNGTPPMPYEYQEWIDPATNKRYYNEKGLVVNLQKLSIYRFMVDSFIKDKKSTNEIAWELNRRNIPSPRGGRWCNMTVRRLLVDETHLGKIISNKTKGDGHKNKSPNKQPFQKIPKEQWTVVENRHEAIKTQDEHEKILIGIQKNLKSPYRRSDHYYPLKGLIKCGLCGYGLPLEYKRGKDLIVKKCWHKDYLGNKCPNSSGKAQYIIDAIDEQLKEYEEQIRKEIESCEDQSTDLIQLQIKTIMDKLNKKDIALKRARIAYDEGVDTLDEYRSAKERILKEVDELENQLSIENLKLQKAQSITNHEKLHYIEEFRRSRWEDELDDKELNDLYKTIISSIIWTKQGDNIDIKVNFL

SEQ ID NO: 10376 - protein, 514 aa, Unknown
  Description of Unknown: Integrase B10377 sequence
  cd00338,IPR011109,IPR038109,PF07508, Coil,PS51736,G3DSA:3.40.50.1390,PTHR30461, IPR036162,IPR006119,mobidb-lite,PTHR30461:SF3, PS51737,PF00239,SM00857,G3DSA:1.10.10.2600,SSF53041
VAVAAIYARYSSAGQREESIEDQVRVCTEAAERAGDNVVRVYQDRASTGTSVDHRHGFLQMVADGQRGAFEVLYVYKTDRFARNRYDSAVYKMRLRRAGVRVVSATERIEDGPDGILLESVLEGMAEYYSANLSENVRRGLDGNAEKCRHNGVRTFGYELGADGYFALDEVEAPVVLGCFEAYADGMGMPEICAEYSWVRTKMGKPLTVSMLSRMLRNEKYRGRYSYGGHVVEGGMPRIVSDELFYAVQRMLAAATRRRRGVMDYLLTGKLFDEEGHRYQSQSGHGKSGRKYTYYKCPATGHAVRQDALEAEVARGVAGILEADDDAVAAIVAMVLAEQDEAAAGDVAAMDAMRSRLEENAREQSRMVDLAAKTGAVDAVAAKMAELSEERGALERDLAEMERACPLLSGEEVEFWVRRVMGRRDPLEAVRLFVSRVVLDRSHGEVLVEFTFDGGRGGGGGGGGEKPNPRPGDCPGGGSDRLRMADRSQLIANTWLVCAMRGGFTLVVPFRLSR

SEQ ID NO: 10377 - protein, 514 aa, Unknown
  Description of Unknown: Integrase B10378 sequence
  cd00338,IPR011109,IPR038109,PF07508,Coil, PS51736,G3DSA:3.40.50.1390,PTHR30461,IPR006119,IPR036162, PS51737,PF00239,SM00857,G3DSA:1.10.10.2600,SSF53041
MDTTTNAVIYARFSSHSQQEQSIDGQLRYCREYAAQHGYAIVAEYCDRAMSGTNDNRPEFQRMIRDAAGRGFQYILVWKLDRFSRNRYDSAIYKRQLAKHGVRVLSVTENVGAGDETLLLEAILEAMAETYSRQLSQNVKRGMAESARKCQSNGGRGILGYKVDANKQFIIDPDGAAIVQRIYSMYAAGSSKAEIVETLNAAGLRNNLGKPFTFNGITKTLQNVRYTGVYKYGDIEVPGGMPQIITQELWDACQARQQAKPPRIREKAEYLLLGKVYCGYCGRALIGTSGHGKSGNVWRYYAHRSGTKDCHKKPEKKAWLEWYVTDRACRYVLNPDNTEYIAQRVCAAWQAENGGNADAMQGRIKAIDRELDRIAISYTTAVPAIQAALNARASDLQTERNQLQAEYGRMQARRPLALDDVKQYLQQLCVGDPSDPAVQKQVIDTFINCVYVWDDKIVVYFNVSDGGQIEYAKAKEHAAGVRAECTSAHQNAVGTNAYIVFVGGYIGIVCPREL

SEQ ID NO: 10378 - protein, 514 aa, Unknown
  Description of Unknown: Integrase B10379 sequence
  cd00338,IPR011109,IPR038109,PF07508, Coil,PS51736,G3DSA:3.40.50.1390,IPR006119, PTHR30461,IPR036162,PS51737,PF00239, SM00857,G3DSA:1.10.10.2600,SSF53041
MDLYAVYLRKSRIDLDAERAGQGETLKRHETALLALAKQRQYPIGEIYREVVSGDTISGRPEMQRLLADVESGRWKGVLCMEESRLARGDTMDQGRVQQAFYYSHTLIITPNKIFDPDSEADQEYFEFGLFMSRREYKMINRRLQRGRLASVKEGKWVGGHVPYGYRKVDIPQGKGKMLVPVPEEAQVVQAVYHWFVEDNADISAIAKRLNGMGLKTAQGHLFGCQSVRDMLDNPVYAGWIRYGSRQKEKIPVNGKLVDYHHRAPDVEGQNLFRGRHEPIISEELYQSAKARRSLRRGTPGPRLAPAKNPFAGLVYCSRCGRAMARNPGKPGGSRDRLMCMYPSCSGIVGSTIIEELEGLLLSSLQHHLAEITIPEAQQERRNHEEDLLRTAAEQVEKELAGIATQRARAFDLVELGTYTPEIFTQRMEALAARESELQNQLEELNHRREESAAEARGAKVLAPKIKRIIDLYPGLKSPHEKNNLLKTAINHITYARPKGGTIDDLRLKIYYIM

SEQ ID NO: 10379 - protein, 514 aa, Unknown
  Description of Unknown: Integrase B10380 sequence
  cd00338,PF13408,IPR011109,IPR038109,PF07508, Coil,PS51736,IPR036162,PTHR30461,IPR006119, G3DSA:3.40.50.1390,PTHR30461:SF3,PS51737,IPR025827,PF00239, SM00857,G3DSA:1.10.10.2600,SSF53041
MAQVKLISPLTKQGIQKLRVAAYCRVSTNYADQKNSYATQIKTYTKQINEKAEWELVEIFADEGISGMKADNRPEFQRMLKRCERREIDLIIVKSLSRFARNVKEALEYVRKLKLLGIGVIFEKEGINTLSLGDEMLLNTFSAIAQEESQAISQHMRLSITKRMENGDYVDSNAPYGYRLVNKHLEPYQPETDIVKLIFQLYLMGSSTSEIARELTQMQIPTKNGKEKWRSTKVAYILSNERYVGDSKYQKTYRSTTVPFKQAKNRGEEDMFYASDTHDGIIPREDFDRVQALLQKRQTQFSKATPGLNSYPLTSKVRCAECGSYFRRRVRSGDIKWLCSKHYEDSKACDSLYYSEERIYDGFITMINKLRFGEEQILKQVISKLELASALYKKNNKAARAISESIADLNSKIVMLEQLHSKGYLASEVYQSQAREIRNQITALKSDRQDAFESRIQDMLISVRKLQDLLDEIEEPLDEFNEKLFMETVTEMTINNKDELIIKLIGGLEFTELI

SEQ ID NO: 10380 - protein, 514 aa, Unknown
  Description of Unknown: Integrase B10381 sequence
  cd00338,G3DSA:3.40.50.1390,IPR006119,IPR036162,PTHR30461, PF00239,SM00857,SSF53041
MTAAAIYLRSSKDRHDLSMDAQRRTLHEHAALAALAVVAEYADAVESGKDEDRPGFQRLLAALKRKDREWSVLLALDTSRIARRRHLAMIFEHEAERAGVRIQYANVPDTDPITGMLLRSILQAMDEWHSLTSKAKGLAGMAESVRQGWRAGGRAPRGYRLEHTPTGTLRDGQPVMRSKLVPTDDATAVAVYLRTRAQGKPRGIASAASGIVRSLNELEWQALTYAGHTVWGVHAEHAAGGYKGGHKRKPRAEWQITRDTHPALISDDEAESILQQLEDGQTRRNRAGNRVYLLSGLLISPDGQPYSGETTKGAGFYRLGKGRRISTRLLDDAVMDCVFNDLSQPDTAKLIADQMRAASAPKGKPRDITAMKLRLQGLDQKISRLVDLIAEDAEAAPAYRRAIGKMETDRVMIEAEIEAAAVESKTAECVALWTPEDVLRLLGQLKADLLGSMESGDVASVRTALSDLVDVIEYDADQRLAEIRYRLDTGVKMASPRGGDVAPVEWSSKTAVRR

SEQ ID NO: 10381 - protein, 514 aa, Unknown
  Description of Unknown: Integrase B10382 sequence
  cd00338,IPR011109,IPR038109,PF07508,Coil,PS51736,G3DSA:3.40.50. 1390,IPR006119,IPR036162,PTHR30461,mobidb-lite,PTHR30461:SF3, PS51737,PF00239,SM00857,G3DSA:1.10.10.2600,SSF53041
MSKLPSGEFWLYLRKSRADLEAEARGEGETLAKHRKALFRLAREKGINVTQVYEEIVSGESLFHRPQMLKLLEDMETNAPKGVLVMDMDRLGRGNMQEQGLILDTFRRHNVLIVTPAKTYDLNDESDELMTEIQTLFARQELRMITRRMQRGRVASVEEGNYIGTRPPYGYLIHQEGRERFLVPHPEQAPIVKQIFQWYANEEIGARKIAARLNEMGIRTYTGRTWTSPSVLVILKNEVYIGLIQWKKREQKKSRTPGKRRDTRTRDKSEWISVRGKHEPLVNEELFRKAQDRLKSKYHVPYQLINGVTNPLAGLIKCGKCGYSMVLRPYTKQAPHIKCYNRFCDNKSSRVEYVETKLIQALEEELQHIKIKWSSHRKKKDSNVEIHEQVIQSLERELKELEQQKERLYDFLERGIYSEDVFLERSQNLQSRIEQTQQAIVKAHEELHHEQERVKAQKDIIPNITNVIRLYKRSKDPARKNALLKSIMYHAEYRKEKHQRLDDFELKIFLKIHR

SEQ ID NO: 10382 - protein, 514 aa, Unknown
  Description of Unknown: Integrase B10383 sequence
  cd00338,PF13408,IPR011109,IPR038109,PF07508, Coil,PS51736,IPR036162,PTHR30461,IPR006119, G3DSA:3.40.50.1390,PTHR30461:SF3,IPR025827,PS51737,PF00239, SM00857,G3DSA:1.10.10.2600,SSF53041
MNVVLYLRYSSDKQTEQSIEGQDRVCTEFCERNGYNIVWRYIDRATSAFKDTDKRTEFQRMIRESEKQGFQGVVVYKLDRFARNRYDSATYKAKLKRNGVHVISATENISDNPEGIILESVLEGMAEFYSKELSQKVNRGMYETALKANSCGGPIPLGYRVENKKYVVVDKDAAVVQEAFNLYADGKTITEIIDLFRKKGYRTAKGKEFNKCSFDKMLRNERYIGIYKYKDVRIEGGVPAIVDKKTFDIVQSRLKENASAPGKGKAKVDYLLAHKLYCGHCGAIMTGESGRSETGVKYYYYTCSCRKKTHKCDKKNMRKEWIERVVVEDVLALLTPERIEAFADMAIKANQEDIQNESLVPALKAELKDIETRTNNLIKLAERVTDSGSLADRLIALENERKDAEKRLAIAESDIVILEKEQVVYWLEKFSKGDIDDPDFCRSVLDLFVNSVTVWDEPGGYKITTIYNLQKHNRKTHKVKSSDFVPSGSPLFYYPNFSVFFIAEVFGMIKHREA

SEQ ID NO: 10383 - protein, 514 aa, Unknown
  Description of Unknown: Integrase B10384 sequence
  cd00338,PF13408,IPR011109,IPR038109,PF07508, Coil,PS51736,IPR036162,IPR006119,PTHR30461, G3DSA:3.40.50.1390,PTHR30461:SF3,PS51737,IPR025827,PF00239, SM00857,G3DSA:1.10.10.2600,SSF53041
YCRFSSRGQREESIEAQIREIEKYASDNNTQIMQIYVDRAESATTDNRTNFQKMINLLVDTKNSIGINYIIVHKLDRIFRDRYDSAVYKRKLKLLGIKIVSVLERIDDSPESIILESSIEAFAEYYSRNLAREVMKGLKENAYKAKFNGGILPLGYDTDSDNNYVINEHEAFIVRFIFSEYLKGTGYRTICKILKEKGYKTRSNKNFTHTSIYSILKNEKYTGKYVFNKTHNLKTEQGKKIFRKNNDDVIITIDNAIPIIIDKKTFSEVEIMLEKNKKIFRSFNTVENIYLLAGKLYCGKCGSLLTGSTRKGGANKNSIYSSYVCGDKKKGNCTLKEIKKDEIENAVIELLETKLFNKDAIDKLLKNIEKELEKFKSEYKSEITVFEKELKDTEKQIANIVEAVANGFYNPAMKDKMSELEDKKNNLVVMIAEEKIKLTAARDTDKIKEDLQAVKSLKTLEPKKQKEIIQKYVKKITINDDNYEVLTNINVATVSNVGFPLYYTVATTIIRNKK

SEQ ID NO: 10384 - protein, 513 aa, Unknown
  Description of Unknown: Integrase B10385 sequence
  cd00338,PF13408,IPR011109,IPR038109,PF07508, Coil,PS51736,IPR036162,IPR006119,PTHR30461, G3DSA:3.40.50.1390,PTHR30461:SF3,IPR025827,PS51737,PF00239, SM00857,G3DSA:1.10.10.2600,SSF53041
MAINYLTDEAYIMYLRKSRADSPHESVEEVLEKHETILQELAERDLGGRIPEHCIYREVVSGETIDERPEMLNVLAQIENPKLKGVLVVEPQRLSRGDLEDCGKVVNAFRYSKTEVITTTMVYDLTNKMQRKFFEQELMRGNDYLEYTKEILLRGRVAAVKRGCYIGNIPPFGYNKIINENGDSTLEPNEFAPAVLMAFDMYVNQGKTHLEIARHFDKIGIKPYRSQIWEKSSIRAMIKNRHYIGLVYFGTRKDEKYFENGRLQVRNVKVEKEEDMIVAKGLHPAIVPLELFNAAQEKFANNPRKQPDTALKNPLAGIIFCHKCGKAMAQHPYKHARTRIECRNRNGCGSKSYYLDEVVESVAFSLETVSLPELEAKLNNNEGLSAAIQKKLLEKLYKELEEMQAQEDRQHDLLESGTYTEEVFQRRNKQLHAKMEELKSKIFETKQNMPKEVDYAQKIVKLKQAVAALRDDSMSIEDKNRLLKAIVERIEYEYIAWEGKGKVRYKLHIQLLL

SEQ ID NO: 10385 - protein, 513 aa, Unknown
  Description of Unknown: Integrase B10386 sequence
  cd00338,PF13408,IPR011109,IPR038109,PF07508, Coil,PS51736,IPR036162,IPR006119,PTHR30461, G3DSA:3.40.50.1390,PTHR30461:SF3,IPR025827,PS51737,PF00239, SM00857,G3DSA:1.10.10.2600,SSF53041
MRAFIYCRFSSHKQQELSIEGQRDICQEYADKHNITVVGQYADRARSGKTENRADFRRLMRDAATGVIDCVLVWRYDRFFRNRAESALYRKQLEAAGVHLISVTEYIPEGSAGIITQGMIETVAEYFSAKLSEDVSRGMNKAAQHCQIVGRAPLGYRAGPNKRWQIDPVGAELVRRIFEWYASGKAMGQLAAQLNEEGHRTTNGTLYTRSSFNSILRNEKYIGVYSYGGEVRIEGGCPRIIEDELFFTVQRRLSVNRHRPGAYKAEVPYLLSGKLFCGLCGAPMTGTAGTSHTGARHYYYICNNRRAKTCKKKNVRLDLIEEAVLQSALDILTDENIAYISAEVERRCAENSDSAALLASLNAQLEEVQRRLKNIGNAIAQGIITETTKELLEEAEADRTALRQQIDRAKVQAALVVKAEAVACWLDGFRRGDRTDPDFRRQVFGALVHSVFVYDDYLKIIFNVDSAGAAVVPYEAAQAATPSEAPPGSYLDTLGAPKKALRKRKAFSIMIAA

SEQ ID NO: 10386 - protein, 513 aa, Unknown
  Description of Unknown: Integrase B10387 sequence
  cd00338,PF13408,IPR011109,IPR038109,PF07508, Coil,PS51736,IPR036162,IPR006119,G3DSA:3.40.50.1390, PTHR30461,PTHR30461:SF3,IPR025827,PS51737,PF00239, SM00857,G3DSA:1.10.10.2600,SSF53041
MAINYLTDDAYIMYLRKSRADSPHESVEEVLEKHETILQELAERDLGGRIPEHCIYREVVSGETIDERPEMLNVLAQIENPKLKGVLVVEPQRLSRGDLEDCGKVVNAFRYSKTEVITTTMVYDLTNKMQRKFFEQELMRGNDYLEYTKEILLRGRVAAVKRGCYIGNIPPFGYNKIINENGDSTLEPNEFAPAVLMAFDMYVNQGKTHLEIARHFDKIGIKPYRSQIWEKSSIRAMIKNRHYIGLVYFGTRKDEKYFENGRLQVRNVKVEKEEDMIVAKGLHPAIVPLELFNAAQEKFANNPRKQPDTALKNPLAGIIFCHKCGKAMAQHPYKHARTRIECRNRNGCGSKSYYLDEVVESVAFSLETVSLPELEAKLNNNEGLSAAIQKKLLEKLYKELEEMQAQEDRQHDLLESGTYTEEVFQRRNKQLHAKMEELKSKIFETKQNMPKEVDYAQKIVKLKQAVAALRDDSMSIEDKNRLLKAIVERIEYEYIAWEGKGKVRYKLHIQLLL

SEQ ID NO: 10387 - protein, 513 aa, Unknown; identical to SEQ ID NO: 9841
  Description of Unknown: Integrase B10388 sequence
  cd00338,PF13408,IPR011109,IPR038109,PF07508, PS51736,G3DSA:3.40.50.1390,PTHR30461,IPR006119,IPR036162, PTHR30461:SF3,IPR025827,PS51737,PF00239,SM00857, G3DSA:1.10.10.2600,SSF53041

SEQ ID NO: 10388 - protein, 513 aa, Unknown
  Description of Unknown: Integrase B10389 sequence
  cd00338,PF13408,IPR011109,IPR038109,PF07508, Coil,PS51736,G3DSA:3.40.50.1390,PTHR30461,IPR036162, IPR006119,PTHR30461:SF3,IPR025827,PS51737,PF00239, SM00857,G3DSA:1.10.10.2600,SSF53041
MKTAVIYARYSSSGQREESIVGQLRECREYAKKHKLTVLEEYTDSALTGTSDRRPAFQKMIKDSETGAFSVVIVWKLDRFARNRYDAATYRHMLQANGVKIVSAMENISDSPEGIILEGLMESLAEYYSANLAENVRRGLYDSALERKMLSQPTFGYRKSSDGKYEIDETQAAIVRRVFTEYANGKPYMQIIDDLNAEGITTGHGHKFTNNSLRYMLKNEKYIGIYRYKDILDEHGIPPIIDRELYDRVQKERKRRSFTRKRKKPTGGDEYLLTGKLFCGHCGRQIVGESVRNKGGNTYRYYTCTGTKTASRNGCTKKRVPKEWIENEVIRIINEEVLTDTFIDLMAAEVLRYQDSAEVNRTTQILSDQLAEIKRKINNIVAAIQNGIWSETTGEVLRSLEAEQKATEDRIRHEELTRRVFTAEEIKTFLYALKRAEKTDTEAQRYLINACINRIYLFDDDDGQKFIFDLNYSTTGSEPVSFERVRQMCSNPCLFVDRRTVTEDGHVLLFIKA

SEQ ID NO: 10389 - protein, 513 aa, Unknown
  Description of Unknown: Integrase B10390 sequence
  cd00338,IPR011109,PTHR30461:SF21,PF07508,Coil, IPR038109,PS51736,G3DSA:3.40.50.1390,PTHR30461,IPR036162, IPR006119,mobidb-lite,PS51737,PF00239,SM00857, G3DSA:1.10.10.2600,SSF53041
MTTLEWLVGAYERLSLDKRDKSARDDGASPSVARQTKDNLKVAATHGLTIHRHYTDRANSAYDETKPRPEFEELIRDLEAGVIDGIVCYNQDRLLRDPYDLEVLRRIVKAAKKRGRVIMIFTPLGPIDLLNENDLLTARLNAMVANKSSGDTSRRVTDQHRDAANSGRPVGHRSFGWAEDKLALNPRESEAIRDGADKLLAGLNLADVFRDWNEKGLLTTKGNKWTTAAARWLYRNPRLVGWRYMPGTKYTAKELVRDGHGIPVVGQWEPVLDVNTWQAVNAVLDEKAHKAGFQKGQKSLRKYLLSGLLRCGNPDCTMARLRANGTSARADGSVRRNYACSECKAVAIDGPRTEELIEQQYLRRLGLRVLLTANAPTEDDAPWDGDERLAEINRLSEELMAAFRKGPKQEGGLSGADVFPQINALNEERDELTRQRGQYEAAKKKRPIAEPERLLHGWIDLSIPEKRAALESELSGILIHPRPVQEGWARQFDASRIEPLWNEQDEAADRAEA

SEQ ID NO: 10390 - protein, 505 aa, Unknown
  Description of Unknown: Integrase B10391 sequence
  cd00338,IPR011109,IPR038109,PF07508,PS51736, IPR036162,IPR006119,G3DSA:3.40.50.1390,PTHR30461,PTHR30461:SF3, PS51737,PF00239,SM00857,G3DSA:1.10.10.2600,SSF53041
MVNRAVMYVRMSTESQDYSTDHQRASIREYAAARDISIIREYVDDGKSGLDIRRRAGLLSLMQDVQSQDPDFSRILVFDISRWGRFQDIDEAAYHEHTCRRAGIEVTYCGERFADDAGPYASLLKSMKRVMAAEYSRDLSEKVFAAQARFIEMGFKQGGHAGYGLRRLALKACGTPRAILEYGESKISATDRVVLVWGPEHEVATVQRVYALYLEQGASEAGLARMLNNETVPSEFGRPWTQAMINSLLTNVKYCGALAYNRRSGKLSTRRTRNATDRWIVKQEAVAPIISARVFAQVQAERARRMKRYSRDELVALLQSCHGRHGAVNAKIIAADEQLPDPQLLVRTFGSLMNAYEAAGIPASPKYAFVATKRLLAAARTGLLQEVEALARAAGGATDPGDKQNTILMNGHLRVRIEITVPRNPRRGQRNWRIHGTPDADFTIVGRMEPLTGAIADYFLFSRNDLAPRVIYLKDSNLDQFARMRYPTVRGMFGLDAPSSLESTC

SEQ ID NO: 10391 - protein, 513 aa, Unknown
  Description of Unknown: Integrase B10392 sequence
  cd00338,IPR011109,PF07508,Coil, PS51736,IPR036162,PTHR30461,IPR006119, G3DSA:3.40.50.1390,PTHR30461:SF3,PS51737,PF00239, SM00857,SSF53041
MNIKDVAIYLRKSRGDDEDVLSKHRLLLTEYATKQGWNYTEYEEDLLSGERLATRPKMLVLLDDIADGKWDAVLVAAYDRLSRGSSKDFGTIIETMQYTNCYIATPERVYNVNDTNDLTMLGIQGVFANTELRIIKERFIRGKKLGAKDGKWTNGKPPYPYIYRKRIFINERGKEEIDADVLTDPEQKEIYLLMKRLYLTGEYSTEKLMIKMNKLGYPGPTGGLWRHNTIRRLLRSEFHMGYSIYGKYEYKTDKNNVKKAVRKRDREEWYIGRGDWEILKTEDEHRKILAIMKKHSKTPSRARSGSFPTSGLMYCKLCGHAMHYAGNGRVEVKTGKKFNFTKCSFTYPTGEKCPQRGVKLSEEFYDNLYNMVITSHFDTEIIEKSQLNQNDIAEKESSIADLERQLKQYSEALVRIKDAYSMGVYNLTEFGEEKKKLDDKIKNLRKNIDRIENEIASVTTYTRAELNSRIEEFKIKWQKASTPQEQNILLKTIVKRIIYNRQDDNVVLEVEYL

SEQ ID NO: 10392 - protein, 512 aa, Unknown
  Description of Unknown: Integrase B10393 sequence
  cd00338,PS00397,PS51736,IPR036162,IPR006119, G3DSA:3.40.50.1390,PTHR30461,PF00239,SM00857,cd03768, IPR006118,SSF53041
MSTWVYARVSTLDQYVNGYSIDQQVRVCLEYAKNNDYLLGLETNCDLPGVFIDGGKSAFKKKLCQRPGGLMLLGNAKPGDVIIALATHRLFRQFNDMVAVMDQWVQNGVTVKFVDYPTLNTDTANGKAMLYMMAVMAQLRSELISARVKESRVIARTKAPERPKPKPVETICSSKDVGAILQQMQRDREADKYKFTGRVHAYVRVSTNDQTVEHQVNLLTKMLPDDLRGAEIVWYKDEGVSAFKTKFEKRKAGGEMLKALKPGDMVVAWRPDRLFRSMVDANRVVDSIHKTGASLMTVEGDLRTDKPQGKMLMQMLAMFAEIESQDISRLTRLGNFGAIGINPKMQAMRVPKLLREMKKHFNQKHYHFENIFTADERFYMHIELHLTAKNYRSRKEACRVISNKWLAKKGLPPVQGEYGEPCKNYARRIHNMQKVEFTERRHRLCERLKKHPDEVRYPLSTETACQLVRNQTEFLRVAKMFPGRLKDKQSLTMLASSCTSPEAAVDFMGRLG

SEQ ID NO: 10393 - protein, 512 aa, Unknown
  Description of Unknown: Integrase B10394 sequence
  IPR038109,IPR006119,PS51737,PF00239, cd03768,G3DSA:3.40.50.1390,PTHR30461,IPR025827, SM00857,G3DSA:1.10.10.2600,SSF53041,IPR011109, PF07508,PS51736,mobidb-lite,PF13408,Coil,IPR036162,PTHR30461:SF3
MRHRDAPDRPARVLGYVRVSGREQGERGTSLEGQQDELRRFCAGRGYPEPIIRLEVESASPEKIEKRDELHGLIADARPGDLIVVCRVDRWSRDLEYGVGSVRKIVKRGVGWYSVGESIDATTSQGDSVLGIMAWAADQERKRIKERTVGRRAELRDQGLYVEGPAPYGYRRGSREERRQLLLELVPDEAAVVREAFERCLSESVERVRDWLEGETARAWDKKAAHLLLMNRVYLGEVKSSSGAWIPSTHTPAITRDLYERAQAAMAARKLGGRSPSSESRTATWLLRGLASCPDCGSRMGAQYSRSTDGGYYACARRLRLGVSACAAPYVPVDKADAAAGVAALAQLATFRRELARPRGAVAPTRKARDFGADRARLRSARERAVRLATDGTITREDLARELARLDQELGRLEVAAGAAARSETAQDPEARRAALADVERLERAWRRAPVEVRREALRGLAASIVLRPTGAEIAWRSADELAQEHAAAGAAHLFAPPAARSRKSSGKRRRK

SEQ ID NO: 10394 - protein, 512 aa, Unknown
  Description of Unknown: Integrase B10395 sequence
  cd00338,PF13408,IPR011109,IPR038109,PF07508, PS00397,PS51736,IPR036162,PTHR30461,IPR006119, G3DSA:3.40.50.1390,IPR025827,PS51737,PF00239,SM00857, G3DSA:1.10.10.2600,IPR006118,SSF53041
MKQVVIYARVSSDRQEKEGFSIPAQISYLKQYAAQNNFNVVKVFSESETAKKAGRKAFNEMLTYIKEKKINIILVEKTDRLYRNFKDYVTIDDIKGLEVHLVKDNTILSEKSSSQTKFLHGIKVLMAKNYIDNLREEVNKGRAEKIKQGYYPHKAPAGYINTKDENGKKIIAIDEKKAPFIRKLFELYASGVSGEECRKQLNAMGLYHNSKPYAKSILLKMLHDPFYIGKMEIKGVIYQGNHEPIIDIALWNKVQSMFTQSKARTHNVVFDYVGVIKCGHCGCQLTAELKKGKYIYYHCTGKRGGDCKKSYIRQEQIEQAIIRVLERIQIPEENADKIIAALKEMQGVKERFDETSSESINKQIKILTHRIDALYADKLDGKITEEFWEEKHNQWHNEKVTLLNKLQSLSVASKNFYESSNLLLNWCKDAPAKFLGKSAETKRKILNLIGSNFIYKDGKLSIVLNPVFELILNSHFSKNGGTHRTMLEPYTFIAELKKVVNEELYVNLKLVA

SEQ ID NO: 10395 - protein, 512 aa, Unknown
  Description of Unknown: Integrase B10396 sequence
  cd00338,Coil,IPR036162,PTHR30461,IPR006119, G3DSA:3.40.50.1390,PF00239,SM00857,SSF53041
LNEKKPNAVLYLRSSKDRHDVSIESQRHELARLAADRGLTVVGEFRDVVESGKDDDRPGIQALLEAVRRRDRGWAAILVLDTSRLARRAAAAYIFEDRECKPRGVEVIYKNIPPMEEAERAMYKAMLHGVDEWHSLVSKRKGLQGMRQNVKSGFRAGGRAPVGYRLEHVDTGIVREGKPVLKSRLVASSDAPAIQRYLKERAQGAARRALVRRLGLQISASSLVGVEWNALTYAGHTVWNVHAEEGTGTRRRPRADWVIQRDTHEALITDAEAETLLKNLEAAHVKRPRRTSGDYLFTGLLKTSEGVPWYGEKSRYYRAGNAHAPAQDVERCLLEKIAADLRSSAFSAALVQRARTSYGREFTAELARLNEAERVLARRISGFMDMAEKLDTPGPVLRKVDELEQDRKRLEREMEQARRDAAIAAQARAVTEDQVNRMLDAMANDMERLDRDKLKDFLFTICDRVTLNADTLSARIHYKIPLVRRDRLASPRGFDAVPHVRTVGCVQVRRAA

SEQ ID NO: 10396 - protein, 512 aa, Unknown
  Description of Unknown: Integrase B10397 sequence
  IPR011109,IPR038109,PF07508,Coil,PS51736,G3DSA:3.40.50.1390 ,PTHR30461,IPR036162,IPR006119,PS51737,PF00239,SM00857, cd03768,G3DSA:1.10.10.2600,SSF53041
MAKCILLSRVSTEQQSLDEQTRNLKTAAKAAGYDKIIVIETKESAIKLTEEERQGLNELKSYIEKGDVSCVFIWELSRLSRRPKVLYSMREYLQEKRVQLRCLHPDFTMFKDDFSLDTNANIIFGLYVSLCENEMAIKKERFHRGKEKNAREGKFSGGRYVKLGYKLDDNNYFVVDPDGADLVRELFYLYGVKKMSLRDLYNEMKSRGFKKTLTSIRKMLHDASYYGEPTKGTRGENTFYRTYPAIVSKELYDLVQERIEAAKHDNRKTVKQILGKKIVKCPKCGHAMVLDSNGRFTCNWHTKRNFVFDPCDNTCTIDSKTVDNLLWSASKKIWKWKMKQHSVDEKKRMVDELLVAQSKIKVCDKELAQIETRMKRAKDLYILGDLNEREFEEYRTSINDKKIEQAAQKAHLEERITYLNECIVGLNDPEETDIELAETDYTMKDKIVHECIKELVVDYIDDKKRDKVIKLKTIFNESYWLKRFQVRGVERIIWDKDGWTRLPSTNKKEEDF

SEQ ID NO: 10397 - protein, 512 aa, Unknown
  Description of Unknown: Integrase B10398 sequence
  cd00338,PS00397,PS51736,IPR036162,IPR006119, G3DSA:3.40.50.1390,PTHR30461,PF00239,SM00857,cd03768, IPR006118,SSF53041
MSTWIYARVSTLDQYVNGYSIDQQVRVCLEYARNNDYLLGLETNCDLPGVFIDGGKSAFKKKLCQRPGGLLLLGNAKPGDVIIALATHRLFRQFNDMVAVMDQWVQNGVTVKFVDYPTLNTDTANGKAMLYMMAVMAQLRSELISARVKESRVIAKAVAPERPKPVVVEPLSSSKDIGAILQQIQRDREADKYKFTGRVHAYVRVSTNDQTVEHQVNLLTKLLPADLRGAEVIWYKDEGVSAFKTKFEKRKAGGEMLKALKPGDMVVAWRPDRLFRSMVDANRVVDSIHKTGASLMTVEGDLRTDKPQGKMLMQMLAMFAEIESQDISRLTRLGNFGAIGVNPKMQAMRVPKLLRDMKKHFNQKHYHFENIFSADERFYMHIELHLTAKNYRSRKEAFRVISNKWLKRKGLPPIQGEYGESCRTYARRVHLMQKIEFSERRHKLCEKLQKHKGEVRYPLSPETACQLMRNQTEFLRVAKMFPGRLKDKQSLTMLASSCASPEAAADFMGRLG

SEQ ID NO: 10398 - protein, 512 aa, Unknown
  Description of Unknown: Integrase B10399 sequence
  cd00338,IPR011109,IPR038109,PF07508, IPR036162,PTHR30461,IPR006119,G3DSA:3.40.50.1390, mobidb-lite,PTHR30461:SF3,PS51737,PF00239, SM00857,G3DSA:1.10.10.2600,SSF53041
MTERRRAIGYIRQSEQRPGEDEKTSLSLRGQEDVFKQWCDQHDALPVAVVADHDLRGDDPSRPGLRELLDVAERERADVVWVLSLSRFARDHILQELTWRDLQKRGVQHLVSQIESGVDDPFFRGIYGLMHAKTKAEMSGHLRSAFARRAKDGGFPLGTTPIGYRRPHRITVTRANGTRYERETGQPSIDPDGADFVRHLAARVLANEPLAVIADDLNRRGPGPRGGRWRPTTIRRILQSPIYAGDIVHHGVVVHHNPEWAILDRETWDRLQQRFARAPVIRRGQIDSWLEGLICHACDDGQTRRMYYGAHTGKSAGHGGSLVCQGQWEKTCRGERRIIGAHLAEEAVTRCLIADLGDMRTSAAAIAMAHAEIGGTAVAKRREDLDQREADAHARWRRSHERYATGVLPWEVMDEEDARLKESLAAIERDRAALPVPPDEPAIHAAAARLSTVRALIARATGDDLRGLLTDLGVAIVSADGIAIRYHGPIRHLLPGTLTPVPRWGKGLRSVG

SEQ ID NO: 10399 - protein, 512 aa, Unknown
  Description of Unknown: Integrase B10400 sequence
  cd00338,PF13408,IPR011109,IPR038109,PF07508, Coil,PS51736,G3DSA:3.40.50.1390,IPR036162,IPR006119, PTHR30461,IPR025827,PS51737,PF00239,SM00857, G3DSA:1.10.10.2600,SSF53041
MKANQAAAQKNAVIYARFSSHAQNEQSIEGQLRDCHAFAEREGLTVVGEYIDRAISGKSDDRPDFQRMIADAKKRAFQFVIVWKLDRFARNRYDSAIYKHKLKQCGVKVLSAMENIGDNPESIILEAVLEASAEYYSVDLSQKIKRGRHESAVKGKFIGSIAPIGYKKSGSTLILDEITAPLVKWAFEQYAAGMQKRDIIAALNERGLRNKKGEPFGYTALQTAFRSEKYVGVLEQDGVRIENAIPALIDRPTWEKVQRNLDANARHGAKFKAAVEYLLSGKLFCGHCGKPMQGVSGTGKGGATFCYYMCAGRRKKECNKAHEKKDFVEWYVCEQTVEYVLSPARIKRIAEAVVAQYEKEFGDNSVEECEKRIAALDRELNKLIDAALEMPKNARQPLYDRMEQIGAEKDDAEIDLAKLKVANSIRYTVEEVESWLRSFCKGDLFDMDFRRRIIDVFVNSVFLFDDKIIIYYNIKGGKQVSYIEMLESIGEDAPADPGSGVCISKPLLHRQR

SEQ ID NO: 10400 - protein, 512 aa, Unknown
  Description of Unknown: Integrase B10401 sequence
  cd00338,PF13408,IPR011109,IPR038109,PF07508, Coil,PS51736,G3DSA:3.40.50.1390,IPR006119,PTHR30461, IPR036162,PTHR30461:SF3,IPR025827,PS51737,PF00239, SM00857,G3DSA:1.10.10.2600,SSF53041
MTKYIEYLRKSQMDRDFEDVSVEETLNRHRAILAEFVKSKKLNVEVILEEVVSGEALSSRPQMLKLLDLVNTGEYDGVICMDIDRLSRGSSIDSGYIMQVLQVNNCKIITPQKTYDLLNETDEQFADMKFMFSRYELSTIRKRLITGRDTSVKEGRFMGSVAPYGYKIIKLKGEKGNTLEVIPEEAQVVRMIFDWYTQDGLGAGQIAEKLTTLHIKPRKVGEWSAEVVRKMLINEHYIGKLPWKKNRIGKKFVDGQLTKKKYVNKEYEIYDGRHEPIISKEQFELAQQVRQDNRTRPVKLNLDIVNPFGGLLHCGHCGTKMTMVKPSKSNPNAKPRFKCGKSKKCGCKSHYSEEVEKAIVIEMKEWLAGYVIQLEQNDVQKDDGLEVSLEMLKNRLEELFEQQDSICELHEKKEYSDRLFQRRNAAIEAEIDQVESDIDELEQKLSEQKEEADIKSSIIPTSQYLLDNYDDLTPKEKNDIWKLILHKVDYVKTETGKEFNITIYPKLSHKPL

SEQ ID NO: 10401 - protein, 512 aa, Unknown
  Description of Unknown: Integrase B10402 sequence
  cd00338,PF13408,IPR011109,IPR038109,PF07508, Coil,PS51736,G3DSA:3.40.50.1390,IPR006119,IPR036162, PTHR30461,PTHR30461:SF3,PS51737,IPR025827,PF00239, SM00857,G3DSA:1.10.10.2600,SSF53041
MKNAVIYARYSSLAQNEQSIEGQLDVCKGYAAQNGYNVIGEYIDRAISGRTDDRPEFQQMISDAAQHMFDYVIVYKLDRFARNRYDSVIYKKRLKDNGVKVLSAMEGITDSPESAILEALLEGMAEYYSIDLAQKVHRGQIESIKKGRYVLGSPPYGYSLTDGKLSVCEPEAEVIRKLFGNYADGISLADCVKDLNDQGYRRRNGQKFVPRSFQKTLHNRIYIGENTQKGITIKDESLRLVDNEVFDRVQERSKLNQGKGGRYVNRYNYLLTGKLYCGECRALMNGVSGTSKTGERYHYYVCANRRKNNACTKANEPAEALEKFVVDQTMSYILNPDRIEELIAEIIKAYQDSRHGSEIVRKQTRLAAIETEMAKLAERLAVVPDSAVQTVTDRMKALGDEKTTLQSELMHLKAERTLTEKDVRKWLKSLGEVDRDDPSFQTKIINIFVSAVYVWDDRAVVLYNVFSDGAAATGMTIDADVVDEEFGVHLEDTTVHHRIRIVNTLLGIGFSR

SEQ ID NO: 10402 - protein, 512 aa, Unknown
  Description of Unknown: Integrase B10403 sequence
  cd00338,PF13408,IPR011109,IPR038109,PF07508, Coil,PS51736,G3DSA:3.40.50.1390,IPR036162,IPR006119, PTHR30461,PTHR30461:SF3,PS51737,IPR025827,PF00239, SM00857,G3DSA:1.10.10.2600,SSF53041
MNAAIYARFSSSGQREESIEGQLRDCNAYAKRNGLTVVAEYADKAISGRTDKRPDFQRMLKDSEKGAFQLLICWKMDRFARNRYDSAIYKAKLKKAGVRVVYAMESIPEGPEGIILESVMEGYAEYYSENLAQNVRRGYYDSALELKTLGAKPLGLKKGPGDHFVIDPETAPVVKRIFEEYASGRKINDIIEGLNAEGYRTARGLPFTRNSLQTILANEKYIGVYGFKDIRVEDAIEPIIDKTTWEAVQKMRKRRVISPAASRDVNFKLTTKLYCGECGCPMTGDSGTSRSGQTYYYYTCSNKKRGRHCKSKSVRKDDIEKLVVDQLLSLICSDQFIEDVADLCMEYQDRERDASLIASLEQKKKEIDKKIENLTKALEDGRAADIILDRLDQLKAEREDIERGIAVQLIEDPRLDRDQIIFYLQRLRERREKPEELGEDLIETFLNSAHLYDDGRLVLGLNFTGDRSKLTIEDISKIKDPSCSDSTGQIGITHQKPNMAIIGTVLMFEMVA

SEQ ID NO: 10403 - protein, 512 aa, Unknown
  Description of Unknown: Integrase B10404 sequence
  cd00338,IPR011109,PS00397,IPR038109,Coil, PF07508,PS51736,IPR036162,IPR006119,PTHR30461, G3DSA:3.40.50.1390,PTHR30461:SF3,PS51737,PF00239,SM00857, G3DSA:1.10.10.2600,IPR006118,SSF53041
MPAIKKTTSNTIKKCVIYARVSSDRQEREGFSIPAQLKLLKEYAQRNNIKIVQEFVESETAKKAGRKQFNEMIKFLKKNTTIKSILVEKTDRLYRNLKDYVTLDEFTGLEIHFVKEGEILSASSKSQDKFMHGIRVLMAKNYIDNLSEEIQKGLKEKCEQGYCPTRAPIGYLNVIQTSGKRTIEVDNETAPFIKKIFEEYLTGNYTYKTLAQYINKAGFKPRNKQCTGKTIENILHQEFYTGNFIFKGKKYYNGQHTPLITPELFAQVQEKLRKKNSPRGRVHNFAYTQFIKCAKCGKYMTAEIQHGAHNSGDYIYYKCRYCKKTYLKQEEIEQVFKETILDNIEFTKDEIAQIIEVIKELVKMECNDAIFSVEQINKRVVLLEKRLEQLYTDKVDGAISESLYIKKRDEWQNELNELLIKYEKTAKAGKEFIGNVELLLNLCKDAPRLYLNQTPHEKRKLMNLIVSNPIFDGSKLTFTVYSAFEYALKLKNLETVGLEPTSKMDQHLLLRV

SEQ ID NO: 10404 - protein, 512 aa, Unknown
  Description of Unknown: Integrase B10405 sequence
  cd00338,PF13408,IPR011109,IPR038109,PF07508, Coil,PS51736,IPR036162,IPR006119,PTHR30461, G3DSA:3.40.50.1390,PTHR30461:SF3,IPR025827,PS51737,PF00239, SM00857,G3DSA:1.10.10.2600,SSF53041
MKNAVIYARYSSLAQNEQSIEGQLDVCKGYAAQNGYNIIGEYIDRALSGRTDDRPEFQQMISDAAQHMFDYVIVYKLDRFARNRYDSVIYKKRLKDNGVKVLSAMEGITDSPESAILEALLEGMAEYYSIDLAQKVHRGQIESIKKGRYVLGSPPYGYSLTDGKLSVCEPEAEVIRKLFGNYADGISLADCVKDLNDQGYRRRNGQKFVPRSFQKTLHNRIYIGENTQKGITIKDESLRLVDNEVFDRVQERSKLNQGKGGRYVNRYNYLLTGKLYCGECRALMNGVSGTSKTGERYHYYVCANRRKNNACTKANEPAEALEKFVVDQTMSYILNPDRIEELIAEIIKAYQDSRHGSEIVRKQTRLAAIETEMAKLAERLAVVPDSAVQTVTDRMKALGDEKTTLQSELMHLKAERTLTEKDVRKWLKSLGEVDRDDPSFQTKIINIFVSAVYVWDDRAVVLYNVFSDGAAATGMTIDADVVDEEFGVHLEDTTVHHRIRIVNTLLGIGFSR

SEQ ID NO: 10405 - protein, 512 aa, Unknown
  Description of Unknown: Integrase B10406 sequence
  cd00338,IPR011109,IPR038109,PF07508,PS51736, G3DSA:3.40.50.1390,IPR006119,IPR036162,PTHR30461,PS51737, PF00239,SM00857,G3DSA:1.10.10.2600,SSF53041
VTAARNLHEAPATAGAAARKPAVIYTRISKDRQGLELGNDRQEREARDLCAQRGFDVVAVYRDVDTSAYKRNVRRPGFDSTLAAIAAGEAVVVVVYHPDRFVRRNDQLEGVIARLEAALAEGKAGDFELASVTGGGYDLSTPAGRMMARVVGATAQYEMEQKGMRQKSKNVELAADGYWRGGPAPYGYRNGRMALEGGKADASAGTLVVQPDEAVEVAWMVDRILGEGWSLNRIVLDLNARGVKTVRGIAWTRQTLRRLMRTGAIAGRVTTKAGADLGKGNWTAIVPHDQWLRVQAILDDPRRAHRRPGPTREYLLTGLVHAATYDADGTIVGTDRVLMAHAREGGRRTYATVGNAFVKGAQSITVDAAGLEAFVVDVVLGVADERTILDTGGDAASNALIARRLEALDEDEAELTAGYKAGDIRMKQYRDLSADLAAKRHDLERSLTVRASVDRELERFLTTPGALSKAWPRLTFEQRRRILRRIPVRIDVGPVREVRRTFDPARVLITIP

SEQ ID NO: 10406 - protein, 512 aa, Unknown
  Description of Unknown: Integrase B10407 sequence
  cd00338,PF13408,IPR011109,IPR038109, PF07508,Coil,PS51736,G3DSA:3.40.50.1390, IPR006119,IPR036162,PTHR30461,PTHR30461:SF3, PS51737,IPR025827,PF00239,SM00857,G3DSA:1.10.10.2600,SSF53041
MECDLINAVIYARYSSHNQRDESIEGQLRECHEFANKNEMTVIGEYCDHAISGKTDKRPQFQKLIKDSDKGHFEAVIMYTLDRFARNRYDSAIYKAKLKKNGVKVYYAKQPMPDTPEGIILESVLEGYAEYYSENLSRNVKRGMKDNALKGLSVGQPTPLGYVIGHDKRYKIDPIGAKIIREIFQRYADGMSVSQIVNWCNDQGYKTSRGNKFTKNSLTCILQNEKYTGKYKFMDIEIDGGMPQIIDKDLFEKVQSMRKRNYKSRARSKAKEQYLLTTKVFCGYCGAPMIGESGTSKSGMTYHYYKCANRKNKKTDCNKRTEKKDVLEAVVVRYTVNTVLTDENIEKIAKKAIELIKKEASDNSYLNSLKDRLKTVENKIENILTAIEDGLYTPSTKDRLVAFESEKEDLEIQISKESMKKPTLTEDHIIFWLQSFKNGDIHDKKYQQKIIDTLVNSVFVYDDKIVFTFNLSEKNTATLKCSDIEDIAPPNRLNPNTPIIIKHCFVFCKMWF

SEQ ID NO: 10407 - protein, 512 aa, Unknown
  Description of Unknown: Integrase B10408 sequence
  cd00338,IPR011109,IPR038109,PF07508,Coil, IPR036162,IPR006119,PTHR30461,G3DSA:3.40.50.1390,PS51737, PF00239,SM00857,G3DSA:1.10.10.2600,SSF53041
MFSKEILVYLRKSRADDVYETVEEVLAKHETILRDWASVHLEDGKLEETNIYREVVSGETIADRPKMQDILAAIENPSIKGVLVVEPQRLSRGDLEDIGKIVRIFKYTNTRIITPQRAYNLYDEYDKDMIERELKRGNEYLEYTKKILLRGRLVSVQQGNFIGNTAPLGYDKVLIKEGKKTCHTLKPNKDAWIVQKIFELYASGVGYNNITKEMYALTGRPFHMSTIKDMLANKHYIGKVVWNRRAEVRTVENGELKITRPRHSDYLIYDGKHEAIISDELFEAVQERKKLLPAQPTNKVPRNELARLVYCPCGHAMSLKYDGGDARLRCRNTACKNSQHSLNYNALLSQVHASAIDKIEDIEVQFQQIQAQNNRYAKEIQKIESRLSEIDDKEVALWEARANMEMPEHVFVKLKDKYISQREDLLEKKKQYEEKSTTTIDIKQLKSYKKILNSTESSVTDKNQVYHAIIDHITVIPGKNIRATKGIEIPEGAKKMRGWINMPSTIEIEFKL

SEQ ID NO: 10408 - protein, 512 aa, Unknown
  Description of Unknown: Integrase B10409 sequence
  PS00398,cd00338,PF13408,IPR011109, IPR038109,PF07508,PS51736,G3DSA:3.40.50.1390, IPR036162,IPR006119,PTHR30461,PS51737, IPR025827,PF00239,SM00857,G3DSA:1.10.10.2600,IPR006118,SSF53041
MTVARIYARFSTERQDITSIADQLRVCRAHAVAQGWRIAAEYSDEAISGAALGNRPGAQAALRDLQHGEALLVNDLTRLARSQDLGPMIARLRFRGVRVIGAQDGFDSTSRTAGMQAGLSGIMSEEFRRQIADRTHSSAVTRARTGGKIGGKVYEDPAIVREIFERFDRGEGLRAIAGDLNARGVPSPGATWNREQRRSDGRWIVSALHAMLKNERYAGREVWNRSQWFRHPDTGVRHRRMRPPEEWIVRECPALIDRDLFERVQTRMRARGRAGGGPGGGPKYLLSGLLTCALCGSRMIVSGGSQHRYVCGLRHGGGAAACANGIGVPRRLAESLILQPVIEQLLSPEAETEGVKALAEHNAAPVGAQPEEVAVIERLVREGILSRETAAPSLAEARRKALQRAAESPRYVFTATGRAAWRAAVRDLTTILQGEDVAAARAALHDLLGTVICRPAPTGDHLIAELTACSVMLQTGSGRWIGSGGLIAIHLLKPPPDDGPRKVLRWKRRSTV

SEQ ID NO: 10409 - protein, 512 aa, Unknown
  Description of Unknown: Integrase B10410 sequence
  cd00338,IPR011109,IPR038109,PS00397,Coil, PF07508,PS51736,IPR036162,IPR006119,G3DSA:3.40.50.1390, PTHR30461,PS51737,PF00239,SM00857,G3DSA:1.10.10.2600, IPR006118,SSF53041
MESVAIYIRVSTKRQVDKYSPHEQKRVLTEYANSRQWGIFDYYSDLGESGADSDREELDRLLVDAGKKHFSKVLLFEQDRLSRLEQLDWAYLANSLAKMNIKLVTPTSEINLDNEEDRFLADLFNLLANREMKKIKKRTSMGRKAAHKAGTYFASESPFGTFYDRETNTWSVIPEEAKLVKMMFEWYIGGMGFPSIGNKLKSLGYKTRRGSGFAGNVVYRIMMNKVHTGYYEQTIVGETLSHKIIWKEGHGPYITEEQFKCMKRIANERSTGQVEYFHESRYLLSGLLVCGECNKKLRLGTKRYMAKDGEHVYLTYTHKPYDPACNARHKVSLVDNNVIGELMNMVGNANYIKELMENKNIQETVKPSEEDFSEIKVLRGKLLNRKSKILDLYMDEDWTKEELLKKKKEIDTELQALANREEEFNNRLKSSEEKDIDIDYLADSLQIIKVIGTGEIPPREENSILKDIISEIIISKDGIVKIKLMPNNANFSDSKYHAHQDVWVTLPQIAAR

SEQ ID NO: 10410 - protein, 512 aa, Unknown
  Description of Unknown: Integrase B10411 sequence
  cd00338,PF13408,IPR011109,PF07508,Coil, PS51736,IPR036162,IPR006119,PTHR30461,G3DSA:3.40.50.1390, PTHR30461:SF3,PS51737,IPR025827,PF00239,SM00857, SSF53041
MRAYSYVRFSSEKQSLGDSHRRQVALAEAYAAEHKLDLDDRRFEDLGVSAFKGKNAVEGNLGTFLKAIDEGKIRTPAYLLVESLDRLSRSDVDEALVLFLSIINRGVTIVTLADKQTYSKDSIKKDRGISIIISITIMMRANEESATKSARVKAAWARKAEQGDTLTSICPSWLVPKPDGSGFDYHSRERVELVQRMFHMFIHERKGSPTIARELNQEGIKPFGWAKAWSNGVVASILRNTATYGTLTRKKAGGTIKDYYPKVIEYATYEQAIAMAKSRKWTGSNKGPSITNLFAGLMYCAKCGEKLRSVGNSTHAYVRCLNSYAAAGCDTPRYPLTTIEKALMDRFLVGQGRFMSDYIPKESPDPSAPLRAELAENQKRLANLIKLAEAAPDVEGIAQRLSEISRTITKLEKDIAKATPDVPITTEELHDAKWAYDALTKGEVSTEELVELRRKLQLSIRRVVKRVDVLPDSETIRYTIYSRKAGGDVVREIKYEKLPWGFQKGNVRGKRA

SEQ ID NO: 10411 - protein, 511 aa, Unknown
  Description of Unknown: Integrase B10412 sequence
  cd00338,PF13408,IPR011109,IPR038109,PF07508, Coil,PS51736,G3DSA:3.40.50.1390,PTHR30461,IPR006119, IPR036162,PTHR30461:SF3,IPR025827,PS51737,PF00239, SM00857,G3DSA:1.10.10.2600,SSF53041
MNIAAYCRVSTDKTDQLNSLEAQKAFFAEYTQRTGDTLVRLYADEGISGTKIKNRKEFLRMMADAEHGLFEMVVVKDISRFARNTVDLLQSIRKLKSLGVETQFLTANMTSMGNSEFVLTIFGALAQEESANTSKRVKFGKKMNAEKGRVPNIVYGYDKTIGDYFNLTINPEEADVVRQIFQWYTKEGYGSAKISIFLNQRGLKTKRNCPWNQNGVRRILNNELYIGKIINGKEEVTDFLTGKRTERSEEDWLIVNRPELQIVDSETFEQAQQIMASRTELFKLSHERQSNKHLFSTLIRCKECGWSFRRTVRTYKNTYVRWVCSHHNGRGESECSNRITIDEEELVTVLQEYFANLLRFKKDVILYVIKEFQRVYRAKDENVEYEKELNAQIAKLQKSRQKYMNMYADDLITREEVNEKIGGMRKEIERLENELKMVAFHLTKAELLEAVLRQTFKEIEDIADVRQMTNAQLKRIIQKIEIDKDGNVDIYLRLFSDLGLEETVLVNDICT

SEQ ID NO: 10412 - protein, 511 aa, Unknown
  Description of Unknown: Integrase B10413 sequence
  cd00338,IPR011109,Coil,PS51736,IPR036162, IPR006119,G3DSA:3.40.50.1390,PTHR30461,PTHR30461:SF3,PS51737, PF00239,SM00857,SSF53041
MRVANYYRVSTKLQEKKFSLPAQKTELNKYVNQMGWSLIDEFRDVDSGGKLSKDGLNALLDLVENGGIDVVLVVEQDRLSRLDTIAWEYLKSTLRENGVKIAEPGNLIDLENEDDEFISDIKNLIAKRQKKGIVRAMMRGKRQRLREGKGWGQSPFEYRYNRQTAKYEAKEEWKWVIPFIDNLYLNEQLGMKLISDRLNEISKTPTGRKWNEHLVHTRLISKAFHGIQEMDFSTGETIAAPVYEPMRTEETYNKLQIERKKRGEQFSVSGRKNTENIHMLKRTNLTCGKCGRKILIATHGTKKSPLYYAKHGRKLRIKDGSICDININSVRFDKNILKALKNILVSEELAKEYINIDHNEEEISNLKNKIKSMEKDLTDLRSSAERLLDLYLSGGLNKDKYMEKEKELNSKLTIQEEELEKHKRKFEAIESSSFTYENLYQYIELTQNIETELTNLEKAQLMGTLFPTGILYEDKLILITEVFNGIPIEVKIPISDDPFPWHSTKRGNTKK

SEQ ID NO: 10413 - protein, 511 aa, Unknown
  Description of Unknown: Integrase B10414 sequence
  cd00338,IPR011109,IPR038109,PF07508, Coil,PS51736,IPR036162,IPR006119, PTHR30461,G3DSA:3.40.50.1390,PTHR30461:SF3,PS51737, PF00239,SM00857,G3DSA:1.10.10.2600,SSF53041
MPVNVLSDEAYIIYLRKSRADNPHESVEEVLAKHEIQLQEYAERELGGRIPEHCIFREVVSGETIAERPEMNKVLAMIENPKLKGVLVVEPQRLSRGDLEDCGKVVNAFRYSKTEVVTLNMTYDLTNKMQRKFFEQELMRGGDFLEYTKEILLRGRIAAVKRGCYIGNIPPFGFNKIVDADGDSTLEANDMAPAVLMAFEMYVNEGKTYLQIARHFDSLGIKPYRSKVWEKSSIRAMLKNRHYIGLVVFGAYRTEKTVENGQVVAHSVRQAEDEVIVAKGKHKGIVPLELFEAAQEKMDNNPRAKWDMPLQNPLAGLLWCQKCGRAMAQHPYKHAETRVECRNRSGCNANSAKLREVVEAVAYALEMEQLPELEVKLTNDEGKAASIQKKQLEKMNKEMDELHAKEERQHDLLESGTYSEETFLKRNKALHAQMEELRSKIYEAKQNLPKEIDYQDKIIKLQDAVEGLRDDSLSAEQKNRLMKAIVRRIDYEFIERKRRQTRFRLHIDLLL

SEQ ID NO: 10414 - protein, 511 aa, Unknown
  Description of Unknown: Integrase B10415 sequence
  cd00338,IPR011109,IPR038109,PF07508,Coil, PS51736,G3DSA:3.40.50.1390,IPR036162,IPR006119,PTHR30461, PS51737,PF00239,SM00857,G3DSA:1.10.10.2600,SSF53041
MIRRKIIMYLRKSRTDNQSESVEEVLSRHEKMLQDYCIRVFGKQIPEDCIYREVVSGETINERPMMLKLLKDIELGLVDDVIVVEPQRLSRGSFGDIDRIVNTFKYTNTKVITPTKVYDLNNKFDRKYFEQELLRGNDYLEYVKEILVRGRIRSVEDGLYIGSVAPYGYDKIKLPKKGYTLTPNKDTENVKYIFEKFLEGMGTTNLAKHLIELGIKSHTGKQWTPAMTRNILMSEIYIGYVSYGRREGKKTMQDGEILKSRPVNNDYLRVKGLHTPIISEDIFNKAQELLKSKASKNVRSDKTIKNPLAGLVKCKYCGSNMVRRPYDKRPVPTLICKTIGCKCVSSDLTLVEDRVIELLKKELNSYKQFLDNYEEEIKTSTNAIDKKINKIDKELELLNKDLQNALVNYNRNKITEDEYTFLRNYTREEENRLNALKSTLNSQLENAELNHKIKAIPVIENCLNEYHSLSMADRNKLLSYIIDKITYEKDKGGRWNEDARSNFIIELFMKI

SEQ ID NO: 10415 - protein, 511 aa, Unknown
  Description of Unknown: Integrase B10416 sequence
  PF13408,IPR011109,IPR038109,PF07508, Coil,PS51736,IPR036162,PTHR30461, IPR006119,G3DSA:3.40.50.1390,PTHR30461:SF3,PS51737, IPR025827,PF00239,SM00857,cd03768,G3DSA:1.10.10.2600,SSF53041
MKYMLYARVSPKGSDWHAEETSISMQIQEMKDYILRKDPAAKFLIQQDEFKSGKNLNRPGIQAVLSDLELPEPPWSTLVVWALDRLSRSLADAVPIFEKLRDAGCGFICVRQDYLSTQGAMARFTLNQTILIAQLEREMTSERVKAKMVWIAEKGKIPAGKIPLGYRRKKNAKNEIEPDPETAPIVQDIFKSYLAQTETVVELRRRYSEYIYGKMQLYRMLRNRLYIGEVEYDGKVYPGRHVPIIDRDLFDAVNAMLPGERRAPRPGRQIYKYLLQGLVFCECGKKMVPYSVKKSGNTRYFYYKCQDTDSCKYAINAERLDAEVMEAVKEIALDENYIRERYEDWQRDRAEQEQRNRAEIEKSATLVTEAQREVDKIDNLFLSGVVTSANASHWNAKLQAARDNLNLLQEKHRHLVDDLAGVKANADLPDLLQELRRWADLLDRAGDDFNIKRNLILGIVKNVRCIDREGHIEIAVMTKGKKWRPEWGLVITFRRVIDKHVRKFRNGSLKG

SEQ ID NO: 10416 - protein, 511 aa, Unknown
  Description of Unknown: Integrase B10417 sequence
  IPR011109,IPR038109,PF07508,Coil,PS51736, G3DSA:3.40.50.1390,PTHR30461,IPR036162,IPR006119,PTHR30461:SF3, PS51737,PF00239,SM00857,cd03768,G3DSA:1.10.10.2600, SSF53041
MYQKKKGRVLKMIAIYCRQSIDKKDSISIEQQEKYCKRRILDNVTFRVYKDKGYSGGNIKRPGFTNLLKDIKNGKISKVVVYKVDRISRSLKDFIEIYNDFEKYNVEFESCSEQFDTSTAMGKATLQIIMVFAELERNMIKKRVSDNFYERGKKGLFLAGVAPFGYKKVPTVLENINTHILEADKYQSSIVKFIYQKYAETKSLGDVVKKLNENGYKTNRNKNFQNVAVRRILRNPVYVRANADVYIYLESKGAKINQPIDEFVGLYGCTVYSKRQGKTRAKFSTYDGEFVQMNTHEGIIDASLWLEVQRELDKNKPISNSGRGTHTWLTGLTKCGYCDMSVTVVNGQRNGKRYVNCGGRKNKTCYERKNPITFDDIEISVKNDLIDHIKYFEFTKLERNIQYQKEKNELKIQLKKIQDEIENLINKIPMANEKVMNYINEKIDELDSQRISIQNKISSFKSSDFENISDDVIKSTITNWDNLTLEDKKLIARAFIEKVIVYDNKIDIIYK

SEQ ID NO: 10417 - protein, 511 aa, Unknown
  Description of Unknown: Integrase B10418 sequence
  IPR038109,PS00397,IPR006119,PS51737,PF00239, cd03768,G3DSA:3.40.50.1390,PTHR30461,IPR025827,SM00857, G3DSA:1.10.10.2600,SSF53041,IPR011109,PF07508,PS51736, IPR006118,PF13408,IPR036162,PTHR30461:SF3
MNDVLIGYARVSSEEQAQHGVSISAQRDILNGYAAMNETTIEIYEDPGFSGKDTNRPAMRRLLDRCRAGGVSAVVVWKLDRLSRSLRDTLAIIEDILQPNHISMVSVTEKIDTSTPSGRMMLNLLASFAQLEREQDSDRVVMAHKHLAHDCRYLGGHIPLGYRVDADKHYQLDPILAPVARRVFDLYLARAGYKVIMDYLNGPEIFPLTGRKRPFRKPDLSFMMQNPVYSGTYVRKLGADPRHRITAPEVISIPGGVPALLSPEEWERVLQIRTENGKAMAMYKAKSNYPLTGLVYCSVCGGRMFLNHGGKTRARESERYYTCKNKCVKPARVEAAEKATFDALIWFSEHLEELRQSCEIANGFSDQAEQDKAPRREEIEKQIADNRKKAAQITAFIAKNGASAPASLMDELTAIDEQSAALAAQLDSLARPVARYDAEKTISAVAAAVDAIKKGPPEQLKTTVQAAVYRVIVSPDSFDVRLAWHTFGGDEPPRNVCHILPRANYTRFVNR

SEQ ID NO: 10418 - protein, 511 aa, Unknown; identical to SEQ ID NO: 10306
  Description of Unknown: Integrase B10419 sequence
  PF13408,IPR011109,IPR038109,PF07508,Coil, PS51736,G3DSA:3.40.50.1390,IPR006119,PTHR30461,IPR036162, PTHR30461:SF3,IPR025827,PS51737,PF00239,SM00857, cd03768,G3DSA:1.10.10.2600,SSF53041

SEQ ID NO: 10419 - protein, 511 aa, Unknown
  Description of Unknown: Integrase B10420 sequence
  cd00338,PF13408,IPR011109,IPR038109,PF07508, PS51736,IPR036162,IPR006119,PTHR30461,G3DSA:3.40.50.1390, PTHR30461:SF3,PS51737,IPR025827,PF00239,SM00857, G3DSA:1.10.10.2600,SSF53041
MRVAAYARYSSDQQRDASLDDQLRNCRTYCVRMDWPAPVTYTDAAMSGARNDRPGYLRLLADASRFDVILVDDLTRLSRDSVEAQQAVRRLRFAGVRVIGVSDGLDTGRKGHKAEVGLRGLMGELYLDDLRDKTHRGLSGRALSGASAGGLPYGYRVTETGLRAIREDQATVVRRIFADYLAGQSARAIAAELNREGVPSPRGATWAVSAIYGDAKRGIGILANPIYAGRQVWNRSQWVKHPDTGRRLRRERPPAEWITTDHPELAIIEPRTWQAVQDAIKRRGHVGGNRGRAPRALLSGLLRCGECGGPVTMIDGHSYGCATAKDRGTCGNRMRVKRTEADAEMVAGVRDAMLTEDAMQLWRAAIARATKAQAGDAGAARRRLAQAAQERDNIMAAIRQGIITPTTRAALEAAERAVSGAEAALQQPAQILPDARARLRRIADTLADRARQVPAAREALRALIGEAVLRNENGNPVAEIAGSHLAMVAGAGFGHWMTEPLVIPLTARRES

SEQ ID NO: 10420 - protein, 511 aa, Unknown
  Description of Unknown: Integrase B10421 sequence
  cd00338,PF13408,IPR038109,Coil,G3DSA:3.40.50.1390, IPR006119,IPR036162,PTHR30461,PTHR30461:SF3,IPR025827, PF00239,SM00857,G3DSA:1.10.10.2600,SSF53041
MQVSNNHPFSLNSPVVAYLRDSGHEDQELSVAQQEAAIRAWCEQNGLILTRVFIDEAAPGSSTVGRETFQALIGHFHNPACREAGVILWKYNRFARDIDDAQFYKADLRRRGYIIHSLNDSVPAGLDGRFFESAIDWMNARYLEDLSTDTKRGLHHIMDQHGALGGVPPRGFMREPVEIGLRRDGRPHIVHRWVPYPDLIDQVRLAFELRAMGASYAEITRQTKLYKNKNSWPTFFCNKIYIGVMEFGDRLIEDYCDPIVPKAVWDAVQARQKVLSRRNTMSVKSHPRRVASRFLLSGLAQCGLCGSPLNGDTATAKGIYRYDYYTCSRANRRGDCPATKIPRQALENSVLDSLSDYILEPNHIQELTTELENNASHAVEQVEQRKQDLNKKLSSVRRKIDNLVDVIADQGRSAGALHTKLTELEAEEGQLLAERVQLTPRAKKLRPTEEIQDLVNEIRGLRAENNTTRLRDILRGLIDRVEIKRDEDRISGTIWYFTPVLALGECPRRES

SEQ ID NO: 10421 - protein, 511 aa, Unknown
  Description of Unknown: Integrase B10422 sequence
  cd00338,Coil,PS51736,G3DSA:3.40.50.1390,PTHR30461,IPR006119, IPR036162,PTHR30461:SF3,PF00239,SM00857,SSF53041
MQAALYLRSSKDRSDVSIDAQRRELIDLAKSKNLVIIEEFADAVESGKDDQRPGFQAMLSQLKSRDRKWTFLLALDTSRIARNQYLAHALHYECDKRNIKILYAKMPETGSVVDVVIRAVMQSFDQLHSLMSKEKGMAGMAENVKQGFRAGGRAPLGYKLQSHETGAMRDGTAVTKSKLVPGDYFNEVKEFLKLRTLLVSRSKAAQDAGLLSVAHTTLLGIEWNALTYAGHTVWNVQNERLPSGGYKGNTKRKPRTEWVIQHDTHPALITTDEAEGILKVLEQSTRGDARKTKSEYLLSGIMVNEMGLPYHGSEGIYYRAGKGRRLKREDLEPLILQRIMSDLQSDEFIADCVKSARQSAQPIPDDEVKALKSEVNKISGQIGKLMDIAAEADSPRPWLEKIEKLELQRSDVVARLDKADANYRSAQLLLTISERDMKQMIGGLSSNVDFADVQRAKEFLTSVIDNIVLTETPRLICTINYSISSGDSVASPRLRDTIPAIKLARLLKLAA

SEQ ID NO: 10422 - protein, 510 aa, Unknown
  Description of Unknown: Integrase B10423 sequence
  cd00338,IPR011109,IPR038109,PF07508,Coil, PS51736,IPR036162,IPR006119,PTHR30461,G3DSA:3.40.50.1390, PTHR30461:SF3,PS51737,PF00239,SM00857,G3DSA:1.10.10.2600, SSF53041
MAEKAVIYARFSSDKQREESIEDQVRVCSQFAASKGFEIVKTYTDEARSGTNAAGRPGFQKMILDAQAQRWTKVIVYKTDRFARSRYDSAVYKAKLRKCGVEIVTAAESVPDGPDGIILESVLEGMAEYYSANLAQNVKRGMEGNALKCKHNGVSIFGYDRGADGYYAINEHEAEGVRMAFDMCAAGETKAEIMRRLNGLGYKTVTGRHFSNEAVSRLLNCERYIGTYTWGDFRKENGMPSIIDRELWDSAHAHMASRGRKRRGKMNAEYLLSGKIYDADGNQFESDCGYGENGRQYHYYRCRKTKVSMRRDEVEDKVIGACARLLNENPDLDERIVDMVLARQDKDAEQEISAREALSRRITDVEREIDNAIDLACKLGSTDRMAVKINGLQDELTALKAELDEIKRGAPLIDRDMILFALYKMRQSDGPRGMVAAFVDRVTVNEDGSLLVQFILCRPSSENKKPEPSNGEFGKISCGSPGVNYPELFQVYHSVGILPLKGGFGVLLAA

SEQ ID NO: 10423 - protein, 510 aa, Unknown
  Description of Unknown: Integrase B10424 sequence
  cd00338,IPR011109,IPR038109,PF07508,Coil, PS51736,G3DSA:3.40.50.1390,IPR006119,IPR036162,PTHR30461, PS51737,PF00239,SM00857,G3DSA:1.10.10.2600,SSF53041
MDTDIFAIYLRKSRKDLENQDYDVLKRHRKILLDFAKSKRITIHEEDIYEEVVSGETIQDRPIIQNLLKKIEAGYYKAVLVMEIERLARGNTIDQGIIAQAFQLTNTLIITPNKTYDTNNEYDNEFLEFGLFMSRREYKAISRRIQTGRIQSCKEGNYVGSITPYGYDKEKLKGEKGYKLIPNNEAANVKLIFELFLDGLGTSSLSYKLNELKIKSKTGKQWTPAMVRNILINKVYIGILTWGKRANVKKLDNSVISKSRPINNNCIESKGKHEPIIDELTFYRTQELLKANSSKKVHKDKSLQNPLAGIIVCKKCGTNMIRRPIKNIPDTLLCKNHYCDNVSSYIYLVEKRLLDSLRNILNKYYHYLENYEEEHIKQKKDYNSQIKRLEQEIEKLKKQHIKTCELLETGVYSLELFKDRSSSIKEQIDGINKQKEELIKLNENNKIDKIIQAIPKIENCLKIYDTLTTEEKNKLLKTIINKAYYLKNKAGNRWDKDTQDKFTLELELFL

SEQ ID NO: 10424 - protein, 510 aa, Unknown
  Description of Unknown: Integrase B10425 sequence
  cd00338,PF13408,IPR011109,IPR038109, PF07508,Coil,PS51736,IPR036162, IPR006119,PTHR30461,G3DSA:3.40.50.1390,PTHR30461:SF3, IPR025827,PS51737,PF00239,SM00857,G3DSA:1.10.10.2600,SSF53041
MTADLIPAVIYARYSSSGQREESIEGQIRECTEYAERNGMRVIRSYSDKALTGRTDRRPDFQQMIADSEKHLFQIVICWKTDRFARNRYDAAVYKAKLRKNGVRIVYAREAVPEGPEGIILESVMEGFAEYYSANLAENVKRGNYDSALQHRTLGKKVLGYRTAKDGTFEIDPLTGPIVTEIFQSYKSGKTMKEITEDLNRRGIHTVTGGQFNKSSLHRILSNEKYIGIYEWQDIRDEDAIPKLTDPETFAICQKLMATAKKKRRSRDLDRPDFLLTGKCFCGHCGESMTGDSGKSKTGSVYWYYTCNGKRHHTCQKKREPKQDLEDFVVHQLVQILHSDDGYLEEMSQRVADQLAAGSEQSELAELKRRQTQIRQKISNLVGILEDAPSKAMASRLAALEQEDEDLSIQIEEAALAAPPSLSADQILFMLTRLSDGLESDPEYRRRLVDTFLNSVYVYDDGKIVIHLNFTEGNSTASFEYTRQFVQSLAESAYQASIRNGIMSFAVARF

SEQ ID NO: 10425 - protein, 510 aa, Unknown
  Description of Unknown: Integrase B10426 sequence
  cd00338,IPR011109,IPR038109,PF07508,Coil, PS51736,IPR036162,IPR006119,G3DSA:3.40.50.1390,PTHR30461, PS51737,PF00239,SM00857,G3DSA:1.10.10.2600,SSF53041
DTEDRQVRSLADQLSELRELAKKEQLNVVDVFIEKQTAKTPGRPVFAEMIERIEKGEANGILAWHPDRLARNSVDGGRIIYMVDTGTITDLKFPTFWFDATPQGKFMLSVSFSQSKYYVDNLSENIKRGHRQKLKNGIWPQKAPLGYLNDKVTKNITIDTEKAPLVVKTFEAYATGNFTFAQVRQKINDLGLKGTGDGVLAVSNFQYLLKNPFYHGLIRYGGEFYEGKHPPIISKKLFDDVQEVMTRKSKPHSKGLKPYVYRGLFHCGECGCFITTEQQKGHNYLRCTKRKGVCSQKYVREEIITAKMQEELRKYSLADEVADWLIAEVEKDSVTDSASSGIQIGKVNNEIAIIDVKLDKLMTAYLENALTLTEYQETKNKLVTEKHALKDKLSAFERSATIRFEPVVNFLNDCKQATIVAESNDPTKIRAQIEKVGSNPLVRDRTLVFSARSPWIFLSKIPKNANKDAGGAEGGFQGGIPPRPPHSAILSPFSADSEFCAKLRWRFPEV

SEQ ID NO: 10426 - protein, 510 aa, Unknown
  Description of Unknown: Integrase B10427 sequence
  cd00338,IPR011109,IPR038109,PF07508, Coil,PS51736,G3DSA:3.40.50.1390,IPR036162, PTHR30461,IPR006119,PTHR30461:SF3,PS51737, PF00239,SM00857,G3DSA:1.10.10.2600,SSF53041
MERTAIYLRKSRTDIEAEARGEGETLAKHKKALLKFAKEKGLNIVRIREEIVSGESLLHRPEMQELLKEVERGEYTAVLCMDIDRLGRGNMQEQGLILNAFRETDTKIITPTKTYDLKDESDELMTEIQTLFARQELKIITRRMQRGRTQSVEAGNYIGTRPPYGYEIRKEGKSRWLVPHPEQSKIVQMIYEWYTHDDPNERMGASKIANQLNEMGFKSYTGIPWSDSSVLAILKNKVYIGRLQWKKKEYKKTATGRVVKSRVKAEVLDVKGKHEPLISQETWEKAQEILKGKYHVPYQLENGITNPLAGLVRCAKCKYSMIYRPYTTQPAHLMCYNKDCDCRSSKFEYVEKAVISGLKEWLRTYKLELSKHKREDKSDREVELKQMAVAALEKEMSELEVQRGRLHDFLERGIYSEEIYLERSQNLAARMEDNRRAMERARTELQDAMNREKQQNNIIPMVQNVIRLYERSKDPAKKNALLKSILVKVEYRKEKHQRNDDFNIELFPKL

SEQ ID NO: 10427 - protein, 509 aa, Unknown
  Description of Unknown: Integrase B10428 sequence
  cd00338,PF13408,IPR011109,IPR038109,PF07508, Coil,PS51736,IPR036162,IPR006119,PTHR30461, G3DSA:3.40.50.1390,PTHR30461:SF3,IPR025827,PS51737,PF00239, SM00857,G3DSA:1.10.10.2600,SSF53041
MPKVTVIPPSINRTTRQSTTTPTRRKVAAYARVSTDFEEQLTSYEAQISYYTNYIQRNPDWEFVKIYTDEGISATSTKHREGFNSMIADALDGKIDLIITKSVSRFARNTVDSLTTIRKLKEHHVECFFEKENIWTFDSKGELLITIMSSLAQEESRSISENVTWGQRKRFADGKVSLPYAHFLGYRKGENGLPEIVPEEAETVRYIYQRFIDGLTPYKIANELTAQGVPTPCGKEKWSASTVKSILTNEKYKGDALLQKKFTVDFLTKKQQINEGQVPQYYVENSHPAIITPEEFDFVQSEFQKRCMKPYSSTSIYATKIICGDCGSYFGAKVWHSNSKYRRVIYQCNSKFKGSHFCTTPHLYEPEIQEKFLQAFAQYFSQKDVVIKNCQFALNCLKKQESKKKELQDELVAVNEKLKEYIQHGGEDFDALNAKYEELSAQLDAEEAAESDRKRRIAKMQKILQTLKKTDSVLETFDESVWNAVLENLTVFHDGSLVFLFRDGTEIKV

SEQ ID NO: 10428 - protein, 509 aa, Unknown
  Description of Unknown: Integrase B10429 sequence
  cd00338,IPR011109,PF07508,G3DSA:3.40.50.1390,PTHR30461, IPR006119,IPR036162,PS51737,PF00239,SM00857, SSF53041
VKRLPRSVDALRGLRAARWVRESTERQTERYGPDAQRAIGDEAIARYGLTDSGRVWQVAHSGRTIATTAQFAEMLAGAGTEWDVLVVSYASRFARDLRTAINARHDLHLAGAVILFCDEALVSSDEDRWEQYVELTKEAESYSRRLAKRVTEGYAAKFRTLGDQGGAAPIGFHRVGSDRRLAIDPDAIGLPVAVFQRYATGVVSYADVGAELGMEAGAVREILRNPVYNGWVRRYRRSIMEERKPAPWRDEPPVSDALWDRVQELRLRRTRSSGQHAADRPRPLLSGLLHCSCGFRIRSNGTQGSPPHPVVIHHGRCDAWGERLTWPTAPYEAAIAAQVTGMRIPDSDVAALVRMLAHPSPALPSVRHGVERRLRDLAIAHAESRIGDADYLARREAIRSEPVVETPAEGIDAAEVVRWIRELPDAWAEASHDWRRALLAAVYERIVIEGERFVDVIPTSHAVARGLPALLPSVIELVSREGNKTSRYISIPVRGGEAARLRLRAARTA

SEQ ID NO: 10429 - protein, 508 aa, Unknown
  Description of Unknown: Integrase B10430 sequence
  cd00338,IPR011109,PF07508,IPR036162,PTHR30461, IPR006119,PS51737,PF00239,SM00857,SSF53041
MQDMPTCVIYLRLSDSRTEEALDGREEKLRAEAKRLGWIVSRVQPENDAPRRVGGKMAPASAFKRRAVRTASGEIVRDPDTGKPVMRVIRPGWQSVIADLKTGRASAVLAEDLDRACRDPRDLEDLLDACAQTGASARSLTGSLMLTNGGNDSEIFMARVMVAQAHKSSSDTSRRVRDAKARYFGQTYQGGLRPFGYAHVADTEKYHRTLMVVPDEKDMILAAVADILDRDISLAAITRDWRARGALTVTGKPWTSQKLRQALIKPAVAGLAVFGASLKPAPWPHILERDTWEKLKAKLDDPVRRNTTGNEPKHLLSMIARCGICDDGTVLYSMGVGHRGGRGYACRNAGWHLRRNGRHLDECVEAVVVEWLELYGKTALKPPPRQAGINAPALRAEAGRLRTAKREQMRMHSAGTIDNDDLAEGLREIRDRLAVIDAQLAVSDQPDPLAEFRDAPALAVWRSLTLPRKRAIVRFLVEVTVYPTARRGPGFDRASVDVTARYPGGESC

SEQ ID NO: 10430 - protein, 508 aa, Unknown
  Description of Unknown: Integrase B10431 sequence
  cd00338,IPR011109,IPR038109,PF07508,Coil, PS51736,IPR036162,PTHR30461,IPR006119,G3DSA:3.40.50.1390, PTHR30461:SF3,PS51737,PF00239,SM00857,G3DSA:1.10.10.2600, SSF53041
MTEYNIMYLRKSREDEKDPTFTLDKHRRTLLEYAQKEGLGISKIYEEVVSGDTIAARPRMQELLKDIENGTVTGIICMDLDRLGRGDMKDQGTMFEIIKLNRVIIYTPDRTIDLNKPCDQDYAEFKAFFARMEYNTIKRRLRNGTNRSAKDGWHVGCIPFGYERIYMYHGKPSHNKNGKPTLKEDELTAPYVRMMFDMYVNQLKGTPTIAETLNAMGIKTSRGNDFRRNSVTKILKNPIYIGKIYFNREECIRKSKTGSKSLTRLKPESEWIIADGNHPAIIDEETFYKAQEMLKGRTHPPFNTGELKNPLAGLVICSKCGAPLQRRPYYQRGMEPHMLCVTKGCQMAVLQTRLEESIQNNMREYISTADEKFQAIIGTPKANTASSQISSLEKELSKLNSQKAKLYDLLEQEVYTIDLFTKRHQEISEKITLLTEQISQIKTTHISTEQQITILENRLSNMKTLLAEYDTLTAQQKNNSLKQIYSKIYYTRQKGPHSSPFTLECEYL

SEQ ID NO: 10431 - protein, 508 aa, Unknown
  Description of Unknown: Integrase B10432 sequence
  cd00338,PS00397,PS51736,G3DSA:3.40.50.1390,IPR006119, IPR036162,PTHR30461,PF00239,SM00857,cd03768, IPR006118,SSF53041
YWGGAVMAAYIYARVSTVEQVVGGCSIEGQVRSCRLYCEANGLVLGAATNCDKAGVILDGGRSAFSKPFATRPGAMLLAGALQQGDTVVVTSLTRLFRRVAEAATIMERWVQIGVSVTFVDYPSLSFDSANGRCLVYCMAAVAQLKSELIAARVREGRARKKGLPAEPNRPAKPAKVLLPAAQQPIAEVIRRMAEKRPSSRSGRVCVYARVSTDEQSVDTQLAILRQAYPGAVEYVDHGVSAWKTSLPDRPEGGRMLRELQPGDTIVVLRPDRVFRSLKDAATQIDAIQKVGAFLHIHEGGIKSDELFGRLLLGMLSAFAQLESEETSRATKHAMAIACGTNDAALQARLPKPLLRDVPPKTKHYVFDDVFDSGERQQMWLTVHLTKANYCSLGVCILDATNRSLYEKGLPPLTSQSMDMRDYRQALREVGTKKAKALIPKIENYARVASPVGSSQNFPKAEKRYEHFMRVFGELPREQRDLRLLTMMQSPKAVAAFADATKRAVETV

SEQ ID NO: 10432 - protein, 508 aa, Unknown
  Description of Unknown: Integrase B10433 sequence
  cd00338,PF13408,IPR011109,IPR038109, PF07508,PS51736,G3DSA:3.40.50.1390,IPR006119, IPR036162,PTHR30461,PTHR30461:SF3,PS51737, IPR025827,PF00239,SM00857,G3DSA:1.10.10.2600,SSF53041
VKGYPRKHLLLLAFRVIYRLPKRKEVWLVEIQIREGSREQKRKLKVCAYCRVSTDADEQENSLENQVRHYEMVIKANPDYEYAGVYSDFAISGFKEKRPGLQKMLADAEKGKIDLILTKSVSRFARNTSIVLEATRKLKELNVGVFFELQNINTLSGEGELMLTILAAFAQAESESGSAGAKMVYQRKYEAGIPVQYLERSFGYTKDERGVFVADEAEAVWVRKIYKMAAEGYTPASIKRYLNENGIKTVGGVQWVDSTVFRLLENEIYKGDYIMHKHFVNEERKLVRNRGEVDAWYIEDDHEAIVSPELWQKAQDALAAKRDYLAEGSVIEEFTEENYPYMNKIYCAKCGYPLYKRIYSKGNRLNWGCSGTKRYGKSFCDGINIPDGVLRSAWHFEENTYIDEKASDKGVKEFTYLKERSWKRRHKKKQPSAIPENTETEYPYREKIFCALCGSRLVRYVNPQNYKVTWVCNRRKRKGKEACDGTRVPDTVIKGWGEIKKDIYIQRK

SEQ ID NO: 10433 - protein, 475 aa, Unknown
  Description of Unknown: Integrase B10434 sequence
  IPR038109,PS00397,IPR006119,PS51737,PF00239,G3DSA:3.40.50.1390 ,PTHR30461,IPR025827,SM00857,G3DSA:1.10.10.2600, SSF53041,IPR011109,PF07508,PS51736,IPR006118, cd00338,PF13408,Coil,IPR036162,PTHR30461:SF3
MKIAAAYIRVSTDDQIEYSPESQIKAIRDFAKRNDYILPDEYIFMDEGISGKTIKKRTEFQRMIGIAKTTPKPFDAILLWKFSRFARNREDSIVYKSMLRKQLGIDVISISENLGDDKMSILFEAMIEAMDEYYSINLAEEVKRGMTEKANRGEPLSVPPFGYLMKDKQLFPHPDESAMIKMIFTDFANGMGKMAIARKVNDMGARTHRGNKFENRTVDYILNNPVYVGKIRWNPSGHTDRDFQNESLIIKKGSHEPIISQELWDKVQELNKQLKVKHKKYQRETSEPSHIFQGIIKCSRCGSTMIYSTGGIQCHLYSKGRCDTSHYISIKKIESIVLNKIQEDFATGTFNIVPRTPENINQNNFILKRIEREEQKLLRVKQAFEKGIDTIEEYAENKKRIQEEISSLRLQLTSDAYTADTHSLQKNFLQKYSDLILKLRDDNVSISDKNRILKMFVDEIVYNKKSATVDITYFL

SEQ ID NO: 10434 - protein, 401 aa, Unknown
  Description of Unknown: Integrase B10435 sequence
  cd00338,PF13408,IPR011109,IPR038109,PF07508, PS51736,G3DSA:3.40.50.1390,IPR036162,IPR006119,PTHR30461, PTHR30461:SF3,PS51737,IPR025827,PF00239,SM00857, G3DSA:1.10.10.2600,SSF53041
MIDIYADEGISGTNTKKREGFNRMIEDCKSGKIDLVITKSISRFARNTQDCLYYSRMLKNQGIGIIFEKEGISTMDASGELLFTILSSLAQEESRNISENCTWGIRHNFQRGIVHFNTTGFMGYDSDEEGNIIINQEQAMIVRRVFREFEEGWTPNEIAKHLNEEKINGVKGKPAWNGATIRGMLTNEKYKGDARLQKTFTADYLTKKRLKNEGQVEQYYVEDSHKGIIPKTEWEAVQMELDRRTNYCKEVGLSSFGMASVDSPFVSRLVCAHCGAAYGRKCWRSRHQFYWTCRNREAKNGHICHADNVNEEVLQKVFIIAWNGIVKSRDKMLPTWEAMKEAVNPLQMMRAQQMIELTEEGLLTCLVPELTRMVLERIIIHSKTHFTVKFLDSTSKEVCIL

SEQ ID NO: 10435 - protein, 508 aa, Unknown
  Description of Unknown: Integrase B10436 sequence
  cd00338,PF13408,IPR011109,IPR038109,PF07508, Coil,PS51736,IPR036162,IPR006119,PTHR30461, G3DSA:3.40.50.1390,PTHR30461:SF3,PS51737,IPR025827,PF00239, SM00857,G3DSA:1.10.10.2600,SSF53041
LNGVIYARYSEGPRQTDQSIEGQVADCTAYAERNGIDIVGLYADRGISGKSAENRAEFQKMIRDAAAGKFQVVIVWKVDRFGRNRQDIAFNKYKLKKAGVKLMYAEESVPDGPEGIILESVLEGMAEYYSADLRQKVIRGRRETLKKGLYCGAPLPLGYRVDEERHIQIDEEVAPAIREVFRMYASGTGVNDLVDYLNKLGITGRRGGRISPAVIYRMLRNERYLGIFDTDGVELRAEPLIDEATFRACEDYFRPLHQNAAGRANVDYKLSCKCFCAYCGAMLVGESGTGKKGKVYHYYKCGKKKRGSKCKLKPIRKDVLEEAVLKATMEDMLTDETIAVLVDEILRIQDQEAEADPASALRKQLDSNRKRQRNLLDAIEEGTGAKGLAARLADLEAEEHDLVIEIEKAELQQPRISREDITAWLCSFRGGDIDDPEFAARLIDTFVAKVEVKNGMAAIYYNIRKGGHKKTTDRSRVRIRSVEWGSRSLIRTRKPFVHDGYIVLLIAV

SEQ ID NO: 10436 - protein, 508 aa, Unknown
  Description of Unknown: Integrase B10437 sequence
  cd00338,PF13408,IPR011109,IPR038109,PF07508, Coil,PS51736,IPR036162,PTHR30461,G3DSA:3.40.50.1390, IPR006119,PTHR30461:SF3,PS51737,IPR025827,PF00239, SM00857,G3DSA:1.10.10.2600,SSF53041
MKRAVFYGRYSSDRQTEQSIEGQRRVCEEFAKAEQIQIVGEYIDRATSGTSTEHREQFQKMLKDSKNCGWDYVLVYKLDRFARSRYDSAISKQQLKKNGVKVLSATERITDSPEGILIEGLLESMDEYFSRELSRKCKRGIRESIIKGHNFGGRVLYGYDRKDKRFVINEEQAVNVRRIFKSYLSGCTIQSIADQLNADGYRTNYGNEFKRYTVSDILHNDKYTGIHYIDGIEEPETCPAIISQTTFERVKEKLNQSAHRSREHTTGHTYALSGLLQCGVCGRYVCGSSVERKYFYYACRSREHAENSVHIHADKLEQVVIDALQTFFTEEQVSTLAERLYQIYTTDMDGKPDRSKRLNEIEKQIQGTVNALIACPSSKALQEKLTQLEEQKAEIEKMPILQPQLKKEHFENYFRWLALRLEHIEDRQTFFHTVIHKVLVYPEKAVIILNMTDEMADPPKREQVEAFMSNVGEVSLYPCPNCTKVNPKSSKFCDICTAPQRSKAISLM

SEQ ID NO: 10437 - protein, 508 aa, Unknown
  Description of Unknown: Integrase B10438 sequence
  cd00338,PF13408,IPR011109,IPR038109,PF07508, Coil,PS51736,IPR036162,IPR006119,G3DSA:3.40.50.1390, PTHR30461,PTHR30461:SF3,IPR025827,PS51737,PF00239, SM00857,G3DSA:1.10.10.2600,SSF53041
MVKVDKKINRGVIYARYSEGPRQTDQSIEGQVADCKAYASQHDIDIIGIYADRHISGTSTEGRDEFLRMMHDADRHAFDAIVTWKIDRFGRSREDIAVNKIRLRKAGVALHYAKESVPDGPEGILLESLLEGLAEYYSADLRQKVTRGIRESAKKGKVSAGQIPIGYKRSPEDGRLVIDPEKAEAVREAFRMHISGASMKDLQSALYKRGIRSRDGKLPSQSVVYRMLRNDHYLGRFEIQGVEILVDPVIDLETFEEAAAHFKGNHQNAAGRATVNYLLSKKCYCALCGKLLHGTHGIGKMGKRYYYYRCSSQSKCELKPIPQQELEDLVIRHTCEDILTDEMIGKLTEKIMEIQEKEQQGDPATALRTELKGLKKKQKNIIQAIEDGAGSSLVARLNEIDTRMDELAVEIERARLQHPVIPEEIVRGWLLSFRSGDKDDPVFRKRLVETFVSDIMVGPEEIVITYNTTQKGPTRTKCSSKPLKVDLSRSYSNPEIIEGRIVLRVFRQ

SEQ ID NO: 10438 - protein, 508 aa, Unknown
  Description of Unknown: Integrase B10439 sequence
  cd00338,PF13408,IPR011109,IPR038109,PF07508, Coil,PS51736,G3DSA:3.40.50.1390,PTHR30461,IPR006119, IPR036162,PTHR30461:SF3,PS51737,IPR025827,PF00239, SM00857,G3DSA:1.10.10.2600,SSF53041
MENNRAAIYARYSAGSGQTDQSIEGQVRECTHFIEGRGLDLVATYADRHITGRTDRRPEFQRMIADAESGAFDVVVVYTTDRFSRDKYDSAIYKRKLKNCGVRILYAAENIPEGPEGILLEALMEGWAQYYSEELSRKILRGMHDSATKRGATGSTPPIGYRVGPDKKYEIDPDVAPHVVRAFEMYMEGSRFCDISRYFAEHDILTGRGNPHSGQAIRRLLTSRRYIGEYHWSDVTIPGGMPAIVSEELFNMVQRKIRIDHPPKSKSAEYLLSGKLYCGLCGSRYKGTSGTSRHGTKYYYYKCPNKECSAGTVPARQLEQYIADAISDTLRDPGMLDLIADKLYEYRRSTTRGADPEDPAKKLEKIERQLDALALNLEKRPGSETLLNRLDALEAERDDLRIQISASAARPASAAFDRDQLRALVQIFLAGFPHSGKEATTKMILDGFVAKAVRTNKKILIELNVSGLDPLELEDLIGFDQNPDWWTSLSSGRTLICGSAVVLMISVA

SEQ ID NO: 10439 - protein, 508 aa, Unknown
  Description of Unknown: Integrase B10440 sequence
  cd00338,PF13408,IPR011109,IPR038109,PF07508, Coil,PS51736,IPR036162,IPR006119,G3DSA:3.40.50.1390, PTHR30461,PTHR30461:SF3,PS51737,IPR025827,PF00239, SM00857,G3DSA:1.10.10.2600,SSF53041
MNAVIYARFSSSAQREASIEQQINVCTSYAKQNGYTIVQTYSDRALTGRTDRRPQFLQMIKDAREGRFCAVLVYALDRFSRDKYDSARYKHELRACGVRVVSATEPITDNPSGILVESVFEGLAQYYSAELSQKIRRGYEDNAKKCLACGSVPFGFRRGKDGRYEIHPEEAEVVREIFQRVSAGETYADICRDLNGRGIKTKHGASWNRSSFNTILSNQRYIGTYLSKYHVQEDAIPQIVEKELFYQVQTLPRHTKAGPRRTPNGYYSLTGKLFCGLCGDAMTGTSGTSKSGKLCYYYSCHGHRAHKCDQRSYPRDQLEETICRAIWDDVLSDDAIRWMAHQTILDQDKIREDSDLDIIRTELAQTRSQKSNIMNAIKAGIFTASTRDELLKLEQEEALLEDRVKQAETAISALPSEDDIISFLDLFREGYASQELTNAALLDAFVIRAEVRPSDILVYFSIKKEDRQKIVDLPSGPECSFSPVKWTSPNSKRTLYRVGEWFVLRIVA

SEQ ID NO: 10440 - protein, 508 aa, Unknown
  Description of Unknown: Integrase B10441 sequence
  cd00338,IPR011109,PF07508,Coil,IPR036162, IPR006119,G3DSA:3.40.50.1390,PTHR30461,mobidb-lite,PS51737, PF00239,SM00857,SSF53041
VQYSRGMTETGYDATTWQQIEQSLRQRDADPAYADAPVLDAYARISKSPEGDLEKTDRQLVDILNNIARRPARLGAVLRDDNLSAWRRTPKGRPGWNVLVRRLEARTSAGVVAWHTDRLMRQPRDLERLIDFGEKHGLTVGSCHGDYSLDDQDDLFTLRVLTAAASKASADTSRRQKRKAQSLRDAGRLHGGARPFGLPGKELGGKAPVQPAQIEREREAIASAIRSHLDGVSLATICREWNASGLRTTSGKPWRVVHMGRLLIAPRVVGLLVHKGVVVGKLADVEPIVSEDEWRAVVATFKSRSRGRPASDPYLLSGGHLRCGVCGERMKGKPQHRPGSVVRRYTCRDINCGGVSIDALLVEAEVRSFVLTELADPKHQRQIAQTSAKLAEAEKRLRVARDTVTELARRLGEGEMDLDAHDAAVAPLKRRITKLTAERDALLDAGAGSALRVANRAELATEWDDPDATADHRRRMIRRVAPRGFIVMPRELGTSRVNVKARLRVAEQ

SEQ ID NO: 10441 - protein, 508 aa, Unknown
  Description of Unknown: Integrase B10442 sequence
  cd00338,PF13408,IPR011109,IPR038109, PF07508,Coil,PS51736,IPR036162, IPR006119,PTHR30461,G3DSA:3.40.50.1390,PTHR30461:SF3, PS51737,IPR025827,PF00239,SM00857,G3DSA:1.10.10.2600,SSF53041
MNAVVYARFSSSAQREASIEQQINVCMAYAEREGYNVLQTYSDRAMTGRTDRRPQFLQMIKDARKGRFCAIIVYALDRFSRDKYDSARYKHELRQSGVRVVSATEPITDNPSGILIESVFEGLAQYYSAELAQKIRRGYEDNAKKCLASGSVPFGFRRSADGHYEIMPEEAEIVREIFRRVGSGETYADICRDLNARGIKTRHGAEWNRSSFNTLLSNQRYIGTYISKYHVQEDAIPQIVDKDLFYKVQTVSHTKTGPRRTPNGYYSLTGKLFCGLCGDAMTGTSGTSKSGKLCYYYTCHSRRQHKCEQRSFPRDLLEDTICRAIWEDVLSDDSIRWMAHQTILDQDKLRPDSDLDLARMSLAEVQTQKTNILNAIKAGIFTTTTKDELIRLEQEEASLTDKIRQTEKLLEEQPTEEDIISFLEIFREGYVDQEFTKSGLLDAFVTRAEVYADHMLIYFRIKKEDRLKSADLPSVPDECSFSTVKWTCRDSKRTLYHAGDYFILKIAA

SEQ ID NO: 10442 - protein, 508 aa, Unknown
  Description of Unknown: Integrase B10443 sequence
  cd00338,PF13408,IPR011109,IPR038109,PF07508, PS51736,IPR036162,IPR006119,PTHR30461,G3DSA:3.40.50.1390, PTHR30461:SF3,PS51737,IPR025827,PF00239,SM00857, G3DSA:1.10.10.2600,SSF53041
MNKSVLYIRYSDEKQNEQSVDGQIRVCKEYAKKNNLEVVGIYIDRALTGKNDNRPEFMRMIRDSYKKRFNYLIVYRLDRFARNKFDSAIHNHTLKKNGVRRLSAMENITDGPEGVLMESLLEGMAEYYSLELAIKVKRGIYDNLDKGNGIGGTTPLGYDLVDKKYVINDYEAHIVRLIFDLYLRDKNSIKVVQELKTRDLKDKEGRTLNVNRVLRALNNEKYSGVYTKDSVSYTNIYPQIVDSTTYESVKSILHKNKRSPGSNRTNVNYLLTGKLFCEKCGQLMIADSANKPNKTYHYYSCNKNRKHNCPVRPVSKDYIEKKVAELLVSKVLTRDVLVPIIDESIVIYNKENKDDTIIRHLIKEKKRVENELSNSILAIKNGFVSDTLQKEIISLEVFLKSIEIQIAKEQIKQPIALTRDDMLFMFDTFISDKDNENHIEKVIDTFVDKVIYTEKGVTITINSHQNNTYKLDFDDINSSIVSSLRAPSKNKSNFVFYKGYYIFYFNLE

SEQ ID NO: 10443 - protein, 508 aa, Unknown
  Description of Unknown: Integrase B10444 sequence
  cd00338,PF13408,IPR011109,IPR038109,PF07508, Coil,PS51736,IPR036162,IPR006119,G3DSA:3.40.50.1390, PTHR30461,PTHR30461:SF3,PS51737,IPR025827,PF00239, SM00857,G3DSA:1.10.10.2600,SSF53041
MKKAIAYMRFSSPGQMSGDSLNRQRRLITEWLKVNSDYYLDTVTYEDLGLSAFNGKHAQSGAFSEFLDAIEHGYILPGTTLLVESLDRLSREKVGEAIERLKLILNHGIDVITLCDNTVYNIDSLNEPYSLIKAILIAQRANEESEIKSSRVKLSWKKKRQDALEAGTIMTASCPRWLSLDDKRTAFVPDPDRVKTIELIFKLRMERRSLNAIAKYLNDHAVKNFSGKESAWGPSVIEKLLANKALIGICVPSYRARGKGISEIAGYYPRVISDDLFYAVQEIRLAPFGISNSSKNPMLINLLRTVMKCEACGNTMIVHAVSGSLHGYYVCPMRRLHRCDRPSIKRDLVDYNIINELLFNCSKIQPVENKKDANETLELKIIELQMKINNLIAALSVAPEVTAIAEKIRVLDKELRRASVSLKTLKSKAVSSLGDFHAIDLTSKNGRELCRTLAYKTFEKIIINTDNKTCDIYFMNGIVFKHYPLMKTISAQQAISTLKYMVDGEVYF

SEQ ID NO: 10444 - protein, 508 aa, Unknown
  Description of Unknown: Integrase B10445 sequence
  cd00338,IPR011109,IPR038109,PF07508,Coil, PS51736,G3DSA:3.40.50.1390,IPR006119,IPR036162,PTHR30461, PS51737,PF00239,SM00857,G3DSA:1.10.10.2600,SSF53041
MDTKGKIEQIKDVAILLRKSRGEEEDLDKHKQELVELCVQNGWRYVIYKELGTSQDIKYRPELQKLLSDIQEDLYDAVVVVDKDRLSREGTGQVTINKILMEHDVLIVTPYKVYDLSNDSDMLMSEVEDLMARFEYRMISKRFKRGKKRGAKMGNWVNGTPPFPYVYVPETKSLAVDPEKKKWYRFMVEQFLEGKPFYEIAWELNKMGVKTQRGNLWHENSIRRLLLSEVHLGKIINQKTEGSGHKNKKTKPLRIRPRSEWIIVENCHEAVKTQEEHDIIIATLAARRKVPKTSKQIKLPLTGLVRCGKCKKTMRVYRRKLVNGYSFKINTCQASDPFGNRCKNSGGDAMAILSTITQEAKTMVDELEQKAKNSKSMDKEIQHYKLKKNSALNEIDKKKESIERAYLAYEEGVISLEKYKQRTATLKKEISKLEEKIKSYDILIEKSSNQDKEEKINRYMEMIELIEKFDNIEDDETNQKLNKILKDNIFDIYWTREGDNVTIEVNFI

SEQ ID NO: 10445 - protein, 508 aa, Unknown
  Description of Unknown: Integrase B10446 sequence
  cd00338,PF13408,IPR011109,IPR038109, PF07508,Coil,PS51736,IPR036162, IPR006119,PTHR30461,G3DSA:3.40.50.1390,PTHR30461:SF3, PS51737,IPR025827,PF00239,SM00857,G3DSA:1.10.10.2600,SSF53041
MKKAIAYMRFSSPGQMSGDSLNRQRRLITEWLKVNSDYYLDTVTYEDLGLSAFNGKHAQSGAFSEFLDAIEHGYILPGTTLLVESLDRLSREKVGEAIERLKLILNHGIDVITLCDNTVYNIDSLNEPYSLIKAILIAQRANEESEIKSSRVKLSWKKKRQDALESGTIMTASCPRWLSLDDKRTAFVPDPDRVKTIELIFKLRMERRSLNAIAKYLNDHAVKNFSGKESAWGPSVIEKLLANKALIGICVPSYRARGKGISEIAGYYPRVISDDLFYAVQEIRLAPFGISNSSKNPMLINLLRTVMKCEACGNTMIVHAVSGSLHGYYVCPMRRLHRCDRPSIKRDLVDYNIINELLFNCSKIQPVENKKDANETLELKIIELQIKINNLIAALSVAPEVTAIAEKIRVLDKELRRASVSLKTLKSKAVSSLGDFHAIDLTSKNGRELCRTLAYKTFEKIIINTDNKTCDIYFMNGIVFKHYPLMKTISAQQAISTLKYMVDGEVYF

SEQ ID NO: 10446 - protein, 508 aa, Unknown
  Description of Unknown: Integrase B10447 sequence
  cd00338,PF13408,IPR011109,IPR038109,PF07508, Coil,PS51736,G3DSA:3.40.50.1390,IPR036162,IPR006119, PTHR30461,PTHR30461:SF3,PS51737,IPR025827,PF00239, SM00857,G3DSA:1.10.10.2600,SSF53041
MKKAIAYMRFSSPGQMSGDSLNRQRRLITEWLKVNSDYYLDTVTYEDLGLSAFNGKHAQSGAFSEFLDAIEHGYILPGTTLLVESLDRLSREKVGEAIERLKLILNHGIDVITLCDNTVYNIDSLNEPYSLIKAILIAQRANEESEIKSSRVKLSWKKKRQDGLESGTIMTASCPRWLSLDDKRTAFVPDPDRVKTIELIFKLRMERRSLNAIAKYLNDHAVKNFSGKESAWGPSVIEKLLANKALIGICVPSYRARGKGISEIAGYYPRVISDDLFYAVQEIRLAPFGISNSSKNPMLINLLRTVMKCEACGNTMIVHAVSGSLHGYYVCPMRRLHRCDRPSIKRDLVDYNIINELLFNCSKIQPVENKKDANETLELKIIELQMKINNLIAALSVAPEVTAIAEKIRVLDKELRRASVSLKTLKSKAVSSLGDFHAIDLTSKNGRELCRTLAYKTFEKIIINTDNKTCDIYFMNGIVFKHYPLMKTISAQQAISTLKYMVDGEVYF

SEQ ID NO: 10447 - protein, 508 aa, Unknown
  Description of Unknown: Integrase B10448 sequence
  cd00338,PF13408,IPR011109,IPR038109,PF07508, Coil,PS51736,G3DSA:3.40.50.1390,IPR006119,PTHR30461, IPR036162,PTHR30461:SF3,PS51737,IPR025827,PF00239, SM00857,G3DSA:1.10.10.2600,SSF53041
MKKAIAYMRFSSPGQMSGDSLNRQRRLIAEWLKVNSDYYLDTITYEDLGLSAFKGKHAQSGAFSEFLDAIEHGYILPGTTLLVESLDRLSREKVGEAIERLKLILNHGIDVITLCDNTVYNIDSLNEPYSLIKAILIAQRANEESEIKSSRVKLSWKKKRQDALESGTIMTASCPRWLSLDDKRTAFVPDPDRVKTIELIFKLRMERRSLNAIAKYLNDHAVKNFSGKESVWGPSVIEKLLANKALIGICVPSYRARGKGISEIAGYYPRVISDDLFYAVQEIRLAPFGISNSSKNPMLINLLRTVMKCEACGNTMIVHAVSGSLHGYYVCPMRRLHRCDRPSIKRDLVDYNIINELLFNCSKIQPVENKKDANETLELKIIELQMKINNLIVALSVAPEVTAIAEKIRLLDKELRRASVSLKTLKSKGVNSFSDFYAIDLTSKNGRELCRTLAYKTFEKIIINTDNKTCDIYFMNGIVFKHYPLMKVISAQQAISALKYMVDGEIYF

SEQ ID NO: 10448 - protein, 508 aa, Unknown
  Description of Unknown: Integrase B10449 sequence
  cd00338,PF13408,IPR011109,IPR038109,PF07508, Coil,PS51736,G3DSA:3.40.50.1390,IPR036162,IPR006119, PTHR30461,PTHR30461:SF3,IPR025827,PS51737,PF00239, SM00857,G3DSA:1.10.10.2600,SSF53041
MPDFSTLTRFALYRRVSSQESFEKDLSLPEQAAQQRDYVTRNGGIIVAEFEEGKGISASREDRPEFQRMISAAKSGEFDVLLIHRSNRVFRSRMHAVTYKHLLGQHGIRLASVTESFIGSDDPTDKLLEGIMECFNEWFLENLKAEIGKGLRQAAAQGRQSGAVPYGYQWDREGDGNWAIDPVTSPWVARIFEAFLTRSLAFSEIARELNSLGAPSPGNPGSAKQRQNWSNTGTDWWGAAVKRILSLRQYVGDVHYKGEWYKGVHSALITRDVFDETARRLSGKRVGRSYSAPALFGTGLLLCPHCGQALTVRRHVHKADGVRREYTNYACSTHSAYTQKTAQGGIAAMDCPGFMISEGKVLDTFRPVLEAASADVDPAVITVTALPPMKPPTDNYALMTAMRTELATIPTTRTNYLRIAGKGMMPDDVLAEELASLSAREVAITAEIERLTNQGTIRAEPDPVDAYRLLRALDRDDLTVPQKRDAIRAVFVSITPTADKVGLRCVLC

SEQ ID NO: 10449 - protein, 507 aa, Unknown
  Description of Unknown: Integrase B10450 sequence
  cd00338,IPR011109,IPR038109,PF07508,Coil, G3DSA:3.40.50.1390,PTHR30461,IPR036162,IPR006119,PTHR30461:SF3, PS51737,PF00239,SM00857,G3DSA:1.10.10.2600,SSF53041
MKAVILARVSSKEQEDGYSLDAQISRLSDYANKKGLEVIKTFTLTESSTQGDRKKFQEVLKFCSSQKETIALIADAVDRVQRSFKESTYLDELRKKEKIELHFYREGMVVGKNASSSDLLRWDFLVIGAKSYVLALAENVKRSINFKIEHGEWCGKAPIGYLNRRNAHGKSEICLDPVRAPIIKKLFQEYSLGKTSFKELANLADKWDLKSNSPKARKLTSKTLYDTLTNPFYCGKMRIKGQLYPHIYEPLISEDLWNKCQEVRLGYKKQPVKYASKEFLYRGLITCYNTGKIVTTDQKRGHINYLICYDKTGKRIYCHEETITKQVQQILDSIIIPEPILTGLNQILRDSKKNEALLHEQAVTSLRKDLDITKKRIENLVDMYLDKKIDDEIYSSKINQLKNEKTSLENKIAAHSVSDDKFNETIINLFDIVNHAGKKFANSSNIEVKRRILKLIIRTMKLDRGNLGYELAWPFSELPKSDDCYLWRTRRDSNPRPLASEANTLSN

SEQ ID NO: 10450 - protein, 507 aa, Unknown
  Description of Unknown: Integrase B10451 sequence
  cd00338,IPR011109,PF07508,IPR036162, IPR006119,PTHR30461,PS51737,PF00239, SM00857,SSF53041
MLDMPTTDLYLRLSDSRTEEALDGREAKLRAEAIRLGWIVSRVVVENDAPRRVGGKMAPASAFKRRAVRNASGEIVRDPDTGRPVMRVIRPGWQSVIADLKTRRASAVLAEDLDRALRDPRDLEDLLDACAQTAASARSLTGSLTLTNGGNDGEIFMARVMVAQAHKSSSDTSRRVRDAKARYFGQTYQGGLRPFGYAHVADTEKYHRTLMIVPDEKDLILAAVADILDRDITLAAITRDWRARGAVTVTGKPWTAQKLRQALIKPAVAGLAVYGGELTVAPWPHILERDTWEKLKAKLEDPVRRNTTGNEPKHLLSMIALCGICHDVLYSTGAKHRGGLGYGCRNNGWHLRRNGKHLDECVEAAVLAWLELHGKTALKPPPRRAGVNAPALRAEAGRLRTAKREQMRMHSAGTIDNDDLAEGLREIRDRLAVIDAQLAVSDQPDPLAEFRDAPALAVWASLTLPRKRAIVRLLVEVTVYPTARRGPGFDRASVDVRFKATPEGGAE

SEQ ID NO: 10451 - protein, 507 aa, Unknown
  Description of Unknown: Integrase B10452 sequence
  cd00338,PF13408,IPR011109,IPR038109,PF07508, Coil,PS51736,G3DSA:3.40.50.1390,IPR006119,IPR036162, PTHR30461,PTHR30461:SF3,IPR025827,PS51737,PF00239, SM00857,G3DSA:1.10.10.2600,SSF53041
MIGVIYARYSEGPKQTDQSIEGQVNDCMAFAQRNGIDVIEVYADRHISGKSVVGRYEFQRMLQDAQLHRFDCVIVWKIDRFGRDRQDIAVSKMQLKKAGVKLMYAEESVPEGPEGIILESVLEGIAEYYSADLRQKVIRGRRETLKKGLFCGGSLPIGYMVDSERHIVPDPATAPHVREVFRMYAAGSQIKDCVWYLQDKRVKGQRGTDMSKSTVGAMLRNKRYLGIFDVSGVELRAEPLIDEETFLLCADRFPGGPQKNAAGKADVDYLLSCKIYCGKCGRMLTGESGKGRSRVYYYYKCPAKKRNAECDLAPVKKEWMEELVLKATVDDMLTEDTISMLTDEILRVQDRDLADDPVKVIQSALDSCRKKQANILHAIEETGARGLATRLAKLEEEEAELSLELKKAQVCRPRLSREDISLWLHSFRNGDLSDDDFKKRLLETFVARVELLPDRAVIFYHISEKSKQKRTVSFGSDTARLLEESGLYPNHPTFFHGFIVLVVMRAA

SEQ ID NO: 10452 - protein, 507 aa, Unknown
  Description of Unknown: Integrase B10453 sequence
  cd00338,PF13408,IPR011109,IPR038109,PF07508, Coil,PS51736,IPR036162,IPR006119,G3DSA:3.40.50.1390, PTHR30461,PTHR30461:SF3,IPR025827,PS51737,PF00239, SM00857,G3DSA:1.10.10.2600,SSF53041
MYEDIKTACLYVRFSSHNQTEQSIEGQTRVCRDFCKRHNIRIVEIYADRATSASKDIEKRVQFLKMIKDSEKGLFDAVIVYKLDRFARSRYDSATYKYRLKRNGVQLISATENISNDPEGIILESVLEGMAEFYSAELSQKINRGMRESAYKHNSIGGAIPLGYKIEDKKLVIDPKTAPIVKEAFEKYADGETVAEICRQFNARGYKTSKGTAFGKSSFTKIFRNERYIGVYSFHDYRAEDAIPAIIDKDLWDRVQLRVGKIKNAPARNKAKVVYLLSGKIFCGHCGSKMNGNCNAGNYYYYQCYGKKNGNVDCKKKNIRKEFIERLVAHDALSLLTDEYIEQIATIACEKNQHEIELDSALPTIRDRIHQVDLSLNNLLKAIESGSAPDMLVKRMGELEKEKKDLQVQAKKESEDIVELDKAQVIYWLEQFRGGSIEDEEFCRMLIDLFVNSVTVWDEDDGSYKVTVAYNLTSLPTKTYRLNKGGTLSDFTSNAPAFRRSSPESDC

SEQ ID NO: 10453 - protein, 507 aa, Unknown
  Description of Unknown: Integrase B10454 sequence
  cd00338,PF13408,IPR011109,IPR038109,PF07508, Coil,IPR036162,IPR006119,G3DSA:3.40.50.1390,PTHR30461, PTHR30461:SF3,IPR025827,PS51737,PF00239,SM00857, G3DSA:1.10.10.2600,SSF53041
MRVALYARFSDSELQNERSADDQLEALRQVVKARGWTETRAYADHGISGAALANRPAVQSLLRDAAAGGFDCVLAEDLDRLSRDQEGTAHLFKHLTFAGVLLETLGQGRISVMHVGLAGTMNQLFLEQLAAKTRRGLVAKVKAGFSGGGHTFGYAIVAKGVYAVDPDQARVVRRIFTDYDLGASPRAIAARLNAEGVPGPSGRQWSASTINGDRRAGDGVLHQELYVGTRVFNRRRFRKHPETGRRSSVLNPTESWIRMPTPDLRIIDQDLWARVQARKSALGAAPAQRARRPTRLLSGLLVCALCHGPMTVQGKRYACSTRREKGTCTNASYAGCTAVETRVIVGLRDNLLHPDVVAEAIRTFQAEMQAATRSAITDRAKIEEELQGLQRRLDRASDAYQRGLFELDELEAQISPLKARRAALRDQLAMADAPPVYRIHPHAAEMYRSIVENLAGALEKDSSQDMRNALRGLISRVIFTPGEARGAFDLSVQGRISGLLSNSTAPD

SEQ ID NO: 10454 - protein, 507 aa, Unknown
  Description of Unknown: Integrase B10455 sequence
  cd00338,PF13408,IPR011109,IPR038109,PF07508, PS51736,IPR036162,PTHR30461,IPR006119,G3DSA:3.40.50.1390, PTHR30461:SF3,PS51737,IPR025827,PF00239,SM00857, G3DSA:1.10.10.2600,SSF53041
MQVNVIKPVEKTKKKLKVCAYARVSTEEDEQENSLENQKDYYEKLIRSNPSYEYVDVYYDFGISGYRETRPGFQKMLADARTGKIDLILTKSISRMSRNTVAMLKAVRELQSIGVGIFFELQNMNTLSGEGELMLSIYSAFAQAESDDCSKNAYMTYKRKFEAGIPAVRIHECYGYRLDSHGNLALDEREAYVVRKIYEFALAGLNPSEIARYLNKNGIKTAKGKKWICSSVFRVLRNEIYKGDVMMQKTYLDADRVRHKNRGQKDRYYLADNHIPIVDSDDWNAVQEILDDRSLALKEKVKPKAEGMGDSHSTYPLTGMLYCPKCGGMLHHKFGNGKKNVYWSCSTWIKKGRTQCSGISVPDTVADAWEIKEPTTVFVTEDDFGRKQYSLVPKEVYEKKKDCPYKPKERTAKYSHSTYPLSGKLYCSKCGSLMHHQGGWNHKEFWWCGKRVKQGPQACEGVRVPATVADTWKFEGCIYVTEGEDENGKKCYSYQSKSEDDGNGCEG

SEQ ID NO: 10455 - protein, 507 aa, Unknown
  Description of Unknown: Integrase B10456 sequence
  cd00338,PF13408,IPR011109,IPR038109,PF07508, Coil,PS51736,IPR036162,IPR006119,PTHR30461, G3DSA:3.40.50.1390,PTHR30461:SF3,IPR025827,PS51737,PF00239, SM00857,G3DSA:1.10.10.2600,SSF53041
MNAVIYARFSSSAQREASIEQQVNVCMEYAERTGYNVLQTYSDRALTGRTDRRPQFLQMIKDARKGQFCAVIVYALDRFSRDKYDSARYKHELRACGVRVVSATEPITDNPSGILIESVFEGLAQYYSAELSQKIRRGYEDNAKKCLVAGSVPFGFRRSADGHYEIQPEEAEIVREIFRRAGAGEHYADICRDLNARGLRTRHGAAWNRSSFNTILKNQRYTGMYVSKYHVQEDAIPQIVDKDLFYRVQAASHEKSGPRRTPNGYYSLTGKLYCGLCGDAMTGVSGTSKSGKLCFYYACHSRRAHKCTQRILPRDQLEAQICRAIWDDVLSDDSIRWMAHQTILDQDKLRADSDVDILRASLAQTRAQKTNLLNAIKAGIFTASTRDELLRLEQEEADQAERLQQAEKLVADLPSEDDIISFLEIFREGFEDQDFKRTALLDAFVSRAEVHEDHILVFFRIKKEDRSIKTDLPSPVECSFKTNEWTCGNSKRTLFHVCDYFVLRIAA

SEQ ID NO: 10456 - protein, 507 aa, Unknown
  Description of Unknown: Integrase B10457 sequence
  cd00338,IPR011109,PS00397,IPR038109,Coil, PF07508,PS51736,G3DSA:3.40.50.1390,IPR006119,PTHR30461, IPR036162,PTHR30461:SF3,PS51737,PF00239,SM00857, G3DSA:1.10.10.2600,IPR006118,SSF53041
MPAIKKTTSNTIKKCVIYARVSSDRQEREGFSIPAQLKLLKEYAQRNNIKIVQEFVESETAKKAGRKQFNEMIKFLKKNTTIKSILVEKTDRLYRNLKDYVTLDEFTGLEIHFVKEGEILSASSKSQDKFMHGIRVLMAKNYIDNLSEEIQKGLKEKCEQGYCPTRAPIGYLNVIQTSGKRTIEVDNETAPFIKKIFEEYLTGNYTYKTLAQYINKAGFKPRNKQCTGKTIENILHQEFYTGNFIFKGKKYYNGQHTPLITPELFAQVQEKLRKKNSPRGRVHNFAYTQFIKCAKCGKYMTAEIQHGAHNSGDYIYYKCRYCKKTYLKQEEIEQVFKETILDNIEFTKDEIAQIIEVIKELVKMECNDAIFSVEQINKRVVLLEKRLEQLYTDKVDGAISESLYIKKRDEWQNELNELLIKYEKTAKAGKEFIGNVELLLNLCKDAPRLYLNQTPHEKRKLMNLIVSNPIFDGSKLTFTVYSAFEYALKLKNLEMVGVEPTSIVDKN

SEQ ID NO: 10457 - protein, 507 aa, Unknown
  Description of Unknown: Integrase B10458 sequence
  IPR011109,IPR038109,PF07508,Coil,PS51736, G3DSA:3.40.50.1390,PTHR30461,IPR006119,IPR036162,PS51737, PF00239,SM00857,cd03768,G3DSA:1.10.10.2600,SSF53041
MKAIILARVSTENQSLDSQIEKLISEAKRFGYDEDNITIISAKESGVKLDIEERQTIQQMKDCIETGQYNMVLIWEVSRLARRPKVLYEVREYLIEHHVNLHCMTPQFTMLKDDFTIDPTASIVFALFGTMAEEEARLSKQRMMRGRIAKREQGKFIGGNLLFGYTYDTETDKIHINENERPTVIEIFERYTQKESIRSIAKDLMDRGQLRYDDYATACVMLRRMIRRSEYAGIKQNTYDYPAIISQDLYYKVRARAESKNKYKTRVSEIYYLQGIIHLKRNGMLMSPSKHAVQYRGWDERTNSGTMINMSYIDSLAIYFTKLYKQRASGPERIKMIDSILKQMMYNNQRQQNCIVEHQEVEATIERINERVVKGKMSEEQGDRLIEEQQDKLRELDNMMIKCSENTKQYESQIDALKSNSIEDIDKMNDEQKQRIIRECIKSVYVDIDGVTNHGKIIEINMIDDIKHTIHMTKKGNDFITNIVLKDKEKPLNDLQITARFIRKKKR

SEQ ID NO: 10458 - protein, 507 aa, Unknown
  Description of Unknown: Integrase B10459 sequence
  cd00338,PF13408,IPR011109,IPR038109, PF07508,Coil,PS51736,IPR036162, IPR006119,G3DSA:3.40.50.1390,PTHR30461,PTHR30461:SF3, IPR025827,PS51737,PF00239,SM00857,G3DSA:1.10.10.2600,SSF53041
MLRAAIYARYSSDNQRHESIETQFRICEDYCRQKGYGVVAHYQDEAKTGTTSIGRDGFHRMLSDARRDIFDVLVVYTLDRTARQELDYYLYKKELQAAGIKYEYATESFDPSSVDGQFFEGIQVAQAAWYSRKLSVKVRDGKDTNARQFLFPGGTPPLGYDATPDHHYVINETEAAAVRLIFKMFIAGSGYGPIIDELNRQGFRTKRGKMFGKNSLHEILANEKYCGTYVHRRSYGKQRRNQTAASGTPNAIPAIITQETFMEAARRRELNRGRSASYAAKAVYLLSGKVCCGECGHSYNGNSMSSRGYRYEFYQCCDQTNHGSRTCKNPRIKKSWLERHVVDAILKMFTLDRINAVVDKALAKYQATAAAAPDETAQLYRQKAGAEKRLANLYKMVENGAADEFDLERMRDIKNQIRAINEKIATVDSQPKISINREQIKRYWYKLVAELKIQNRPELIRPVLQKIVNKVMVYPDRVVVSIGNVAGISGHNGNGLALPDKNNSDIQ

SEQ ID NO: 10459 - protein, 507 aa, Unknown
  Description of Unknown: Integrase B10460 sequence
  cd00338,IPR011109,IPR038109,PF07508,Coil, PS51736,IPR036162,IPR006119,G3DSA:3.40.50.1390,PTHR30461, PS51737,PF00239,SM00857,G3DSA:1.10.10.2600,SSF53041
MENKLSEIIKDIAIYLRKSRAKNQEEETDETLYKHKEILVDFAKKHDFRYVIYQEVVSGDSIDNRPEMIRLLDDVENELYDGVLVIDLDRLGRGGEEDSGKIKRIFKKSDTLIITPNKIYNLENEDDETYMEFQTFLARQEYRLIKKRLIRGKKIGSKMGNFTNGTAPIPYKYNPQTKGLIVDEEKLPIYNLIKYLYLDKLLSVDNIANELNKLGIPTLYDRGTKWHANVIQRILISETHLGKIISNKTKGNSKKGEKIIQYSRDKWIVVENCHSCVKTQEEHDRILELFKQRKQIAPRAKQGVFDFSGLLKCSLCQHSMTFFVRKESDKVYMKPCWYVDNFGNKCPNRAGSVEEVSKFVKLKIIERKERLFKELKNGTSHDSSKIELIIKQKNKQLAKFNKALNNAKDAYDLGDYTRDEWIERKSKWENEIEKVNSDINELNEQMLKNSVIKNKEEDIYIITKVLENLDKKDISSKEKNRYYKSIIKEILWTRIGNNEEIIDIEWR

SEQ ID NO: 10460 - protein, 507 aa, Unknown
  Description of Unknown: Integrase B10461 sequence
  cd00338,IPR011109,IPR038109,PS00397, Coil,PF07508,PS51736,G3DSA:3.40.50.1390, IPR006119,IPR036162,PTHR30461,PTHR30461:SF3, PS51737,PF00239,SM00857,G3DSA:1.10.10.2600,IPR006118,SSF53041
MESVAIYIRVSTRKQMDNYSPGEQKRVLTEYAESRGWKIYDIYSDLGESGSDSDRDDLDRLMVDAGRKLFSMVLLFEQDRLSRLEQLDWAYLANSLAKQNIRLVTPTSEINLDNEEDRFLADLFNLLANRELKKIKKRTSMGRGAASQDGVYFGSVPFGVTLNRVTKLWSVVPKQVEVTQLAFEWYAIDFGFNAIAKRLNDNGYRSQKGAKFNSSTVSRILTNPICLGEFEQTVVGKTSRHTVKWEHGNGPYISKQSYNRVQSIIAERGEYQYFLKAKYLLVGIIVCEECGRKLQSKPTQSILAKGNKVIYHYYAHRQATKKECSAHHKMSIIHGKILSTLQEIAGNPKRIELLIKENSRPVNTDDIKEKLERCRDERAKLIDKKGKLLDFYLDGVWEKDELDQKKRDIEIQIAAISSRESELDQRLTSSLRTDVDIKKVSEALLMLKGFNENKELTDDQKITLIRDLISEVRVSKLGAIELFLKVNVGSNACPIISSDLHLCLTLD

SEQ ID NO: 10461 - protein, 507 aa, Unknown
  Description of Unknown: Integrase B10462 sequence
  cd00338,IPR011109,IPR038109,PF07508,Coil, PS51736,G3DSA:3.40.50.1390,IPR006119,IPR036162,PTHR30461, PTHR30461:SF3,PS51737,PF00239,SM00857,G3DSA:1.10.10.2600, SSF53041
MQTAVAYARFSSDNQREESIDAQVRAIQEYCTQNDIELLKIYSDEAMSGTTDDRPQFQKMIEEVENINYVIVHKLDRFARNRYDSAVNKRKLRDKGIRVISVLERFDDSPESVMLESIIEGMNEYYSLNLSREVKKGHRENALKAKHNGGSPPLGYDVDKDLYYIINEDEAIIVRLIYKLYCDGHGYGKIIDILSSNGYRTKVGNEFGKNSLYEILRNEKYRGVYLYNRRKRMDKSYNNHKNSPNMIRIEDAMPKIIDDVTWENVRDKRDVNKRKGGSFSSKFTYLLSGKLQHDCGAVMNGTVKTNKKSDNQVYYYRCEDKDCNIKPKSIQVNNIEPFVINALTTYLFNSDSTFAKEMYKRVNSKDDVAEFELLKKRLDKIVREEDKITEAVVKGLLNDSLIAKNNDLQEQKTAITIKINNLKSDHKSYTMSEINEYMKKYADLKDFDREAQKKVIDIFVHKVILTEDRVRILLYPNPFGGRAQDNGASHPDHQYSRHLIIEMPRVA

SEQ ID NO: 10462 - protein, 506 aa, Unknown
  Description of Unknown: Integrase B10463 sequence
  IPR038109,PS00397,IPR006119,PS51737,PF00239,G3DSA:3.40.50.1390 ,PTHR30461,IPR025827,SM00857,G3DSA:1.10.10.2600, SSF53041,IPR011109,PF07508,PS51736,IPR006118, cd00338,PF13408,Coil,IPR036162,PTHR30461:SF3
LSKQSNAVLYGRVATKEQISESPKFRFAAAYIRVSTDDQDELSPESQLDEIRKYAKREGIILLEDCIYIEEPISGRKAKNRPKFQEMIARAKESDCPFSVILLWKFARFARNQEESIFYKSILRSKCKVDVVSITEPLIAGPFGKLIERIIEWMDEFYSIRLSQEVKRSMRVNAERGKRQCTASFGYRLDESDKMVPDPAEADYVRRIFDEFIAGKGLFPIAKEMNALGVKTHRGNPFENRTVEYIIRNPVYIGKLRWNPEGRTRRDFFNENIIIADGDHEPIIDLDTWEAAQRRMDEVKSQWGYKARPSTELKHWMSGIVRCSACGATLVFAKPHYFKCGNYTKGRCTHTQHIRVDLLEDAIISRLGQDATSSTGIIYDITYTNASEGRDLVHLEAALRILESKKERLQEAYLAGVIELDDFSKAKKALEENMAQTAKELEERKSNSDEEITRAAIKGAISTALETLRSSTATTVEKNNAARSVIENCVFDKDSYTLAITYRIIL

SEQ ID NO: 10463 - protein, 506 aa, Unknown
  Description of Unknown: Integrase B10464 sequence
  cd00338,PF13408,IPR011109,IPR038109,PF07508, PS51736,IPR036162,PTHR30461,IPR006119,G3DSA:3.40.50.1390, PTHR30461:SF3,IPR025827,PS51737,PF00239,SM00857, G3DSA:1.10.10.2600,SSF53041
MRVAIYTRVSTELQAEKGYSLDTQLEACRNYAIEMGATYMEEFRDDGYSGEYLDRPELTRLRESLKDFDVVVVYDPDRLARNLSHQLIITDDIEKAGLLLKFVSVNFEQSPEGNLFYSIRGAVSAYEKEKIKERFARGKRGKLKKGRIISDSKPFGHIYDKETSTYIINDDEAAIIRNIYDWCVNEKLGTAKIAVRLNEMGIVTHRAKSMWTPNAVYYVIVNPRNKGMHIGLKTKTTRVSLTKKKVTPRPEKDHIIVHVPPIVDEVIWQAAQKQLKLNRIQSKRNSKQVHALSGLVYCGKCGRKMRIEYSGRKPYPGYYACIGVTNPNFRYGASGPRCDARRIPSKILEEHIFSILPTMITASEVEKYADRPAKNDNSKNIQQSLDRLATREKELIQQRETVFKWFRTKVISETDATTQLNDINKQLGEIAGLKNNLINSITESTPKKTTKEIVKQIKSSFNGKDLSEEDKRDIIVGLLEKIIVERVDNTTARSSVPDISISLRFL

SEQ ID NO: 10464 - protein, 506 aa, Unknown
  Description of Unknown: Integrase B10465 sequence
  cd00338,IPR011109,IPR038109,PF07508,Coil, PS51736,G3DSA:3.40.50.1390,PTHR30461,IPR006119,IPR036162, PS51737,PF00239,SM00857,G3DSA:1.10.10.2600,SSF53041
MDQYALYLRKSRADVEAEARGEGETLSKHRAALTEYARRRGLLIVKEYAEIVSGDTIAARPQMQHLIEDVKAGLYAGVIVNDIDRLGRGDGIDQEIIKYTFAAVHCIIITPNGDIDPASNRDEDMLDFRMFFARMELRKTSQRMAQGRARSALSGNWIAGSAPFGYKKVKSGRKITLEPDESTAPILRLIFDWYATGEAGYTGIANRINRMGVKVSPQPNAATNASTIRRILSNPIYIGKLAWGKTESVSRIENGQRVKRRVKSTPTVIDDAFPPLIDVETWNVVQDRIASAHHIAPVNSNSVMQNPLAGLVICSECGRHMVRIQGHNRPILQCPRTTCKTSGAYIDVIEDTLLEILRTWCVEYSGFIEPVKPQSAIIQIEALRRQLEQIDTQITRAQELVEIGVYSPSEYVQRKTALEGRRSGLRAEIDKLTRPSPRAAVAAAVPEIRRVLDAYPLAPDAAAKNRLLRSVIDHIIYYKTKSARGNKSTPGALLSLDVFPVINRLG

SEQ ID NO: 10465 - protein, 506 aa, Unknown
  Description of Unknown: Integrase B10466 sequence
  cd00338,PF13408,IPR011109,Coil, PS51736,G3DSA:3.40.50.1390,IPR006119,IPR036162, PTHR30461,PTHR30461:SF3,PS51737,IPR025827, PF00239,SM00857,SSF53041
VTSDFPCETLKQNISRKTAHDDIMSFYILSYQAFFRYQKEGFYMSFFTPNPQLFGLRVVKYIRCSHDDQVLHGDTLEAQDLILEDFIKVNRMILVDTFIDEALTARKKFNKRKEFVRLLDGVKAHTFDLIIFTKLDRWFRNIGDYHKIQEILEANGVQWKAVTENYDTTTTNGRLHINIRLSVAQDECDRDSDRIKDVFAYKLKNKTYVSGSLPRGLKLDAEKHVIIDPEWNCFALDMFDRFEATCSKRDTQLFLQEKYNIRVCYDTVARYLKNPLFKGQYRDDPDFCPATISPERFERIQKLAIRNVRIRHTQQFYIFSGLLICSSCNHYMCGTVTYRRMADGSEKMYKNYRCNFKAQSKLCDRGKTYREADLEEYMLAHIRPALSDYIAKYEVTAASTVQKNPVTEIAKIERKMKKLYDLFMDDLIDKEAYRSEYDKFKAQIEELQKCSTAAPMRSLDSVKKLLSEDWEAVYHTFSDQEKNTFWKSFVESVLVYEDGSMDIRFL

SEQ ID NO: 10466 - protein, 506 aa, Unknown
  Description of Unknown: Integrase B10467 sequence
  cd00338,PF13408,IPR011109,IPR038109,PF07508, Coil,PS51736,G3DSA:3.40.50.1390,IPR006119,IPR036162, PTHR30461,PTHR30461:SF3,IPR025827,PS51737,PF00239, SM00857,G3DSA:1.10.10.2600,SSF53041
MKTAVAYARYSSAGQRDVSIEQQLRDIHAYAEREGYTIVHEYADHARSGFRNVAARSQFQAMIAAASSGAFQTVLCWKSDRFARSREDSAIYKGQLSRLGVSVVYVMEPIPQGAAGVLTEGMLEAIAEWYSRNLSENVKRGMADNASKCLYNGTTIYGYNGIRNQQYQINEEQAAVVRQIYALYIDGYSLAEIARLLNSSGQRTESGKEFTINKLYNILKQERYLGIYIFGDFRIPGGMPAIIDPETWEAAQLMKSKTSRHYENNPDVYLLTGKAFCGHCGKPMVGDSGTSKTGSMHYYYTCQSKKRRSGCDKKSVRKDLLENMVINFLLDNVLTGPQVEEIADAVLAAQQQRVAASPLQSMESELRETERKISNTNRAIAEGVFTSSTLVMLNELEETASQLRLSIEARRYAESQLMDRDRILCFLSRFAKLDRNNRDDRRFLIRTFLNSVYVYDDHLRILVNATEHCETIPFSDLPPEEGSDSVSPVLLVQIQTNSVILLYGVR

SEQ ID NO: 10467 - protein, 506 aa, Unknown
  Description of Unknown: Integrase B10468 sequence
  cd00338,PF13408,IPR011109,IPR038109,PF07508, Coil,PS51736,G3DSA:3.40.50.1390,PTHR30461,IPR006119, IPR036162,PTHR30461:SF3,IPR025827,PS51737,PF00239, SM00857,G3DSA:1.10.10.2600,SSF53041
MDVCLYMRYSSDRQTEQSIEGQRRVCMEFCKREGYNVVEQYIDRATSAFKDTDKRTQFQKMIRDSEKQLWEAVVVYKLDRFARNRYDSATYKARLKKNGVRVISATENISDNPEGVILEAVLEGMAEFYSKELSQKITRGMFESANKCHSIGGHIPLGYRIENKKLVINEAAAEIVREAFHLYANGATVAEICETFNNKGYKTAKGADFNKNSFNSMFKNERYIGIYKYKDMRIEGGVPAIVDKETFDIVQKRLKINAQAPARGKAKVDYLLSQKLFCGHCGATMTGESGTGRLGGKYHYYTCSTRKRYHSCEKIPVKKDFIERAVVEDALSILTPEVIEELAEAAVRQNKIDIENESLVPALTQELYEIERSIANLIKMVEKGADSDALTARLIELEKQKRATEKRLVVAQDEIVVLEKEHIIWWLTEFCNGDIEDEDFRRHIIDLLVNSVTVWDEPDGWFKITSVYNLTSSKTSTFRIPSGQGSDLSNLAPPAAMCRSKLGTTR

SEQ ID NO: 10468 - protein, 500 aa, Unknown
  Description of Unknown: Integrase B10469 sequence
  cd00338,IPR011109,PS00397,IPR038109,PF07508, PS51736,G3DSA:3.40.50.1390,PTHR30461,IPR006119,IPR036162, PTHR30461:SF3,PS51737,PF00239,SM00857,G3DSA:1.10.10.2600, IPR006118,SSF53041
MLKAYSDRAALYVRASTEHQNYSTDHQEAALQEYAASHGFTIAQVYRDKGRSGLTLDGRAGLLQLLTDIQSSRAEFSAVLVYDVSRWGRFQDVDESAYYEYACRRAGIAVAYCAEPFTNDGSPLAAVLKGLKRAMAAEYSRELSAKVFRAQCRLTEAGFKQGGLAGYGLRRIAISASGQAKGVLGAGERKSMPTDRVTYTIGPDAEVAVVRRIYDMYLGAAMSDTGIARRLNSEGVENEFGRPWSPYHVRQVLTNDKYAGTLVFNRSTQHLKSTRRPNAPDSWVRVEDAFVAIVPRQQLEAARAERNRRRRQWSDDEMLESLREIFVEHGKVTPDLIDSSGGPSVKSYAFRFNGITSALGLAGVSWPSLTRSAITRYRMRCITRDMTIELERCAAKAKAQVERLSPRTYRLNGVSARLLCTRCRFERSHPCWKVALVHEPAVDFVIWVRADPANEKVEAMYLIPVADFPDHIYIWPSSRTLAKYEQYAHASLADMFGLTT

SEQ ID NO: 10469 - protein, 506 aa, Unknown
  Description of Unknown: Integrase B10470 sequence
  cd00338,IPR011109,IPR038109,PF07508,Coil, PS51736,G3DSA:3.40.50.1390,IPR036162,IPR006119,PTHR30461, PS51737,PF00239,SM00857,G3DSA:1.10.10.2600,SSF53041
MSSVSVIPVDIGSVVRKVRVAIYARVSTNNEEQETSYELQVNELIKSIEANPNYELTCVFADKESGMDTKNRPSFNNMMELARKGGIDLIYTKSVSRFGRNAIEVPEIIRELRSLGVSVFFEKENISTRDFADEFLLNILSGVAEEESRQISSNLRWTFKKKMSKGLNTTVRIYGYKIIDGNFIIVPEEARIVKQIYDWYIEKVSYARMIHLLHELGIKSPQGNEFWSHSVLESILLNEKYCGDALLGRGRELARTNKCLFYDEPTKYLVRNNHEGIITRDMFDFVQAERKKRTKYRRTNVSQTLKPESKFFYSMEVDKHFVYKVERPKGKYNIPVLLCVKNDFRKMIQYKYVVEGISSVCNHLLKNFKSITNYYGDIKANTLESMQNELTVLNQELDRTIDADVKLNIYNRISAIKNNQLTFESIEDTLRKLKLSLLALSDGYDIEIVKTIFSQVYVKDNHFYLIFNPTNSLIDLSNDINILLSVKVSSIVNYKTTELEFSIVLV

SEQ ID NO: 10470 - protein, 506 aa, Unknown
  Description of Unknown: Integrase B10471 sequence
  cd00338,IPR011109,IPR038109,PF07508, Coil,PS51736,G3DSA:3.40.50.1390,IPR006119, IPR036162,PTHR30461,PS51737,PF00239, SM00857,G3DSA:1.10.10.2600,SSF53041
MSGRAWLYARVSKDLREGSSCDQQLTIGRRECDREGVPVAGEYRDDDISASQYAKRARADWDRLMEDLKRDGQPGDRLWGWEISRLARERGTWSQTVRLLQDLGMFLWVGGKIYDPQNPQDMFFLDIMLAKAVAEVGDTRQRILRDVAARAEAGGASGRPGYGFEHVYDPKTGSFLERRPKPDEAEIVAEMADRLLAGDGLETIARDLNTRKMPNSIEYIAGQRMPDGKTSRGWTAATVRSMLMRSSIMGKRSWKGRLIAEGGWEGIVSEEDWYELQRRLKSRSGQVRDGRASHELSGIGTCGARVDRAEGGEGGEEPTLVRCGCRVYAESSKRGRVYRCRGRYAGDESGHVSRKADLIEEQATGLLMEHFSRPDIKAALLSPPDESGDAARARSEVKRLERELEGLYEDVRARRVSRQLAAADEEGIRAELRRLEGQVRPQTIDPMLIALAQNPRAAWSGWSVEQRRRAWRSAVARLDVLPVGRVGRRPVPVEESIEIDFVGLVV

SEQ ID NO: 10471 - protein, 465 aa, Unknown
  Description of Unknown: Integrase B10472 sequence
  cd00338,PF13408,IPR011109,IPR038109,PF07508, PS51736,G3DSA:3.40.50.1390,PTHR30461,IPR006119,IPR036162, PTHR30461:SF3,IPR025827,PS51737,PF00239,SM00857, G3DSA:1.10.10.2600,SSF53041
MAREVTVIPATKTPQANGKKQLSEKKIRVAAYCRVSTEQEEQENSFRNQVEYYTRYIEEHPEYELVDIYADEGISGTSTKKRENFKRMIADCEAHKIDMVITKSISRFARNTQDCLENYRKLKNLGIIVVFEKENISSADTTGELLLTILSSLAQDESRNISENTKWGIRSKFQKGIPHINAKRFMGFDQDAEGRLIVNEEEAKLVRRIFREFLEGYTATVIATRLNAEGVPGVNGEPRWLKTTIEGMLKNEKYMGDSLLQKSFTSDYLTRKMVKNEGQVTQYYVKNSHEGIIPRDEWNAVQQEFERIKQYMNRHNMSRYGYGGEVRPFTQKIICGECGCIYGRKAHSGREAETYWQCNTRCYNGPKSCRGVNIRESVINRVFVEAWNTVVANQESLSKRWEEMERTGTELEAVRARQMQSLVKNGPIRRIIPEMVLTVLESITIKDNATFEIRFLDGTAFSIQF

SEQ ID NO: 10472 - protein, 505 aa, Unknown
  Description of Unknown: Integrase B10473 sequence
  cd00338,PF13408,IPR011109,IPR038109,PF07508, Coil,PS51736,IPR036162,IPR006119,PTHR30461, G3DSA:3.40.50.1390,PTHR30461:SF3,PS51737,IPR025827,PF00239, SM00857,G3DSA:1.10.10.2600,SSF53041
MNNTDLQTGVIYARYSSDKQRDESIEGQIRECTEYAQREGILITKIYTDRALSARTDNRPEFLQMIRDSSNQTFNYVIVYQLDRFSRSREDSAKYKGILRRNGVRVLSAKEHITNEPAGIILESMLEGMAEYYSVELSQKVKRGMTENALKGKMNGSAVPLGYDLTESHHLAVNAHEAKAVRLIYSLYLKQYSLAKIADILHSKGYTTKRGGKISYSVIRNILSNEKYIGVYQWGDIRIENSIPPIIARDVFDEVQRILPTRIKNKGRRSEMYNLCGRLVCGQCGGHYMGSTATSRNGEKHHYYVCTNRRKYHTCSAPNIRRDELEDLVINRTLEILKQPQIIARIVDLVMSGYNHTTQEAKTAIQGIHGKIKAIDTELNNCMTAIKQGFINERLKAEIETLEKERQDLLEQKANHESVISPIKFTAEHIEYFLERMANENPTTKAGRSRILDTFIKNVTIHSDRVEIVFNYKSELPEFSEQSASGSHFSILVGPPGIEPGTDRL

SEQ ID NO: 10473 - protein, 505 aa, Unknown
  Description of Unknown: Integrase B10474 sequence
  cd00338,PF13408,IPR011109,IPR038109,PF07508, Coil,PS51736,IPR036162,PTHR30461,G3DSA:3.40.50.1390, IPR006119,PTHR30461:SF3,IPR025827,PS51737,PF00239, SM00857,G3DSA:1.10.10.2600,SSF53041
MSRSDLNLKTAVIYARYSSDKQTEQSIEGQLYDCYNYAKQHGITVVREYIDRAMTGKNDDRPAFQQMLHDSAQHKWDSVLVWKLDRFARNTIDSAVNRQILAKNGVKLLSVMESFGDDASGQMMTHIIEAINEYYSADLREKTIRGMRQSAMKAQTTGHIPLGYKVVDKKLVIDDETRIIPETVFRMYAEGERLTDIAEHLNAQGYRNRRGRPFTPNSFYNMLANEKYIGIYKYDDIVIEGGIPQMIPNEVFEAVREKLITNRKRAAKNTAKADYYLSGKLYCGHCGEPMSGLSGTGRNGVKHYYYRCNGVQKKSGCHKKLEKKYLIEDEVCRAARSAFEQMDKAETAETIYQMYLQTVRNEYAPAELEKELTECTKQAENVVNAIAQTGGNQLLYDKVRELEERKEQLGSALRLSQAMTDNVPSVEQITVFIDDILATDINTTEGKKAIADIMISKVYVYDDKLTVIFKDKDGKSVDIPLSAVSDSSSADCAPSALGTLEYQRT

SEQ ID NO: 10474 - protein, 505 aa, Unknown
  Description of Unknown: Integrase B10475 sequence
  PF13408,IPR011109,PF07508,Coil,PS51736, G3DSA:3.40.50.1390,IPR006119,PTHR30461,IPR036162,PTHR30461:SF3, IPR025827,PS51737,PF00239,SM00857,cd03768, SSF53041
MIAIYARKSVFREDSISIESQIEHCQYEAKGEESIVYSDNGFSGKNTDRPEYQRMIEDIKSKKINKVIVYKLDRISRSILDFSRMMDLFQKMNVAFVSATEHFDTSSPMGRAMLNICIVFAQLERETIQQRVADAYASRSKKGFYMGGKIPYGYIKVPIIINGVKTSMYEQQPEEAEVIRFIYELYSKPSVTLGDVLRELTKRGLNTKRDGYTWQTSRISEVMRNPIYTYANRDTYNFFKTQGCNIINPIDDFTGETSLYLFQGENHNRKTWDLSNHNIVVAPHQPIIDSTTWLICRKKLLANHQIKTCKAKNSFLAGKVKCGHCGYAFVVRISQRRRSEDVRYFVDSGYSFMHCCPVKLPSLKANEFEADIVEHIKNKLDSLTIKRCEKTTLVDSRIDSLNLQREKISTEIENIVNTLAATSNQVAISYIEKKIADLDSQKRKIESEIQTIQSEQETKQLNQSRISNAVSKWSELSFDDKKAVIDLLIDKILVFQDHIEIVWRV

SEQ ID NO: 10475 - protein, 505 aa, Unknown
  Description of Unknown: Integrase B10476 sequence
  cd00338,IPR011109,IPR038109,PF07508,Coil, PS51736,G3DSA:3.40.50.1390,IPR006119,PTHR30461,IPR036162, PS51737,PF00239,SM00857,G3DSA:1.10.10.2600,SSF53041
MNKVILFSRVSTLGQDLTQQNDELYAEAKRNGYEDIVLIEQKESAIKLDEDERIGIQKLKDTIENDDIDCVIIYEISRLARRPTVLYSVRDYLIEHGVNLICMKPYMRLLDPDGKMSQTASILFSLFGALSESEMMIKKERMMRGRIAKREKGKYIGGNVLFGYSWDEETDKLYINENERPTVIEIFERYTQNESIRSIAKDLMDRGQLRYDDYATACVMLRRMIRRSEYAGIKQETYDYPAIISQELYYKVRARAESKNKYKTRVSEIYYLQGIIHLKRNGMLMSPAKHAVQYRAWDEKTNSGTMINMSYIDSLAIYFTKLYKQRASGPERIKMIDSILKQMMFNNQRQQNCIIEHQEVEATIERINERVVKGKMSEEQGDRLIEEQQDKLRELDDMMIKCSENTKQYESQLDALKANTIEDIDEMNDEQKQRIIRECIKSIYVDIDGVTNHGKIIEINMIDGIKHTIHMTKKGNDFITNIVLKDKEKPLDDLQITIRFIRKKK

SEQ ID NO: 10476 - protein, 505 aa, Unknown
  Description of Unknown: Integrase B10477 sequence
  cd00338,PF13408,IPR011109,IPR038109, PF07508,Coil,PS51736,IPR036162, PTHR30461,IPR006119,G3DSA:3.40.50.1390,PS51737, IPR025827,PF00239,SM00857,G3DSA:1.10.10.2600,SSF53041
MKRAVFYGRYSSDRQTEQSIEGQRRVCEEFAKAEGIRIVAEYIDRATSGTSTDHRDQFQQMISDSKNGCWEYVLVYKLDRFARNRYDSAVYKQKLKRCGVKVLSATERITDSPEGILIEGLLESMDEYFSRELSRKCKRGIRETIIKGNTFTRAPYGYHKTEKRLVVDEVEANNVRQIFTQYVSGATLQSIADKLNAAGHRTRQGNLFRRYSVSDILHNPKYTGTYYVTDIAEPETCPQIVPQSLYDAAQERLKHSAHNARTNRTGHVFALTGLLQCGICGRKVVGTSVQRKYFYYTCIAKSCETLPHDHNLTISSEKVESTVIAALADYFTPEHVTDFAECLYRMYLAEDSPKPDRSKQIQALEKQIQGAVSALIACPQSEALQARLTDLEQQKQQLEQAPPEPPKLTQQDFIKFFCWITKALDRADDRKKFFNAVIHSVTLYRDHVVIAINLTNDDVDPPERVILEKSFSDTVVKSSLYPTISKIKLAPPLLLLYVPLPAGIF

SEQ ID NO: 10477 - protein, 505 aa, Unknown
  Description of Unknown: Integrase B10478 sequence
  cd00338,PF13408,IPR011109,IPR038109,PF07508, Coil,PS51736,IPR036162,IPR006119,G3DSA:3.40.50.1390, PTHR30461,PTHR30461:SF3,PS51737,IPR025827,PF00239, SM00857,G3DSA:1.10.10.2600,SSF53041
MSRNAVIYARFSSDKQREESIDGQIRECRAFAEANEITIINTYIDRAMSARTDQRPSFLQMVKDSAKHLFDYVIVYQLDRFSRSRYDSAIYKHRLKKNGVKVLSAKENIKDDPSGILLESVIEGMAEYYSAELSQKVKRGMTENLLEGKWIGGIVPFGYELTPENKLAVNPATGHLVPEIYKKYQSGVRTTDILSKLNSLGIETQRGCKFTRNSLNRILKNQIYTGTFNWAGTTYPDYAPALITQEQYAAMQNLFESRKRKNNTARRVSPQYALTGKIYCGTCGLPMTGYCGKSHTGTTYYYYQCSSKNNKSEKAQRSRIKCDAKNINRDKLEKLVLDTTISILKDKTALKCIAEQCMAIQEAEIAHKPAEQLRLESQIKDIEKRLKNSVKAVENGLISQTITNNIETYEKQLTELKAELDGIKLETHIIPITEEAVIYYLNQLIERANKKDGYSLDTFDDFIRRVVVTGKRVDIYYNYTAVPHVLENPAVKMLRGSSEDCLVTR

SEQ ID NO: 10478 - protein, 505 aa, Unknown
  Description of Unknown: Integrase B10479 sequence
  cd00338,PF13408,IPR011109,IPR038109,PF07508, Coil,PS51736,IPR036162,IPR006119,PTHR30461, G3DSA:3.40.50.1390,PTHR30461:SF3,PS51737,IPR025827,PF00239, SM00857,G3DSA:1.10.10.2600,SSF53041
SHSQREESIEGQLRECHEFALKNGFTVINEYCDRAISGKTDNRPSFQRLIKDSEKGHFQAVIMYTLDRFARNRYDSAIYKAKLKKNGVRVFYAKQPMPDTPEGIILESVLEGYAEYYSENLSRNIKRGLKENALQCIATGGAGVALGYTVGEDRKYVIDPVGAKIVQEVFQMYADGMSATQIINYCNEKGYKTSRGNSFNKNSLRTMLKNEKYIGTYKFMDVVVPNGVPAIVDKDLFEKVQAMLSHNAKARAKNKAKEDYLLTTKLFCGHCESVMVGESGTSKSGKVHHYYKCIDRKRKHQCTKKVEKKDWIEELVVRFTVKYVLTDENIDLIATRAMEMFEKESSDKTYLIGLQEELKDIKKKIKNLMTAIEQGIITSTTKERLEELESEKNHIEGQIAKEEMKKPLLTKERIMFWLLSFKSGDINDIDYRRRVIDTLVNSVYVYDDGDKGRRIVFTFNISGQNTATISCSDIACSAPPKGSNPNTLFFVKHCFGFVLIIEEVS

SEQ ID NO: 10479 - protein, 505 aa, Unknown; identical to SEQ ID NO: 10390
  Description of Unknown: Integrase B10480 sequence
  cd00338,IPR011109,IPR038109,PF07508,PS51736, IPR036162,IPR006119,G3DSA:3.40.50.1390,PTHR30461,PTHR30461:SF3, PS51737,PF00239,SM00857,G3DSA:1.10.10.2600,SSF53041

SEQ ID NO: 10480 - protein, 505 aa, Unknown
  Description of Unknown: Integrase B10481 sequence
  cd00338,IPR011109,IPR038109,PF07508,PS51736,IPR036162,IPR006119, G3DSA:3.40.50.1390,PTHR30461,PTHR30461:SF3,PS51737,PF00239, SM00857,G3DSA:1.10.10.2600,SSF53041
MRQPTRTRAAIYVRMSTENQNYSTGHQRAKIHEYAAIHGIEIVREYMDEGKSGLDIRRRPGLIELIKDVQSPGVDFQLIIVYDVSRWGRFQDVDEAAYHEHTCRRAGIKVVYSGEQFSDDGTPLGALMKSIKRTMAAEYSRELSAKTFSAQCRFTQIGYKQGGHAGYGLRRLAVTKDGTPRRLLEYGEAKGAVTDRVVLVLGPDHEVALVRDVYRLYLEDRLSEPAIARRLNGAGVPSEFGRPWTHSMVNSLLTNPKYCGTLVFNRRSCKLSSRRTRNPAENWVLNEGAISPVVPLALFEQAQRERARRLRRYEPDELLSLLRTCYEMHGKVNARIIAADPAMPDPQLLVRTFGSLIAAYDAAGLAPSDAHTFVETKRLIAIKQRQLISNVNSLAREAGATVGEGAMSNTLVLNGAVVVQINVAIQRRPAKGFSNWRVRPQPGIDFFITARLSGDTHEIIDFFLIPANWLSNGPLYLKESNMDHFAPLRYQSLAPMFGNPLAERI

SEQ ID NO: 10481 - protein, 499 aa, Unknown
  Description of Unknown: Integrase B10482 sequence
  cd00338,IPR011109,PS00397,PF07508,IPR038109, PS51736,G3DSA:3.40.50.1390,PTHR30461,IPR006119,IPR036162, PTHR30461:SF3,PF00239,SM00857,G3DSA:1.10.10.2600,IPR006118, SSF53041
MKAPMLDTAALYVRASTEHQNYSTNHQEAALREYAAQHDLDVVAVYRDEGRSGLTLDGRNGLLQLLNDVHSGGASYSAVLVYDVSRWGRFQDVDESAYYEYACRRAGISVAYCAEPFENDGSPLATLLKGLKRAMAAEYSRELSGKVFRAQCRLTAAGFKQGGSAGYGLRRASIAVDGRVTRILEMGERKNLPTDRVAFVHGPDQEVAVVRDIFEMCTVKNMPDTRIAETLNARSLSNQHGRPWSAHNVKAVLTNEKYAGTLIFNRSTQRMRSSRRPNDATKWVRVEDAFPSIVTRELFEQTKRERARRGKRWTDDEMLDGLRDILVEHGRVSADLIDTSALPSAKSYAFRFRSLVAAFEAAGVSGPSLSRSTITRYRIRCVTKDSSAELERCALRANAKVEKITTRTYRIAGVTVRLLCTRCRYERSHPCWKVTLRHSPGVDFVIWVRMNEANEEVAQIYLLPVQQFPDHQYLWPSTRTLWNYQQFAYSSISQLFGVS

SEQ ID NO: 10482 - protein, 504 aa, Unknown
  Description of Unknown: Integrase B10483 sequence
  IPR038109,PS00397,IPR006119,PS51737,PF00239,G3DSA:3.40.50.1390 ,PTHR30461,IPR025827,SM00857,G3DSA:1.10.10.2600, SSF53041,IPR011109,PF07508,PS51736,mobidb-lite, IPR006118,cd00338,PF13408,Coil,IPR036162,PTHR30461:SF3
MGRSLRAALYLRVSTTRQAEEGVSLDLQEERCQLWAKARAAQVVDVYRDEGLSGKNTQRPAYQRMLADLRAGKFDVLVALKIDRLSRSVADFCQLVQEAEAHGVDVVAVTQEIDTTTPAGRLLRNLLASFGQFEREMIAERVSETMQSAARKGRYCGGRIPFGYRQKQGGGLEPNPDTRAIVSDLFRLYASGKSATDLVRHLRESGRPLSHTTVIRILRNPIYLGKQQWAGEVLAGSHMPIVDQRLYDRVQPILERNAALAGGQRRTHKEHYEYLLDGLIFCGICGKHLTTWTARGKMGKRYFYYGCTGNRRGGTCKSKPFNAQELDRFMAEKVAERLADPSSLHAAMAAQKKTAAADLKRLAADKRSAEASASNAQQRMNNLMALAADGEWGPGDAADLRAEMAKKRATREDAERRLAVISQEMRAAEARAGVERNAEELGAEIQKVLGSSDHPRRRRLLRSALRKVTVNADSVEVLLYFGTHENSSGKPGPSEFARTSIGGG

SEQ ID NO: 10483 - protein, 504 aa, Unknown
  Description of Unknown: Integrase B10484 sequence
  cd00338,PF13408,IPR011109,IPR038109,PF07508, Coil,IPR036162,IPR006119,G3DSA:3.40.50.1390,PTHR30461, PTHR30461:SF3,PS51737,IPR025827,PF00239,SM00857, G3DSA:1.10.10.2600,SSF53041
MNYYIMYLRKSRADRPDESVEEVVAKHESILQDYAKRRFGHTIPEENIYREVVSGETIADRPYMQKVLQIIEQKECLGVLVADPQRITRGDLLDCGTIVNAFRYSDTHVVTPMHDYDLSLDMDRRYFQDELLRGNDYLEYNKRILRAGREESAKHGHYLASIVPFGYERCWVGKHPTLRINEYEAYYVRKIFEMRREGKGQRAITRWLNEQKVKPRMAKCFCISSVKNMLANDVYIGYVRWNTRNLVKVYEEGKIKKKRVDKGNMIRVKGMHEPIIDEDLFNAVQEVNGKTPKVPAKYGLVNPFAGLLKCGMCGTSMIYWHDSRKGTKSYYLCPKKTSGYCKNTRIDTAVVEREVIKALKSDLKDFEIRVRNGETNRPDHTVVLDQLQAERQDIEKRQINLYDLLESGVYSKEVFKERNERLDQERKQNIKAIEKVKKDSENENHIVDMTRSLKQAIAALEDDTVSIEAKNRFLKGIVDSIYVSKPHRKEYGKPEELEIRVNLK

SEQ ID NO: 10484 - protein, 504 aa, Unknown
  Description of Unknown: Integrase B10485 sequence
  cd00338,PF13408,IPR011109,IPR038109,PF07508, Coil,PS51736,G3DSA:3.40.50.1390,IPR006119,IPR036162, PTHR30461,PTHR30461:SF3,PS51737,IPR025827,PF00239, SM00857,G3DSA:1.10.10.2600,SSF53041
MTKDLQTGVIYARYSSDKQRDESIEGQIRECTEYAQREGILITKIYTDRALSARTDNRPEFLQMIRDSAHQSFNYVIVYQLDRFSRSREDSAKYKGILRCNGVRVLSAKEHITAEPAGIILESMLEGMAEYYSVELSQKVKRGMTENALKGKMNGSAVPLGYDLTESHHLAVNAHEAKAVRLIYDLYIKQHSIAKISDILHSKGYLTKRGRKISPSVIKTILSNEKYIGVYSWGDIRIEDSIPPIISRKVFDEVQTIMPTRIKNKGRRSEMYNLCGKLICGECGGHYAGSTATSRNKEKHHYYVCTNRRKYHTCTAPNIRRDELEDLVINRTLEILNQPSNIARIVDLVMSGYNNTTQEAKVAIQGINNKIKAIDTELNNCMNAIKQGFITERLKDEIENLESERNNLLEQKANHESALIPIKFTADHIEYFLERMAKENPTTKAGRSRILDTFIKSVTIYSDRVEIVFNYKNELPAFNTQCATGSHFKVLVGPPGFEPGTDRL

SEQ ID NO: 10485 - protein, 504 aa, Unknown
  Description of Unknown: Integrase B10486 sequence
  cd00338,Coil,IPR036162,PTHR30461,G3DSA:3.40.50.1390, IPR006119,PF00239,SM00857,SSF53041
MFNNAAALYLRSSKDRSDVSIDAQRRELQNLAATKGLTISAEFADIVVSGKDDNRPAFQRLLAGLKASGRAWSAILMFDTSRLSRNQHVAHVFRHECKKRGVAVHFSMTPDLGGIAGIILPAVLHAMDEVHSFLSREKGLAGMAENVRRGFRAGGRAPTGYVLKHLDTGTLREGKPVTKSKLEPGPAAPEITAYLRARALGTRRSIAARQAGLDTPSGTLIGIERNALTYAGHTVWNVSHNDTGKRRPRAEWVIQRDTHPALITEAEAEGVLERAGEPRGRYRTKAAYLLTGLLITPQGAAWHGDGGKFYRAGKGRRIGAADVDQAVVAKVLADLRAGEFVDALVRDAKRRAVHHEPAEVLEARRAELRKLDERIRRASQAALDAPTPRAFYERLGELEAERAAIGRVLEQLEKQNAERTALSTITARDIEKVLDTLAESLEALDREQLKDFLHELAERVTLDPEDLTCKIHYRIPAQAGKFMASPREFGQIPRLHAWRQLKIA

SEQ ID NO: 10486 - protein, 504 aa, Unknown
  Description of Unknown: Integrase B10487 sequence
  cd00338,IPR011109,IPR038109,PF07508,Coil,PS51736,IPR036162, IPR006119,G3DSA:3.40.50.1390,PTHR30461,PTHR30461:SF3, PS51737,PF00239,SM00857,G3DSA:1.10.10.2600,SSF53041
MRKYILYLRKSQMDKDFEEESVEETLKRHRKRLTEFAKANNLYIAVILEEVVSGESLTSRPKMLECLELVNTGEYAGVICMDIDRLSRGNSMDSGYITQVFQVNNCKIVTPSKTYDLANDSDEQFTDMKFMFSRYEFKTINKRLKSGRESSCAEGKFVGSVAPYGYERYKLDGIKGYSLKINPEQAHVVKMIFDLYTEKGLGYGKIVRELDRLGIQPSPPISFWDRHVIERILKNPVYIGMIRYKFKTVKKTFEDGKMIKKRIRNRENYDLHEGLHEPIITIEQWEKSQEARKNNLPVTSNYELCNPFSRIVKCEKCGRTIVRRTTSSTPVKYRLSCPSRDCDCRSIFLEPFEEAVVKEMTEWLKGYRITIQSNTITVDDNLLFSLQQMEKQMAEAEAQQEKICDLLEKGIYTIEMFSKRSEKLQSEINNLKLSIQKIKKEIAKQEERANNSTDFVPKVQHILDSYGILNPQQKNDLWKEVLHKIEFYAEPKGKDFRIKLYPKI

SEQ ID NO: 10487 - protein, 504 aa, Unknown
  Description of Unknown: Integrase B10488 sequence
  cd00338,PF13408,IPR011109,IPR038109,PF07508, Coil,PS51736,IPR036162,IPR006119,PTHR30461, G3DSA:3.40.50.1390,PTHR30461:SF3,IPR025827,PS51737,PF00239, SM00857,G3DSA:1.10.10.2600,SSF53041
MNSPVSSSNSRAIGYFRVSTVGQSGEHHVSLETQSQRFSSYCQSHDLTPVKTYTDVASGRRDNRKEYQSMLHFLQEKGADFVVVQYLDRFGRDAREILRRIWSLQDIGIEVIATDEDIKEELILLVRAGIATAESRKTSARIKANIGRAVAKGVHVGRVPFGFDGIRKIDPDGRARISEFIINPAEVAVIKRMYELAAEQNHGFKYIADQLNSEGHRSKAGNIFTSHTVRKILSDQAITGNLVYGKRPRPGSHAEDLIIIEGFFPQILTDKQWKRLQASLAIRRGSRAHGRTFTSGYLLSGIARCGYCGGPMVGKLTSHGIYYHRRYFCHRALTSRLMCDHRNSHRADELEKMVLDKLGEFADKKRTLELLAGMETVPGNKDLEPDRLKKDLKACEREFELHLRLLKEGQISEVQFSVANEPVRKRHEGLLQKSRELENSVKQEKGLKSWHRTLADLLTTFPQDFKSLPLAQQKAKLIEVIREIRVYKDRSTEVYLRENPLAMP

SEQ ID NO: 10488 - protein, 504 aa, Unknown
  Description of Unknown: Integrase B10489 sequence
  cd00338,IPR011109,IPR038109,PF07508,Coil, PS51736,IPR036162,IPR006119,G3DSA:3.40.50.1390,PTHR30461, PTHR30461:SF3,PS51737,PF00239,SM00857,G3DSA:1.10.10.2600, SSF53041
MSDKYLMYLRKSRADGEHETVEEVLAKHYKILQDYAAAKLGGAIPEDMIYREVVSGETIQDRPEIKKLLDRIQTEEIKGVLVVDPQRLSRGDLSDCGAIIRAFRYTDTLIVTPPKAYDLGDKFDRKFFEMELMRGNDYLEYVKEIMMRGRIASVNEGNFIGSVAPYGYDKVKVGKAYTLVPNAEADTVRLMYELWTKDGLGTTTIANRLNELHIKPRKSEIWNNASIRDMLRNPVYIGKIRWNCRKTVKHYEGGELISSRPKSQKEDWILVDGKHEPIISEETFNASLARFGSLPKVKAKSGLKNPFAGIMHCSCGRPMIYQPHKKCEARLHCAYQMRCGNRSATYREVEEEVIRALRQLAAELSEQLAEGTQNTHDAHKAIAEALRKELNALETQQERLYEFLEQGIYTSEVFVKRNAALAQRRQELQEAIETAKSYQVSETDYQQKIIALHDAIAMLEDPTASAEEKNNLLRTVIRDITYHRETEVRDKWHPVPFFLDISLI

SEQ ID NO: 10489 - protein, 504 aa, Unknown
  Description of Unknown: Integrase B10490 sequence
  cd00338,IPR011109,IPR038109,PF07508,Coil, PS51736,G3DSA:3.40.50.1390,IPR006119,IPR036162,PTHR30461, PTHR30461:SF3,PS51737,PF00239,SM00857,G3DSA:1.10.10.2600, SSF53041
MSEKYLMYLRKSRADGEHETVEEVLGRHYRILQDYAAAKLSGAIPEELIYREVVSGETIQDRPEMKKLLERIQSDEITGVLVVDPQRLSRGDLSDCGTIIRAFRYTETIVITPQKTYDLADKFDRKFFEMELMRGNDYLEYVKEIMLRGRIASVNEGNFIGSVSPYGYDKVKDGKSYTLIPNDEADTVRLIYELWTVNGLGTTTIANRLNALHIKPRKSELWSSASIRDMLRNPVYIGKIRWNWRKTIKKYEDGELVSSRPKSKKEDWILVDGKHEGIISEEVYNASLARFGSLPKVKAASGLCNPFAGIMHCSCGRPMIYQPQRRSAPRLHCAYQMRCGNRSATYAEVEEEVVRALKSYIVDLQDELKGKSDTSTNAQKAVTAALQKELNSLETQQERLYEFLEQGVYNSEVFVKRNAVIAQRRQELQEAITEAKSTEVSEIDYKQRLIALREAVAILENEAATAEEKNRLLRTVIKDIIYYRETDIRDKWHQVPFSLDISLI

SEQ ID NO: 10490 - protein, 467 aa, Unknown
  Description of Unknown: Integrase B10491 sequence
  cd00338,PF13408,IPR011109,IPR038109,PF07508, PS51736,G3DSA:3.40.50.1390,IPR006119,IPR036162,PTHR30461, PTHR30461:SF3,IPR025827,PS51737,PF00239,SM00857, G3DSA:1.10.10.2600,SSF53041
MERQVTVIPAIGGRRTRGRNKADHNKKTRVAAYCRVSTEQEEQLNSFENQVQYYTKYIEERPDYQMVDIYTDEGISGTNTKKREGFNRMIADCEAGKIDLVITKSISRFARNTQDCLHYSRKLKALGIGIIFEKENISTLDASGELLFTILSSLAQEESRNISENSTWGIRHNFQRGILRINPTTFMGFDMDENKKLVIDPEQAKIVRRIFREFEEGWTQNEIAKHLNDEKVKGVRGKVAWNGATILGMLTNEKYMGDARLQKTFTTDFLTKKRAKNEGQVEQYYVENSHKAIIPKAEWEAVQMELERRKDYCQEIGIKRYGFASLDNPFISKLVCGHCGAVVNKKSWSNRRQHVWACKNKEQRYGGTCHSENVKEETVRRAMVIAWNAVVNDRDKLIGAWEKMQEEGNPLQVLRAKQMIELTAHGPIKWEIPELTRMVMERIVIHDKRHFTVRFLDGKVKEIVVAE

SEQ ID NO: 10491 - protein, 467 aa, Unknown
  Description of Unknown: Integrase B10492 sequence
  cd00338,PF13408,IPR011109,IPR038109,PF07508, PS51736,IPR036162,IPR006119,PTHR30461,G3DSA:3.40.50.1390, PTHR30461:SF3,PS51737,IPR025827,PF00239,SM00857, G3DSA:1.10.10.2600,SSF53041
MERQVTVIPATGIKKARGKNKAAQNEKTRVAAYCRVSTEQEEQLNSFENQVHYYTKYIEERPDYQMVDIYADEGISGTNTKKREGFNRMIADCEAGKIDLVITKSISRFARNTQDCLHYSRKLKALGIGIIFEKENISTLDASGELLFTILSSLAQEESRNISENSTWGIRHNFQRGILRINPTTFMGYDMDENKKLVIDPEQAKIVKRIFREFEEGWTYNEIAKHLNDEKIKGVRGKVAWNGATILGMLTNEKYMGDAILQKTFTTDFLTKKRAKNEGQVEQYYVKNSHKAIIPKAEWEAVQMELERRKDYCQKIGIKRYGFATLENPFISKLVCGHCGAVVNKKSWSNRRQHVWACKNKEQKYGGTCHSENVKEETVRRVMVIAWNAVVKERDKLIGTWEKMQEEGNPLQVLRAKQMIELTAHGPIKWEIPELTRMVMERIVIHDKRHFTVRFLDGTVKEIVVAE

SEQ ID NO: 10492 - protein, 504 aa, Unknown; identical to SEQ ID NO: 10165
  Description of Unknown: Integrase B10493 sequence
  cd00338,PF13408,IPR011109,IPR038109,PF07508, PS51736,G3DSA:3.40.50.1390,IPR006119,IPR036162,PTHR30461, PTHR30461:SF3,PS51737,IPR025827,PF00239,SM00857, G3DSA:1.10.10.2600,SSF53041

SEQ ID NO: 10493 - protein, 504 aa, Unknown
  Description of Unknown: Integrase B10494 sequence
  PS00397,IPR038109,IPR006119,PS51737,PF00239,G3DSA:3.40.50.1390 ,PTHR30461,IPR025827,SM00857,G3DSA:1.10.10.2600, SSF53041,IPR011109,PF07508,PS51736,IPR006118, cd00338,PF13408,Coil,IPR036162,PTHR30461:SF3
MRIAIYCRVSTEDQEREGTSLDSQLKACQDKAQEFGYEISKKYTLKETYSGLVLERPKLDQLRQWARNKEIDAVAAYTLDRLSRDPVHFIILQEELERYGIRLILVTEDVDSSDIGKLVAHIKGFAAKLEAEKIKERTMRGKRERIRNGKLPTGRGILYGYDYDREHGINLANKDLDTVKMIGQWVIHEGISLNEACRRLMERHIPAPKGGRRWSRGTVGRIMRNPTYAGKSYAGKTRTEGKKRIRCSEAEYIPIADAVNRSVFSWEEWELIQRQLNRNRELSPRNQKLKYLLSGRLFCTSCGRKYYGVPMHGKPYYRCSGRVKLLSDKVCTSRSINASKLDEAVWAEVAKVLANPSTILAGLQQSESVNEEAFWGEELDRMAKRLKALNKGQEQLLQWALKGFPEDMVVKENEKINRERNELESAIQETKKKLGRAKENHANFEHVEDFCQIASQNLADFGYAEKKLALETLRIRVLVDGNDPPRLHGILPVPSEVYAVSQPL

SEQ ID NO: 10494 - protein, 504 aa, Unknown
  Description of Unknown: Integrase B10495 sequence
  cd00338,PF13408,IPR011109,IPR038109,PF07508, Coil,PS51736,G3DSA:3.40.50.1390,IPR036162,PTHR30461, IPR006119,IPR025827,PS51737,PF00239,SM00857, G3DSA:1.10.10.2600,SSF53041
MNTYALYLRKSRADLDAEARGEGETLAKHRAALTDYARRRGLFIAREYAEIISGDSIAARPQMQALLADVKAGMYTGVLVNDIDRLGRGDSIDQEIIKLTFAASHTLIITPSRDIDPANPTDDDMLDFSMFMARFEYKKISQRLREGRTRSVAAGHWVAGNPPYGYRLEKSQTGTTLAIDEKTAPIVRLIFEWYAKTEAGYQAIASRLNAMGIQFTPGHAPRLASVRNILKNPVYVGRLVWGRRSMVSVIEDGRRVKRQIKSPSQLIVEAAFPALINAETWQAVQNRINDQRHKAPINTNAVMQNPLSGLIVCGECGHIMVRTNSRGRRPLLTCTTPDCPTSATYLEIVENALLEILEGWCADYIQPEAIEKRDDHADEIAALRRQIATARAQITRAQELVETGIYSPSDYMSRRMALDAQISAAEAEADKLSSPSPEAARAAILPRLRTVLDAYRHAPTAADKNALLRTLLDHVTYHKIAAARRSADKNPRRLLSLDVFPRLY

SEQ ID NO: 10495 - protein, 504 aa, Unknown
  Description of Unknown: Integrase B10496 sequence
  cd00338,IPR011109,IPR038109,PF07508,Coil, PS51736,G3DSA:3.40.50.1390,IPR006119,PTHR30461,IPR036162, PTHR30461:SF3,PS51737,PF00239,SM00857,G3DSA:1.10.10.2600, SSF53041
MCEKYLVYLRKSRADGEHETVEEVLAKHYKILQDYAAAKLGGAIPEGMIYREVVSGETIQDRPEIKKLLDRIQTEEIKGVLVVDPQRLSRGDLSDCGAIIRAFRYTDTLIVTPPKTYDLGDKFDRKFFEMELMRGNDYLEYVKEIMMRGRIASVNEGNFIGSVAPYGYDKVKVGKAYTLVPNSEADTVRLMYELWTKDGLGTTTIANRLNELHIKPRKSEIWNNASIRDMLRNPVYIGKIRWNCRKTVKHYEGGELISSRPKADKEDWILVDGKHEPIISEETFNASLARFGSLPKVKAKSGLKNPFAGIMHCSCGRPMIYQPHKKCEARLHCAYQMRCGNRSATYKEVEEEVIRALRQLAAELSEQLAGGAQNAPDAHKAIAEALRKELNALETQQERLYEFLEQGIYTSEVFVKRNAALAQRRQELQEAIETAKSYQVSETDYQQKIIALHDAIAMLEDPTASAEEKNNLLRTVIRDITYHRETEVRDKWHPVPFFLDISLI

SEQ ID NO: 10496 - protein, 504 aa, Unknown
  Description of Unknown: Integrase B10497 sequence
  cd00338,IPR011109,IPR038109,PF07508,Coil, PS51736,G3DSA:3.40.50.1390,IPR036162,IPR006119,PTHR30461, PS51737,PF00239,SM00857,G3DSA:1.10.10.2600,SSF53041
MTYAIYLRKSRKDDETGYADTLSRHEKMLMDLANRIGIEIHEQDIYREIVSGESIEARPQMQRLLKAVEMRMYTAVLCVELERLSRGNGEDQARILKAFQFSNTKIITLNKTYDLASDDEFDEEFFEFGLFMSRREYKMIKRRLLRGRLQSQQEGYFTGSTLPFGYGKMKNPEGKGYILVPNEQTPILQMIFRRYAEGELLAEIVHDLNATGVKTASSVNARWSTNRVRDILRNRVYIGEININKYAKNRRMEDGRIIETKRRNPDMQTVPGKHEPIIDMETWNKVQARFARFEPRTNIDRSLKNPLASIMRCAECGKMMARRTYTHKGVSIPIIVCQSNRCITRQSNLEMVENMVIETLKKELERQQTILASYGNEKQDNSDDKTLEFLQAEIAKKDKMMERVDELYELGDYTRTKYLERSQKLQAQKAELMKQLEEVEKRISERDNNRKNAVPILTKVLDEYHTLDVKGKNDLLKMIIETITYRKHESGSDIEPELNFKLLI

SEQ ID NO: 10497 - protein, 504 aa, Unknown
  Description of Unknown: Integrase B10498 sequence
  cd00338,PF13408,IPR011109,IPR038109, PF07508,PS51736,G3DSA:3.40.50.1390,IPR006119, IPR036162,PTHR30461,PS51737,IPR025827, PF00239,SM00857,G3DSA:1.10.10.2600,SSF53041
MSLYAIYLRKSRADFEAEARGEGETLERHRTALRALAARRGFTVIKEYAEIVTGDSIAARPQMQALLEDVRRGMYAGVIVNDVDRLGRGDSIDQEIIKLTFVTGHCLIITPTRDIDPAQPTDEDMLDFSMFFARFEYRKISQRLSVGRMRSVQAGNYIAARTPYGYNKVTAGKHITLVPDPETSEIVRMIFNDYASGEIGYSGIASKLNGMGLHTTLGNTWTRASVKAILTNPIYTGRLLWGRTATVSTIEDGKRKKKQVESQPTVVENAYPAIISDEVFNRVQNMFEQSRHASSTKASLALANPLAGLVVCSQCGHVMQRRGGHRSATQDHVLTCMTHGCKTRGTYTSIVMEAVLDTLNDWCARYNPATVTLPEKPNMDNIIAKQSAQIESRLAKARELVETGIYTPSEYLAQKNMLEEQLAALHSKSSPMTMTKEEAIAQAVPNIIRVLDALPHAETMEQKNALLRTVIDHIEYTKLKPAYRGTSPQSLLTLDIFPRIGYNV

SEQ ID NO: 10498 - protein, 503 aa, Unknown
  Description of Unknown: Integrase B10499 sequence
  PF13408,IPR011109,IPR038109,PF07508,Coil, PS51736,G3DSA:3.40.50.1390,IPR036162,IPR006119,PTHR30461, PTHR30461:SF3,PS51737,IPR025827,PF00239,SM00857, cd03768,G3DSA:1.10.10.2600,SSF53041
MDFIYTRQSVDREDSISIESQIELCMREVTSSEHKVFRDKGYSGKNTDRPDFQEMMAQIREGGVRRVIVYRLDRISRSVLDFASLINEFQKYGVEFVSVTERFDTSTPIGKAMLMIVMIFAQLERETIQQRVMDAYRSRSRKGFYMGGRIPYGFSLKDTIIEGIKTSMYVAKPEEIKVVKLIYEMYSDPQVSFMDVIKYLKEQGIKTPDGKNFSRMRLRDLIINPIYVKADSAIFEFFQSQGAEIVNDISQFIGTNGAYLYTGDNAEKRKAISINGHVLVLAPHEGFIESEQWLLCRRKCLNVRQIAKPVKAKNTWLAGKIKCIDCGYALALKSYPRKRKEAARYYMCNSKYVSASCDGVGSIPAIEIEDIVFDEMTRKLAEFDQLAHKEKKGDSLQIAKYKVRMDQIEKEINILIDKLIASSSTTAEYVNERIEALDAEKRDLKEKIAQLSAELYGKQDIDVIKNYMDKWADIDIQDKITVVDALIETIHVGHGNVQIKWKI

SEQ ID NO: 10499 - protein, 503 aa, Unknown
  Description of Unknown: Integrase B10500 sequence
  cd00338,PF13408,IPR011109,IPR038109,PF07508, Coil,PS51736,G3DSA:3.40.50.1390,IPR006119,IPR036162, PTHR30461,PTHR30461:SF3,PS51737,IPR025827,PF00239, SM00857,G3DSA:1.10.10.2600,SSF53041
MQKNTTIENTTKAVIYARYSSDRQREESIEGQLRVCEDYAKRNGMTILHVYADRALSGRSDQRPEFQMMIQAAATQAFDTVLVYKLNRFARNRYDSAKYKHKLKKYGVKVVSAMENIADDPSGILLESVIEGMAEYYSAELAENVMRGMTENALECKWPGGTVPLGYKLDVAHHLIIDDPAAKTVRWIYQMALEGRQPASIIRELNAAGCRTAFGRPFGRTSLNTILKNERYIGTFLWNGIKKPNAIPAIVNPEEWQKVQEITKAKKKCIAKSRGENYLLTGRLFCGQCGGSMVGTAGTSKMQRVYHYYDCGNHLKRKGCTTKAIRADKLEDLICDTTTQLLSNQDAIKAIAKQAISAQKEQGPSLVLQSLQNQKADISRKLQNCIKAIEEGLISQTVTNHIQDYEKQLQTLNDDIRREELMSRIPQLTEKHIEFFFWSISQQIKKADKYKSILLSSLVRSVIIYEDFIEIQYNYKKKLPILQNPVKIKSSYLNNVVIHPGFE

SEQ ID NO: 10500 - protein, 503 aa, Unknown
  Description of Unknown: Integrase B10501 sequence
  cd00338,IPR011109,PF07508,G3DSA:3.40.50.1390,IPR006119, IPR036162,PTHR30461,PS51737,PF00239,SM00857, SSF53041
MTAVPETAPATTPLGLIPAAKYRRISNDPEGRELGISRQDEDLDALAAKHNLIYVASYCDNDISASTRTRKIRKQYQQMLKDAKAGNFKVIAACTTGRLTRKPREVEGQIELAEQHGISYMYDRSPVFDLNTAYGRLVARQFAAWDAGEAEIISERVTRARLQQAKEGRFGGGRRRFGWGMPLLDPKTGEVVIDHDQMVDFEIDEIKKMGAYLLAGKSMRYVIRDLTDRGVETAGGGKWTAIAVRDIMLRPALAGMVKYRGEILEGAKVSWEPIIPVEQWKALRAMLKDPRRKTTTGNTPKWLLSHVAVCGSPVCEGKGNRLRVTGMPSGGNTGRTYPSYRCIEVAHCNMRADKLDAEVEHIIIERLSRPDAINLVEQVDEIDIKFLASEGNALRAHLEEAKGAYKRRLLTLADLIEVTEDVNLKLADIERRLAEATSLDPLAGLIGRPDVAERWNELDLGQKKAIINSLMTITILPSFQRGGRLPGGGYIDQRRLVIDWKRG

SEQ ID NO: 10501 - protein, 503 aa, Unknown; identical to SEQ ID NO: 9666
  Description of Unknown: Integrase B10502 sequence
  PF13408,IPR011109,IPR038109,PF07508,Coil,PS51736,G3DSA:3.40.50. 1390,IPR006119,IPR036162,PTHR30461,IPR025827,PS51737,PF00239, SM00857,cd03768,G3DSA:1.10.10.2600,SSF53041

SEQ ID NO: 10502 - protein, 503 aa, Unknown
  Description of Unknown: Integrase B10503 sequence
  cd00338,IPR011109,IPR038109,PF07508,PS51736, G3DSA:3.40.50.1390,IPR036162,IPR006119,PTHR30461,PTHR30461:SF3, PS51737,PF00239,SM00857,G3DSA:1.10.10.2600,SSF53041
MKYAIYARVSTSLEAQDSSFEAQTQDLHKRVEILYPELELYKVYSDHGISGTKLERPDFQQMIADAIDGQFEVIVTKSISRFARNTKILLNTLDELNKAGVKVIFLEENIDTSQASQKFLLTVLGALAEMESVNTKEHRREAKKIRWASDKIACPNHLPFGYKFEDNKIIINEEEAKTVRFIFNQYLQCKSSLQIVRMLEAKGVPTKHGRPWQMQTVRTMLKNKKYIGVFEEKDPDTGEVHTFECPAIISQEDFDKVQKSFKQGKQGRRLYPLSNKVYNEAGLKVTRTTKVGKPYFLDEPSSGIPMWGYLLNGHGDYKTKWLLSETSLYLVIIHALVDHTKNLGKLHRGTFWEEFINQLQDPEEIEYNKELAAYEAKKSSLIKQKTKLIELFKKDIIDLEEVTRDTKRIDKQLRELAMPIPPETKTINTIHITNFIEAVSQDDVESSVNALTELFKDPEQRKSICDTFIKRIDLLERKHVKITLNDDTELHYFVKRFTPKRPK

SEQ ID NO: 10503 - protein, 503 aa, Unknown
  Description of Unknown: Integrase B10504 sequence
  cd00338,PF13408,IPR011109,IPR038109,PF07508,Coil,PS51736,G3DSA:3 .40.50.1390,IPR036162,IPR006119,PTHR30461,PTHR30461:SF3,PS51737 ,IPR025827,PF00239,SM00857,G3DSA:1.10.10.2600,SSF53041
MKKAVIYARFSCGRQTEQSIEGQLRKCHSYAKEHDLVVVKEYIDRARTARNDNRPYFQKMLSDSEDSEWEYVIVYSIDRFSRDDGDYGADKRILRNNGVTLLSATETIGMNADGTENLGGILTEGLLVALAKYYSRELSQKIRRGQYESLQKGQTLGSSAVYGYFVKDKRYHINEDQAVVVREMFELYSKGKSAIDIAEIFAKRGLRNAQGRPFKPNGIMKMLKNPKYIGTYTFGDKVYEDYHPAIVEKNLFYLVQERIEKNKMNPARLKARDEFILTGKLYCGYCKHTMVGESGTSHTGQSYYYYKCSHRKNRKGCEKKNIKKDVLEDIVIEETLKHILNGSIIDDITTEILALQEEQRDLSELVLLKKQLSEISGYINNLLTAIKRGIITESTQAELQKLEEDKKLIEERIVQEEFKDSQKLTKEKIEFWFEQFLHFDKTDKGAREYLVNYFINRIFLYDDRIVIIYNHDGDNRTDLSNEEIEEALSSDLTHDRPPETKST

SEQ ID NO: 10504 - protein, 503 aa, Unknown
  Description of Unknown: Integrase B10505 sequence
  cd00338,PF13408,IPR011109,IPR038109,PF07508, Coil,PS51736,IPR036162,IPR006119,G3DSA:3.40.50.1390, PTHR30461,PTHR30461:SF3,IPR025827,PS51737,PF00239, SM00857,G3DSA:1.10.10.2600,SSF53041
MRKKKCYIYTRVSTMAQTEGYSLEAQVERLREYAEYRNLQIVGEYCDAGKSGKSIKGRPAFQEMMDDIVNGKDDVSYVLVFKLSRFGRNAADVLKSMQLLNDYDVDLVCVDDAIDSSTQGGRLTLAILSAVAEIERENITVQFNAGRMQKVLEGGWPGGPVPYGYRNIKKQMQIEPTEAELVKKMFEAFLIDGMTTTSVAAYMNEQGYRRVIKGEERPFTYDFVANALENPFYCGKILYGKRSKKKDVMAIQGIHEPIVDEDLWEQVQAKRKALSVKWQKVDEPERISILSGLVKCPLCGKGMIATKNKHVNKNKGGHYKTIHYYSCRNHRKSSGRECSFNRQLNQSKIDSSVFEIFSGITALPEYHEMIANVLGNQPSVELLENELKALRKQLRSCETQKRKLGEELDGLDILDDNYDENYDRIQAEMDEIYDRMDVAESSISKIKKKLSAAKNGIRSIEKVKELVEHMQLLFPKMTCDEQKEMYRLFIERIDVYPEEQDSG

SEQ ID NO: 10505 - protein, 503 aa, Unknown
  Description of Unknown: Integrase B10506 sequence
  cd00338,PF13408,IPR011109,IPR038109,PF07508, Coil,PS51736,IPR036162,IPR006119,G3DSA:3.40.50.1390, PTHR30461,PTHR30461:SF3,IPR025827,PS51737,PF00239, SM00857,G3DSA:1.10.10.2600,SSF53041
LTGVIYARYSEGPRQTDQSIEGQVADCTAYAERNGIRLLDVYADRHISGKSVEGRDEFQRMICDAEAGLFDAVIVWKIDRFGRNRQDIAINKMRLKKAGVRLLYAEESVPDGPEGIILESVLEGLAEYYSADLRQKVLRGIRETAKKGQYCSSTMPIGYKRDEDRHVIVDPIEAEAVREAFRLHIAGATTAEIKQLFNDRGILTSRGKPVSSGTIYRMLRNERYTGHWELAGIPLDVEPIIDEATFLEASKHFKTSRNNAAGRAKVNYLLSCKCFCGYCGAMLNAEAGTGKAGKVYHYYKCGDKKRGKKCELKPIQMERLDDAVIDATVEKMLTGEVIDQLVVRILEIQEHDEAADPAAAYRKRLEANKKKQKNIIAAIEEGAGKGLAKRLAELEAEEEEIDLEIQRLELKAPKLTEGVIRSWLNSFREGDVSDPDFRQKLVDTFIARVDVWNDHAIIYYNMQEKTAASKCSSTARLVDLSSWYSNTSIPLILPPFIIIYIDL

SEQ ID NO: 10506 - protein, 503 aa, Unknown
  Description of Unknown: Integrase B10507 sequence
  PS00397,IPR038109,IPR006119,PS51737,PF00239, cd03768,G3DSA:3.40.50.1390,PTHR30461,IPR025827,SM00857, G3DSA:1.10.10.2600,SSF53041,IPR011109,PF07508,PS51736, IPR006118,PF13408,IPR036162,PTHR30461:SF3
MKAAVYIRVSTPGQAINGESLDMQKERLIEYVKTHKWDLYKTYEDGGFSGKDTNRPAFQEMLKDAEDKKFDILVVYKIDRLSRSILDFHTTMKFLEKQGISFVSVTQQFDTTNSMGRLMLAILVDFANFEREINVDRAIDSYMKRLQDGVNSGTVPYGYRREGKKVVIVPEEAKNIKEIFHLASQNLSMNNIARKTGFTNYHIRSILTNPFYCGYIVRKRDRYERRIKEHEWKWYKGKHKPIISEETWKETAELRKKKIKVIIKKTTGIFSRLIYCPYCEHNLCFHSKYTKDSVILYYQCDRIKMDGKSCSQYIREEPLETVLLNYINNIFELKVPISRREIEVEDKVANVDRKIDKIIKLIEEDYMSFEKGKKQLDKLKEEKAVLLASRIIETDYSEIVKKLKQIKQIYPLATREERSQLWHVLIEKIEAHKDKIVVYWRFRKKQTIQRRKISKLLKNYSPTQGRIPPAATTQANVLMFISDLKRLLTPKKFLNDSWPSKRK

SEQ ID NO: 10507 - protein, 503 aa, Unknown
  Description of Unknown: Integrase B10508 sequence
  cd00338,PF13408,IPR011109,IPR038109,Coil, G3DSA:3.40.50.1390,IPR006119,IPR036162,PTHR30461,PTHR30461:SF3, IPR025827,PS51737,PF00239,SM00857,G3DSA:1.10.10.2600, SSF53041
MANKSPFQPGSLVAAYFRDSGGEAQDLSIPQQEAHFRNWCVQNGLTPGAVFRDAARPGSTVAGRQAFGDMMHHFRNGAQEAGLVIWSYSRFARDFDDAQFYRADIRRRGYLFHSLNDDIPDGPMGRLFEAVIDWKNEQFLEDLSRDVRRGLHDLVLTHGAVPGTPPRGFKREPVQIGSRRDGRPHIANRWVPDPEKIELVRQAFSLRAAGVPLSQINAQTHLYGSINSYTTFFSNRLYIGILEFGDLVIENYCEPIIDQVTWEAVQLRLQQHAAHHNLTDPGSVVHPRRIGSRYLLSGLAFCARCGSPLYGSSTPQRNKSVVNRYACTRAARQRDCDLKPIPRKVLETAVLDTLAVYVLQPEVQAANLQLIQAQQAQAHADLRAQRTDLSNRIGGVRRRLANLTAAIAEAGHTSALLESLNRFEAEVADLRSQIAAIDRQLAAPVPELPAEDLPAQLEALRAVLSDPNPEAAQRLLRGLVNRIVVDRDGSLVRGELIYYSPPP

SEQ ID NO: 10508 - protein, 503 aa, Unknown
  Description of Unknown: Integrase B10509 sequence
  PF13408,IPR011109,PF07508,PS51736,G3DSA:3.40.50.1390, PTHR30461,IPR006119,IPR036162,PTHR30461:SF3,IPR025827, PS51737,PF00239,SM00857,cd03768,SSF53041
MAVAIYSRQSVDKKDSISIETQIDFCKREIFEEEIKIYIDKGFSGKNINRPKFKEMEKDIKAGIIKKVIVYKLDRISRNLLDFANIIDYYKKYDVGFLSCNEKFDTSTPMGNAMLSICMVFAQLERETIQKRVKDNYYARGALGLYMGGRAPYSFIKIETKIAGKKTYTFKNDNEKVISLLEMYELYSTSDMSLGKVSDYLNSKGILAAEGGLWDSGKISRILRNPVYVMADADVYSYYKNKRCIISNDISEFIGVNGCYLYGKRESNERKYTDVTDHTLSIALHEGLVTSSTWLACQYKLDSNKQIKNTGKGKHSWLSGLMKCGKCGYSISVVVARDKRYLSCRGKTNMKTCIGFTKTMFADKIEKVVEKEIFMRIDTIRKNNYPKQKVEDSQSNKFKIQIIEIDRKIDNLILQLEESSKVSAKYMNAKIEKLDSEKNIILANISKNAIVKLNLYPKEELFKKVDNWEGLSLDEKKNICKFLIKKISIMETDIKIDWHKEVL

SEQ ID NO: 10509 - protein, 502 aa, Unknown
  Description of Unknown: Integrase B10510 sequence
  cd00338,PF13408,IPR011109,IPR038109, PF07508,Coil,PS51736,G3DSA:3.40.50.1390, PTHR30461,IPR006119,IPR036162,PTHR30461:SF3, PS51737,IPR025827,PF00239,SM00857,G3DSA:1.10.10.2600,SSF53041
MSETTQIGVIYARYSSDKQRDESIDGQIRECMAYAEREGITITNTYIDRALSAKTDDRPEFRQMILDSNKQAFNYVLVYQLDRFSRNRYDSAIYKAKLRKNGIRVISVKENIKDDPSGIILESVLEGMAEYYSAELSQKVMRGMTDNVLQGKWVGTVVPYGYKLSNNRQLEINEHEANVVRKLFDMYLQRHTLSEMASYMNANGHLTHKGKPFNTNSIKAIISNEKYIGVYSWGSERIENAIPPIIDKNIFKKAQHKRNLRAKKKGNRSELYQLCGKLECGRCGGNYVGSTGTSKTGTLHHYYVCSNRRRKNACQAQNIRRDALDDIVISQTLAILNKPNVVNKIAKYAASSGKNLQSETVAQIDIIDAHIRDLKKSLDNYMIAIANGFISDVLKHRIEATEQELKDQIEIKTNLENTIIPVELTEDHIRFFLLKMAKENPSTLRGRARIIEAFVHHVTIYEDHIEIVFNYKNELSEFHDKTLESSLLNDLVTQKGFEPLAF

SEQ ID NO: 10510 - protein, 502 aa, Unknown
  Description of Unknown: Integrase B10511 sequence
  cd00338,PF13408,IPR011109,IPR038109,PF07508, Coil,PS51736,IPR036162,PTHR30461,G3DSA:3.40.50.1390, IPR006119,PS51737,IPR025827,PF00239,SM00857, G3DSA:1.10.10.2600,SSF53041
MRGVIYARYSPGPRQTEQSIEGQVADCKYYAEENGIDIIEVYADRKVSGKSVVGRDEFQRMLRDAEKGRFDCVIVWKIDRFGRDRQDIALGKLTLKRSGVKLLYAKESVPEGPEGIILESVLEGLAEYYSADLRQKVIRGMKETAKKGQYCGQSLPIGYKVDAERHIIVDEREAAAVREAFRMHIAGGQLRDIVQMFADRGIMGRRGKPVSNAVVYRMLRNNKYLGEFYIQDVKLNVEPIIDQATFLEAAQHFKTSRNNAAGRAKVNYLLSCKMFCGYCGSMINAETGTGKLGKVYRYYKCGDKKRGKACELKPFPKDQLEDAIILATVNDMLTDDMIEKLTVRILEVQEQENADDPVVGLRRRLDSNKKRQRNLLDAIEEGGARGLVSRLAALEEEEEQLVLEIQRAEIKRPRLTHEVVEAWLRSFRVGDVTDDDFRARLVDTFIARVELRNDEALIFYNIREKGPHSRVRVRPEWWSPRDGTRTPKIIVLRDYVVLRIAV

SEQ ID NO: 10511 - protein, 502 aa, Unknown
  Description of Unknown: Integrase B10512 sequence
  cd00338,Coil,PS51736,G3DSA:3.40.50.1390,PTHR30461, IPR006119,IPR036162,PF00239,SM00857,SSF53041
MKAAMYLRSSKDRSDVSLAAQRRELEKLAASRSLTVAKTYEDAVESGSTENRPGFIELVRALKHSSRGWEYLLVYDTSRIARRRYIAQAIKHEAKKRGVTILYARMPSDLDPVAELVLESVFEAMDEAHSIMSRQKGLAGMAENVRRGFRAGGRAPIGYQLQALTTGTIREGSPVMKSKLMPGAGAAMIGEYLTARANGIPRTIAARKTGMPATSLIGVEWNALTYAGHTVWNRHAPNGGGTKMRPRAAWQMTRDTHTALISDAAAETILTRLETSHVGRSVSQAMAAKSDYLLTGLLYTGDGQMWVAHGKYYRLKRRDATPGKTVRADMIESAVLEQVEAGMKSDLFLRNLLIAAQRSRRAADPAAAIDQQIAKLEKEKGRAAELALTSDADTFTAIVEERGRHIESLRREADAVRQDDTVSKQLAAMTVDQLRGLLADQSREKALQTLVDRIVLERDLTCQIELKAVPGRQRRWPGVASPQVRDSWPPELIQRVTLKRIA

SEQ ID NO: 10512 - protein, 502 aa, Unknown
  Description of Unknown: Integrase B10513 sequence
  cd00338,PF13408,IPR011109,IPR038109, PF07508,Coil,PS51736,IPR036162, IPR006119,G3DSA:3.40.50.1390,PTHR30461,IPR025827, PS51737,PF00239,SM00857,G3DSA:1.10.10.2600,SSF53041
MRGVIYARYSPGPHQTEQSIEGQVADCQQYAEEHGIDIIEIYADRHVSGKSVVGRDEFQRMLRDAEKGHFDCALVWKIDRFGRDRQDIAMGKMALKRAGVKLMYARESVPEGPEGIILESVLEGLAEYYSADLRQKVIRGMKETAKKGQYCGQSLPIGYKVDAERHIVVDEREAAVVREAFKLHIAGGQMRDIVQLFADRGIMGRRGKPVSNAVVYRMLRNEKYLGEFYIQDVKLNVEPIIDQATFLEAAQHFKTSRNNAAGRAKVNYLLSCKMFCGYCGSMISAEAGTGKLGKVYRYYKCGDKKRGKKCELKPFPKDHLEDAIILATVNDMLTDEMIEKLTVRILEVQEQENADDPVVGLRRRLDSNKKRQRNLLDAIEEGGARGLVSRLAALEEEEERLVLEIQRAEIKRPRLTHEVVEAWLRSFRVGDVTDDDFRARLVDTFIARVELRNDEALIFYNIREKGPHSRVRVRPEWWSPRNGTRTPKIIVLRDYVVLRIAV

SEQ ID NO: 10513 - protein, 502 aa, Unknown
  Description of Unknown: Integrase B10514 sequence
  cd00338,IPR011109,IPR038109,PF07508,Coil, PS51736,G3DSA:3.40.50.1390,IPR006119,IPR036162,PTHR30461, PS51737,PF00239,SM00857,G3DSA:1.10.10.2600,SSF53041
MKTCIYLRKSRADEELEKKEDVDTLARHRSTLLEVAKKQDLNIVEIKEEVVSGDSIAKRPKMIQLLEEVENNTYDAVLCMDIDRLGRGDMQDQGKIINTFKESNTLIVTPDKIYNLNNDLDEEMTEFKTFFARRELKVITKRMQRGRVKSIEEGNFIGSVAPLGYKFEYDKFGKRHMVIDEETAPAIKLIFDMYLNGEGSFRIMKRLNTLGYKTTAGKDFTECAVRRIVRNQTYCGYVTWFEYRRKGTKTRKNKEGDVLVCKGKHKPIISEEDWNKAQEIRKGNQIPSKKNDRKLINPLAGIIKCSNCNHTMVASYNTVKEGPVLYLRCKNCYEVGSSRLDLVEEEILNTLKVKLKEIKDELNNTEIEDKENKQLEMLQNTLISLDREKTELDKQKNKLHDLLERGIYDVDTFLERQQTLASKKEEIETAIKGTKKLLEAETSKDIDYKELAKNIECAIEDYENTDSIELKNKALKSVIKEILYNKEKKRFAQFTLEVKFKI

SEQ ID NO: 10514 - protein, 502 aa, Unknown
  Description of Unknown: Integrase B10515 sequence
  cd00338,PF13408,IPR011109,IPR038109, PF07508,Coil,PS51736,IPR036162, G3DSA:3.40.50.1390,IPR006119,PTHR30461,IPR025827, PS51737,PF00239,SM00857,G3DSA:1.10.10.2600,SSF53041
MRGVIYARYSPGPHQTEQSIEGQVADCQQYAEEHGIDIIEIYADRHVSGKSVVGRDEFQRMLRDAEKGRFDCVLVWKIDRFGRDRQDIAMGKMALKRAGVKLMYARESVPEGPEGIILESVLEGLAEYYSADLRQKVIRGMKETAKKGQYCGQPLPIGYKVDSQRHVVIDEREAAAVREAFKMHIAGAQLRDIVQLFADRGIMGRRGKPVSNAVVYRMLRNEKYLGEFYIQDVKLNVEPIIDQATFLEAARHFKTSRNNAAGRAKVNYLLSCKMFCGYCGSMISAEAGTGKLGKVYRYYKCGDKKRGKKCELKPFPKDHLEDAIILATVNDMLTDEMIEKLTVRILEVQEQENADDPVAGLRRRLDSNKKRQRNLLDAIEEGGARGLVSRLAALEEEEEQLVLEIQRAEIKRPRLTHEVVEAWLRSFRVGDVTDDDFRARLVDTFIARVELRNDEALIFYNIREKGPHSRVRVRPEWWSPRDGTRTPKIIVLRDYVVLRIAV

SEQ ID NO: 10515 - protein, 502 aa, Unknown
  Description of Unknown: Integrase B10516 sequence
  IPR038109,PS00397,IPR006119,PS51737,PF00239, cd03768,G3DSA:3.40.50.1390,PTHR30461,IPR025827,SM00857, G3DSA:1.10.10.2600,SSF53041,IPR011109,PF07508,PS51736, IPR006118,PF13408,IPR036162,PTHR30461:SF3
LNIAMIFGYCRVSSDEQAAHGISIQAQRDILNGYAAMSQSEIKIFEDAGFSGKNTQRPALLRLLAELPASSVSAVVVWKLDRLSRSLRDTLTMIEDIFQPAGASLVSVTESIDTSTPSGRMMLNLLASFAQLEREQDSDRVVMSHKHLARDCQYLGGHIPLGYRVDENKHFQLDPVRAAIVRRVFDLYLARCGYGAILGYLNSPEIFPLTGKTTIYTKQSLYFLLRNEIYAGVYLRHMGADPRHRITSPETIRIPGGVPAILSADEWQRVCRICDENASGYKTTYRSRTVYPLSGLVRCAVCGRIMSVRHGGKARNGETERYYTCKNKCVRPARLENVQDAVFTALEYFASDESVIRQACEISNSFIDTDEKENQQAVAPLEDRLQEIARQNARIVSFVKNNDNPPASMMQELTDLDKEEKLLRSRIVSLRRPLGRHDAEETVRLLRLAGDIRKLPPDEQKARIQAAVNKVLVTDFTYQVILACHTYSGDEPTHYIEHTIDR

SEQ ID NO: 10516 - protein, 502 aa, Unknown
  Description of Unknown: Integrase B10517 sequence
  cd00338,PF13408,IPR011109,IPR038109,PF07508, Coil,PS51736,G3DSA:3.40.50.1390,IPR006119,IPR036162, PTHR30461,PTHR30461:SF3,PS51737,IPR025827,PF00239, SM00857,G3DSA:1.10.10.2600,SSF53041
MEGYLVYLRKSRSDGEHESVEEVLARHEKLLQEHAVKILGEPVPESCIYREVVSGETIQDRPEVRKLLDRIQQEPVRGVLTIEPQRLSRGDLSDCGTIIRAFRYTDTLIITPTKTYDLADKFDRKFFEMELTRGNDYLEYIKEIMMRGRLASVSEGNFIGSVPPYGYDKVRSGKSYTLAPNDEADTVRLIFRLWTEEKLGTTRLANRLNELGIRPKKGDYWTCASIREMLHNPVYIGKIRWNWRKTVKTIENGEIKKTRPKSSEDTWIMVEGKHPAIIDEKTFDAAQALFGNAPRNKVGKELTNPLAGMLRCECGKAMILQPQQRSAPRLHCRHQTHCGNKSATYEAVEEAVIAQLSELIEHIEVMIRNGEDPASINEDIIRKLSKELNDIETQQDKLYDLLEQGVYTNAVFLRRNQALAERRDKCRSALDQAKAAGSPVPLEKRRLMLMEAIGTLRDNTVSPKEKNELLRLVIREIKYSRQAGSRTKWDTTPFNLEISFNF

SEQ ID NO: 10517 - protein, 502 aa, Unknown
  Description of Unknown: Integrase B10518 sequence
  cd00338,PF13408,IPR011109,IPR038109,PF07508, Coil,PS51736,IPR036162,G3DSA:3.40.50.1390,IPR006119, PTHR30461,PTHR30461:SF3,PS51737,IPR025827,PF00239, SM00857,G3DSA:1.10.10.2600,SSF53041
MTGVIYARYSEGPRQTDQSIEGQVDDCRAYARNKGIDIVEIYADRHVSGKSVDGRNEFKRMMHDADQHKFDCIIVWKVDRFGRSREDIAVNKIRLKKAGVLIMYAKEAVPDGPEGILLESLLEGLAEYYSADLRQKVIRGHSESAKKGKWTAGRLPIGYKKDNDQRIILDPKAADCVRGIFRMCISGHSLKDMQQYLLECGIASRGGTVPSKSVVERILRNEKYTGKFSFRDIEIPAPIIIDRATFDEAQRHFHTGRNNAAGRAVVSYLLSGKCYCAYCGSLLVGECGTGKSGRMYHYYKCANAKRGKKCALKAIPQKKLENLVVEHTIADVLTDDLIDMLVDKIMEIQKKRQDEDPTIILKKRLEDNRKRQEALATAIENGGARVLVQRLATLEAEENELLVQISRNEIKHPVIPAELVRGWLLSFKAGDKDDPEFRKKLLHTFVSNVIVKNDSVTIFYNIEKEPNSRCSNTALLVDYAERYSNIQGPCVATNFIILRVAV

SEQ ID NO: 10518 - protein, 502 aa, Unknown
  Description of Unknown: Integrase B10519 sequence
  cd00338,PF13408,IPR011109,PTHR30461:SF21,PF07508, Coil,IPR038109,G3DSA:3.40.50.1390,IPR036162,IPR006119, PTHR30461,mobidb-lite,IPR025827,PS51737,PF00239, SM00857,G3DSA:1.10.10.2600,SSF53041
MTARVTLCGYERISHDPTGAQAGVERQHRDIEHLAAIFDADVCWHRDNDQSAFLDDVVRDHFEEMLVHVGHPGHPSRGVLAYDLDRLCRRGDDLQRLLKLYKRDETLIFRTSAQEINLSAPDGRLMAEVMVAFAQKESADKQRRQRRLHYYRALTGKPTGPHGFGHLPNRIDLDPIEAPVIRAAGEDVLTGTRSTAQVARDWNQAGYAPRPRRRKLEDGSFTEPKSGKWSSRTVTQLLRAPRIGGYAVYQKEIARDAEGGLVRSTGLPIMDPEKWLKLQAFLLSEERGAGVDTRSASHGYLASGTLRCGGCRNRLNGHGSNRTGVHRYECQAREGRGCGQCSIDGPSLDRMLDAYVEGALSMVDPAQVGIAVEPWGREEEMAEVAARHAEAFAAYTSGSSPLSRQTQVAALEALEERLETLRREQRKHRGREVEAAAMADAGDLAQWRKAFAEGNWTYCRFVVSTLIATVTVSPAPPGKRGKAGAPRWFDPNRVEIVPRKPS

SEQ ID NO: 10519 - protein, 502 aa, Unknown
  Description of Unknown: Integrase B10520 sequence
  cd00338,PF13408,IPR011109,IPR038109,PF07508, Coil,PS51736,IPR036162,PTHR30461,G3DSA:3.40.50.1390, IPR006119,PTHR30461:SF3,PS51737,IPR025827,PF00239, SM00857,G3DSA:1.10.10.2600,SSF53041
LTGVIYARYSEGPRQTDQSIEGQVSDCRAYAERNGIRILDVYADRHISGKSVEGRDEFQRMIHDAEDGRFDAVIVWKIDRFGRNRQDIAINKMRLKKAGVRLLYAEESVPEGPEGIILESVLEGLAEYYSADLRQKVLRGIRETAKKGQYCSSTMPIGYKRDEDRHVVVDPIEAEAVREAFRLHIAGATTAEIKQLFNDRGILTSRGKPVSSGTVYRMLRNDRYTGHWELAGIPLDVEPIIDEATFLEASKHFKTSRNNAAGRAKMNYLLSCKCFCGYCGAMLNAEAGTGKSGQVYHYYKCGDKKRGKKCELRPIPQEHLEDVVIDATVEKMLTNDVIDHLVVRILEIQDNDEAADPAAAYRKRLEANKKKQKNILSAIEEGAGKGLAKRLAELEAEEEEIDLEIQRLELKAPKLTEGVIRSWLNSFREGDVSDPDFRQKLVDTFIARIDVWNDHVIIYFNMQEKAASKCSSTARLVDLSEWYSNTDEPLIIPPFIIIYAAL

SEQ ID NO: 10520 - protein, 502 aa, Unknown
  Description of Unknown: Integrase B10521 sequence
  cd00338,IPR011109,IPR038109,PF07508,Coil, PS51736,G3DSA:3.40.50.1390,IPR006119,IPR036162,PTHR30461, PTHR30461:SF3,PS51737,PF00239,SM00857,G3DSA:1.10.10.2600, SSF53041
MSRAVIYARYSSDNQKETSIEDQLRLCREYAERNSMGVVHEYCDKAKSGTSVKRRTQFNKMLKDAESGRFDVVLVYATNRFARNTYDSFVYRHQLRENGVDIVSITEPMPDGDVGDLVEYLFSWEAAQYSKNLSKVVKRRLDQRAAECKCNGTRIYGYKKGPDGCYAVDEAEAEVVKRIFQEWADGRQAQAIVDGLNDDLIPNVKGGDWVAHSIQNMIRNERYTGVYKWGDVRIEGGMPAIVDQDLWERSKMHKRKKGKHTSYLLTGKVYCTCGRKMRSASGTSKSGRRYTYYRCPDCRSQIASHDLEDAVLGTTAMLLSEPGIVEQVADAVVEESKKEYDADAIEQEIAEVDKKIDRGVAFLLRGHESPTMEAEIAKLEARKSKLQKKLAKAMERVVTADGVAAWLMQYDCSDERFNEAIVEHLAERVTVDGDEIVIAYRTGDACVVEDSGAVTWPDDEPSRDCVLQGCSTESLLAGLQGFQSNTPELRINHGFLLVKFHL

SEQ ID NO: 10521 - protein, 502 aa, Unknown
  Description of Unknown: Integrase B10522 sequence
  cd00338,IPR011109,IPR038109,PF07508,Coil, PS51736,IPR036162,PTHR30461,G3DSA:3.40.50.1390,IPR006119, PS51737,PF00239,SM00857,G3DSA:1.10.10.2600,SSF53041
VNEFQTYKTTRNILESIKNVGMYIRKSRGDAQEDLQKHRMIMEEICKQNNWNFVEYSEIGTGDSIEDRVEIKELLKDVAEGLFDAVIVFDYDRLGRGNGTDQDTIKNTFRNSDTLIIVSNPFQIFDTNDERDEEAMDFKGFMARREYKMITKRMVTGKKIGLKMGRWSNGVAPFGYEYSKELKSLTVHPLESEIYKKLIVSEYINGKSITDIAWDLNKKNIASPRNGKWTPNTISNMLKSEVYLGHIVYNKSEGSRKSNSQTKKPFKQKPKEEWITIKNCHTSLKTQTEHLKIISLLKSKTRHNNHSINALTGLVKCYECGGTLKTQKVNNKVVLRNCTACKDSHGGDTSLIEKTIFDTISHLRDILINTKNSNANETEKEYILNQVKSLERELDVNEAAIEKIENAYEEGEYDINKFRKKVKARQENILELEENLKVKKLELSSFSNVDNEERIQRIDVFFEQIKKCKNNKEMNESYKSIISSIVWKRTIWDEVRVTVNFL

SEQ ID NO: 10522 - protein, 502 aa, Unknown
  Description of Unknown: Integrase B10523 sequence
  cd00338,PTHR30461:SF21,IPR011109,PS51736, IPR036162,PTHR30461,G3DSA:3.40.50.1390,IPR006119, PS51737,PF00239,SM00857,SSF53041
MKTSRTPTGQRTRAVIYVRISQDRTGAHLGVDRQREDCEALAERNDWDVVEVYVDNDVSAYSGKKRPRYQQMLTDLDDGLATVVIAWHTDRLHRNLSELEAYMALSRAKGVVTHTVKTGLLDLASASGQLTAGMLGTIARYESAHKAERVAAARRQKAKAGQWAGGIRPFGWGVETGKFRTKTEKVTDPESGEQSVIETEVPVLDMTKLVPEEGAALEVGSDMILSGGSIRGWVRWLADKGLLSTTGKAIEPPSARDLLLRPRNAGIAVYQGEEIGRGLWEVAVPEPKFRAVVAILTNPDRVTTTGSQPRWLGSLIYRCGRAGCTATARCTKVGGSKMPSYRCQADHGGGRNADRLDRYIVDLLVERLSQPDAVDLLEPAPDGINAAALQLESEQIRRRLTDLAGLFGSGQISMAQFTEGSDTARAQLEGVTAQLARAAVTDPLVGLVGVPDVRVAWDACDLGRQRTVLRSLLEVILHPPRPGRMPDGGYFDYEAIETRWKR

SEQ ID NO: 10523 - protein, 502 aa, Unknown
  Description of Unknown: Integrase B10524 sequence
  IPR011109,PS00397,PF07508,Coil,PS51736, G3DSA:3.40.50.1390,PTHR30461,IPR006119,IPR036162,PS51737, PF00239,SM00857,cd03768,IPR006118,SSF53041
MGIARGYVRVSTRKQEAGVSLDTQRDAMREYAAEHAQTLTLYEDVESGRNVNRPAYLRLLSDLRPGDVVLVWKLDRAGRNAEEALRFRRLIQERGARLISITEPGMQEPLLYGVNAVFHEEFSRALAAKVVPNMERVVTIERRWVTKAPHWYRLDVKPRVGKQRRVFSEGEGRLVPNEDYPGQAQECWEMLLATNSISGTAAAFDLTYTKLARMINSPAYVGDTLWRGILVTGTHPAIVRRETWEAVRTQRLENPFPSPRRTEGPRLLTGYVFRADSQHRMYHRVRNEHTPYARPYYKTADVVPRPPHAAIPADELHEAVITTLKTLDLSPAEVRTLERDARRAVRTDPHAKRRAQLQRQLIELEAERDAATRALLRGAITDAERARARERHDREEVEYRAGLAALPPLPDVEDVQIRSRGRIGIAHLIDELWRQFNGTDAEIARRAMYDIRELLRLYVRRIEVWGAENEGRFGGDQAVWRRDHPPRIHIVWRDSPSNNEES

SEQ ID NO: 10524 - protein, 502 aa, Unknown
  Description of Unknown: Integrase B10525 sequence
  cd00338,PF13408,IPR011109,IPR038109, PF07508,Coil,IPR036162,IPR006119, G3DSA:3.40.50.1390,PTHR30461,PTHR30461:SF3,IPR025827, PS51737,PF00239,SM00857,G3DSA:1.10.10.2600,SSF53041
VSSRPLRVAIWAAVSSRRQAEEDRVSLDDQEKAGLAWAEGLGAEIVNVYRVPGHTRDIWNWNEAEREMPAYRQLREDAQAGKLDLLWAYDMDRLGRDPALGQQVISLVEKSDGPNLPRAEVYVASSPHVVGSKTIGHRYIGAIQSVRAGEDQEMRVRRFKMGMKGRVLRHGLMGTTIPAGYTRVKDGDGKTTGYALDDNAPAVDTVTRLYLDGLPYAEVARRMNESGYRYPGGRPWRYYDIGRIIRNDAYAGRPRLGPLQWEGEPQYPAIWDDATWTAVQRERQRRRVAPQVSHGGNPYSGVLFCARCGGGMNQVISRTGGRVYLYYRCQTHARQTEHGRSCHCNFIARWKVTSALVAYFYSLQTPERVDALLAEYGDSADAERLRGEIAAAEKAAKETEVARYQAGLTHSRGKMHTDIYRQVDDELLAELAAHQGRAAELARHLAALPDLDAWRKQLADVAGTFAEVIEDGLVAPETIAAALQRAGVRCWVEDGEVVKIEP

SEQ ID NO: 10525 - protein, 502 aa, Unknown
  Description of Unknown: Integrase B10526 sequence
  PS00397,IPR038109,IPR006119,PS51737,PF00239, cd03768,G3DSA:3.40.50.1390,PTHR30461,IPR025827,SM00857, G3DSA:1.10.10.2600,SSF53041,IPR011109,PF07508,PS51736, IPR006118,PF13408,Coil,IPR036162,PTHR30461:SF3
MKVAVYVRVSTTEQAQEGYSLDAQIERCRAYALSQGWEISETYIEDGESAKDLNRTKLKQLLSDAQKGLYDVLLVYRLDRLTRSVSDLYKLLETLEKYNVKFKSATELYDTTNAMGKLFITLVAALAEWELNNLRERVRFGMEELVRGGNWHGGPVPYGYLWEESQMSIIQEEAFTLRELRKIYMSGEGFGRTAKILNSRGLKRRNDEPWSENSVWYTLDNPFYAGKIRYGSKKKNGKYASRKKDELVDVIWADTEFPTIFTWEEYEEHTARMKRRQQYGTSRKRDYWFSGVIKCARCGAAMIGRPYRNRLKDGTMGISYINYICSGRSLQKGCDLPLLKQTVAQSLIMTYLEKIKITQEEIAAAAETVEKEQRASINEMDDLRKELKAIGERRRKWQYMLAEDLMSEQDFRARKREEDEKERFINDRIEEIKAEEVGINSEFAQLVYELPSIFDQLSDVAKKEVMQTLFTSIYFECDVKNGREASGKGKTLPFRITEVNFN

SEQ ID NO: 10526 - protein, 501 aa, Unknown
  Description of Unknown: Integrase B10527 sequence
  cd00338,PF13408,IPR011109,IPR038109,PF07508, Coil,PS51736,IPR036162,IPR006119,PTHR30461, G3DSA:3.40.50.1390,PTHR30461:SF3,PS51737,IPR025827,PF00239, SM00857,G3DSA:1.10.10.2600,SSF53041
MNAVIYARYSSANQTEQSIEGQLRDNYAWAKQHGINVIGEYIDRALTGTRDQRPDFQRMIEDASRKQFEMIIVWKLDRFARNRYDSAVYKARLKKHGVKVVSAMENITDSPEGIILEGLLESMAEYYSANLSQNTKRGKRETAAKGLWNGGHAPLGYKLVDRKLVADEKTAPIIRYIFEQYAAGVSKAEIIRALEAKGVRSYYGNPLTYASFNSVLHNQTYIGKCMYNGEVVEGLAEPLIDEKLFQKVQEQIQKRRRAPAAGKAKANYLLSGKAFCGTCGLPMSGTCGRSKGGKQYYYYTCSHRKHPWRCPKNNERKDFAEQFIVEETLRHVLTQSQIEHISKAVVTEYKKEFSDNGIHELKTAIARLDRELEKLVDALIEAPKPAHKRIYDRMESLELQKADLQESLSRLIAASKIPLSEQEVAAWLKQFCKGDITDPAFCSRIIDVFINSVYFFEDRIVIFYNIRDNRSPDFEDVKNAPDTKSEAIRQCSDLNTQASAR

SEQ ID NO: 10527 - protein, 501 aa, Unknown
  Description of Unknown: Integrase B10528 sequence
  cd00338,IPR011109,IPR038109,PF07508,PS51736, G3DSA:3.40.50.1390,IPR006119,PTHR30461,IPR036162,PS51737, PF00239,SM00857,G3DSA:1.10.10.2600,SSF53041
MEGSMAPRQKAKQGNRLPAIGYLRVSDDKSGEEKSTTLQKKLVIAEAEKVGWEIDIWHMETLSAFKRRKVKGPDGKPMWRVIRPEFFAMLEELRDGDVKNVMAYDLDRACRDPRDLEDLIDLAERGGVTAKSVTGSLKLDTDADITMARVLVAFNNKSSRDTARRVRINHEERLAAGKFNGGTRRFGYTPGNKALVPEEAEFLTWAYRALDSGIGTQAIWRELDRRGLTGTSGGKVPAATIARWLRTPHHAGLAGLRGKVVGKSEAPPVIDEDTWRRCQTILSDPARQTGAGRPSSSLLAGIVYCGACGSKAYSRSGHMRDGVRIRNYSCHAKGCCNRPQDAVDVPIIAAIAGLLALDAMRLRPVAKPRPDSSASVIEAEQLRQRLADLADLMTAGDLDPRAYASASREMLVRLDALDARAGKESAHPATDALLRAADPAAAWTSMTTEQRRPVVKELIARIDIPPLGGGQYSRKQNDLKPVWRDWVLDTPRVPPKGDSPK

SEQ ID NO: 10528 - protein, 501 aa, Unknown
  Description of Unknown: Integrase B10529 sequence
  IPR011109,IPR038109,PF07508,Coil, PS51736,IPR036162,IPR006119,PTHR30461, G3DSA:3.40.50.1390,PTHR30461:SF3,PS51737,PF00239, SM00857,cd03768,G3DSA:1.10.10.2600,SSF53041
MMTRIRMGEFSHLLVWKIDRISRNLRDFSDMYDELKKYNVTFISKNEQFDTSTAMGEAMLKIILVFAELERKLTAERVFAVMMSRAEKGLWNGATVPLGFIWDEEIKFPKIYEPEAKIVQYIFDLYEKKRSTTKVAEQLNQENVKTKRDGTWTPRTVGAILTNPFYIGTYRYNTKTQKTRRWKDKSEWIVIEDHHPAIISKEQFERVAKILKDNYRGDYNRQRASKNVHILSSIIKCFKCGSNMNAGNDRARKNGFTPSRYTCYQIHKTYTCNNYASDLTVLPFIINYIGNYMTLQDRITKNHSYRDMESILLRGKYFTDIEHINKDDIKCTYKLLVNNLPVINYKLQENQEDKKTTFKDRYDIYKNEKEKQENALKRLDDLFLYAEDSMPKKDFILKRQEITNKIEEINSKIQELRAEENNFVDNKEFSLNAKASFYLITQLIGNSKNIDVRYLLENVDKSIIKDFLSTILNEVSVDHQKVQYITFKNGLTHHFEYKENQ

SEQ ID NO: 10529 - protein, 501 aa, Unknown
  Description of Unknown: Integrase B10530 sequence
  IPR011109,PF07508,Coil,PS51736,G3DSA:3.40.50.1390, IPR006119,PTHR30461,IPR036162,PTHR30461:SF3,PS51737, PF00239,SM00857,cd03768,SSF53041
MIAIYARQSIDKKDSISIEGQIEKCKYEAEGQDCIIFEDRGYSGKNIDRPNFTKMMEDVNNQNISKIIVYKIDRISRAIVDFGKIMEELDRNNVEFVSYTEKFDTSTPIGRAMLNIIMVFAQLERETIQQRVKDNYYQRGEQGYYLGGRAPFGYNKIETRLNGKKTYTFEENIEQAKIIRELFNEYSSTDASLGKLVAELNNKNIMTYFNNPWNSVSLGRTLRNPIYVKADADVYMYLQSRGAMLNNDPSDFIGENGCTIYAERQSVTTSKFTDLSKSFATLGLHKGIISSSTWLQCQLKLDKNKQVGNSGKGTHSWLSGLMKCGYCGLAIVVANNGKYNYINCGGRKQKFCYDRKKVIHLKDIEDSVQYQLFDYWKSLIDKDFMEVKEQDNISVNLLKIQLVDIENRINKLIGNLELANELTMEYININIKKLDDEKKGIQKQILNSSHKEVQKYSKEELLDIIKNWESYSIEKKKIIATSHIEKVIITDEKIQIKFKQI

SEQ ID NO: 10530 - protein, 501 aa, Unknown; identical to SEQ ID NO: 10214
  Description of Unknown: Integrase B10531 sequence
  IPR038109,IPR006119,PS51737,PF00239,IPR037285 ,G3DSA:3.40.50.1390,PTHR30461,IPR025827,SSF140560 ,SM00857,G3DSA:1.10.10.2600,SSF53041,IPR011109,PF07508 ,PS51736,cd00338,PF13408,Coil,IPR036162,PTHR30461:SF3

SEQ ID NO: 10531 - protein, 501 aa, Unknown
  Description of Unknown: Integrase B10532 sequence
  IPR011109,IPR038109,PF07508,Coil,PS51736, G3DSA:3.40.50.1390,PTHR30461,IPR006119,IPR036162,PTHR30461:SF3, PS51737,PF00239,SM00857,cd03768,G3DSA:1.10.10.2600, SSF53041
MDAIYGRQSIDKKDSISIESQIEFCKYETRGREYRVYTDKGYSGKNTDRPQFQELLQDIKNGEIHRVIVYKLDRISRSILDFASMMQIFEQYGVEFVSSTEKFDTSTPMGRAMLNICVVFAQLERETIQKRVLDSYNARKKKGFYMGGKIPYGFSKEKIVINGIRTSKYIINPEEMEQVITIYEMYSNPTTSMRDIIGYFNENGIKQLRGGKWRATNLLSLVKNPIYVQADLDIYEFFKSQGVEIINPPSEFIGTNGCYLYKGENAEADKSVRLEGHTLVLAPHGGTIPSETWLKVRRKCLNDNKILKPNKAKNTWLSGKLKCKKCGYAILSRGSTKGEKFRYLFCQFSKNDNGCEGIHCMKTSDMEDAILNEIKEKLSNFKTLSREQSAAINPKINELRIKEKDIDNEIESLMEKLVDANDTLLKYINKRIVELDNAKKQILSDLNTLTLSQNNITNSKTIVDHVDKWDKLSFDDKRSVVDALIDKIMVSDESVEINWKI

SEQ ID NO: 10532 - protein, 501 aa, Unknown
  Description of Unknown: Integrase B10533 sequence
  IPR011109,PF07508,Coil,PS51736,IPR036162, IPR006119,G3DSA:3.40.50.1390,PTHR30461,PTHR30461:SF3,PS51737, PF00239,SM00857,cd03768,SSF53041
MKAVYTRQSLDKKDSISIETQVDECTSRAGNATYKIYSDKGYSGKDTKRPAFKEMMEDIKSGVIDQVIVYKLDRISRNVVDFVQMHETFTKYGASFISCKEGFDSSTQLGRLLMMMLISFAQFERESIQQRVKDSYYSRGSKGFYMGGTIPYGFTKEKVIIDGINTSQLIPNEEEATILIELYERYALTDISLGKLSKDLNQRGIKSSNGVSWDSGKISRILRNPLYVRANADVYIYYQHKKCNMNNPIEDYIGTNGCYIYGKREANERKYTNVEDHHVTLAPHEGLVDSDIWLTVQYKLDSNTQIRNSGTGKHTFLTGLLKCSKCGYAVCVTSGYKGSRYLTCRGKTNLKVCDGLGRPIKVLEVEQVIQSELITKVQELRGIATEDAPIKSKEEVNNLKIKLAQVKEQIDNLIEGLANGNAKLLPYLNAKIDELDEQKSEIESNILQKSLEHRKTTNTDAILDRIERWDELDFEEQRDTAKAMIEKILVASDEIDIQWKF

SEQ ID NO: 10533 - protein, 463 aa, Unknown
  Description of Unknown: Integrase B10534 sequence
  cd00338,PF13408,IPR011109,IPR038109, PF07508,PS51736,G3DSA:3.40.50.1390,PTHR30461, IPR006119,IPR036162,PTHR30461:SF3,PS51737, IPR025827,PF00239,SM00857,G3DSA:1.10.10.2600,SSF53041
MARSITVIPARNRQASGHRAASQKKIRVAAYCRVSTDQEDQLHSFEAQVDYYTKYINDHENYEMAGIYADEGISGTNTKKREQFKRMIADCEKGKIDLVITKSISRFARNTQDCLMYSRKLKNLRIGIIFEKENINTLDSTGELLFTILSSLAQDESRNISENCKWGIRTKFKNGEMHLNTFKFLGYDKDENGKLIINREQAKTVRRIYRDFLWGLNPAQIAKELEEEQVSGCLGQTKWYASTVVGILKQEKHMGDALLQKTYTADFLTKRQVRNNGEVAQVYVKDSHKGIIDKETWNAVQEEFDRREKFMQRHGTDRYSYGSECYPFCEKIFCGECGSLFTRHSWKSRGIVQWQCKNHRKDGKVACTNAYVDNADLEKGFVKAFNRLAGEREKHMERWNAMKADGTPIEKIRAVQMMEATENGQLQKYVPEAAQLVLEEITIFGAKKYEFAFLEGSRVKVSV

SEQ ID NO: 10534 - protein, 501 aa, Unknown
  Description of Unknown: Integrase B10535 sequence
  PS00397,IPR038109,IPR006119,PS51737,PF00239, cd03768,G3DSA:3.40.50.1390,PTHR30461,IPR025827,SM00857, G3DSA:1.10.10.2600,SSF53041,IPR011109,PF07508,PS51736, IPR006118,PF13408,Coil,IPR036162,PTHR30461:SF3
MGNLQKLANAYHQDPETRIIKKRVFAYIRVSTLEQAEEGYSLGEQEERLKKYCEAYEYQLVKVYVDPGYSGGNMDRPALKEMISEIERGMADIVLVDKLDRLSRSQFDTLYLIQKVFNENDVAFVSRAEAFDTSTPFGRAMVGILAVFAELERERIKERMKEGKAGRAKEGKYRGGAYYPTGYDYDEETGYLVVNEYDAMQVQEVFKLFNQRTPIYTIMTMMNDRGFKTSIGKGKGKGAWNETRIRKMLENQTYIGKLKHLGEWVEGGHDPIIDMKTFAKAQEILAEREIANEHMKQGRRYKAPLGGLLWCSCCGSRYHYRSGGKNKDGSVRAYYICYSREKSNPDMIKDPNCKNKTYRDHALEKMVFGEVFKLKTDPEYIDKIHTSVDESEKKKLVENNIEYIKKQISNLMDLYSIGSIPMEEIKAKIEPLNAERSKLESTLERIKQNTFKKEKQEVFNMVDEFKTALAENNSFMVNVMLNELIEKIIIDDGDVLIHWNF

SEQ ID NO: 10535 - protein, 501 aa, Unknown
  Description of Unknown: Integrase B10536 sequence
  cd00338,PF13408,IPR011109,IPR038109,PF07508, Coil,PS51736,G3DSA:3.40.50.1390,IPR006119,PTHR30461, IPR036162,PTHR30461:SF3,PS51737,IPR025827,PF00239, SM00857,G3DSA:1.10.10.2600,SSF53041
MRRVDAIYTRQSIEKKDSISIDTQIDLCQRQCDANAVVYRDAGFSGKNTNRPEFTRLMQDVRAGKIKRVFCYRLDRISRSIVDFGLIWQTLEEHHTEFCSVTEQFDTSTPMGRAMVNIIIVFAQLERETIAERVKTSYYARTAAGSWCGGRPPFGFKTIRAEVNGKTAAVLAVEPDEAKIVKELFDLYETGSYSLCQLARLFEDNGKKVSRYGGINSNVVIRNILTNPVCAVADVELYSYYFTQGANIASDIAAFDGSHAALLIGKHKAENRNILRAISDRTLAIAHHKGFVPSAQFIAVQEILSRNKRVKNDVPSQVSWANGLLRCANCGYSVQIYMRKQRNNHRYAKCNGRYQRHTCDMLFRIRPDEIEAKIEQAIQQFLDSMTELAGKPQEDSEEVIQFKILRAEKEKQMNNLIDAIAEGGGVVMRQLSSRLETLETEIKDLTEKISKSQSRRLPAAMTYIPNLDNADMETKRQIARMVVKKAYISVNDVKVETIDLV

SEQ ID NO: 10536 - protein, 501 aa, Unknown
  Description of Unknown: Integrase B10537 sequence
  cd00338,IPR011109,IPR038109,PF07508,Coil, PS51736,IPR036162,IPR006119,PTHR30461,G3DSA:3.40.50.1390, PTHR30461:SF3,PS51737,PF00239,SM00857,G3DSA:1.10.10.2600, SSF53041
MYLIYLRKSRADGEYETVEDVLAKHYRILQDYAVSKLGGTIPEECIYREVVSGETIQDRPEMKKVLDLIQNEDIKGVLVVEPQRLSRGDLSDCGTIIRAFRYTETLIVTPTKTYDLADKFDRKFFEMELMRGNDYLEYIKEIMMRGRIASVNEGNFIGSVPPYGYDKIKDGKSYTLIHNSEADTVRLIFDLWVKEKIGTTTIANRLNELHIKPRKSDIWSAASIRDMLRNPVYIGKIRWNWRKTIKKYEEGQLVSSRPKSKKEDWILVDGKHEAIISEETFNASLARFGNMPKVKSDRSLNNPFAGIMHCSCGRPMIYQPQRASAPRLHCAYQMRCGNRSATFSEVEEEVAKALKKLATDIKDMLEGKSADYIDTQKAVSGILQKELNALETQQERLYEFLEQGIYTSEVFVKRNAALAKRRIELQAAIASAKEEEVSEVDYKQRYIALQEAIAVLEDPASSADEKNRLLRTVIKDITYHRETSIRDKWHPVPFSIEISLI

SEQ ID NO: 10537 - protein, 501 aa, Unknown
  Description of Unknown: Integrase B10538 sequence
  cd00338,PF13408,IPR011109,IPR038109,PF07508, PS51736,G3DSA:3.40.50.1390,IPR006119,IPR036162,PTHR30461, PTHR30461:SF3,PS51737,IPR025827,PF00239,SM00857, G3DSA:1.10.10.2600,SSF53041
LEIQIREGNREQKRKLRVCAYCRVSTDADEQENSLENQIRHYETVIKANPSYEYAGVYSDFAISGFKEKRPGLQKMLADAQKGKIDLILTKSVSRFARNTAIVLEATRKLKELNVGVFFELQNINTLSGEGELMLTILAAFAQAESESGSAGAKMVYQRKYEAGIPVQYLERSFGYMKDERGVYIADESEAVWVRKIYEMAADGYTPAAIKRSLNENGVKTVGGTKWIDSTVFRLIENEIYKGDYIMHKHFVNEERKLVRNRGEVDAWYIEDDHEAIVSPELWQKAQDAIEAKRDYLAEGSVIEDFTEENYPYMNRIFCAKCGHPLYRRIYSNGNRLNWGCSGTKRHGKSFCEGINIPDGVLRKAWHFDGNMYIDEKPSVKGTKEFTYLKESSWKRRHKKKVPESIPENTEEAYPYRKKIFCGLCGSRLVRHVNPKSHKVIWICNGAKRKGVAFCRGTRIPDSVIRGWGEIKKDIYIQRKDDKNGKKRYSYTSKKPSGIGA

SEQ ID NO: 10538 - protein, 501 aa, Unknown
  Description of Unknown: Integrase B10539 sequence
  cd00338,IPR011109,IPR038109,PF07508,Coil, PS51736,IPR036162,PTHR30461,IPR006119,G3DSA:3.40.50.1390, PTHR30461:SF3,PS51737,PF00239,SM00857,G3DSA:1.10.10.2600, SSF53041
MIAAAYARYSSMNQNDESIDAQLKQIYAYAIKNDINIVNEYIDRGRSGSNDEREEFQKMIREAKEKKYDAIIVHKIDRFARNLKDAGHYKSLLEENGIKLISVSEDITGASGDLVFGIMASVADWYLKNMKAEISVKSREIAQKGFFMGGNPPYGYDIERVKVENLAGKKTRGVYKINENEAKIVRIIYDLAAEGNSPAKIAKHLNDKNIRNRKGNKWNYSTLYDLVHNPKYKGTFVWSRGNHRTLHIKRDDAVVVPNAIPAIVTEELWEKAQKSMSKRRINKRRKREYLLRDLLVCDECGSVMSPAGGIKNAQYVCNKIKRQKQNGLNPDHYRGIYANKVEKFVLSYLSNELFKNIDIKKVKDNINKYYSVKKDNKEAELKKLFEKKEEIQERRQRLIKAIEDGTITMEDIKEQMAIKNKELNELNNIIKLKSQTQRFEFSEENVEKMIETTRKILDDGSLEEKQKLLKEIINKIIIKEDNYIKIQLNASISTIQNFNEL

SEQ ID NO: 10539 - protein, 501 aa, Unknown
  Description of Unknown: Integrase B10540 sequence
  cd00338,IPR011109,IPR038109,PF07508,Coil, PS51736,IPR036162,IPR006119,PTHR30461,G3DSA:3.40.50.1390, PS51737,PF00239,SM00857,G3DSA:1.10.10.2600,SSF53041
LDNIEKNASIAVYLRKSREDVDSTDTLAKHRGQLSEYVATNGLTNTTWFEEIGSADSIAKRPVFMELLSQVEENEYEGVLVVHFDRLTRGSQIDNGIIAQTFKRSSTLIMTPARTYDLSDESAELMSEVEGLLSRAEYRSIKRRMQQGKVNATKQGKHVSGILPIPYFRDKNTGIVHIDPDKRKIFDFIVESYLSGMSANRIAIELNLRGISTVRGKTWRNRQVLALLKSDFHRGILTYGKLYRGPDGTMCKQTDPSKIISVPGIHEAIIDEATARRIDRALQDSQKIPTKSRSGIFALSGLMRCKACGATVSFTTDNKPEIPVVFLRKCKAMQQDGIHRCSANKGMKEALLLDILRGNMRDFKTTLFATTEGKNSRIDVGQSPIEMNEEIIVNATDKMERLKSIFVDGIIDRKEFDKRKHSIDVEVLQAKKELTQLKQNSEIVSKEIREQRNDNWTNIDIEGLFENQSDNDERNRIFHKLIERIEFLRVGDETDINVVYK

SEQ ID NO: 10540 - protein, 501 aa, Unknown
  Description of Unknown: Integrase B10541 sequence
  cd00338,PF13408,IPR011109,IPR038109, PF07508,Coil,PS51736,G3DSA:3.40.50.1390, IPR006119,IPR036162,PTHR30461,PS51737, IPR025827,PF00239,SM00857,G3DSA:1.10.10.2600,SSF53041
MKAVIYARFSSSSQREESIEGQVRECRKYAQKLGYEVIRTYEDRAMTGRTDKRPAFQKMIADSAKHAFDAVICWKTDRFARNRYDSALYKRKLKLNGVKVLYAMESIPDGAQGIIMESVMEGFAEYYSANLSENVKRGNLDSALQHKTLGVRLLGLKTASDGTYEIDEETAPVVRRIFAEYDSGKPMADICRDLNNDGFRTSMGNLFNKSSLGRILHNEKYVGVYHFADIREENIIPAIISKDQFERVQSRMKHKAHAPKAKAVRFLLTGKLFCGHCGSAMTGESARSKNKETYYYYTCVQRKAHACNKKRVRKDSIEKLIIEELYRRVHDDDYINEIADLCMEQQADHSELDDLERRKKETDRKLSNMRRAIEEGIITKTTKEAVLELEDQAWQIDQAIAEMRLKQPNLSREEVLELLYALRDGEIEDDRYTEALIDTFLNSVYLYDDGTCVTHMQFTQQEAVTLEYTESVRQASTAVCQCVRERTQFGIVTEIRKGAVA

SEQ ID NO: 10541 - protein, 501 aa, Unknown
  Description of Unknown: Integrase B10542 sequence
  cd00338,PF13408,IPR011109,IPR038109,PF07508, Coil,PS51736,IPR036162,IPR006119,G3DSA:3.40.50.1390, PTHR30461,PTHR30461:SF3,IPR025827,PS51737,PF00239, SM00857,G3DSA:1.10.10.2600,SSF53041
MNAKRAAAYCRYSSDNQREESITAQMRAIEEYCKKKDYVIVKFYADEAKSATTDKRPNFQLMIEESSINIFDVVIVHKYDRFARNRYDSAHYKRKLKVNGARVESVLEQLDNSPESVILESVLEGMAEYYSKNLAREVMKGMHENADKGIHTGGRPPYGLKINPETLMYEIDENCYRAVQIYFEGIRDNISLSEIAKCLNKQGYRTQDGKEFSKNSFFGWARNRKYIGNYVWNVSSSKDAEGRRNGSKKKPIEDQIIKEGIIPQIIDHDLFKEVNSMMELRKHKPGVLKANINYLLTGKVFCGQCESPYNGNSYRNSKSKENTLLSYYKCAGKCKNARIRKNDLEKVVIEQLEEQCFSGKGMKEIVERVNKLYKERKKDYESNEEPIKKEIKEIEKTIDNWIDALGKGIKGLETKIVEAQNKVEALQRELFKIKAIQNHNVLNNDDIYAVLKMKKDSLFSNNEEEKKKVLQEYVNRIIVNPTDNINELDLEITYRVFNGGG

SEQ ID NO: 10542 - protein, 463 aa, Unknown; identical to SEQ ID NO: 9603
  Description of Unknown: Integrase B10543 sequence
  cd00338,PF13408,IPR011109,IPR038109,PF07508, PS51736,G3DSA:3.40.50.1390,IPR006119,IPR036162,PTHR30461, PTHR30461:SF3,IPR025827,PS51737,PF00239,SM00857, G3DSA:1.10.10.2600,SSF53041

SEQ ID NO: 10543 - protein, 500 aa, Unknown
  Description of Unknown: Integrase B10544 sequence
  cd00338,PF13408,IPR011109,IPR038109,PF07508, Coil,PS51736,G3DSA:3.40.50.1390,IPR006119,IPR036162, PTHR30461,IPR025827,PS51737,PF00239,SM00857, G3DSA:1.10.10.2600,SSF53041
MSEKSAVIYARYSSHNQREESIEGQIRECKRYAQINDVTIIAEYADRAISGKSDNRAEFQRMIRDAEKGRFGLVIVYKLDRFARNRYDSAMYKARLKKCGVKVVSATEQLSDSPEGIILEAMLEGMAEYYSANLSQNIKRGMMENALKGLATGGGRCLGYYTGPDKKYYIDEAGASTVRMIYEMYDQGHTYAHIVETLNNQGRKTYKGAPFNKNSLGKILHNRRYIGDYVWGDIVQEGGMPQIIDRDLWERVQRKLNRKQNASARARGEYDYILSGKLYCGRCGKPMIGDSGTSRNGAKHYYYTCSTKKHGGTCPKKSVRAAAIEDEVIRTTIQTILTDEMLEHIADKVMEYQARDTDSAILIEQYKNQLKETETAIAGILRAVEAGMFSPSMKDRMDELEGQKAELNADIEREQINQQRVSRDEVLFFLSQFKGGDPDDPDYKQRLVDTFVNSVWLYDDKLVLTYNYSGDDNKITLDLVDKALSGAASGCSDNACQAPP

SEQ ID NO: 10544 - protein, 500 aa, Unknown
  Description of Unknown: Integrase B10545 sequence
  cd00338,IPR011109,IPR038109,PF07508,Coil, PS51736,G3DSA:3.40.50.1390,PTHR30461,IPR036162,IPR006119, PS51737,PF00239,SM00857,G3DSA:1.10.10.2600,SSF53041
MAYAMYLRKSRADEELGYENTLERHEEMLRNLAAQTGIHVDESHIYREIVSGESIEARPQMQKLLKAVEMGLYTGVLCIELERLSRGDGADQQRILKAFQFSDTKIITLTKTYGLAGDDSFDEEFFEFGLFMSRREYKMIKKRLYRGRIQAQKEGYFIGSRPPYGYGKKRIGKGYVLVPNENAEVVRYIFRRYAQRETAANILHDLNNMAIPTVTGTKWTAYAIREVIKNQTYIGKINTKTVRCEKSIKDGKVVQRWLNNYEPVTVEGRHEPIVDEELFWKCREVRDSKKTRVKADQTLKNPLASIMFCEVCGKTIRRTHYDYKGERTFYYGCVTSRCETKNTFTHIVYDMVIDELKKELERQQVMLADYDTSPEHDARKDELEMLKAELGKKQMMLERACEAYETGIYDRQTYLERVQKVNAAKVELQARIETLEKDIEESEERHEKAVPILTKAVEEMHTLTPKEQNDLLKMIIDKITYKKTESGAAIEPELEISLKI

SEQ ID NO: 10545 - protein, 500 aa, Unknown
  Description of Unknown: Integrase B10546 sequence
  cd00338,PF13408,IPR011109,IPR038109, PF07508,Coil,PS51736,G3DSA:3.40.50.1390, IPR006119,IPR036162,PTHR30461,PS51737, IPR025827,PF00239,SM00857,G3DSA:1.10.10.2600,SSF53041
MDVVLYMRYSSDRQNEQSIEGQHRVCKQFCDANGYNIVDVYIDRALSAFHDTTKRVEFQRMITDSEKHQWQGIVVYKLDRFARNRYDSAIYKAKLKKNGVRVISATENISDNPEGVLLESVLEGMAEFYSKELSQKITRGMYESAHKCHSIGGHIPLGYKIVDKKLAIDPLTAPIVREAFEMYAEGATVSEICDVFNNKGYKTAKGSEFNKNSFRAMFKNERYIGVYTYKDLRIEGGVPAIVDNDIFETVQKRLKTNAKAPARGKAVVDYVLSAKLFCGHCGKPMNGESGTSHTGKRHHYYACSSRKPFHNCDKKSIQKDYIEYVVAQKVQELLTPETIDYYAECAVKACQDEIANSTLLPSIRNQIKEIDKSINRLIRMVEQGAESHTLTARLNELEKEKKAAEKRLLKEQSTIIELDKEIVVYWLSKFLQGDIEDADFRRHLIDTLVNSVFVYDNPDGTTNLDIACNLTSGKHLKVTLSDVKSNGFGFGVLESTKKKR

SEQ ID NO: 10546 - protein, 500 aa, Unknown
  Description of Unknown: Integrase B10547 sequence
  cd00338,PF13408,IPR011109,IPR038109,PF07508, Coil,PS51736,G3DSA:3.40.50.1390,IPR036162,IPR006119, PTHR30461,PTHR30461:SF3,PS51737,IPR025827,PF00239, SM00857,G3DSA:1.10.10.2600,SSF53041
MRMCGYARVSTDEERQLDSLEHQMEFFSDFAKQNGHHLVNVYTDEGITGRQLKKRDAFNKMLSDSKLGLFDLLVVKDVSRFARNTVDLLTSIRQLKSRGIDVIFVNNSQKVLGESEFIITLLGAVAQEESSNLSKRVKFGKNITSKKGRVPPRIFGYDRIDNFTMEINEREAEVVREIYHLYIDEGLGCRLIAITLAEKQMKTKFGNDWNQRNIRRILENPIYSGHYINHRYTVVDFLEGTTKALPKEQYYHHDRPEWAIITPERFQQAQEILEQRRKQYATEYTHFTGRYSNRHLFSTLIRCKECGRAFSRRVTHYPNSDYIYWRCPTNNQYTAKRCSNNTIVREDDLIETLSTYLREVVSNKESIAQEIARKFKEANAVEGSKPDAQTLEAKKVKLKAKLEKYMEMYANDVITMEALKSKTAEINESINVIDDQLILLEGQRTQERTIESITNEAMTEIERFLSLQSATNMDLRRIIDSIIVDDKKQVKINLKITGNL

SEQ ID NO: 10547 - protein, 500 aa, Unknown
  Description of Unknown: Integrase B10548 sequence
  cd00338,PF13408,IPR011109,IPR038109,PF07508, Coil,PS51736,G3DSA:3.40.50.1390,PTHR30461,IPR006119, IPR036162,PTHR30461:SF3,IPR025827,PS51737,PF00239, SM00857,G3DSA:1.10.10.2600,SSF53041
MNTVIYARYSAGPRQTDQSIEGQLRVCTDFCKQRGLTVIDTYCDRHISGRTDERPEFQRLIADAKRKKFEAVVVYKTDRFARNKYDSAVYKRELKRNGIQIFYAAEAIPDGPEGIILESLMEGLAEYYSAELAQKIKRGMHESALKCQSTGSGRPLGYRVDEQKHFQIDTESAQTVQTIFEQYIKGESNAAICELLNSRGLRTAQGKPFNKNSINRIIKNRKYIGEYRYHDIVVEGGMPAIISKDTFNLAQAEMERRRTRKAPKSPKAEYLLAGRLFCGHCKGPMQGVSGTGKSGNKWYYYYCGNTRGKNKTCDKKQVSLDRLERAVVDFTVRYILQEEVLEELARKVHAAQERQNDTASEIAFYEKKLADNKKSIANVLRAIESGAATQTLPARLQELENEQAVILGELSFLKGKCLAFTEDQILFALTKHLEPYPGESEQDYRRRIISDFVSEVYLYDDRLLIYFNISSEDGKLKSADLSNIEGGEFDEGLVSSMQKP

SEQ ID NO: 10548 - protein, 500 aa, Unknown
  Description of Unknown: Integrase B10549 sequence
  cd00338,PF13408,IPR011109,IPR038109,PF07508, Coil,PS51736,IPR036162,IPR006119,PTHR30461, G3DSA:3.40.50.1390,PTHR30461:SF3,PS51737,IPR025827,PF00239, SM00857,G3DSA:1.10.10.2600,SSF53041
MKKAIIYARYSSERQTEQSIEGQLRVCQEFAEREGITITGEYIDRAISGTTDHRPQFQRMMSDCQHLDIDYVIVYKLDRFARNRYDSAIYKAKLKQHGIRLLSAMEKITDSPEGIIMEGLLEAMNEYYSAELSQKIRRGMRENVIKGKTTGGNIALGYRIGADKCFEIVEEQAAIVRKIFQMYAEGSTFAEIITELNSTGLKTSRGNPYNKSSISRILSNERYIGRYTIKGIDEVAECPRIVSDELFSIVQKKLGESQTKHRHRKNHTYLLSGVLYCGECGKRMTGTGGTSRYGKRYYYYHCQNKHFGRIDADTLEETVLGTIDEYLQSDKTASIAKTAFDEYKKQILDTSELNAVQKELKQIEKKLNNAVNAILSGLNSETIQNTITELEAQKNDLLARENMLRQRAPEFTPEMFMAAVKNLAETPSATLVNTVISRIEYFHDYIVVYFRLFDVDGSDPDKIKIPFNSKDKCNIASPPPTTPLYAKGHIIVILPLSITV

SEQ ID NO: 10549 - protein, 500 aa, Unknown; identical to SEQ ID NO: 10468
  Description of Unknown: Integrase B10550 sequence
  cd00338,IPR011109,PS00397,IPR038109,PF07508, PS51736,G3DSA:3.40.50.1390,PTHR30461,IPR006119,IPR036162, PTHR30461:SF3,PS51737,PF00239,SM00857,G3DSA:1.10.10.2600, IPR006118,SSF53041

SEQ ID NO: 10550 - protein, 500 aa, Unknown
  Description of Unknown: Integrase B10551 sequence
  cd00338,PF13408,IPR011109,IPR038109,PF07508, Coil,PS51736,IPR036162,G3DSA:3.40.50.1390,PTHR30461, IPR006119,PTHR30461:SF3,IPR025827,PS51737,PF00239, SM00857,G3DSA:1.10.10.2600,SSF53041
MVKAVIYARYSSHNQREESIEGQLRKCHDYAEMNGFTIIEEYCDRAISGKTDNRAEFQRMIKDSEKGHFQAIIMYTLDRFARNRYDSAMYKAKLRKNGVRLYYTEQSITDEPEGIILESVLEGMAEYYSENLSRGVKRGMKENALKCMITGGYMPLGYRKTADKKFEIDPATAPIVQEIFDLYINGKSQRQIVDILNEKGYRTVKGMPFRLGSISGILVNTKYIGLYSFGDVVIENGIPAIIDKDVFDKAQEMLKKNKRESGRMKAPMNYLLTGKLFCGHCGGSMVGESGTSGSGTIYNYYKCLSRKRHKDCTKQTEKKDWIEKLVVEETVKRILQPEVIDEIACKVAELAENEFNNKSRLTTLQNDLKSVQTAIRNLLRLVEQGIDTDDVGERLLDLNSQKADLQKQIAKEENKKPMLTKDRIAFWLTSFLNNGDIESVDYQQRIIDTLVNKVFVFDTDGGGRKIVITYNTSNSMKSTITLSDINKCSDIEGFARRKRR

SEQ ID NO: 10551 - protein, 500 aa, Unknown
  Description of Unknown: Integrase B10552 sequence
  cd00338,PF13408,IPR011109,IPR038109,PF07508, Coil,PS51736,G3DSA:3.40.50.1390,IPR006119,IPR036162, PTHR30461,IPR025827,PS51737,PF00239,SM00857, G3DSA:1.10.10.2600,SSF53041
MKAVIYARFSSSSQREESIEGQVRECRKYAQKLGYEVLRTYEDRAMTGRTDKRPAFQKMIADSAKKQFDAVICWKTDRFARNRYDSALYKRKLKLNGVRVLYAMEAIPDGAQGIIMESVMEGFAEYYSANLSENVKRGNLDSALQHKTLGVRLLGLKTASDGTYEIDEETAPVVRRIFAEYDSGKPMADICRDLNADGYRTSMGNLFNKSSLGRILHNEKYVGVYHFADIREEGIIPAIISRDQFERVQSRMKHKAHAPKAKAVRFLLTGKLFCGHCGSAMTGESARSKNKETYYYYTCVQRKAHACAKKRVRKDAIETLIIEELYKRVHDDEYINEIADLCMEQQADHSELDDLERRKKETDRKLSNMRRAIEEGIITKTTKQAVLELEELAWQIDQAIAEMRLKQPNLSREEVLELLYALRDGEIEDERYTEALIDTFLNSVYLYDDGTCVIHMQFTQQDAVTLEYTESVRQATASVCQCVRERTQFGIVTEIRKGAC

SEQ ID NO: 10552 - protein, 500 aa, Unknown
  Description of Unknown: Integrase B10553 sequence
  cd00338,IPR038109,Coil,IPR036162,IPR006119, G3DSA:3.40.50.1390,PTHR30461,mobidb-lite,PF00239,SM00857, G3DSA:1.10.10.2600,SSF53041
MAEERPPIAYEILPGKRPRKNESSVTTYGALRGLVAIGLYLRLSLAKTTAKAQSEALERQDATEAAKTEGANVTRTYCDPDHSGEKRTLTRPAFDLMVSDLKAGLIKGIAIGDIDRLTRRHGVLELLIEIYEANQELADKGKAERLYWYCYHDEEDERAPVDLRTAEGRREARKRVDAAYEEIQVMKQRQTKRHRQAKKAGRMVGARGFGYETTGEIRASEANTVRLLADAVDKGQTLRPILNGLGPISKAGTPLTHRTVQGILTGGRVAGYRVDKANKTGEWYGIALDENGLPIKGIQEPILEQDQWLRLRKIYREREVATERRQYLGTGTLRCKACRKNYTGNANRTWGSYNYHCPCGSYLNGPDTDRYLKLLVELQLSQNPPGVAAPVPWPKQAELEALEADREATELEMSEDPIGWIRLEKAYVKAAGKLTLERREWLKAHPVPTALPAEALVKRWRTGDPEIMRGVLRDIFSVIWVTKAPGKFNPDWLSPIPPND

SEQ ID NO: 10553 - protein, 500 aa, Unknown
  Description of Unknown: Integrase B10554 sequence
  cd00338,PF13408,PTHR30461:SF21,IPR011109, PF07508,Coil,G3DSA:3.40.50.1390,IPR006119, IPR036162,PTHR30461,IPR025827,PS51737, PF00239,SM00857,SSF53041
VGDTRPLAGYLRMSDADLAEIKNLVKIGALTPEEAKERERKGVLKQKQDVTELRDRLYPGRPIVWYEDNNLSAFKRNVKRKDFERMLKDFDASALGGILAYDLDRVYRQPRDLEKVIDFYDTPNSTLVFHTLSGQNFDLTSADGRFTARIMVNVANKSSEDMSRRLKREMERMAFAGEMAGGPRPFGWEEDRLTLRPKEKKALDDMAEKILQGDSLTTIMDWLKEEGFVGRTGKPFVRSSVRRILLNPRNAGIRQFRGEPLKAEDGEYVKGSWEAPWTVDKWRAVKEVIEGSEQSNRTKVGPGHNTVRSILSGILRCGVCGTRMVAANSSRKYPKYRCAKDAGGCGNITISRTASEDAIRGLVSDVLMAATAQKETEEVGPKWEKAAELTSLEKEFQELHQLWKDDKIKTTSYILGREKLEGEIDQLRGERAVALARPAKPPSLEVIKGGWDKLSIERQREVILSVLTAVMVATRKDVPAGGRVDRGIDHSRLTPIFKEQ

SEQ ID NO: 10554 - protein, 500 aa, Unknown
  Description of Unknown: Integrase B10555 sequence
  cd00338,PF13408,IPR011109,IPR038109,PF07508, Coil,PS51736,G3DSA:3.40.50.1390,IPR006119,PTHR30461, IPR036162,PTHR30461:SF3,IPR025827,PS51737,PF00239, SM00857,G3DSA:1.10.10.2600,SSF53041
MKIISADYRRVSTDDQRKGYGLQDQAKANAAYALEHGLHVPDDYHIEDDETGYSMDRSGLVRLRQLAADRKIKAIVIHRSNRLSRNARESLILRDELLALNIQIHIVAWGRAFDPHNNTDHLLWNVEAAVSDYDRRAILAQLSAGRRRKAESQKWVGNGRPPYGYIKVGERKQTYLKPDASKLKIVRGIFDALIIKRKTQTAIAKDLNRRGVLTTLGADWNAETVNRIATNPIYAGYKYYGDIRIELPGLAIIDQTTFDLAQVILRANKEAAARNRKRSYPLSGHLRCTCGRAMGGHYTQQNGIFYQCNQSSIRKEKRDCPVHFVTATQVEKPVWAYVVSAIEHADEDIAQAQKAAGDAQSDAGQIKTLEAEIARLNKRVDTLLARFGDSADAVVLGAVERQVADTSAQIKKLSDRRNELADGERRQALKSAARSSVLSNIRTYRELAQRADFDDKRALFTAIDLQVVLSVEPGGRFLVISSSIAKTKRLKLKWSKRQAE

SEQ ID NO: 10555 - protein, 400 aa, Unknown; identical to SEQ ID NO: 9981
  Description of Unknown: Integrase B10556 sequence
  cd00338,PF13408,IPR011109,IPR038109,PF07508, PS51736,IPR036162,IPR006119,G3DSA:3.40.50.1390,PTHR30461, IPR025827,PS51737,PF00239,SM00857,G3DSA:1.10.10.2600, SSF53041

SEQ ID NO: 10556 - protein, 500 aa, Unknown
  Description of Unknown: Integrase B10557 sequence
  PS00397,IPR038109,IPR006119,PS51737,PF00239,G3DSA:3.40.50.1390 ,PTHR30461,IPR025827,SM00857,G3DSA:1.10.10.2600, SSF53041,IPR011109,PF07508,PS51736,IPR006118, cd00338,PF13408,Coil,IPR036162,PTHR30461:SF3
MSGPCGSGGGSDALYARVSSTEQAERQTINTQIDEARRYATLRGLTFAETFLDDGISGTIPLERRPGGAALLAAARAGRITTVYLYRLDRLGRDIRVTHNAIHALAEAGCAVVSVTESFDSTSPSGRAMIGFLAVVSAWERDSIAERVRAGMHRAHAEPARWMGGARPPYGYAVEVRETGSYIVPCEEEARIVRGLFELAAQGWSCIKLADYLNALAVPTAWAGRAVTHYRTGRPYSGRWQPNTVRQILRNTTYKGVRLRRGVEQACPALVDDRTWAAVQAVLVRNRSPRTRPNERIYLLRGLLVCGACGRRYHGWPQTSGYHYYMCHGWRYRPKCAGKLVAAERIEEAVWQEVEAWLRTEEAVDASLAGQAESRRVQEAERAREREVLRARIDAKSGERERVLSLYRRGVITEAELDRQLAEVQAEQALLTERWAALEGEEPEERGLERAELARAVREALGAGPDPLARQEACAALIERIRLTTYPERGRYDLEIVWRV

SEQ ID NO: 10557 - protein, 500 aa, Unknown
  Description of Unknown: Integrase B10558 sequence
  cd00338,IPR011109,IPR038109,PF07508,PS51736, IPR036162,PTHR30461,IPR006119,G3DSA:3.40.50.1390,mobidb-lite, PS51737,PF00239,SM00857,G3DSA:1.10.10.2600,SSF53041
VVKDAYSTHMVGSHKHPVKAVIYCRMSLARHGDTVKVKRQEKLCRQLAERLGWEVVFVFCDNNQSAWQRNRKRPGWDEMLRWLQDGRANAVIFYHGDRLIRQPWDLEVLLSLSDGRGIKLASPSSIRNLDDPEDRYRLRQDVAKACAESDTIGRRVTVIHEERARKGKIHRGGPRMFGYKRSGKIVEAEAQEYRAAVGRLLAGESRTSVLRDWNQRGVLTTQGNQWGYTAFSRMLGRARYAGLRSYHGEVVATGKWTGLIGVEEWEALQTVLAVGSALYTHGAGARPASSKYLLPGIAVHAACGATVKAHLDTRPDQTAYVCRNPTCTQAMRRKMSHVDAYVVGRVLHLLADPALWERLESRRGDDGLGAQLIALVERRQATVDQFATSTTMMPATLDAVLRQMDEQAGQIRAQIAQRQAVHALDGCRDMTRAEWDELPTNRRRAIIRGLVKVEMLPARRGRGFDSESVRVTRLNADAAAGKGDSGGLELVASVGGPAPE

SEQ ID NO: 10558 - protein, 500 aa, Unknown
  Description of Unknown: Integrase B10559 sequence
  cd00338,PF13408,IPR011109,IPR038109, PF07508,Coil,PS51736,G3DSA:3.40.50.1390, IPR006119,PTHR30461,IPR036162,PTHR30461:SF3, IPR025827,PS51737,PF00239,SM00857,G3DSA:1.10.10.2600,SSF53041
MTTPKPGTPLAAIAYYRYSEEGQSEYSIPAQRDAVQKAAPGLGYTIVAEFADEGVSGLRSDRPGFQAAISAARAEAAVAAILVHKFDRFSRDSEHQAVFRAALKRDGVRLVSIAEPTDDSPAGFLTERIMDAMAAYYSLNLSHEAKKGLSQRRKQGRHCGSAPLGYHWKACDARYPTLKSLVIEPQEARVVRAIYRLAEQGFGTVTIARRMNERGYLGKWGSAWTNTVRVMRTLRNPTYAALIASEPKSHRVAVGGKRIDHHRREWEKALVETEEWLPIIERERWRRIQAILDRRARTMHPASPYLLTGLLKCPVCGENMWGSGGGTGGSRYYRCSRARLTHPSFSLPAPKVEAAVIEALAEAAGNLELVAVAPAQRSAERLEDLRDELRGLRETMTRLEDAYLAGQFDLATFRDRKRLLVGRIEETEQALSAPVPAPKPPSKRYLRETIRKLRSAETPVVERRRRLSEVFVSVTPRQDGGLDIILRDRSDLPEDASPAR

SEQ ID NO: 10559 - protein, 499 aa, Unknown
  Description of Unknown: Integrase B10560 sequence
  cd00338,IPR011109,PS00397,PF07508,Coil, IPR038109,PS51736,G3DSA:3.40.50.1390,IPR006119,IPR036162, PTHR30461,PTHR30461:SF3,PS51737,PF00239,SM00857, G3DSA:1.10.10.2600,IPR006118,SSF53041
MSEKLKEVCAYIRVSTDKQEELSPESQIRLIKDYAEQHNMLLTRIYQEDHGISGKKADKRPAFQEMIATCKDKSHPYDAILLWKFSRFARNIDESTYYKSVLRKKCNVDVISVSEPIVEGMYGRLIEMVIEWSDEFYLYNLSGEVMRGMTQKALKGGYNSNVPIGYIKERGKDKIPQIEPKGAEIVRKIFDMYTEQNIPMSDIAAKLNKSGYRTARGSFFETRVVGYILENPFYIGKIRWNFFDKQSNKRKNPDDVIISDGKHEAIISDKQFSKAANRRAHDRLRTGYNKKRRPTPLLANWLSGMIKCSKCGASLGFAHGTAKVVPNFCCWKYSKGLCSTRNGITLKNAEKEVLTILEELSGSGYFYNYNLNVINTENTERAYILKELRSLDTKMKRIKDAYINEIDTLEEYKANKELINKRREELNKKLEAASVTVHPAAVHKAVDFQALIDIIKDENSIDTEKHNALLEVVDHFVWDKETQEMTVVLNSDISLVNCK

SEQ ID NO: 10560 - protein, 499 aa, Unknown
  Description of Unknown: Integrase B10561 sequence
  cd00338,PF13408,IPR011109,IPR038109,PF07508, Coil,PS51736,IPR036162,IPR006119,PTHR30461, G3DSA:3.40.50.1390,PTHR30461:SF3,PS51737,IPR025827,PF00239, SM00857,G3DSA:1.10.10.2600,SSF53041
MNTTDLQTGVIYARYSSDKQRDESIEGQIRECTEYAQREGILITKIYTDKALSARTDNRPEFLQMIRDSSNQTFNYVIVYQLDRFSRSREDSAKYKGILRRNGVRVLSAKEHITNEPAGIILESMLEGMAEYYSVELSQKVKRGMTENALKGKMNGSAVPLGYDLTESHHLAVNAHEAKAVRLIYDLYLKQYSLAKIADILHSKGYTTKRGGKISYSVIRNILSNEKYIGVYQWGDIRIEDSIPPIIARDVFDEVQRILPTRIKNKGRRSEMYNLCGRLICGQCGGHYMGSTATSRNGEKHHYYVCTNRRKYHTCSAPNIRRDELEDLVINRTLEILKQPQIIARIVDLVMNGYNHTAQEAKTAIQGIHGKIKAIDTELNNCMTAIKQGFINERLKAEIETLEKERQDLLEQKANHESVIPPIKFTAEHIEYFLERMANENPTTKAGRSRILDTFIKNVTIHSDRVEIVFNYKSELPEFSEQSASGSHFSILVGNSYNK

SEQ ID NO: 10561 - protein, 499 aa, Unknown
  Description of Unknown: Integrase B10562 sequence
  cd00338,PF13408,IPR011109,IPR038109,PF07508, Coil,PS51736,G3DSA:3.40.50.1390,IPR036162,PTHR30461, IPR006119,PTHR30461:SF3,IPR025827,PS51737,PF00239, SM00857,G3DSA:1.10.10.2600,SSF53041
MKKAVIYARYSSDRQTEQSIEGQLRVCHEFAEKNELTVIEEYIDRAMTGTNDKRPAFQKMIADSIHHKFDYVVVYKLDRFARNRFDSAVYKAKLKQNGIRVLSAMEGITDTPEGIIMEGVIEAMNEYYSVELSQKIKRGMRENVIKGKATGGNVALGYKIGADKRLELDETAAITVRKIFEDYAAGSTYAEIIRDLNSQDIKTSRGNDFNKSSLTHILTNERYIGVYTIDGVAEQSECPRIVSDELFHKVQEKIQNSQQKRRKRSKYSYLLSGLLYCEKCGCKMTTTSGTSKTGKKYHYYYCPNKCTGRISAEYLEQSVLDMLREYLTSENLEMIARAAYTEYQKTIMDDSELKVVKRELKNVEKQIQNGIDAVLNGFASESLKATLAELETKKKSLLLQIDDLSRAAPKLTLEHFKGIIQKLIDDCQKNLVDTIVAKVTYSSERIIVYINITNPDNDPPLDKIEFNVASPQPHATLSAIICEGFICLCKKNQKFNYRM

SEQ ID NO: 10562 - protein, 499 aa, Unknown
  Description of Unknown: Integrase B10563 sequence
  cd00338,PF13408,IPR011109,IPR038109,PF07508, Coil,PS51736,IPR036162,PTHR30461,G3DSA:3.40.50.1390, IPR006119,mobidb-lite,PS51737,IPR025827,PF00239, SM00857,G3DSA:1.10.10.2600,SSF53041
MLDLQRKPRACAYVRVSTNSRDQEHSFAFQSEYWEDFIKQQNQYEYVGLYADEGISGKSIKARKQFLQMIEDAKQGKIDKIFTKSFTRFARNKVEALETIRELRQNNVSIYFDTEHLDTSTTDSDFVLSILATVAEEELIQISENLKWAIDKRYQKGAVYINNNTLGLKMVDNKIVVDEEKRDLIKRIYKLYLDGCGIEKIAKILTKEKVATSTGKYVWHGSVIRSILTNEKYMGDSLQHKVYKTHDMRIKKNTGEVTQYYITNNHEAIIDKEDFKKVGEILATKSNNRNGMVAPTYPFSSKVVCGHDGKTFKRKFEGYKNKKKGIYKCKVYLKYTKDACNNSAILESELEKHFISAYNEFVEHLQTASSTASQRNELKEKLDKERELRALYINGYLTKEQYTSLNDALVTEIQKLDNSIKQQESSIKKQFQLKTIEEFDPQLVDESLEKVIINDYTATYEFKNGYQTTRRYDNGKSGNKKGFRENNNRDSCQAEIPSE

SEQ ID NO: 10563 - protein, 499 aa, Unknown
  Description of Unknown: Integrase B10564 sequence
  cd00338,IPR011109,IPR038109,PF07508,Coil, PS51736,G3DSA:3.40.50.1390,IPR006119,PTHR30461,IPR036162, PTHR30461:SF3,PS51737,PF00239,SM00857,G3DSA:1.10.10.2600, SSF53041
MMEKRAAVYKRVSTAAQDEEDKASLGEQERLCREYCQEKGYAVVAMYQDIGSGMNKKRPSFLQMLKEARQGVFDVIIAWKTDRLARGIYPCAALMEVLEETGVTIETVAEPFDRTTFEIRAVLGRIEVESIVQRTTMGREAKMKAGYHHVKAAYGYDYDSETHRWVIDDAEAKWVRQIFNWYIDGMSPSEIASHLNAEGVPTKLNSRLGWAEKTVSNLVSQEFYAGRGHRNTGAHGRKPRPPQKWIPVSMPAIITDEVWEAAKRRRAHNKTLSPRNTRRTYITQHVLECEECGTRFHVSAGWGGAPRLMCFRMIRYPHSTPCRLPKSVEYDRIADQLWQGMVKVMGSEDGLEAAVLANASRVKGQKDSIEQRLKEVTTKRANLAHEQDRVISWARKGSITEEQLERQLKDISTESEQYAVEQNRLLADLRLIGDGDAVYQQARAFIPTMKARINDHLSEEERQEIVDSLVRRALLDGAGDLTIEFKIPRPEMSFGYFSS

SEQ ID NO: 10564 - protein, 499 aa, Unknown
  Description of Unknown: Integrase B10565 sequence
  cd00338,PF13408,IPR011109,IPR038109,PF07508, Coil,PS51736,G3DSA:3.40.50.1390,IPR006119,IPR036162, PTHR30461,PTHR30461:SF3,PS51737,IPR025827,PF00239, SM00857,G3DSA:1.10.10.2600,SSF53041
MINVVGYARYSSDNQREESIVAQERAIKEFCQKNNYNLIKLYKDEAISGTSIKDRTEFLELIEDSKNKEFQCVVVHKFDRFARNRYDHAIYEKKLNDNGVKLLSVLEQLNDSPESVILKSVLTGMNEYYSLNLSREVKKGLNENALKCVHNGGIPPLGYDLDENKRYIINEVEADTVRIIYKLYSEGVGYTSISEQLNKMGRLNKLGKPFRKTSIRDILINEKYTGVFVYGKKDGRGRLTGKEVKIEGGVPQIISKEDFEKIRNKMKNRKTGSRATAHETYYLTGVCTCGECGGRYSGGYRSRQRDGSITYGYTCINRKTKVNDCKNKPIRKEILEEFIFKTIKKEIFTEKRIKSIAKKVEKSVNQKILNKVQEIKKIEIEIQKVKNKIDTLLEIFLDNKVSKEAFENKNRKLENELFILTQEKNKLSASKKISRENIESFIRNFKSNFNKSNIKKSVIETFVKEIKVYETYVEITLRLFPMYIDRNGGDDESRTRVRN

SEQ ID NO: 10565 - protein, 499 aa, Unknown; identical to SEQ ID NO: 10481
  Description of Unknown: Integrase B10566 sequence
  cd00338,IPR011109,PS00397,PF07508,IPR038109, PS51736,G3DSA:3.40.50.1390,PTHR30461,IPR006119,IPR036162, PTHR30461:SF3,PF00239,SM00857,G3DSA:1.10.10.2600,IPR006118, SSF53041

SEQ ID NO: 10566 - protein, 499 aa, Unknown
  Description of Unknown: Integrase B10567 sequence
  cd00338,IPR011109,IPR038109,PF07508,PS51736, IPR036162,IPR006119,PTHR30461,G3DSA:3.40.50.1390,PS51737, PF00239,SM00857,G3DSA:1.10.10.2600,SSF53041
MYSIYLRKSRADAELERLGEGETLARHRKTLTELAEKHGYTIGEIYEEIVSGETIAARPQMQRLLSDVEQGRWDGVLVMELERLARGNSIDQGIVAQAFQLTETLIITPNKVFDPANEFDQEYFEFGLFMSRREYKTINRRLQAGRLASVKEGNFIGSIPPYGYDKVRLERGQGFTLAPNADADNVRLIFEMFVNEGATANKIADHLTMLGIRPQKGGDYFSAHSVRDILRNRVYAGYVVWNSRPTKKIVKNGCVSVARPRNAAEKVMIFKGKHTAVVSSELFEAAQERIGKTPRLKTDRELVNPFAHLCRCRECGHAIVYRPNNKSADMLICPNKYCGVSGVAFEIADKIVLDELTAQLGSVKAMRNGSRKEAGAARTRTEHIKRELETLSKQQNRLFDLLEQGIYDQQTFVERQTTLKERRFELDEQLAAIDKEFPDEKEIDRMIATLDDLVARYDRLTPSQKNGMLLSCVQKMTYFREKSNRYDQKPVLIDIRLKF

SEQ ID NO: 10567 - protein, 499 aa, Unknown
  Description of Unknown: Integrase B10568 sequence
  PS00397,IPR038109,IPR006119,PS51737, PF00239,G3DSA:3.40.50.1390,PTHR30461,IPR025827, SM00857,G3DSA:1.10.10.2600,SSF53041,IPR011109, PF07508,PS51736,IPR006118,cd00338,PF13408,Coil,IPR036162
MASGVMSGPVPAVIYARVSTEMQATDGGGLDDQLRVCLATCEAQGYTVLGIFRDEGFSGAIEDRPAFQQALAAVPPGGVLVVSQYDRLSRDAAFRLGLPGELSGRNVAIESHSQGRVDVDSPSGFLAYAVDAVFSETLRRVISDATRRAFQRHRREGRQHGGKAPYGYEWGEEKQLLPRTDEAEVVQRIFEWAAEGSGVAKVASRLSGEGVPRPDGSSEAWLDISVKHIIRNPVYVGRVAHCYEKRSRVGRSPVWQKLPPDRWTIHEGKHPAIISRELWDRVQSLVRARSWHAPTNYGHQFLLTGLLRCPYCGGRMNGCHLFTPTGRYAVYRCSRQVHTHTCRGVCRSARKWETAFLDDLERILAGDAILGQTWCYGMPQRKSLPAEAEIAALEAQQQRVAGELATGDWPREVLLREMGRFEARLERLRASVADAEQENQGEEEPPAVLSGLREVLTSPEVPMARKRAVLAEVVQQIDWQNGALHTTFRPEVYATTDET

SEQ ID NO: 10568 - protein, 498 aa, Unknown
  Description of Unknown: Integrase B10569 sequence
  cd00338,IPR011109,IPR038109,PF07508,Coil, PS51736,G3DSA:3.40.50.1390,IPR036162,PTHR30461,IPR006119, PTHR30461:SF3,PS51737,PF00239,SM00857,G3DSA:1.10.10.2600, SSF53041
MDEKVTILYVRKSRIDEKGGQEGTLINQRSRLLAIAKSKGYENIKVIEEIESSIDENRPGLLQMKNMIHNNEVDRVLVTHQDRLARDFGIANKIFEWMIRFKVKLETPAGEMNLEETGSKIVFQISSILAEDEYDRIRTRMQIGKRDGVEFKHNWVHTVVPYGYVYNKNTKKLEVNEQEKKVFRKIVELALSGHSLYSISDKINDMGYTSKNGKMWNHAKIKSTLRSRARLGEITYKNDRIGADVRVKGAHEPLISYEEYNEIHRILSERVPYEKSPQTKGVKTPLDQLIFCAKCGRRLTTIKSVYRSGNWTWKISSCRRVDPDNGDKCDNSGTVLYVLWDMVWNEIMKHRDEMIEEVKKMNVKSVDDKKKEIKNRIIEEEKNLSIQEEKEEKLLDMYLNDHVSEELFIKRNRDIIKRKNFIKDELVTLSGMYHEMDDSKKRNKVEELIDKLDNFDDFNIEDQNIIMKSIIKRINYLREGDAFFNRDAPISIDIEFHD

SEQ ID NO: 10569 - protein, 498 aa, Unknown
  Description of Unknown: Integrase B10570 sequence
  PS00397,IPR038109,IPR006119,PS51737,PF00239, cd03768,G3DSA:3.40.50.1390,PTHR30461,IPR025827,SM00857, G3DSA:1.10.10.2600,SSF53041,IPR011109,PF07508,PS51736, IPR006118,PF13408,IPR036162,PTHR30461:SF3
MIYGYCRVSSDEQAAHGISIDAQRDILNGYAAMSQSQIKIFEDAGYSGKNTDRPALRQLLTAVRSGSASQVVVWKLDRLSRSLRDTLSMIEDVFAPAGVTLVSVTESIDTSTPSGRMMLNLLASFAQLEREQDSDRVVMAHKHLAHDCKYLGGHIPLGYVVDAEKHYQLHPVLHHVVRRVFDMYMARSGYSSILSYLNSSEVFPLTGKKKPYTKQDLYFMLQNEIYAGVYVRRIGADPRHKVTSPETIRIPGGVPAILSPDEWQRVCSIREQNATFSASYRAVNVYPLSGLVRCTICGRTMSIRHGGKTRSGEVERYYKCPAGCVRPARLESVQSAAFTAIEYLAADDETISRACAVANTFGDDTASENRAAIAPLEDQLQQIYKQNARLVRYIKDHSSAPAAIMDELVALENEQKSIQQRIETLRRPRGRYDAEKMKHLLRSASGIKNMPPAEQKARCQAAIHGVLVSDSTYRILFVCPTSGGDEPLRYVEHIIQRQ

SEQ ID NO: 10570 - protein, 498 aa, Unknown
  Description of Unknown: Integrase B10571 sequence
  cd00338,PF13408,IPR011109,IPR038109,PF07508, Coil,PS51736,IPR036162,PTHR30461,IPR006119, G3DSA:3.40.50.1390,PTHR30461:SF3,IPR025827,PS51737,PF00239, SM00857,G3DSA:1.10.10.2600,SSF53041
MPEALNAVIYARYSSDRQTEQSIEGQLRECYAFAKANDIAVIDTYIDRAISGKTDNRPAFQKMIEDSAKRQFQAVIVYRLDRFTRNRYDSAIYKARLKKNGVKVLSAMENLNGSPESIIMESLLEGMAEYYSVELSQKITRGMRENALKGKALGGQRVLGYKVNSDCYFEIDETTAPVVVDIFKLYSSGKTVKEICDILNARGVKTARGGAFNKNSLHTILTNKKYIGIYKTKYGEIVGGIPAIIDKELFEMVALRMEQNKKAPARAKAEINYLLSTKLFCGKCRSAMVGESGTSKTGKKYYYYACVKKKREKACDKSNVKKDWIEDLVIQRTVTDILKDDVIEKIADRLVELQKAEAAESGTMLYLENSLAEIQVSIKNIMTAIEKGIITESTKTRLTELEDEKRNVEIEIAKESIARRIISREQIIYWISSFKDGDITSEKYCQQLIDTFVHAVFVYDDKIVITYNYSGENNTATISDLDLSSPPNLIWSPASCHA

SEQ ID NO: 10571 - protein, 498 aa, Unknown
  Description of Unknown: Integrase B10572 sequence
  cd00338,IPR011109,IPR038109,PF07508,Coil, PS51736,G3DSA:3.40.50.1390,PTHR30461,IPR006119,IPR036162, PTHR30461:SF3,PS51737,PF00239,SM00857,G3DSA:1.10.10.2600, SSF53041
MRTYAAYLRKSRADADKTIEEVLSSHRHDLLKLAKSMNVGIVDWYEEVVSGESVSGRPQVQALLDAVSDGKYHAVFCMDIDRLGRGDMMDQGLILNTFRRSETRIITPRKTYDLTDEADETTTEFEAFFARYEYKQIRKRMRRGTIACLENGGYVANAPYGYEQCRIEKKPSLRIIPEEARFVQLAFDRYCAGVGATAIADELNALGAIPRRNEVFNKNSVRYMLRNPVYCGLTVFNRMRHTKKGTHGADRNICRANPEEKWLVAPGLHEAIISKDQFALAQNIRQGKDRPQFHMQGGVIMNQFAGIFHCSKCGRVMVTASASKGGPRLYCRTPGCSAAAKVEYIEEALLLSLEQELDRLRISDSVDLTSDLFAAEQQIQTIEAELKKAETKKTRLYDFLEDGIYDRSTFMDRMAKAEKEISSLTHRLTAARSNLDAIASSDTAELQSQLETALTLWPESTPAARNNLLKSLLSEATYTKEKKTKPQDFQITLTLRRF

SEQ ID NO: 10572 - protein, 498 aa, Unknown
  Description of Unknown: Integrase B10573 sequence
  PS00397,IPR038109,IPR006119,PS51737,PF00239,G3DSA:3.40.50.1390 ,PTHR30461,IPR025827,SM00857,G3DSA:1.10.10.2600, SSF53041,IPR011109,PF07508,PS51736,IPR006118, cd00338,PF13408,Coil,IPR036162
MTPPKGFTSSVPAPLPDLRIAAAYIRVSTDDQVELSPASQLVEIRKWAARNGYIVPDEFVFMDEGISGRGVKKRDEFRRMIGVAKTKPKPFDAILLWKFSRFARNRDDAVMYKSILRKQLGIDVISISEPVAEGGMGLITEALIEAMDEYYSINLAQEVKRGMEEKHRRGEVQSNPPYGYGIKDHVFVPKPPEDGFVKELFRRYLAGEGCFPLARWMNECGQRTHRGGRFENRTIEYILRNPVYIGKLRWNPAGRTRRDFANENVVLVDGKHEPLIDEETFNAVQRRIDEQKLLYPRYARASGTQKHWISGLVRCAACGGGLIVNTPDYMACNNYVRGSCRVRQTVRRDALEAALISRLREDAAHGSSLTFDVVRSSDGSASSLSAVEAARDSAVRMLDRLRDAYLTGADTVEEYKASKAAVQKRIADLDAQIAAAHKENAAAANPNLLRSALRAVVKTLESPDTTVAEKNAAVRSVTDNITWNKAANTLTIHYRLVL

SEQ ID NO: 10573 - protein, 498 aa, Unknown
  Description of Unknown: Integrase B10574 sequence
  cd00338,PF13408,IPR011109,IPR038109,PF07508, PS51736,IPR036162,IPR006119,PTHR30461,G3DSA:3.40.50.1390, PTHR30461:SF3,PS51737,IPR025827,PF00239,SM00857, G3DSA:1.10.10.2600,SSF53041
MQIEVRKAEMGKEKKRLKVCAYARVSTEASEQENSLENQVSHYTEMIQANPAYEFAGVYADFGISGFKESRPQFLKMMQDAKNGKIDLIITKSVSRFARNTAIVLKASRELKERNVGIFFELQNINTLTEAGELLLTILAAFAQAESESASESSKMAYLHRIENGEVVAYLERSYGYEKDENGEYRAKEPEASVIREIYDLVIQGVNCTNIAKVLNARNIQTVQGAEWTASTVFRIVENEIYKGDVLMQKTFIDGKRHQVQNRGEKAMYYAKDNHPPIVSEKIWEKAQRKLEDMRAERAEHSVIQEFTEENYPYMNHIFCAKCGWPLKPRVYSHGHRLSWDCSGQKRGTKKFCTGIHILDNDLRKMKIEGNRYFSETVDKYGEVHLKHVGERTWKNKHKKKKFNHKDLYPELNEENYPYYKRLYCARCGSRLGRYISHGTVRWICSSYKTKGQAKCPGVRIPDEIIKGWNLPDGKIYIMGKEDKNGEKHYSYTSESAL

SEQ ID NO: 10574 - protein, 498 aa, Unknown
  Description of Unknown: Integrase B10575 sequence
  cd00338,PF13408,IPR011109,IPR038109,PF07508, Coil,PS51736,G3DSA:3.40.50.1390,IPR036162,IPR006119, PTHR30461,IPR025827,PS51737,PF00239,SM00857, G3DSA:1.10.10.2600,SSF53041
MKGVIWVRVSSIDQSAGYSPDAQLRALREAAARKSIEVVKEFNVSESAKTSEARKQFRELIQFIDEYRPDYLIAYAIDRITRNPEDLNTIHNLIQKNGLNVFVVDQNKIVSKSSDPMEKFTFLMFGNIAYLDNMRRAANAKMGMLEKARGGTFPSKAPVGYRNTVDATGLKRTVVVDPVKAPLVRLAFELYAQGGYSLSTLRDELNRRGLRQKTTPMSIYGLEVILHNPFYYGSIRWDKQLFKGTHEPLISVDLFERVQARLKENQSYARPKSKKVFIFKRYLRCGYCRSGITAEEKAGAHKSGLYRYYKCTRSKDRNCPQPVYREEQIDKMFSENIGKLYINPDIAEQIREELRRSHLDQQASDKKELQRLRMEETRKTNHLNLLYTDRLDGTITKEQYLEKQAVIQQELRGIQADIEKLGRYNAKYREEGSAIIDLLKDFKQTYDEADEEGKAIILSAVIDRATLRNGDLFIAWKRPFDALFVLGEGVPRKQEWRA

SEQ ID NO: 10575 - protein, 498 aa, Unknown
  Description of Unknown: Integrase B10576 sequence
  cd00338,PF13408,IPR011109,IPR038109,PF07508, Coil,PS51736,IPR036162,G3DSA:3.40.50.1390,PTHR30461, IPR006119,PTHR30461:SF3,IPR025827,PS51737,PF00239, SM00857,G3DSA:1.10.10.2600,SSF53041
MVKAVIYARYSSHNQREESIEGQLRKCHDYAEMNGFTIIEEYCDRAISGKTDNRAEFQRMIKDSEKGHFQAIIMYTLDRFARNRYDSAMYKAKLRKNGVRLYYTEQSITDEPEGIILESVLEGMAEYYSENLSRGVKRGMKENALKCMITGGYMPLGYRKTADKKFEIDPATAPIVQEIFDLYINGKSQRQIVDILNEKGYRTVKGMPFRLGSISGILVNTKYIGLYSFGDVVIENGIPAIIDKDVFDKAQEMLKKNKRESGRMKAPMNYLLTGKLFCGHCGGSMVGESGTSGSGTIYNYYKCLSRKRHKDCTKQTEKKDWIEKLVVEETVKRILQPEVIDEIACKVAELAENEFNNKSRLTTLQNDLKSVQTAIRNLLRLVEQGIDTDDVGERLLDLNSQKADLQKQIAKEENKKPMLTKDRIAFWLTSFLNNGDIESVDYQQRIIDTLVNKVFVFDTDGGGRKIVITYNTSNSMKSTITLSDINKCSDIEGFARTR

SEQ ID NO: 10576 - protein, 467 aa, Unknown
  Description of Unknown: Integrase B10577 sequence
  cd00338,PF13408,IPR011109,IPR038109,PF07508, PS51736,G3DSA:3.40.50.1390,IPR006119,IPR036162,PTHR30461, PTHR30461:SF3,IPR025827,PS51737,PF00239,SM00857, G3DSA:1.10.10.2600,SSF53041
MIRMARSVTVIPARNRQRETGCRAVQEKKIRVAAYCRVSTDQEDQLHSFEAQVDYYTKYINDHENYEMAGIYADEGISGTNTKKREQFKRMIADCEAGKIDLVITKSISRFARNTQDCLAYSRKLKNLGIGIIFEKENINTLDSTGELLFTILSSLAQDESRNISENCKWGIRTKFKNGEMHLNTFKFLGYDKDENGKLVINKEQAKTVRRIYRDFLIGINPAQIAKELTEEKVPGCNGQTKWYPSTIVGILKQEKHMGDALLQKTYTADFLTKRQVKNNGEIAQVYVKDSHKGIIDKETWNAVQEEFERRERFMKDHGTDRYSYGADCIPFCEKVFCGECKSLFTRHSWKSRGIVQWQCKNHRTDGRVTCSNAYVDNSDLEKGFVKAFNKLVADREKFMERWNQMKTDGSSLEKIRAEQMMEATGNDPLGRFVPEIAQLVLAEVTVLGAKKYEFFFLEGSRIKVSV

SEQ ID NO: 10577 - protein, 498 aa, Unknown; identical to SEQ ID NO: 10002
  Description of Unknown: Integrase B10578 sequence
  cd00338,PF13408,IPR011109,IPR038109,PF07508, PS51736,IPR036162,IPR006119,PTHR30461,G3DSA:3.40.50.1390, mobidb-lite,PTHR30461:SF3,IPR025827,PS51737,PF00239, SM00857,G3DSA:1.10.10.2600,SSF53041

SEQ ID NO: 10578 - protein, 498 aa, Unknown
  Description of Unknown: Integrase B10579 sequence
  cd00338,PF13408,IPR011109,IPR038109,PF07508, Coil,PS51736,IPR036162,G3DSA:3.40.50.1390,IPR006119, PTHR30461,PTHR30461:SF3,IPR025827,PS51737,PF00239, SM00857,G3DSA:1.10.10.2600,SSF53041
MTNVVLYLRYSSANQTEQSIEGQERVCRQYCEMNNLNIINTYIDRGKSAYTNIHKRVSFLQMIDDSKKHTYKAVIVYSLSRFSRNKYDIAFYKKELEKNGVKVLSATEGIKDDPEGELLEGIIETMDVYFSRELSRKVKRGMQQSAEKGLFVGGNIPLGYDVVDKHFVINEDEAPIIKLIYRLYSEGYSFRDILEELDKHNYKNKKGKKFTKRSFESILTNEKYIGVYESQGYRHENLIPPIVDVSTFDKVQNRLDLESKNISYSRYNYMLSGKVYCANCHSLMTGESAYKKEKVYLYYTCKNKDLRVNKEELEKLILRAIKSFLNDDFINDLAEHVVKENERKMKENIELIKLQQELDDAIKLEEALKGLLKNAPDTIGWRYNDACIERDRLEKAVFMEKTKQMFIDKKQVVEFFNYFLNGDYEDEEYQKELFTLLVNRVEVSKEKVDVYFNINSMYNCKLPQNDTITINFDSSQVVRNLLFGEQYTNLNIYYIYNK

SEQ ID NO: 10579 - protein, 498 aa, Unknown
  Description of Unknown: Integrase B10580 sequence
  cd00338,IPR011109,PF07508,Coil,PS51736, G3DSA:3.40.50.1390,IPR036162,IPR006119,PTHR30461,PS51737, PF00239,SM00857,SSF53041
MRTDLYARKSSSDLGRSVARQERTWRADCEAEGLEPGRVFVDPDFSASQYARKDRPDYTALLEHIRAGETEMVSLWEVTRGSRQMGEWVTFLDLCREKRVMVRVFGDGEDAFTYRTWVQRDRDSLMKEGIAAESEVERIRTRTRAGTADAAHEGRPPGPLLDGYVREYGALTGDSLSPSGAKRREIRQVIDEPRAAIYRAAAEGVINGVPLNFIVRVLTAWGIPTASGGSVWQGTVMRRMLLNPGMQGHRVLAGKIVRRDAWPAIFDPVTAARVREILTESGRRHRSDGRLKYMLTGALKCGACRHPMGSRTWSQQQYQCAQPGCSKVAVSMRLVEDEVSRLIVARLIQHDAMSAPAFAATTDDSAVRAAKAELAVLASRRDELYREAAKPDGPSLALVAAAERELLPRIDAMQDEIRRLTLPPVLHDFDPQDLARRWDSGYYAVGDRRAVVMGLADLVLSPVGKAGRWSRWRLAESRWRGDALTWGERWGAEARIDS

SEQ ID NO: 10580 - protein, 497 aa, Unknown
  Description of Unknown: Integrase B10581 sequence
  cd00338,PF13408,IPR011109,IPR038109, PF07508,Coil,PS51736,IPR036162, PTHR30461,G3DSA:3.40.50.1390,IPR006119,PTHR30461:SF3, IPR025827,PS51737,PF00239,SM00857,G3DSA:1.10.10.2600,SSF53041
MSEITQIGVIYARYSSDKQRDESIDGQIRECMAYAEREGITITNTYIDRALSAKTDDRPEFRQMILDSNKQAFNYVLVYQLDRFSRNRYDSAIYKAKLRKNGIRVISVKENIKDDPSGIILESVLEGMAEYYSAELSQKVMRGMTDNVLQGKWVGTVVPYGYKLSNNRQLEINEHEANVVRKLFDMYLQRHTLSEMASYMNANGHLTHKGKPFNTNSIKAIISNEKYIGVYSWGSERIENAIPPIIDKSIFEKAQHKRNLRAKKKGNRSELYQLCGKLECGRCGGNYVGSTGTSKTGALHHYYVCSNRRRKNACKAQNIRRDALDDIVIGQTLAILNKPNVVNKIAKYAASSGKNLQSETVTQIDIIDAHIRDLKKSLDNYMTAIANGFISDVLKHRIETTEQELKDQIEIKTNLENTIIPVELTEDHIRFFLLKMAKENPSTLRGRARIIEAFVHHVTIYEDHIEIVFNYKNELSEFHDKTLESSLLNDLVTQKGF

SEQ ID NO: 10581 - protein, 497 aa, Unknown
  Description of Unknown: Integrase B10582 sequence
  cd00338,PF13408,IPR011109,IPR038109,PF07508, Coil,PS51736,G3DSA:3.40.50.1390,IPR036162,IPR006119, PTHR30461,PTHR30461:SF3,IPR025827,PS51737,PF00239, SM00857,G3DSA:1.10.10.2600,SSF53041
MARKKNIAAGQNAVIYARYSSHNQREVSIEQQVRECMKHAAELGLHVVGTYEDRAISGKTDKRPNFQQMMRDAEKGKFQAVVSWKSNRIGRNMLQAMVNEAKLDDYGVKVFYAEEDFDDTAAGRFALRNMMNVNQFYSENMAEDITRGLYDNASKCMANGRQPLGYKRGEDGRVVLDEANAAVVREIFTRVAAGDLFVDIARDLNAQGIKTSKGANWNKGSFQSICQNERYRGIYIYGDVRVADGIPRIVSDDLWYRVQEAMRMKKNPVGTRHRVGAEDYLLTGKLRCGHCGSYMTGVSGTSRNGELHYYYTCQKRRTEHACDKKNIRRDVIEPAVAQAIKMYCLTDDVIAWIADRTVEYWEKHDNDLQIEALEQQLEENKKATSNMLKAIEMGIITEATRTRMVELETEQSRLSVQLNVAKEDVVKIDREQIISYLELLQQGDIYDRDFQMELFKNFLVAVYVYDDNRMKLVFSCMGDQNSVEIPLETGEDPPDGG

SEQ ID NO: 10582 - protein, 497 aa, Unknown
  Description of Unknown: Integrase B10583 sequence
  cd00338,PF13408,IPR011109,IPR038109,PF07508, IPR036162,PTHR30461,IPR006119,G3DSA:3.40.50.1390,PTHR30461:SF3, IPR025827,PS51737,PF00239,SM00857,G3DSA:1.10.10.2600, SSF53041
MAMAKRENLEVIEVYPDYAVTGRTDKRKEFQRMMNDAKTGDFSYVIAWKSNRMARNMLDSMQYDELLKTYGIKTIYVEEDFDDTAAGRFALRNMMNVNQFYSEALAEDVRRGMMDNAKKCMVNGRLPYGLRKGPDGKAEINPEQAVIVREIFQRVKDGWHHIDIMEDLNDRGIRNRDGRKWQRTVFDKLLRNESYIGVYKFADVRIEGGIPAILDKELFDEVQDILRTKKNPRGRHRSSEEYLLTGRLFCGECGSHMVGFCGTGRGGHKHYYYICQGKHTARNCAKSNVRKDRIENAVIDFLRNFILQDEVIDWLCDELENQQEAIYGRSKLPGMYLDLQESEKAILNILDALEKGIYTDRTKDRLLELEAFQKDIKAKIAEEEKKFFKPDKDMLRFAIEQYRSKNYDDPQYSKDLIRTFIRKVFVYDDYIGIELNDNKQTKAEISLENLSEMKIKLSESESVCIISNKPHHYALYKPHNAITAFQYYDFIYVWLRL

SEQ ID NO: 10583 - protein, 497 aa, Unknown
  Description of Unknown: Integrase B10584 sequence
  cd00338,PF13408,IPR011109,IPR038109,PF07508, Coil,PS51736,G3DSA:3.40.50.1390,IPR006119,IPR036162, PTHR30461,PTHR30461:SF3,PS51737,IPR025827,PF00239, SM00857,G3DSA:1.10.10.2600,SSF53041
MRKAVFYGRYSSVNQTEQSIEGQLHVCERYAEQHDIKIVAQYIDRATSGTSDKRQEFQRMIADSRKQGFEAVLVYKLDRFARNRYDSALYKKKLRENGVRVVSATENITDTPEGIIMEGLLESMDEYYSAELSRKCKRGLKESFDKGRFIGCIAPYGYQVTDHYLQINPATAPVAQQIFQRYADGERQADIIADLNQRNIPNASGRQWNTCNISKMLQNTVYIGQYQVSTIEGISKCPALVTQEVFDKVQEHRARCVHESRKNRTNFNYILTGKAVCGECGHPVCGHSTDKGARHYYRCSVCYKPCGNAFNLHETVRNTLQEYLTEEKLTQLANAAYAEYQKEENAPTNEYDILKQELTAVEKKLQNAVDALLSGLNSERVRRTIEELEQKQTELTERLNAVSAPAPIFTQEHFRIALKRLIANAQAEDFKELVDTIVDRIIVKDKQAIICINITNETNEPPLEQILCMVKDSSVALIQHNHKKHIKFTQGWLLIVA

SEQ ID NO: 10584 - protein, 497 aa, Unknown
  Description of Unknown: Integrase B10585 sequence
  IPR038109,PS00397,IPR006119,PS51737,PF00239,G3DSA:3.40.50.1390 ,PTHR30461,IPR025827,SM00857,G3DSA:1.10.10.2600, SSF53041,IPR011109,PF07508,PS51736,IPR006118, cd00338,PF13408,Coil,IPR036162
MSELHIAAVYIRVSTDDQVELSPDSQLETLRAWAEKNGYVIPEQYIYVDEGISGRSAEKRPRFMEMIAAAKSADHPFDAILVWKFSRFARSQEESIVYKAMLAKAGVDVISISEPLIEGPFGSLIERIIEWMDEYYSIRLSGEVKRSMTLNAERGVAQIAPPFGYQKNPAGSPFMIPDEIEATVIREVFADYLAGVPVWKIVDELNARGIRTHRGGAIENRTIMYWLQNPVYLGMVRWTPTGRTRRDFHNPDTITVPGDHEALVSREDFDAVQVLVAAASEAHRPKSRPSFELKDWASGVVRCASCGSTLVFQRPRYMICNGYVRARCKDRNSITVDALHTAILERLRADVKAAYPLRYKITRSDDTERELRALRQQAEQYDRKLARIRDAYVNGLDSLDDYRRFKESLDAQQAELTAKITDLESRVDPAAAEAVLTESIRTTLETLESPDATLHQKNAAAKSLFESVIWDKASNSLTITYRVFVSSSPQTIDTATF

SEQ ID NO: 10585 - protein, 497 aa, Unknown
  Description of Unknown: Integrase B10586 sequence
  cd00338,IPR011109,IPR038109,PF07508,Coil, PS51736,IPR036162,IPR006119,PTHR30461,G3DSA:3.40.50.1390, PTHR30461:SF3,PS51737,PF00239,SM00857,G3DSA:1.10.10.2600, SSF53041
MYLRKSRADGEHETVEEVLAKHYKILQDYAAAKLGGAIPEDRIYREVVSGETIQDRPQMLRLLERIQNESIDGVLVVDPQRLSRGDLSDCGTIIRAFRYTDTLIVTPPKTYDLGDKYDRKFMEMELMRGNDYLEYVKEIMMRGRIASVQAGNYIGSGSPYGYDKVKDGRTFSLAPNSESDTVRLIFELWTKDGLGTTTIAQRLDALHIKPRKSERWSSASIRDMLKNPIYIGKIRWNFRKHVKRYEDGVLVSSRPHAAAEDWILVDGKHEPIISEDIFKEAQQRFGQLPKTKPKMKLNNAFAGIMHCSCGRAMIYRPERKCEDRILCTNMKYCNNRSAIYAEVVEEVLRALRELAEDVRDLIGSPQKSSEAQKAVTAALVKELNALETQQERLYEFLEKGIYSSEVFVKRNAALSQRRSELQEAIAEAKELESVDVDYKQRYIALMDAIQALEDDSVSVADKNRLLRVVIKDITYRRETTVRGKWQNVPFELDIELL

SEQ ID NO: 10586 - protein, 497 aa, Unknown
  Description of Unknown: Integrase B10587 sequence
  cd00338,PF13408,IPR011109,IPR038109,PF07508, Coil,PS51736,IPR036162,IPR006119,PTHR30461, G3DSA:3.40.50.1390,PTHR30461:SF3,PS51737,IPR025827,PF00239, SM00857,G3DSA:1.10.10.2600,SSF53041
MLDLSAFGVLKAAEYMRYSTDNQTENSIAYQQAGIRKYARENNIQIVASFQDEAASGTNTDRKGFQALVAAAGRKAFDAVIIYDISRGSRDVGDWFTFRKSMMYLGIKVISASGQKLGDLTNSADFLTELITVGMGQVEVLGTRQKSIDGVAVKAKQGAFLGGLPPLGYDVVNGQYVINPAEARIVRDIFAWYAAGKSYDYIVDHLKGALGKRGRPIGKNSLNGILQNERYIGVYTWNKKKYKIMRKWAGGQANPNVERIEGAIPRIIDDDTWEKVQARMKDNKRNAKNKARHQYLLTGLIECEECGARYVGHASTNKKGFVTRYYCCGNKYRTHTCGAKNINADEIETFVVQHLKEYLRTMDFTATAQYIADQINGAQPDLKAEKAELAQIEKKIANGVQAVLSGLVVPELQAELDRLRVRKSELEDIIARRSATRRELDPAALVAFFRSSIDQWNDENLPEIIRAHVTKIYAHADGTFTVNVGVHTNGCGGRTRT

SEQ ID NO: 10587 - protein, 497 aa, Unknown
  Description of Unknown: Integrase B10588 sequence
  cd00338,PF13408,IPR011109,IPR038109,PF07508, Coil,PS51736,G3DSA:3.40.50.1390,PTHR30461,IPR006119, IPR036162,IPR025827,PS51737,PF00239,SM00857, G3DSA:1.10.10.2600,SSF53041
VKQTEFIKDVGIYLRKSRASEETDETLAKHKDILVSLAKKYGFNYTIYEEIISGDKIDNRPEMQRLLNDVQMGLYDAVLVVSIDRLGRGDEEDSGKIKKIFKKADTLIITPEKVYNLENEDDETYLEFQTFLARQEFKLIKKRFIRGKRIGAKQGKWTNGIPPYPYEYDRIEGKLVINPDKLVVYNMIKDMTLTEFLPLHKIATILNKRGIPSPQGKSWSSKVIRDLLLDETHLGKIVYGKTKGANRNGNKVIKIPRDEWIISNGHHEAVKTEEEHQRIVNVLKSRTLHVSRFRNEVPRRTLQGLVICGFCGSVMQVKKSVRGYFVVTCVKKDRYGNNCVCRGIKEDVLIQNILDYIDNLTLNATFNEVQLEIDKLNKQYAYALKRQKETEEKIKKINEAFEEGTYTKAEFIERKKVRISELEEVKQLKESVEKQLDFLMNKDNRLCREDLKHIRENLFSLISSEEKNSLLRQFIERVVYYCKKTEPKRIRLEIYFR

SEQ ID NO: 10588 - protein, 497 aa, Unknown
  Description of Unknown: Integrase B10589 sequence
  cd00338,PF13408,IPR011109,IPR038109,PF07508, Coil,PS51736,IPR036162,IPR006119,PTHR30461, G3DSA:3.40.50.1390,PTHR30461:SF3,IPR025827,PS51737,PF00239, SM00857,G3DSA:1.10.10.2600,SSF53041
MRRSVIYARYSAGPSQTDVSIEGQEKVCQDYIARKDYEYVRMYADRHISGRTDKRPAFQRMIDDARSGSFDVVVVYSLDRFSRDKYDSAIYKKTLRDCGVVVESASENIPDGPEGIMFEGILESLAVYYSAELSKKIRRGMDVKARKCLSTGGPTPFGYALQDGSYHPDPNAAPHVAEVFRMYLSGSSFADCSRYLNGLGFTTSKGKPFSSGTVRKILTNKKYCGYYVYNGMEVEGGMPQLIDENTFYKVQKMIAKNKPHRPRGDFALTGKLICGICGEHMTGTSGTSKTGAVHYYYKCPSKDRKNIPRDLIEHTVAQYVRDVLSDPERIDTIVDRLFALHLEEDRTQAKSAALVDNLKRIEKKIDGIVDHIMENGSSPALADKLSTLEEDRAILRADLDQLQCEPALTRDMIRAGLQLALLGEQTTDADVIRIFVHQVLLHEDHLIVEFNIKGHEGLQKTDLLEFDLCPDWWSIGTSNRTLAIYRGSILLVGSIFQ

SEQ ID NO: 10589 - protein, 497 aa, Unknown
  Description of Unknown: Integrase B10590 sequence
  cd00338,PF13408,IPR011109,IPR038109,PF07508, Coil,G3DSA:3.40.50.1390,IPR006119,IPR036162,PTHR30461, PTHR30461:SF3,PS51737,IPR025827,PF00239,SM00857, G3DSA:1.10.10.2600,SSF53041
AFAERFGIVIVAEYCDRALTGTSDKRPEFQRMIRDSAKGLFSVVITWKNDRFARSRYDSAIYKYKLKQNGVRILYAKESIPDGPEGIILESVMEGFAEYYSANLSQNVKRGNYDSALKRQTLGQRVLGLRKGPDDRFEIDPTTAPVVRRIFEEYASGRAAIDIYTDLNAEGFRTIRGNLFSKSAIRHILKNEKYVGVYEYADIRDEAGIPPIVDRELFDKVQKIVEQHHRSPAAKKADGGGFLLTAKLFCGECGAPMTGDGGTSRNGQVYSYYICNGRRRHKCDKERAPKQWIEDLVVAELAKIANDDVMINAFADRFMEWQEKQKKSSVLAGLEQRLKKTEAAIKNTMSVIDSGLITDSIKSHLLELEAERTSLEAGIARERMESLEIDRDTVVWFLERFRTTDQSDVGWRIFIVETFLQAAYLYDDGRLILHLNYGGQNSAISLQLAERSVSEGEAIGSSIAQTGAPDSANLNTPGVFFFDGIMVAIASAEKKKG

SEQ ID NO: 10590 - protein, 497 aa, Unknown
  Description of Unknown: Integrase B10591 sequence
  cd00338,PF13408,IPR011109,IPR038109,PF07508, Coil,PS51736,IPR036162,IPR006119,PTHR30461, G3DSA:3.40.50.1390,PTHR30461:SF3,IPR025827,PS51737,PF00239, SM00857,G3DSA:1.10.10.2600,SSF53041
MKKVAFYGRYSSVNQTEQSIEGQLHVCEQYATQHDMKIVAQYIDRATSGTSDKRQEFQRMIADSRKQGFEAVLVYKLDRFARNRYDSALYKKKLRENGVRVVSATENITDTPEGIIMEGLLESMDEYYSAELSRKCKRGLKESFDKGRFIGCIAPYGYQVTDHYLQINPATAPVAQQIFQRYADGERQADIIADLNQRNIPNASGRQWNTCNISKMLQNTVYIGQYQVSTIEGISKCPALITQEVFDKVQEHRAKCVHESRKNRTNFNYILTGKAVCGDCGNPVCGHSTDKGARHYYRCSKCCHSAGKAVQLHETVRNALQEYLTEEKLNQLANAAYAEYQKEENTPTNEYDILKQELTAVEKKLQNAVDALLNGLNSERVRQTIEELEQKQAELTERLNAVSAPAPVFTQEHFHIALKRLIANAQAEDLKELVDTIVDRIIVKDKQAIICINITNETNEPPLEQILCMVKDSSVALIQHNHKKHIKFTQGWLLIAA

SEQ ID NO: 10591 - protein, 497 aa, Unknown
  Description of Unknown: Integrase B10592 sequence
  cd00338,IPR011109,IPR038109,PF07508,Coil, PS51736,G3DSA:3.40.50.1390,IPR036162,IPR006119,PTHR30461, PTHR30461:SF3,PS51737,PF00239,SM00857,G3DSA:1.10.10.2600, SSF53041
MYLRKSRADGEHETVEEVLAKHYKILQDYAAAKLGGAIPEYRIYREVVSGETIQDRPQMLRLLERIQNESIEGVLVVDPQRLSRGDLSDCGTIIRAFRYTDTLIVTPPKTYDLGDKYDRKFMEMELMRGNDYLEYVKEIMMRGRIASVQAGNYIGSGSPYGYDKVKDGRTFSLAPNSESDTVRLIFELWTKDGLGTTTIAQRLDALHIKPRKSERWSSASIRDMLKNPIYIGKIRWNFRKHVKRYEDGVLVSSRPHAAAEDWILVDGKHEAIISEEVFNAAQDRFGQVPKTKPKMKLNNAFAGIMHCSCGRAMTYRPQPRCEDRLLCTNMKYCSNRSAIYQEVVDEVVNALIHTVEDLRELSDEPQRSSEAQRAITAALRKELNSLETQQERLYEFLESGVYSSEVFVKRNAALAQRRSELQEAIAEAEAQEVSEIDYKQRIIALKDAIAGLQSDAVSVEDKNRLLRAVIKDITYHRETTVRGKWQNVPFELDIELL

SEQ ID NO: 10592 - protein, 496 aa, Unknown
  Description of Unknown: Integrase B10593 sequence
  cd00338,IPR011109,IPR038109,PTHR30461:SF21,Coil, PF07508,PS51736,IPR036162,IPR006119,PTHR30461, G3DSA:3.40.50.1390,mobidb-lite,PS51737,PF00239,SM00857, G3DSA:1.10.10.2600,SSF53041
MSRDENGRRAAVIYLRQSLDRLGTEDAVTRQREDAVAIAASRGFRVIAIHADNDTSARGRSKRPGFDATLADVEAGNASVIIAWNMDRLTRNSRDRLRLIETGRKAKALVVLARGSDIDLSTPSGRMTADILASVAQAEIETKSDRQKRANLQAVQRGRRVGGRRPFGFEQDGKTLRLDEADAIRDGYHAYLAGSTLAAIARDWNARGFTAQKAPWAGYSVAMILKNPRYMGWRGYAPADENRKGRPVIEAVTQAEWPAIVTENIWHGVNGMLASKATSAVSRGGRYLLTGVAWCALCDVEGQPSTVHGGGAVRHYPMYRCSRTYGHVSRKAEPIDRWVSAYAVARLSRKDARELLTSASSEPGIGELRAEYKSLLERKRKLAEDLALTDMDPGDYREMREAFRRRLGELETAMAGSGRASILRPLIDADNVEAMWDAMPRAHQRQVIDSIFTVTLYPAGQGTRTFRPETVRVEPKREKQALKTQPVLNEKRRIRQ

SEQ ID NO: 10593 - protein, 496 aa, Unknown
  Description of Unknown: Integrase B10594 sequence
  cd00338,PF13408,IPR011109,IPR038109,PF07508, Coil,PS51736,G3DSA:3.40.50.1390,IPR006119,IPR036162, PTHR30461,PTHR30461:SF3,IPR025827,PS51737,PF00239, SM00857,G3DSA:1.10.10.2600,SSF53041
MELSKGVIYARYSSDKQRDESIEGQIRECKAYAEREGIIITHIYTDKALSARTDHRPEFRQMIDDAKKHNFEYVIVYQLDRFSRSREDSAVYKSILKRNGVKVISAKENISSDPAGIILESVLEGMAEYYSAELAQKVRRGMTDNALKGKMNGTPTPLGYDKTNDNSLIINKHEAKIVERIFEMYLKGHSIPSICSFLNSKGYLSKKGGKFSYAVVRRILSNEKYIGIMKWNDIIVEDAIPSIISKEIFDKVQTANSRRIKLKASRSEFYNLCGKLYCGKCNAHYVGSTATSRSGEKHYYYVCNNRRKHHTCDAPNIKREIVEDIVINKTLEILNQPNTIEELAKMAIKANKEMMSTSELELQSINDRIKQLQSELDNYMKAIAKGFISDTLQNQIEKTEAELQDHMTRRTNHEIASNQIQLTAEHIEFFLHKMAKENPTTKQGRASIIDTFIKQATIFDDRVEIVFNYSNDLPQFKEQAIECSHSCDMVDHQGFE

SEQ ID NO: 10594 - protein, 496 aa, Unknown
  Description of Unknown: Integrase B10595 sequence
  IPR038109,IPR006119,PS51737,PF00239,G3DSA:3.40.50.1390, PTHR30461,IPR025827,SM00857,G3DSA:1.10.10.2600,SSF53041, IPR011109,PF07508,PS51736,mobidb-lite,cd00338, PF13408,Coil,IPR036162,PTHR30461:SF3
MTAVIYARYSSAGQQETSIEFQIEDCTQFAHRLGYDVIETFQDRAKSATTDARPGFLKMIAYCAENRVDAVICWKHDRFARNRYDAAVYKSKLAKAGTRLLYCRETNSEGADSIIIDSVMEGLAEFYSANLSANVKAGNRKAAEKRWTLGVKTFGYGTAPDKTYMINEDEAVIVRTIFREYAAGTPIKDIIRDVVPGWGYYRIEKMLSNEKYIGHYHMYGVDDWCIPPIIDRETFDRCQARSAHKKHAPREDHETYLLSGKVFCGLCGDRYNGNSTLKKTTGKIYRWYSCKNHKKGCKNDSVDRDRLEAMVMEKLTAIVHSDEMIEQLADEFIRAQEENATFLRACENQLADLNSQRSALVTAISRNPLNSLVDRLAELEQEIEAREAAIRRERSAMFTREQIRAFFLDFRQHPDEPRWRRMLVQTFLVAVWIYPDKIIIQTTLDGSIAPDRDTADRIASDRDPPVGPITTPACQTRNGPTLSIWLVIPRTEKSTR

SEQ ID NO: 10595 - protein, 496 aa, Unknown
  Description of Unknown: Integrase B10596 sequence
  cd00338,PF13408,IPR011109,IPR038109,PF07508, Coil,PS51736,G3DSA:3.40.50.1390,IPR006119,IPR036162, PTHR30461,PTHR30461:SF3,IPR025827,PS51737,PF00239, SM00857,G3DSA:1.10.10.2600,SSF53041
MPEALNAVIYARYSSDRQTEQSIEGQLRECYAFAKANDIAVIDTYIDRAISGKTDNRPAFQKMIEDSAKRQFQAVIVYRLDRFTRNRYDSAIYKARLKKNGVKVLSAMENLNGSPESIIMESLLEGMAEYYSVELSQKITRGMRENALKGKALGGQRVLGYKVNSDCYFEIDETTAPVVVDIFKLYSSGKTVKEICDILNARGVKTARGGAFNKNSLHTILTNKKYIGIYKTKYGEIVGGIPAIIDKELFEMVALRMEQNKKAPARAKAEINYLPSTKLFCGKCRSAMVGESGTSKTGKKYYYYACVKKKREKACDKSNVKKDWIEDLVIQRTVTDILKDDVIDKIADRLVELQKAEAAESGTMLYLENSLAEIQVSIKNIMTAIEKGIITESTKTRLTELEDEKRNVEIEIAKESIARRIISREQIIYWISSFKDGDITSEKYRQQLIDTFVHAVFVYDDKIVITYNYSGENNTATISDLDLSSPPLQSNPNIFC

SEQ ID NO: 10596 - protein, 496 aa, Unknown
  Description of Unknown: Integrase B10597 sequence
  cd00338,PF13408,IPR011109,IPR038109,PF07508, Coil,PS51736,IPR036162,IPR006119,PTHR30461, G3DSA:3.40.50.1390,PTHR30461:SF3,IPR025827,PS51737,PF00239, SM00857,G3DSA:1.10.10.2600,SSF53041
MYEDIKTACLYVRFSSHNQTEQSIEGQTRVCRDFCKRHNIRIVEIYADRATSASKDIEKRVQFLKMIKDSEKGLFDAVIVYKLDRFARSRYDSATYKYRLKRNGVQLISATENISNDPEGIILESVLEGMAEFYSAELSQKINRGMRESAYKHNSIGGAIPLGYKIEDKKLVIDPKTAPIVKEAFEKYADGETVAEICRQFNARGYKTSKGTAFGKSSFTKIFRNERYIGVYTFHDYRAEDAIPAIIDKDLWDRVQLRVGKIKNAPARNKAKVVYLLSGKIFCGHCGSKMNGNCNAGNYYYYQCYGKKNGNVDCKKKNIRKEFIERLVAQDALSLLTDEYIEQIATIACEKNQHEIELDSALPTIRDRIHQVDLSLNNLLKAIESGSAPDMLVKRMGELEKEKKDLQAQAKKESEDIVELDKAQVIYWLEQFRGGSIEDEEFCRMLIDLFVNSVTVWDEDDNTCKVTVAYNLTSLPTKTYRLNKGGTLSDFTSNAP

SEQ ID NO: 10597 - protein, 496 aa, Unknown
  Description of Unknown: Integrase B10598 sequence
  cd00338,PF13408,IPR011109,IPR038109,PF07508, Coil,PS51736,G3DSA:3.40.50.1390,IPR006119,IPR036162, PTHR30461,PTHR30461:SF3,PS51737,IPR025827,PF00239, SM00857,G3DSA:1.10.10.2600,SSF53041
MPEALNAVIYARYSSDRQTEQSIEGQLRECYAFAKANDIAVIDTYIDRAISGKTDNRPAFQKMIEDSAKRQFQAVIVYRLDRFTRNRYDSAIYKARLKKNGVKVLSAMENLNGSPESIIMESLLEGMAEYYSVELSQKITRGMRENALKGKALGGQRVLGYKVNSDCYFEIDETTAPVVVDIFKLYSSGKTVKEICDILNARGVKTARGGAFNKNSLHTILTNKKYIGIYKTKYGEIVGGIPAIIDKELFEMVALRMEQNKKAPARAKAEINYLLSTKLFCGKCRSAMVGESGTSKTGKKYYYYACVKKKREKACDKSNVKKDWIEDLVIQRTVTDILKDDVIEKIADRLVELQKAEAAESGTMLYLENSLAEIQVSIKNIMTAIEKGIITESTKTRLTELEDEKRNVEIEIAKESIARRIISREQIIYWISSFKDGDITSEKYRQQLIDTFVHAVFVYDDKIVITYNYSGENNTATISDLDLSSPPKIRPSAFGR

SEQ ID NO: 10598 - protein, 496 aa, Unknown
  Description of Unknown: Integrase B10599 sequence
  cd00338,PF13408,Coil,PS51736,G3DSA:3.40.50.1390, IPR006119,IPR036162,PTHR30461,mobidb-lite,PTHR30461:SF3, IPR025827,PF00239,SM00857,SSF53041
MIASITCAIYIRKSREDKDKPSHRLTVQREQLPAHAASQGWAYSVYDDGHASAARGKVDSLKERSRLEADIRAGKIGIILTIELSRLSRDDSLQDYVAWLHLCAEHRVKLATMSRTLDPSQHSDWMLLLMEGGFSSVEMRVLQSRMAEGRAQALQTGKFLGGQLPPPYIYGRAKNAPVVDPEALERMRQLWHLAETKSTRQVAEELKVPLITIRRAISDQRLLFCQAKRPGPTGTLIDCEWEPCLTEEQAERIRANRSGRLSSGSRRIYGGLLSNLGLFQCGYCGRSIRAWTNSRRRKDGSRLDYYGCKANELKRTCPDSRMISQEAINERVITNVLGTLSDTAMLRESWLASQKQDGQEEQLTDLERQGRKLQEKKQRLVAAVVEGVLNFTDAKAQREELDAAIAATEQARQSILRCQREEPDWEALALMRDQFGDLEEAERRQMITLVVKNIRMFASYLIIEYLLPRGPAGEMTSRVHLPPPAKTGPKVYKDKT

SEQ ID NO: 10599 - protein, 495 aa, Unknown
  Description of Unknown: Integrase B10600 sequence
  cd00338,PF13408,IPR011109,IPR038109, PF07508,Coil,PS51736,IPR036162, IPR006119,PTHR30461,G3DSA:3.40.50.1390,PTHR30461:SF3, PS51737,IPR025827,PF00239,SM00857,G3DSA:1.10.10.2600,SSF53041
MRQKFKIDLSMLTPEEQQQFRDDPTTLTKGEVDVALYLRFSSERQKEQSIEGQLRDCIAYCKRKSFRIVAIYVDRATTARKDVEKRVHFQEMISDSAHHLWNFVVVWKLDRFARNREDSAVFKMRLRKNGVRVKSATETISDNPEGIILESVLEGIAEYYSADLSQKITRGLRESAMKGHSVGGHVPLGYKIEDHRLVINPATAHIVQEAFQLYANGESMAEICRIFNGKGYRTAKNSEFNRSSFKSMFKNVRYIGTYIYKDIKKENAIPAIIDKDLFETVQRRLSLAADAPARGKAKVDYLLSGKLFCGHCGATMNGESGTSKTGAIHNYYTCYSRKRRKGCDKKPLKKDFIERIVAQDAMALLTNDVIEELADMAMSQADRDLKENTRIPELSTRLTEIEQGINNITKAVEKGIASDALLDRLTELEKEKKDLTSQLREEEKYIYRIDRDQVVFWLTKFQGGDIEDEDCRRRIIDLLVNSVTVWDEPDGYKIT

SEQ ID NO: 10600 - protein, 495 aa, Unknown
  Description of Unknown: Integrase B10601 sequence
  cd00338,PF13408,IPR011109,IPR038109,PF07508, Coil,PS51736,G3DSA:3.40.50.1390,IPR006119,IPR036162, PTHR30461,PTHR30461:SF3,PS51737,IPR025827,PF00239, SM00857,G3DSA:1.10.10.2600,SSF53041
MYEEVKNACIYARYSSSNQTEQSIEGQLRVCREFCNRHNIRVVEVYTDRATSASKDIEKRVSFLKMIKDSERGNFDAVIVYKLDRFARSRYDSATYKYRLRKNGVQLISATENISNDPEGIILESVLEGMAEFYSAELSQKIHRGLRESAYKHNSIGGQIPLGYKTEGKKLVIDEETAPIVREAFEMYAEGHGVADICRTFNAKGYKTSKGTRFGKSSFSKIFRNEKYIGVYQFHDYRAEDAIPALIDRKTFNLVQARLKTVGKAPGQFKAKHIYLLSGKLYCGHCGSKMNGNCNTNEYSYYECYGKKNLHKDCHKRNLRKDFIEDIVVRDALSLLTPERIEEIATVAIQTNTYEVETTTDIPAIRGRLHETKLSLENITKAIEGGLAPETLVKRMVELEKEKKVLEGELKKEEKGVAYLDREQVIYWLNQFKDGDIEDEDFRRQLIDLFVNSVTVWDEPDDFFKITIAYNLTSLQEKTYRLPKGGTLSDLALNP

SEQ ID NO: 10601 - protein, 495 aa, Unknown
  Description of Unknown: Integrase B10602 sequence
  cd00338,IPR011109,IPR038109,PF07508,Coil, PS51736,IPR036162,IPR006119,G3DSA:3.40.50.1390,PTHR30461, PTHR30461:SF3,PS51737,PF00239,SM00857,G3DSA:1.10.10.2600, SSF53041
MNAAIYARYSSHSQREESIDQQVAVCRRWCAAHGHDVAAVYADEARSGRSTEGREQFLRMVDDAKNGMFQLVVVYKLDRFARDRYDAAIYRKRLRDAGVEVKSAMEAIPDGPEGRLLEAVVEGVAEWYSADLSQKTLRGMTHNAERCRANGVQVFGYGIGEDGRYVIDEPQAEVVREVFRRWADGEPSAVVARELAARGVRTARGRTPKKDWPSTIVHDERYLGTYRWGDVRVEGGMPRIVSDAEWVAAHNRARRPSLAPKRTHDYALSGRLWDRATGLPMHGYSARGEGGEYTYYGVIEDGHRRLVRRELIEGAVVRAVRAALADAALVDDVVARVMERQRRLSDSPEVLGARATLRAADAEEERLLDAIQAGVPLAGIRERAEVLNERRRAARATLETAEGGAVSADAVRAAMARLASHGSDAAILRHCVAGVVVDRAGRAVVVTLPIADKKRAPTREGVSARGVWQPVGGRDSNVAWCVVDGGLLLRAPLAA

SEQ ID NO: 10602 - protein, 495 aa, Unknown
  Description of Unknown: Integrase B10603 sequence
  cd00338,IPR011109,IPR038109,PF07508,Coil, PS51736,G3DSA:3.40.50.1390,PTHR30461,IPR006119,IPR036162, PS51737,PF00239,SM00857,G3DSA:1.10.10.2600,SSF53041
MEGMYCAYLRKSRADEVREKVEEGYDALSHHRQALEALASRMEVDLSRWYSDGIKSGERIEGRDGMRELLADVQARRWDGVLCMEVERLTRGDMIDQGTVLRAFHDTGTLIVTPTKVYDPASEADMEYFEFGLFMSRREFKTINKRLIAGRAASVREGQFIAKDPPFGYDKARISGLKTLAPNADAPHVVRIFEAFAAGDSYKTIVRSLDAAGVRPVRGTAWSTSSIQNIVRNPVYVGKVRWNDTRQEVYYENGRRRSHTKANPDAILVDGLHQPIVSQELWDAVSDRIASAPVRGSYEHRNPFGRILVCAECGKALVWAKPSHCNGSECFTHRHRGVGCRTKGCRVSVLEKAVVDALEQIAGDLDLAVGHEAPVAAVTAADCLAEAEQARKAISDNFDRMERGVISEADFVERRAVLEARIAESEAEAARIESMSAEAAAARAATVRDCIRAIGDHSIPVELRRKAIWAAIERIEYQNRAPVFKDEIELRIIIR

SEQ ID NO: 10603 - protein, 495 aa, Unknown
  Description of Unknown: Integrase B10604 sequence
  cd00338,IPR011109,IPR038109,PF07508, Coil,PS51736,IPR036162,IPR006119, PTHR30461,G3DSA:3.40.50.1390,PTHR30461:SF3,PS51737, PF00239,SM00857,G3DSA:1.10.10.2600,SSF53041
MPTARTAVIYARFSCNKQREASIDDQLRICRQWCQREKYAIVAEYCDYAISGRTDDRPEFQRMVANAGESDIVLVYMMDRFSRGEYDAPIYKRELAQHGVKLVSALEQIPDSPEGIIYEKLLEGLAACESKKTAIRTRRGMEGNALKCKTNGVRVFGYASNEADEYVINEDEAAFVREAFKRRIAKETTNSIARDFAARGVKTSQGNPCGYSMVERMVKNRKYTGRYEWGGVVKEGGMPAIIDEVTFMEAQGIRAAKERSAESWGDFALSGKAICAGCGRNLQGVSGRGRKNVKYEYYRCHDGCVRPVRREELEGEIVKALRALLQDREEALRIARMVAESSDGAEVAARRKQAAQSLSAAERGLKNILNAIERGIIAPGAKERIAELEHQRDRAKLDLEAIRDEQIDPERLADFLQCGSALDDATLLKAFVYQVSVSDEECIVTLNYDVESNEPARLDVQRVRTKCKWCTVCASPRTEVCAIGTIIFVRIPRAA

SEQ ID NO: 10604 - protein, 495 aa, Unknown
  Description of Unknown: Integrase B10605 sequence
  cd00338,IPR011109,IPR038109,PF07508,Coil, PS51736,G3DSA:3.40.50.1390,IPR006119,PTHR30461,IPR036162, PS51737,PF00239,SM00857,G3DSA:1.10.10.2600,SSF53041
MKKDRLSAAVYARYSSHAQRAESIDQQVAVCTDWCEGHGLEVAAVYADEARSGRSTEGRSEFLRMVADAPEAPWSTVVVYKLDRMARDRYDMAIYRKRLRDAGVEVRSAMEAIPDGPEGRLLEAVVEGVAEWYSADLSQKTLRGMRAGADACRALGVPVFGYSVGADGRYEVDEAQAAIVRRVFAEWIRGDEATLIAERLAAEGVRTASGARPDKNWARRIVRDERYLGVYRWGDVRVEGGMPAIIDAAAFLEAGKRRRAAHAPARVHEYPLAGRLWDAETGSKAFGYSVRAHGRDYVYYAVTTPEGRATVPRDAVDAACARAVRAALSDAALVDDVVARVLELDGGPVEGLDEARAALRAVEAERLRLGDAVRAGVAPDDLAEAFRDVRERKMAAEAAVAALTAPPLAAEDVRAAIRDLAAGGLSDREILETSVWRAELVRNEGAVVVELPFRRKNAPREQGVREKCSWLPLGAPGAKWAVVPGALLLRVELAA

SEQ ID NO: 10605 - protein, 495 aa, Unknown
  Description of Unknown: Integrase B10606 sequence
  cd00338,IPR011109,IPR038109,PF07508, Coil,PS51736,IPR036162,PTHR30461, IPR006119,G3DSA:3.40.50.1390,PS51737,PF00239, SM00857,G3DSA:1.10.10.2600,SSF53041
MDAAQYLRKSRVEEGLETDEVLAKHRKALADYAARNGIRIIATYEEVVSGESLYARPEMLRLLRDVEAGSYDAVLCMDLDRLSRGRMHDQGIILDAFRDSGTLIVTPEKTYDLRDELDDEMAEFKTFMSRREYKIINKRLRRGLNQAIQEGCYVANAPYGYRSVYVDKRPTLEIYEPEAKFVRMMYQMYADGYGCVSIARQLNLLGARPHRSDAFNRSSVMHILKNPTFAGKVVWNQKSHIKKGSKGNETHITIYNPRDQWTVTDGLHPAIIDKELYDRVQEIIAGRYRPSRQDGTVRSPLAGLMYCGSCGGRMQKMMGRTKLPYLLCPVPGCCAGTKYELVEQRLLLHLREILERLTSVQGAAQLPQGTDWKTVLTEVRRERAAAEGQKNRLYELLELGEYDLPTFRERMPVVKDKIAALEAREEELLAAMDAEARRDPAAQAEKIAAVLAAYDDSDAAHRNALLHSVVERVTYWKEKKTKPTDFRLDVQIKPN

SEQ ID NO: 10606 - protein, 495 aa, Unknown
  Description of Unknown: Integrase B10607 sequence
  IPR038109,PS00397,IPR006119,PS51737,PF00239,G3DSA:3.40.50.1390 ,PTHR30461,IPR025827,SM00857,G3DSA:1.10.10.2600, SSF53041,IPR011109,PF07508,PS51736,IPR006118, cd00338,PF13408,Coil,IPR036162,PTHR30461:SF3
MIAIYARVSTEEQALKGSSIESQIEACINKAGTTDVLRYIDDGYSGELLERPGLNKLREDVEKGLIDKVICYDPDRLSRKLMNQLLIDDEFRKKGVELVFVNGEYANTPEGQLFFSMRGAIAEFEKAKIKERTMGGRRQKAKKGIIIKNSGLYGYTYNKEKRTYEINEDEAKIVRMIFDYYTEQRFHGINSLAKHLTKIGVPTKNGAKEWHRQVVRQILMNESYTGRYYQNKWNTEGAYVRKQAGKVGGMHLREKDEWIETKIPAIISEEQFARAQELLKYARRRTESYGRHQYLLSGLVRCGRCGATMNGKKTVRRGKAKYDYVCRKNYAGAKNKGCGRQMSEQKLDHIVWNQVLEWLNDPEELSKYKPSDNKQYIYEEIKQIETEIEKTRKGRKRLLKLASLDEELELEEIKEQLRELQEKEKTLTEQYSELQRELEEQKSNNNNNEILLKEALEYFLKNKDDITFDKKQHIIRKLIKEIVVVDAETVYIYTY

SEQ ID NO: 10607 - protein, 494 aa, Unknown
  Description of Unknown: Integrase B10608 sequence
  cd00338,PF13408,IPR011109,IPR038109,PF07508, Coil,PS51736,IPR036162,IPR006119,PTHR30461, G3DSA:3.40.50.1390,IPR025827,PS51737,PF00239,SM00857, G3DSA:1.10.10.2600,SSF53041
VNATPAARTRPKRAVLYLRQSTYREESISLELQEAAGREYCARHGYDVIAVEADPGISGRTWKRPAVQRVMGMIESGEADVVVLWKWSRLSRNRKDWALAIDRADIAGGAIESATEPIDTATASGRFARGLMTEYAAFQSEQIGEQWKEAHARRRRLGLPAEGGPRYGYDKRDGFYYPNPDEAPVLAEMYRRYLRGEGFTRIVKWLNTAGHPTRSGMPWSRTVLTHMLDAGFGAGKIIHRQTKNGKRDWNIANATYHPGQHTPVITEAEWETYLARRREQTPGPRTVEPKYMLTGLIVCDDCGAPMHVGNAGLKDYKCSGAQQRRDRPGMYMTRALVEQAVREWVAELASDVDAGTSAVLKQQRRQVVQLDNVATLERRIEEVTQRMGRITLRWSSGKMPDAAYDAAIAQLDEDLTALRARLKRAAPAPEPPVNPGPLAADLTARWDELTVLEQRNLLRALIHQVRIRKPVRQGTGVWRDRVIIIPSWEAPTVG

SEQ ID NO: 10608 - protein, 494 aa, Unknown
  Description of Unknown: Integrase B10609 sequence
  PF13408,IPR011109,PF07508,Coil,PS51736, IPR036162,PTHR30461,G3DSA:3.40.50.1390,IPR006119,PTHR30461:SF3, PS51737,IPR025827,PF00239,SM00857,cd03768, SSF53041
MVAIYARQSIDKKDSISIESQIAFAKREIFSEECKIYEDSGYSGKNTNRPAFTEMMHDIQTGQIEKVVVYRLDRISRSIVDFADFIDVLENNGISFVSATEKFDTSTPMGRAMLYIIVVFAQLERETIAERVRDNYYARVKKGAWGGGPAAYGFDLVRTTLDSKKATIYEPNADLEIVSKIFDTYAQPFTSLADVQKALIRSGALSAGGVNFDSVKLSGILKNPAYVQADIAIYNYYKSKGAIMANEPEDFDGTHGCILAGKRDASERKYKDVSNHLLAIGHHNGVVDSSTFLYCQEKLSKNRQIKNSGKGKHSWLTGLVKCGHCGYAFSVRFASTKDGRIPYFVCSGKYLHKCCDAKQTHRVREIEAQVQARLIQEAEAYHLAREKRENNVIKQHQQKIADIDSKIENLISTLENVSQISAEYINRRIETLHREKQLLIHQYSEALTEFNAVEIIPFTAEDWENMSFEDRRDIAKSMIDRVVLSEDGVDVRFK

SEQ ID NO: 10609 - protein, 494 aa, Unknown
  Description of Unknown: Integrase B10610 sequence
  cd00338,IPR011109,PF07508,Coil,G3DSA:3.40.50.1390, IPR036162,IPR006119,PTHR30461,PS51737,PF00239, SM00857,SSF53041
MDSVPPREYALYLRKSNGPIGILRQRTATTTYIKGKGGVIGPVFEDADRTAFRKGTDRPEREGFDEMLGWLSQRSGAGAAAWHADRFVRDPEEAELLIRVCRDRGHMVETKAGGAYDMSTANGRKHFRQDALDATTEVDHNTERIIEQKAEAAAAGLWLGGLRPFGWEGIPAEPGSETKFLGLRVVPLEAAALRSAAGAILEGTSVTSIAAEWNARGIKGTSGGPWDAGRLKRVLLRPRNAGLVVHNGVEKGTAQWDPVMPLEVFRALEVKLNGRRKPGHPSARVWQGSGLYRCGVCDKPVGVHGGTGGHHRTSYTCPGHVARQAVKVDKHVSAIVTAYLGRLEAAAALAAATVPRGEDVTLLRAQITAIEGRRKRVAERYVDGTADDDELDASVARAREEIAALEKRIAEAGRVNPLTSVAGDQRIGEKWPGYPVSRRQAIIRELLVVRIHPAGPGRPPGVQWPETWFDRDLIEILPGPVFGAAAPAAPLTVP

SEQ ID NO: 10610 - protein, 494 aa, Unknown; identical to SEQ ID NO: 9873
  Description of Unknown: Integrase B10611 sequence
  cd00338,PF13408,IPR011109,IPR038109, PF07508,PS51736,G3DSA:3.40.50.1390,IPR006119, IPR036162,PTHR30461,PS51737,IPR025827, PF00239,SM00857,G3DSA:1.10.10.2600,SSF53041

SEQ ID NO: 10611 - protein, 494 aa, Unknown
  Description of Unknown: Integrase B10612 sequence
  PS00397,IPR038109,IPR006119,PS51737,PF00239,G3DSA:3.40.50.1390 ,PTHR30461,IPR025827,SM00857,G3DSA:1.10.10.2600, SSF53041,IPR011109,PF07508,PS51736,IPR006118, cd00338,PF13408,Coil,IPR036162,PTHR30461:SF3
MDLEMMKARNVLRVALYVRVSSQEQVEGYSIGEQTDRLKKYAEAMGWSIVKVYVDPGYSGGNMDRPGLNEMIKDVEDGKIDTVVVYKLDRLSRSQFDTLYLIEKVFLTNNTDFVSMTENFSTNTPLGRAMIGFLAVFAQLEKDKINERTLMGKEARAKEGKWGGGSSEPIGYDYNPTTEELEINEYEKMQILEAVDLFLKGTPLRTICTIFDQKGYTYRGKSGKLRKWDPKRLKYVFANKIYLGYIKHRNAWYKGNHTPILTEATFKKLQKLLTQRAEDYAEHKKKCGKQTTYLGGFIYCKQCGAKFSKQSGKTRNGSYNHYYACYSRSKKVPKMVKDPNCKNIYWRMGDLDDLVINEIRKLATDPEYFHLIRKEKAEANDSPNKIDILKTEIKKLDDQISRFMDLYGIGTFTIDQVSEKIEPLNEHKKGLEKELENLNAELNVMTEEEVREIVSTFSEVLDRKDLNEIRLAIETLISFIEIDNEDIYIHWKFA

SEQ ID NO: 10612 - protein, 494 aa, Unknown
  Description of Unknown: Integrase B10613 sequence
  cd00338,IPR011109,IPR038109,PF07508,Coil, PS51736,G3DSA:3.40.50.1390,PTHR30461,IPR036162,IPR006119, PS51737,PF00239,SM00857,G3DSA:1.10.10.2600,SSF53041
MPEEIKTAVIYARFSCSKQREASIDDQLRVCRDWCAREGYAIVGEYSDYAMSGRSDDRPQFQKMIANAGESDIVLVYMMDRFSRDEYDAPAYKHELRKRGVEVVSAMEAMPDGPERILIEKIYEGLAAVESVKTSMRTRRGMEGNALKCKTNGVRVYGYGRNEDDEYVVNEDEAAIVREAFRRSCDHEPVDSIASDFARRGVTTRTGRPCGYSMVYQMLHNRKYTGLYSWGGIEVDGGMPQIIDKATFAMAQEVKPKKRRASEDWGTFALSGRAICSECGHNMAGTSGRGKKNVKYEYYGCRCGAKPVRRDWLEHELAEAIRGMLRDRETALRISHMLWDEPEPEIADARRRAMASKRKAENGLQNIMAAIEQGIVMPEFTERIAQLQAQKARAERDLASYDEARIDPEEFADFLQCGGGMDDAAVLDSFVYQVMVTPEECVATLYCDDERNEPARLSIARVRTFSGWCPICKDSRTQVLALGRSVFIRFSRAA

SEQ ID NO: 10613 - protein, 494 aa, Unknown
  Description of Unknown: Integrase B10614 sequence
  cd00338,Coil,PS51736,IPR036162,IPR006119,PTHR30461,G3DSA:3.40.50 .1390,mobidb-lite,PF00239,SM00857,SSF53041
MTAAIYIRKSREDKNKPAHRLTVQRQQLPDYAMAQGWTPIVYDDGHASAARGKTEDLEERNRLEADIKAGKINIILTIELSRLSRDDSMQDYTAWLHLCSQHNVKLATMSRTLDPAQHSDWMLLLMEGGFSSVEMKVLQGRMAEGRKQAIRSGRYIWGNPPTPYVKNPATGAIEIDPDQRTQVDAILTMAETMSVHRIVQQTGLPQIKIRRMISDDRLLFYLGKILDPDSGEEIDGQWPPLIDADRATTIRQARRTRKPYGKNREAGGLLSNLDGLLQCGYCGRTAKAWRNSRIKNDGTRNNYYGCSHSCQKSRLVQQKIIDDKVITNLLGTLKKTDHLAEAWTKNNTAGDIPGQLAAIDSEETDLLEKKQRLIQAITEGVISFADAKNTRQQIENNLSALQLQRRKIQASRQPEPDWHDLQKRAAKWPLMTEKEQRDFLQINLAEIRIYYNYALVSYRYPRTLDGNQTARVHLPEPYKPSTRKPRATNRNTAK

SEQ ID NO: 10614 - protein, 494 aa, Unknown
  Description of Unknown: Integrase B10615 sequence
  IPR011109,PF07508,Coil,PS51736,G3DSA:3.40.50.1390, IPR006119,PTHR30461,IPR036162,PTHR30461:SF3,PS51737, PF00239,SM00857,cd03768,SSF53041
LTGIYVRQSVDRKESVSIEAQIEFCKNELRGDTFRIYDDRGFSGKNTNRPAFKKLMEDVEKGAVSRIIVYRLDRFSRNIADFAGTYDIISRHGVELVSYTERFDTSSAIGKAMLAIVMVFAQMERETIVERVKDNYYKRGELGLFVGGPFHYGFEKEAVTHNGMKTKRLTEIPAEAKNVRQMYEKYASGISKPDILEWFSKVSSTNKTVMFIGQILRNPIYVKSNLAVINYLENRGAKQVNADGRRDGAGIFIYGIQKRTSVLYQDLTGGLLQIAIHDGFIPAELWLKVQKRFDSEYSPRNLGKGKRSWVVGLAVCAYCKLHVYTANKYGWLSCGGRKKKLCKLRKPFPKMSTVEEQVEKSLLEFMKDFPFKLNITKKENESRIQALEAEISAIGRQIDMIVETIVCTESGLKASAMQKFKQKLEALTDKSAELEREVYDLRQAGDNTYDSDIKLAEYVSNWQNFSMEEKNRIAKIFIKQVVLRDGEIEIKFII

SEQ ID NO: 10615 - protein, 494 aa, Unknown
  Description of Unknown: Integrase B10616 sequence
  cd00338,IPR011109,IPR038109,PF07508, Coil,PS51736,G3DSA:3.40.50.1390,IPR006119, PTHR30461,IPR036162,PTHR30461:SF3,PS51737, PF00239,SM00857,G3DSA:1.10.10.2600,SSF53041
MNAAIYARYSSHAQREESIDQQVDVCRAWCASQGHDVVAVYADEHRSGRSTEGRENFLRMVDDAKRGEWQLVVVYKLDRFARDRYDAAIYRKRLRDAGVEVRSAMENIPEGPEGRLLEAVVEGVAEWYSADLAQKTLRGMRHNAERCMANGVQVFGYAIVDGAYAVDERQAAIVRRVFAEWAEGIPAAHIARRLADEGVRTARGRVPKKDWPGAIVHDERYLGTYVWGDVRVEGGMPRIVSDAEWVAAHNRPRRPSMAPKRTHDYTLSGRIWDRATGLPMFGYSARGEGGEYTYYGVIEDGRRRLVRQHLVESAVCRAVRSVLSDAALVDDVVARVMDWQRRTLDSPDVLGARATLRSVAAEEERLLDAIQAGVPLDGIRPRVDALNERKRAARALLERREGDSVTEGDVRSAMAGLAAHGTPQAILRHCVAGVVVDRDAQAVVVTLPIADKKRAPTREGVSARSVWQPVGGHVSNVLWLVEGTTVMLRVPLAA

SEQ ID NO: 10616 - protein, 494 aa, Unknown
  Description of Unknown: Integrase B10617 sequence
  cd00338,IPR011109,IPR038109,PF07508,Coil, PS51736,IPR036162,PTHR30461,IPR006119,G3DSA:3.40.50.1390, PS51737,PF00239,SM00857,G3DSA:1.10.10.2600,SSF53041
MYCIYLRKSRNDEGTIEETLAKHEKILLELSKKQKLSISKIYREVVSGETIASRPVMQHLLSELEKELWEGVLVVEVERLARGATLDQGIMAQAFKYSSTKIITPLKTYDPNNEFDEEFFEFNLFMSRREYKTINRRLQQGRLASVKEGRYLGSIAPYGYNKTKTEDGFTLEPDPDEAPVVKMIFDFYTKERLGVSKIVRKLNDIGIKARKGNWTTSTIQGMLKNPVYIGKIRWNYRKTIKHVIDGKVESTRPKNKEFELTDGLHVRLIDDEVFYTALNYINQNRATPAPKNQPIKNVLAGIVKCGLCGRNMVRRPYGNLKQEDTLMCAYTDCKNVSSPLSLIEKTIIDNLKNYKFNKKSQKNIVNTELLEKNMNDIDSEIETLKKQKDSLHDLLEQNVYDTNTFLERSKKLNEKIKKLEENKFNIESELKSFKNQNIIIPKITKLINSYDKISIKDKNEMLKTILIRVEYLKKEKALKKNASHNVDLKLFPRI

SEQ ID NO: 10617 - protein, 494 aa, Unknown
  Description of Unknown: Integrase B10618 sequence
  cd00338,PF13408,Coil,PS51736,IPR036162,PTHR30461,IPR006119, G3DSA:3.40.50.1390,PTHR30461:SF3,IPR025827,PF00239,SM00857 ,SSF53041
MTCAIYIRKSRDDKDKASHRLTVQRQQLPEHARAQGWQVQIYDDGHASAARGKVEDLRERNRLESDIRNGLINIILSIELSRLSRDESMQDYVSWLHLCAEHGVKLATMTRTLDPAQPSDWMLLLMEGGFSSVEMKVLQSRMKEGRLQALREGRHLGGGIAPPYVYDKSSKQIRIDQDQLREIDHILTLAETHSARAIAQQVNRPEISIRRILSDNRLLFYQALREDPETGEMIQGDWPAIIDAERAARIRAGRRTRRTNAGRREYGALLSNLGILYCGYCGRTAKTWANSRTRKDGTRLDYYGCQVKNSQGACTNSRLIAQPELERRVLDCLFRNVADSAALADAWDAEQAANNPRQEIERLTQQLQKEQAKKQRLIAAITEGIIDFAEAKDQKRTIDTAIEQLQAQLKTARAADTTSPDWDAICIHPEEFSQLAPADQRDYLTLVIHKIRLYNAYALVDFRFPRLTGDRTARVKLPPISRGTRKGLAPRYKA

SEQ ID NO: 10618 - protein, 494 aa, Unknown
  Description of Unknown: Integrase B10619 sequence
  cd00338,PF13408,Coil,PS51736,G3DSA:3.40.50.1390, IPR006119,IPR036162,PTHR30461,PTHR30461:SF3,IPR025827, PF00239,SM00857,SSF53041
MKATTAAIYIRKSREEKDKPSHRLTVQREQLPAHARAQGWTPAIYDDGHASAARGKTESLPERARLERDIRAGKINVILCIELSRLSRDDTMQDYIAWLTLCADHRVKLATPSRSLDPAQHSDWMLLLMEGGFSSVEMKVLQSRMKEGRDEAYRAGKFLGGGCPPPYIYDKAQGRPVVDPELLQQMTQIWTMAETMSARSIASELGRAESFIIRSLSDDRLLFYQAKRVDQQTGELIPCDWQPVMTQEQAKQIKVARSTRHNKTKGVKKHPAALLSNLGIMFCGYCGRTIKTWYNTKERADGSRLNYYGCASKDTRLKCDRARLIAQDVIDFYATTNIFNTLENLEELKGIWEQQQGRVNSGEELKRINEEKKKNEEKKKRLITAITNGIMNLADAKGAMDEIKAKIETLQHRADQIADIIKSPPNWDAIDLTREDYNQLDRINRREFIRTIITRIDIYNMHAIITYTFPRKPDGTATAKINLPATHRGKRIDK

SEQ ID NO: 10619 - protein, 494 aa, Unknown
  Description of Unknown: Integrase B10620 sequence
  cd00338,PF13408,IPR011109,IPR038109, PF07508,PS51736,IPR036162,IPR006119, G3DSA:3.40.50.1390,PTHR30461,PTHR30461:SF3,PS51737, IPR025827,PF00239,SM00857,G3DSA:1.10.10.2600,SSF53041
MKRGAVYIRVSHLKDDGVSPETQMEKAQLQASLSSIDIVKVYEDLDISGRSATKRIGFQQLIEDVKGGKYDVVLVYRLDRFARNVRDFHHYVEVLEKNNCSLISISQSIDTGSPTGRLLRNILIDFAQFESEMISERVRDNMVQNARRGSWNGGQKAYGYDWDDEQKLLVPNDNAKWVLLMFEEYASNPGANRIRNLLYQNAVQAPSDGKWWAPTTIRYILRNSVYIGKIEYAGEVVDGKHQPIISQDIFDRVQHLLSKNSEMAPRSRDSQHLLSGLLICPYCGRHLQARFNGKKRIRRYMCYTRINMGVNECKCKILDADSLETEIINTVLTLGDSLGYFEDAKQSLKEVATAAAEEKPIIDKMEKEKRLKKIRSAMKDLFKDYYEEKIIPREQFMEINKQYLEEESQLVNYLEKLDQIDNHFAAQAADIDLLQRQLSALRTAWTLMTFEERKMSLRDIIKSISPYTDYIEMDIFFRKIEIIPQKNTETTMSF

SEQ ID NO: 10620 - protein, 493 aa, Unknown
  Description of Unknown: Integrase B10621 sequence
  cd00338,IPR011109,PF07508,Coil,G3DSA:3.40.50.1390, IPR006119,IPR036162,PTHR30461,PTHR30461:SF3,PF00239, SM00857,SSF53041
MRAMDEWAVRNNRRLLPPVCDINKSGRTFRKRSVDKIIAAIKDGHYRHVVLWKWSRWARNQAESAVYSSYVHSAGGRVDSATEDFDLDTAIGRLGQGMTGVIDQYQSELISESWSSVHALRREDGLPHGGRERFGYAYGETVVNEERRKRYTKNDEAPILIKAYCDWLDGKSFIKIAQELNAATFVTMLGGRWTPQGVARMMDTGFAAGLIRERSEGMKEKIRGKQVGANSILSYDIWRTGSHEAVIEASIWDTYKARRVAASGLPPRSKAPVHALSAIMFCTECRRRLTTKYAGAGRTHQWQCPWQKSFHPGVAVTVNNRLALVAVREWVRAEIGDELPVAKATNTAREEQAKRLADAQTHRRALSNRIGELEGMINNLTIQIATSSPSVAARFISSIEVWDSEIDQLRAELARSAPRPRAQKDQEALRALDAVWGELPPSVLHEALAKVISRVEVSPRSEISTRASAADRVSAIGVWEDPSTDEWLASRPA

SEQ ID NO: 10621 - protein, 493 aa, Unknown
  Description of Unknown: Integrase B10622 sequence
  IPR038109,PS00397,IPR006119,PS51737,PF00239 ,G3DSA:3.40.50.1390,PTHR30461,IPR025827,SM00857 ,G3DSA:1.10.10.2600,SSF53041,IPR011109,PF07508,PS51736 ,IPR006118,cd00338,PF13408,Coil,IPR036162,PTHR30461:SF3
MSVKYAYGYIRVSTHDQEEISPDSQEHLLRDYAAKNNIVIIKIFTDLGISGRKANKRPSFQEMIGLAKGDDHPVDQILVWKFSRFARNQEESIVYKSLLKKQHNVDVVSVSEPLSDDPFGSLIERIIEWMDEYYSIRLSGEVHRGMKENALRGAYQARPPLGYKIVEHGKPPAIVPEEAKIVRTIFEKYANEGMSFFDIARYLNSLGLKTSHGKPFERRSVEYIIQNPSYCGMIRWNRTENSTNRIKDKDEWIVTEGQQPAIISKELFESAQERFKATYKPVGKRPSSTYKHWLSGLLKCPDCGRTLTSTTMKRVNGEKYSYFSCYGYSKGKCKKPNGISSLVLEKEVLASIKEILDTKDIVYELREYQPTEQFDERKAITEQLESLTGKEERIKASYREGIDTLEEYKANKAIIQKERESLEQQLKELKKAAHKSDPDPADAMLQKVRSVYDILISNNYTYVQKNEALKQIIDKIIYDRKNDSLKIYFFLYR

SEQ ID NO: 10622 - protein, 493 aa, Unknown; identical to SEQ ID NO: 10035
  Description of Unknown: Integrase B10623 sequence
  cd00338,PF13408,IPR011109,IPR038109,PF07508, Coil,PS51736,IPR036162,G3DSA:3.40.50.1390,IPR006119, PTHR30461,PS51737,IPR025827,PF00239,SM00857, G3DSA:1.10.10.2600,SSF53041

SEQ ID NO: 10623 - protein, 493 aa, Unknown
  Description of Unknown: Integrase B10624 sequence
  IPR038109,PS00397,IPR006119,PS51737,PF00239,G3DSA:3.40.50.1390 ,PTHR30461,IPR025827,SM00857,G3DSA:1.10.10.2600, SSF53041,IPR011109,PF07508,PS51736,IPR006118, cd00338,PF13408,Coil,IPR036162,PTHR30461:SF3
MKETLSERKTGAIYIRVSTDKQEELSPDAQLRLLMDYAKTNHTDIPMEYIFQDNGISGRKADKRPAFQQMIALAKSKEHPIDTIIVWKFSRFARNQEESIVYKSLLKKNNVDVVSVSEPLIDGPFGSLIERIIEWMDEYYSIRLSGEVMRGMTQNALRGHYQGDAPIGYQSPGNKKPPEKDPKTIQIPIMMKDLLLSGSSLLQIARKLNEHGYRTKHGNLWDARGVRYVLENPFYAGISRWNYTDRGRQLKPADEVIYTKGNWEPLWDKATLEEIKKHLAMNMRKTKSRDVSAAKHWLSGLLICSSCGGTLAYSGTKNSRGFQCWKYTKGFCNESHYIGIRPIEKMVIEYLESILHSPAIVYTVISSASADADSKLADLEKQLQKVENKEKRIKAAYLNEIDSLEEYKANKAALLKERAAIEKNIKLLTISNTDMSKEEMDKKMKQNISALLTVLQDDSADYVQKGNMMRNVVDHIVFDRGNTSLDMFLKLVI

SEQ ID NO: 10624 - protein, 493 aa, Unknown
  Description of Unknown: Integrase B10625 sequence
  IPR038109,PS00397,IPR006119,PS51737,PF00239,G3DSA:3.40.50.1390 ,PTHR30461,IPR025827,SM00857,G3DSA:1.10.10.2600, SSF53041,IPR011109,PF07508,PS51736,IPR006118, cd00338,PF13408,Coil,IPR036162,PTHR30461:SF3
MSVKYAYGYIRVSTHDQEEISPDSQEHLLRDYAAKNNIVILKIFTDLGISGRKANKRPGFQKMIGLAKGDDHPVDQILVWKFSRFARNQEESIVYKSLLKKQHNVDVVSVSEPLSDDPFGSLIERIIEWMDEYYSIRLSGEVYRGMKENAIRGAYQARPPLGYKVVEHGKPPVIVPKEAKIVQTIFEKYVNESMGFFDIARYLNDLGLKTSHGKPFERRSIEYIIQNPSYCGMIRWNRTENSTNRIKDKDEWIVTEGQQPAIISKELFESAQERFKATYKPVGKRPSSTYKHWLSGLLKCPDCGRTLTSTTMKRVNGEKYSYFSCYGYSKGKCKKPNGISSLVLEKEVLASIKEVLDTKDIVYELREYQPTEQFDERKAITEQLKSLTGKEERIKASYREGIDTLEEYKANKAIIQKERESLEQQLKELKKAARKSDQDPADAMLQKVRSVYDILISNNYTYIQKNEALKQIIDKIIYDRKNDSLKIYFFLYR

SEQ ID NO: 10625 - protein, 493 aa, Unknown
  Description of Unknown: Integrase B10626 sequence
  IPR038109,PS00397,IPR006119,PS51737,PF00239,G3DSA:3.40.50.1390 ,PTHR30461,IPR025827,SM00857,G3DSA:1.10.10.2600, SSF53041,IPR011109,PF07508,PS51736,IPR006118, cd00338,PF13408,Coil,IPR036162,PTHR30461:SF3
MKEKVSERKTGAIYIRVSTDKQEELSPDAQLRLLMDYAKNNHTDIPMEYIFQDNGISGRKANKRPAFQQMIALAKSKEHPIDTIIVWKFSRFARNQEESIVYKSLLKKNNVDVVSVSEPLIDGPFGSLIERIIEWMDEYYSIRLSGEVMRGMTQNALRGHYQGDAPIGYQSPGNKKPPEKDPKTIQIPIMMKDLLLSGSSLLQIARKLNEHGYRTKRGNLWDARGVRYVLENPFYAGISRWNYTDRGRQLKPAEEVIYTKGNWEPLWDKATLEEIKKHLAMNMRKAKSRDVSTAKHWLSGLLICSSCGGTLAYSGTKNSRGFQCWKYTKGFCNESHYIGIRPIEKMVIEYLESILHSPAIVYTVISSASADADSKLADLEKQLQKVENKEKRIKAAYLNEIDSLEEYKANKAALLKERAAIEKNIKLLTISNTDMSKEEMDKKMKQNISALLTVLQDDSADYVQKGNMMRNVVDHIVFDRGNTSLDMFLKLVI

SEQ ID NO: 10626 - protein, 493 aa, Unknown
  Description of Unknown: Integrase B10627 sequence
  cd00338,PF13408,IPR011109,IPR038109,PF07508, PS51736,G3DSA:3.40.50.1390,PTHR30461,IPR006119,IPR036162, PTHR30461:SF3,IPR025827,PF00239,SM00857,G3DSA:1.10.10.2600, SSF53041
VRAAGYFRVSTEQQASADRNSLDLQAAAFRARCAERGYEVAGTFSDVMSGRKNARPEYQRLLAAARAGAFDVIVVTWLDRFGRNDREITMRVLELQDAGITVEPTEEAIPDFITLVLQAWKAGQEVERIAARTSDGLLAAASKGAALGKAAFGYRRRWDLDQDDRRVNFRFEIFEPEARLVRWVFEQYTFHNASLRGLCYALQQQAGPHLHGLWVPREVAMLLDRERYTGVYTYNARANSRRAAVEVRIPGAIPAIISRDLFDAAQARRHTKAALPAGRTQTSTFLLSGILKCGHCGGPMHGAQNWQRRKRDRTGERVQYPFYSCGWHRRQRGCEFLNLHMTHVLDEAVVAFLEDVAGNVARVRDEIGERSTLAQVQLLDVKKALAEVDAKFERTMRLFFAGSISSEEQLGATNRILDGEKRRLTLERDRLLEAIAATAARQREVAELPEDMGVIVDPRASIQDRKTLVQRYIARVEVWNGEPIPRIYPRFFE

SEQ ID NO: 10627 - protein, 493 aa, Unknown
  Description of Unknown: Integrase B10628 sequence
  cd00338,IPR011109,IPR038109,PF07508,Coil, PS51736,G3DSA:3.40.50.1390,IPR006119,IPR036162,PTHR30461, PS51737,PF00239,SM00857,G3DSA:1.10.10.2600,SSF53041
MTTNTYSIPCKEEKVKCVFYGRYSSAAQTEQSIEGQRTVCAEYAERENMCIVAEYTDRAKSGTSDRRPEFQHMISDIESGKIDTQAVLVYKLDRFARNRADSAIYKRKLKEMGIRVISATEPLTDTPEGIILESVLEGMDEYYSMELARKTRRGKEESLKKGYFINWKAPFGYSVADRELIINPVDAEAVRDIFNRYAEGQPLSRIAKDYKEIIPSKFWDGGIISRILHNRIYIGEYRYGTHDTIGKVPAIIDTDLFERVQALLAESLNKQRKRQGQYEYLLTGRFWCEKCHKRIRGSQGSTNKTHYYRCPNCGHHQRADEVHKRVFQALSERFNDSVVEEVAQAAYEQYQECAMPDTELVLQAQLDSINEKLDNATTAILNGLYNPVLHAKIENLQAQKESLEEKMQTATKTKKYTLTQFKTALTHIAQNPPAQMLKLFVSYVVRRNDDLIICIDLSGEGNHSEVGWEELSMIVGMSNLATINNKPCIILAA

SEQ ID NO: 10628 - protein, 493 aa, Unknown
  Description of Unknown: Integrase B10629 sequence
  cd00338,PF13408,IPR011109,IPR038109, PF07508,Coil,PS51736,G3DSA:3.40.50.1390, IPR006119,PTHR30461,IPR036162,PTHR30461:SF3, PS51737,IPR025827,PF00239,SM00857,G3DSA:1.10.10.2600,SSF53041
MNAVIYARFSSSAQREASIEQQINVCMAFAEREGYNVLQTYADRALTGRTDRRPQFLQMIKDARKGRFCAIIVYALDRFSRDKYDSARYKHELRQNGVRVVSATEPISDNPSGILIESVFEGLAQYYSAELAQKIRRGYEDNAKKCLASGSVPFGFRRSADGHYEIMPEEAEIVREIFRRVGSGETYADICRDLNARGIKTRHGSAWNRSSFNTLLSNQRYIGTFISKYHIQEDAIPQIVDKDLFYKVQTISHTKTGPRRTPNGYYSLTGKLFCGLCGDTMTGTSGTSKSGKLCFYYTCHGHRAHKCDQRSRPRDQLEDTICRAIWDDVLSDDSIRWMAHQTILDQDKLRADSDLEIVRLSLAEVQTQKANILNAIKAGIFTNTTKDELLRLEREEADLTEKVKEGEKLLDDQPTEDDIISFLELFREGYTDPEFTRSGLLDAFVTRAEVYENKILVYFRIKKEDRQKYADLPSVPDECSLSTVKWTCGNSKR

SEQ ID NO: 10629 - protein, 493 aa, Unknown
  Description of Unknown: Integrase B10630 sequence
  cd00338,IPR011109,IPR038109,PF07508,Coil, PS51736,IPR036162,IPR006119,PTHR30461,G3DSA:3.40.50.1390, PTHR30461:SF3,PS51737,PF00239,SM00857,G3DSA:1.10.10.2600, SSF53041
MSGDSLNRQRRLIAEWLKVNSDYYLDTITYEDLGLSAFKGKHAQSGAFSEFLDAIEHGYILPGTTLLVESLDRLSREKVGEAIERLKLILNHGIDVITLCDNTVYNIDSLNEPYSLIKAILIAQRANEESEIKSSRVKLSWKKKRQDALESGTIMTASCPRWLSLDDKRTAFVPDPDRVKTIELIFKLRMERRSLNAIAKYLNDHAVKNFSGKESAWGPSVIEKLLANKALIGICVPSYRARGKGISEIAGYYPRVISDDLFYAVQEIRLAPFGISNSSKNPMLINLLRTAMKCEACGNTMIVHAVSGSLHGYYVCPMRRLHRCDRPSIKRDLVDYNIINELLFNCSKIQPVENKKDANETLELKIIELQMKINNLIVALSVAPEVTAIAEKIRLLDKELRRALVSLKTLKSKGVNSFSDFYAIDLTSKNGRELCRTLAYKIFEKIIINTDNKTCDIYFMNGIVFKHYPLMKVISAQQAISALKYMVDGEVYF

SEQ ID NO: 10630 - protein, 492 aa, Unknown
  Description of Unknown: Integrase B10631 sequence
  cd00338,PS51736,IPR036162,IPR006119,G3DSA:3.40.50.1390, PTHR30461,PTHR30461:SF3,PF00239,SM00857,cd03768, SSF53041
MAWYVYVRMSHRSSAYSGISENSQILACMEYISSCNVGEQIGKHKFPNDVPDGVFVDRGKSGWSRSIDARGAGVELLRVLKPGDHIVFYNVERAFRHTINCLTWVGRWLEQGITPHFATEKIDFSTAGGRFVGSVIAAAAQYYSDLISERTKEALAIRRSRLGLTVKTKLVKNAPRICSIKQHAPPASERELDTDIPKALIYNRVSHLDQSISGLSMDAQREENLKLASRIGIPDAAVFEDESISAFSKPFSSRPGAIRLLTDLKRGDHVIIYRVDRAFRNIRDACQIEKQLRDLGVTLHITREGIDTSNEYGRMFFQILSMFAELESSMKSQRQKENAKARRHRGDFLGNVPRHLKVIGSGSNRVVVHDYDAIVDCFTVALLIDAGFPIEQAARILDTDKALSSSYLRKGRFYRNNIRPAIATLPKAVCQVLMERAICQIKYPNERTWRLNNVEKYSYPVRDIEDRLAAADISPELRDLLPSHLQFAIAQA

SEQ ID NO: 10631 - protein, 492 aa, Unknown
  Description of Unknown: Integrase B10632 sequence
  PS00397,IPR038109,IPR006119,PS51737, PF00239,G3DSA:3.40.50.1390,PTHR30461,IPR025827, SM00857,G3DSA:1.10.10.2600,SSF53041,IPR011109, PF07508,PS51736,IPR006118,cd00338,PF13408,Coil,IPR036162
MAVIFLQISHTFYKGDDIMEQLKYAYGYVRVSTGKQDELSPESQERLLKDYARSNNIVLLDTFFEHGISGRRADKRPEFQRMIGMAKSKEHPVDLILVWKFSRFARNQEESIVYKSLLKKQNNVDVVSISEPLIDGPFGSLIERIIEWMDEYYSIRLSGEVLRGMTEKAMREGYQIAPPLGYDAVGNGKPFAINEDKYKIVSLIFDEYDNQNSDFTKIARKLNALHYLTQRGKPFEARSIKRILQNPFYYGLVTWRDISFIGSHEVRLTKEQFEQRMDKMQRNFKPARRRDVSACKHWLSGLIKCGYCGATLAWNGGNPHSPGFQCWQYSKGIHKESCSLSVSKATAAVYEYFEQILSGMDFKYKYHAPETPQKIDRRTQLLEELEKLSTREARIRLAYENEVDTLEEYKENKKRLNLARIDLHNELDNLETSSEANELSREDVLSKVRTVYDIIKDDSVDYETKGVFMRSLIEDIVYDKKNGQMIFTLYIS

SEQ ID NO: 10632 - protein, 492 aa, Unknown
  Description of Unknown: Integrase B10633 sequence
  PS00397,IPR038109,IPR006119,PS51737,PF00239,G3DSA:3.40.50.1390 ,PTHR30461,IPR025827,SM00857,G3DSA:1.10.10.2600, SSF53041,IPR011109,PF07508,PS51736,IPR006118, cd00338,PF13408,Coil,IPR036162,PTHR30461:SF3
MNKPIVHRLRVALYVRVSSHEQIEGYSISEQTERLQKYAEAMGWDVYKIYVDPGFSGGNTDRPALTEMIRDIKNGDIDKVAVYKLDRLSRSQKDTMILIEDVFLAHNVDFVSMNENFDTSTPFGRAMVGLLSIFSQLERENIKERTMMGKEARAKEGKWGGGSSEPIGYNYNPETEELEINEYEKMQIMEAVDLLFKGTPLRTITNTLNNKGYTYRGRSGIVNNWEAKRLKYVFRNKTYLGYIKYAGQYYKGNHEPIYDEETFAKIQAILDMRDEEHAGKYTKTRKQSTYLGGMIYCKHCGARYCRQAGKKWKDGEPPLYYSCYSRNKSVPKMIKDPNCKNKNWRMPDLDNIVLGEIKKLAVDPEYFHTIVKDETAKKDAPTKIDTIKKEIQTLDEQISRFMDLYGLGTFTIDQVSEKVNPLNDQRKKLNRELEILNAEAGVISEEETREIVETFDEVIEHGDLDEIRLLISSLIYYIELDNDDVYIYWKFA

SEQ ID NO: 10633 - protein, 492 aa, Unknown
  Description of Unknown: Integrase B10634 sequence
  cd00338,PF13408,IPR011109,IPR038109,PF07508, Coil,PS51736,IPR036162,PTHR30461,IPR006119, G3DSA:3.40.50.1390,PTHR30461:SF3,PS51737,IPR025827,PF00239, SM00857,G3DSA:1.10.10.2600,SSF53041
MIRAVIYARYSAGPRQTDQSIEGQIADCKRYAESHDMVVTEIYADKHISGKSTEGRDEFLRMIEDAKRKQFEAVIVWKVDRFGRDRTDIAIYKRELRKAGVQLCYAAESVPEGPEGLILESLLEGLAEYYSADLRQKVTRGMKESLKKGQWPGKCPYGYGKDKDKHVIIIEEEAAVIREIYRLCCEDYSIAEIVRSLAAKGIYKKNGSVYRILTNRHYIGEFEMMGLSIDVPGIVSEEEWDMAQTKLKSTAKNGGADANYLLSGKCICSECGSVLTGTHGTGKSGKKFYYYHCPKKCIKPMPKERYEMMILEECREFTLTDELIEQITDRIMELQEADLPHAEIKHVEAQIRDFTKRMNNLTNSIEQGVPADVVMPRIVDYRQKITDLSVELEKMKIKKPLIPRDYLASWLRSFRDGDVADDNFCRRVIDTFIEKVIVYPDHSVIVLNVSGDKTSPECSNLSRFVNLTKQRSNTEKVLLDLPYALLWVESIC

SEQ ID NO: 10634 - protein, 492 aa, Unknown
  Description of Unknown: Integrase B10635 sequence
  cd00338,IPR011109,IPR038109,PF07508,PS51736, G3DSA:3.40.50.1390,IPR036162,IPR006119,PTHR30461,PTHR30461:SF3, PS51737,PF00239,SM00857,G3DSA:1.10.10.2600,SSF53041
MNVAIYLRKSRADENNPLETLERHKEILLSYAKDNNLTVIDIFEEVISGGMLYNRTEMLKLLDAIPSHIYDAVLCIDLDRLGRGSAADSEKIFDVLKENDVKIITLKKIYDLNNEYDEDYSEFEMFMARKELKFITRRMNRGRIKSINDGCFVSGAPFGYRNAVINKKHTLEVYEPEAKYVRMIFDMYVNQSMGITSISRHLANLGVLSKKNTPLHPTTIARMLRNHTYIGKIVWNKSKSVKGKNTQEKTSKDDWLYVPGLHEPIIDEDTFNKAQDIINLKYKPPMRTGTLQNPFAGLLKCANCGRAIVINTSNETVEKYRLCCRTLGCNKASALSIVEDKVFEVLTKEFKDIELSLKNIRQSHNKDKLSCLDTIATLETELKKLDKQQLRLYDLLEQEVYTKELFIERNNAISDRRKKINATIAQEREKFKLVDTSSIEERLPLLRELLTNYHSLSAAEKNSILKNFVKKIEYKREKSAPEGDIFLKIYYK

SEQ ID NO: 10635 - protein, 492 aa, Unknown
  Description of Unknown: Integrase B10636 sequence
  cd00338,PF13408,PS00397,PS51736, IPR036162,IPR006119,G3DSA:3.40.50.1390,PTHR30461, PTHR30461:SF3,IPR025827,PF00239,SM00857, IPR006118,SSF53041
MPRRRNSRSARATVRPLQAGDEVWAYLRVSTGKQAEAGLPINGQREAIEAYCQARAYRLTRTYSDEGISGTTDHRAQFQTMVDEAQALRPRAIILWSWSRFSRDQNDAAFYKALLRRHGVDLLTVEDEVPNVEGFGNILEALIHWRDERENVARGQATKRGHHALAHLGYHPAGNGNCPVGYRAATVLVTIAGREGERRRIELDPALAPMVRRAYEMRLAGGNFEAINEACQLFAHPNDLGAMFRNPTYHGRYHWGDTEVAVPAIVTEAEWQRVYDGLSRGRGGAYSRTRASDYLLSGLVWCGVCGARMKGHSCSPRGRRWHYYRCFTPDCIIRGIPRAELEAAVTERLITRYLTPRLVADMEERARQHQQDSGQQERIAALRAEVRLHDKAITNLVSALERAPDTRELTERLRQRGQERGRLLSKIAALEHSVPTVPSVEDVLGLRERLKQALVDGERRLARELIRQCVERVTVEGSREWRVKWRLLVCPR

SEQ ID NO: 10636 - protein, 492 aa, Unknown
  Description of Unknown: Integrase B10637 sequence
  cd00338,IPR011109,IPR038109,PF07508,PS51736, G3DSA:3.40.50.1390,IPR036162,PTHR30461,IPR006119,PTHR30461:SF3, PS51737,PF00239,SM00857,G3DSA:1.10.10.2600,SSF53041
MNVALYLRKSRADENNPLETLERHKEILLSYAKDNNLTVIDIFEEVISGGMLYNRTEMLKLLDAIPSHIYDAVLCIDLDRLGRGSAADSEKIFDVLKENDVKIITLKKIYDLNNEYDEDYSEFEMFMARKELKFITRRMNRGRIKSINDGCFVSGAPFGYRNAVINKKHTLEVYEPEAKYVRMIFDMYVNQSMGITSISRQLANLGVLSKKNTPLHPTTIARMLRNHTYIGKIVWNKSKSVKGKNTQEKTSKDDWLYVPGLHEPIIDENTFNKAQDIINLKYKPPMRTGTLQNPFAGLLKCANCGRAIVINTSNETVEKYRLCCRTLGCNKASALSIVEDKVFEVLTKEFKDIELSLKNIRQSHNKDKLSCLDTIATLETELKKLDKQQLRLYDLLEQAVYTKELFLERNNAISDRRKKINATIAQEREKFKLVDTSSIEERLPLLRELLTNYNSLSAAEKNSILKNFVKKIEYKREKSAPEGDIFLKIYYK

SEQ ID NO: 10637 - protein, 492 aa, Unknown
  Description of Unknown: Integrase B10638 sequence
  cd00338,IPR011109,IPR038109,PF07508, Coil,PS51736,G3DSA:3.40.50.1390,IPR036162, IPR006119,PTHR30461,PTHR30461:SF3,PS51737, PF00239,SM00857,G3DSA:1.10.10.2600,SSF53041
MPKRAVIYARFSCNRQREASIEDQLRVCREWCAREGYEVAAEYCDRAVSGRTDDRPEFQRMIANAGESEIVLVYMMDRFSRGEYDAPIYKRELATHGVKLVSALEQIPDSPEGIIYEKLLEGLAACESRKTAIRTKRGMEGNALKCKTNGVRIFGYRRNGDDEYEVDEAQAAWVREAFALRLERMSMNAIAREFARRGLRTRKGNPCGQAMVQQMLRDRRYTGRYEWGGIVREGGMPQIVDEVTFMEVQGIKCRKQRSSENWGDFALAGAALCAECGRNLQGVSGRGRNNVKYEYYSCPGSCVRNIRREELEGSIASALRELLGDRGEALQIANMVAERADTAEVRARRRQAEDSLRAAERGLRNILNAIEQGVIAPGVNERIAELEEQQARARYDLEAITDERIDPERFADFLQCGTALDDATLLKAFVWQAVVSEDEILVTLNYDKKGEPARLDIQRVRAKLEWCPICLDSRTEICAVGTVVLLRIPRAA

SEQ ID NO: 10638 - protein, 492 aa, Unknown
  Description of Unknown: Integrase B10639 sequence
  cd00338,PF13408,IPR011109,IPR038109,PF07508, IPR036162,IPR006119,PTHR30461,G3DSA:3.40.50.1390,PTHR30461:SF3, IPR025827,PS51737,PF00239,SM00857,G3DSA:1.10.10.2600, SSF53041
MTSPMTRAVVLDAVVRVSRRNGRIGEAFMSPTDQRDAIERYAAQHGATIADWHDETDSVSGKTVERAGLQAALDRALTGQVDGIIVAKLDRFARSVTGGLSAIGRLEAAGKLLWSAREGVICGDAPANAMETLMRTIWLGLAQWQLQTLTEGWESTRANHIGRGVANHAPYGYRKGEDRRLLPRPGEAEWVPLIFERRADRWSWGRICDWLTAEGARPRRGGGAWSISTVKQLIANRVYLGELRSGEIVNLRAHEPLVTPSQWERANKVGGARKRREAEPYLLTGIIRCASCGCRMFGMTDRRYTNAAGELSIYRQYRCRGRHGAWGTCPAPARVDADEVEALVCDEFRRLFLIGGAIPTDATTEVDAATAALEAADAELESFVTTAAALDTELFAKGVEARTERRDFARLRLSEARSHAVGVALPVGLDDVWDSYGIPERRPYVAAAFAVVAASRGTEPVTDRVRVWVTGTDVPSPLPGVDGWSQLTPIRS

SEQ ID NO: 10639 - protein, 492 aa, Unknown
  Description of Unknown: Integrase B10640 sequence
  cd00338,PF13408,IPR011109,IPR038109,Coil, PS51736,G3DSA:3.40.50.1390,IPR036162,IPR006119,PTHR30461, PTHR30461:SF3,PS51737,IPR025827,PF00239,SM00857, G3DSA:1.10.10.2600,SSF53041
MRVVGYIRVSRVGKRDGERFISPAEQRKAIVAWADLHGHSIVEVIEDLDQPGTKRDRPGLERALGLIEASRAQGVVVAKLDRFGRSVPHLGQLLDLLARHDAALFTVAEGIDTSGRAGRMIATILSAIAEFEVSRIGETWFQARENAVSRGVWVRWTVPLGYEKDADGRLHPDKAAPLVREVFLRRAGGESWTALARWLGDQLDMPISTQRVRYLIQSRAYLGESFGDQGIENLEAHEPLVSPSEWEAANGVRGSRPRRSGRATRPLTGLARCASCRYALKPSVRGRTGAVDYVCKTNAKQSGSQTCSGPVGIAADKLDTYVLEAFWDFAEAARMRRADPSERISVALADLERAEQRRDAAVSDRLGDILGPGGDAHLAVIDKAQVEVERCQAIVDELTASEVDLPDVDLRAEWGNFDVEQQRQLLASTIDCVFLRRSARPGPGTPTGERVHICWRGSGPTLPRPGVLWVPRPYDFPPPLGVPLGHDGDQGT

SEQ ID NO: 10640 - protein, 492 aa, Unknown
  Description of Unknown: Integrase B10641 sequence
  cd00338,IPR011109,IPR038109,PF07508,Coil, PS51736,IPR036162,IPR006119,G3DSA:3.40.50.1390,PTHR30461, PS51737,PF00239,SM00857,G3DSA:1.10.10.2600,SSF53041
MHGILYLRKSREDEQYEKNTGEDVLQTHRERLVMLCKSREITFDERAEVRSGDTIAGRPKFQNILDTDLPSGQYSCIIVTEISRLGRGDMEDAGRIYKTIIHNEIKIVTPNKIYDPLNPSDLRQLRFELFMSREEYESIKERLWNNRNYRATQGYAGNYIVTLGFRQSRGIVEIIPEEEKLVLEIFTMRSENYSYQEIADYFNSRNLKTKRGTKYHESTIYKILKNPRYIGVAKWQGKEYIAKHPAIVSLDLWNSAQDINAERHHKRRGSKNDNPYLVELYCRECGQRMYGERSTPQRVIDGVRKLYKSRDIYICRGRKSIPKCWHHIGASVVHSTILDELGKIISDPQIFLELVNERESRLGVDTNGLSDQVDELNKQVKDKNILLVKIENDYEKGDLSALLYTKHVEKISKEIASIEGRIKKIKADLLKSAIKISPPMELQSILKTFLNNWNAYPNSDKKLIIRSFLPRVEVNKQGEFFIAITLPDSIEI

SEQ ID NO: 10641 - protein, 492 aa, Unknown
  Description of Unknown: Integrase B10642 sequence
  IPR038109,PS00397,IPR006119,PS51737, PF00239,cd03768,G3DSA:3.40.50.1390,PTHR30461, IPR025827,SM00857,G3DSA:1.10.10.2600,SSF53041,IPR011109 ,PF07508,PS51736,IPR006118,PF13408,Coil,IPR036162,PTHR30461:SF3
MVMTKTTNYIKKVRVAIYVRVSTQEQAKEGYSIGEQIDRLKKYAEVHDYVVVKIYTDAGHSGGNMERPALQEMIADIMGGKIDKVCVYKLDRLSRSQKDTMTLLEDIFLENNCDFESMTEKFDTSTSFGRAMIGILSIFAQLERENIKERMSMGMHARIKEGKWRGGAHVPFGYDYEPALEKLVTNEYEAMIVKNLFEAFAEGNSLYSIAEDMREKGHVLHNGKVDNRNLRYILRNKTYCGYMRHLDEWIKGLHDPIIDEETYNKAQVILDENKRRFEEAGYKTGTEAHSTNLGGLIYCSWCGAKFSKNQTGTKEYGFHHYYGCYSRHKKIKSMIKDPSCKNKYWKIDELDNIIFNEIKKLAIDPEYLHSIKQKNSQTDEAKQIHAIESQIKSINGQLSRFMDLYGIGKFSIEEIQEKSAPLQDQRTKLQIELKRLQEDKKKMSEEQVLQLVQSFNDVLEHGDLNERRSIIEALIERIDIDCNDVTIHWNFI

SEQ ID NO: 10642 - protein, 492 aa, Unknown
  Description of Unknown: Integrase B10643 sequence
  IPR038109,IPR006119,PS51737,PF00239,G3DSA:3.40.50.1390, PTHR30461,IPR025827,SM00857,G3DSA:1.10.10.2600,SSF53041, IPR011109,PF07508,PS51736,mobidb-lite,cd00338, PF13408,Coil,IPR036162,PTHR30461:SF3
MDKAVGYVRQSKERKDRDSISPETQIEKMKQYAVFEDDEIIDVFKDIDISGFRIHYSKRTGLKELFDYLKQNDVKKVYVYALSRLSRRIKEFIEIVDMLEEQGISVISVTEKTDMSTPQGRLFRNILLSFNEYYSDSLSSTITDNHRKNVQLGKWNGGNVPYGFTWDKSNMIFNKNDDFKHLELIIKKAKEGWGVKKISNYLNARKIKSPGGKAWSNQSVKYILSNSFYRGSLNYDGESYQSELVDKIISNEKWEIIQKNLSRYKDLGPKGKVSPHLLTGLLKCNICGSRFEIRYNGSTKVRRYICSGRQYRQDCTSYLIDADSLELSILKHIERLVKSSYFDEIIETHANTSKPLEKDVTREIRRLEVELSKVVQAQEDIYEETFVNRSIKKERFFEMNKMFDKQREELENEIKSLYKELDKTDTTYILDYKKELFNFIDLFYELSKDEQRLALHDVVEKIEVTKEEIKVFLPVSETEIKSSSIIRRTMFF

SEQ ID NO: 10643 - protein, 491 aa, Unknown
  Description of Unknown: Integrase B10644 sequence
  cd00338,IPR011109,PTHR30461:SF21,PF07508,IPR036162, PTHR30461,IPR006119,G3DSA:3.40.50.1390,PS51737,PF00239, SM00857,SSF53041
MPRQADLHVPKRARILARLSEADDEENGNGSKGINDQIDDLRAEAARMGWTVLEPPVVEDGVSAFKRRRVTLSDGRKVYRVVRPALAKLLDELTSGVADGLLAYDIDRAFRDPQDLEDLIMVVEMSRPRIPVRSLTGSLRLDNDADITMSRIHVVMANKSSKDTGRRVSRAKLRQALNGEYGGGRRPYGFEADGVTPRPSEVAEIVKAGEEILTGVSLKAIVRDLNARGLVTVTGTQWTSDGLRAVLLRARNAGLMVHRGEEVGPAPWDPLVPEDQWRVIVAKLTDPARKTSPGPAPRWLGSGLYQCGVCGSGLRVHTFGYDATRQPTYRCQATGGGHVARTVASLDAAVVDTIVRWMTSQDVSELVLPRTEGVDVAALRMEVMTLRASLDDLGAMYVDRTIDKRQLESGTKRAHVRMEELQRTLEGATATSPLVSLAGALDVRAAWEALPLGSQRRVIEELMTVTVLPIPEGGRGLSPDTLRIEPKKGGS

SEQ ID NO: 10644 - protein, 491 aa, Unknown
  Description of Unknown: Integrase B10645 sequence
  cd00338,IPR011109,IPR038109,PF07508, Coil,PS51736,G3DSA:3.40.50.1390,IPR006119, IPR036162,PTHR30461,PS51737,PF00239, SM00857,G3DSA:1.10.10.2600,SSF53041
VKEREQKMSYCIYLRKSRPDIEAERHGEGETLARHENMLMELARDRGLDVVQIYREIVSGDSISARPQMQAMLSDIGQGKYKGVLVAEIERLARGDTIDQGIVAQAFRESGTKIITPVKTYDPNNEFDEEYFEFSLFMSRREYKTIKRRMQAGRLASVKEGNYICSSAPYGYRKIQPEPKIHTLEIVPGEAETVKLIYKLYLEGHGSKFIAAELNRMGIAPAKSIYWENPSIKKILANPVYCGKVGWKSKSNGETLYKGLHEPIISEDVFNAVQDKRKNNPAAQVRLNDRLLNYYHNILYCSNCGHQLKRRVISSTGKEYMLCCYKECQGKTVCASMQEVDEAVMASFRYRIESLRELMSKDGKSDTVQADKKTPLENELQKAKKQLSKLYDLLEQDIYDVNTFVERSRALKERINSLEYALKGLESIKPKLSPEESIARIQNVIDNFYSSSPEDKNRLLHSAAERIYYTKTVKMCRNKKFSDLTLKVDFL

SEQ ID NO: 10645 - protein, 491 aa, Unknown
  Description of Unknown: Integrase B10646 sequence
  cd00338,PF13408,IPR011109,PF07508,G3DSA:3.40.50.1390, IPR006119,PTHR30461,IPR036162,mobidb-lite,PTHR30461:SF3, IPR025827,PS51737,PF00239,SM00857,SSF53041
MTTPPPPRIAIWTAVSSKPQAGPDKSSLQDQEAAGRQLAEAVHGHVVVVYSVPGHSRDLIFWHDAEASMPAYRQLRQDCADHTFDVLFALDPDRLGRDPALSNQVISLVEKSGAEVYFASAPHPIGQASTAQRYIYAIQSVRAAEDQTLRIHRFRAGIEARVTRGLCSSHWPLGYRPIPGPNGRIATAEPHPDLAPAVLLATKLFIEGLPYTRIAQALNASPYHPPRGSRWAYSTVQKMMANDVYAGFPHFDHVEPEYPSPHYPALWDPDTHATVIRERNRRRRDRYNKTAGSPLAGVVFCARCGHQMSRQLAHHKHWWLRCTKHAHRSHTGQSCHRNYIREDRVVERIAAYLAALATPAALDAALIITDDTTQLHQEISALGDHLAELEVRRQRLALALAAGQMDPQVYRSADDLLLADVVATRSRLLDLQVLLAAAPDPAQRRAALEALAAIFPDLVATAPPVRTRTLLQNAGLRVEIEAGAITSIRLV

SEQ ID NO: 10646 - protein, 491 aa, Unknown
  Description of Unknown: Integrase B10647 sequence
  PS00397,IPR038109,IPR006119,PS51737,PF00239 ,G3DSA:3.40.50.1390,PTHR30461,IPR025827,SM00857 ,G3DSA:1.10.10.2600,SSF53041,IPR011109,PF07508,PS51736 ,IPR006118,cd00338,PF13408,Coil,IPR036162,PTHR30461:SF3
MQTAAIYARVSTDWQAEHGYSLETQVSACEKYARDLGAVSVTKYIDDGYSGAYLDRPRLDALRDALRAKIYDVVIVYTPDRLARRLSHQLLITEEIEKSGATLHFVNGEYKQTPEGQLFFQMQGAFSEYEREKIKERTMRGKRGKLKSGKPISDHGVFGYAWDEKTKDYIVNEPQAAIVRQIFDMYISGEYGGTDALAVKLNEMNIPSPGGKKWLGSNVCRLLKKSMYTGEYYAYKEYSKKLDAHKRTSTTRPENEWIPMQCPAIVSKETFDAAQRLLDANKKRRKRKLETKQYLLQGVMKCARCGASIVIRRPASGAYYTCFNAVRVGSDTKCHARYAKTDIVDAAFWETLKQICKTPKKLAAYINATDKTAPRVDDTQKLKERLTKIDAEKAAIVEWYTSGYLTQAAATAKLEALTGEAKRIQEKLSAPKTNERAIDIARIYNLVKNCDGSFEAKKNIVHAIIESVIYERVDETHKNGKYDIRFLIHFI

SEQ ID NO: 10647 - protein, 491 aa, Unknown
  Description of Unknown: Integrase B10648 sequence
  cd00338,PF13408,IPR011109,IPR038109,PF07508, Coil,PS51736,G3DSA:3.40.50.1390,IPR006119,IPR036162, PTHR30461,PTHR30461:SF3,IPR025827,PS51737,PF00239, SM00857,G3DSA:1.10.10.2600,SSF53041
MKLACYCRYSSDMQREESIEAQLRAIYDWAKKNDHIIVKEYIDRAITGKTDERPDFLNMIKDSSSASWDGIVVHKLDRFSRNRYNSAIYKKKLKDNNKRIFSVLENLTDAPESIILESVLEGMNEYYIANLARETKKGLNENAYQCKFNGGTPPLGYDVKDGKYIINEKEAKIVKEIFKLYLAGYGLLKIALELNLKGYKTKRGNSFGKNSLFDILGNERYTGVYIYNQSINSNKRVDNENIIKIEGGMPQIISKEDFEKVMEKRAKNKRISGSYRSKTQYALSGLITCGLCGRKYYGITTTRKRKTKTYIESWYRCSGKDKIHNCTNNNIKCDEIENKVYNLIKEKLLESSSIESLINLIQEEYDKMCNDVNSSAIQTEHSIELLNKKINSYVEAIGNGLYSEEIKNSLQNAEAERAILKEQLIAYKNLENHRIIKKEDVERVLKKDFKNLQADKHQLFNKWIKDIKITPDKAEVQFTIFENVVSLHGGE

SEQ ID NO: 10648 - protein, 491 aa, Unknown
  Description of Unknown: Integrase B10649 sequence
  cd00338,IPR011109,PS00397,PF07508,Coil, IPR038109,PS51736,IPR036162,IPR006119,G3DSA:3.40.50.1390, PTHR30461,PTHR30461:SF3,PS51737,PF00239,SM00857, G3DSA:1.10.10.2600,IPR006118,SSF53041
MNVAIYARVSSEWQAEHGYSIGTQLEACRKKAKDLGAFVVKEYVDDGYSGGFLERPALEQLRDAVQEGLYEAVIVHDADRLSRKLIHQLILVEEFEKYKCKPVFVLGEVADTPEGQMTMQMKGVFAEYERAKIRERTMRGKRAKLKAGKAICDSHIYGYDFDRENSCYVINPAEAEVVKMVYKWFVEDRYGGCDAIAARLNDMAIPTPTGSGLWGTSTVQHMLKRSHYTGKYYASTQYHKKTGPKSYKKIPRPREDWIEMTCPQIIDADLHPRALEIIASHRTYKTWKHSQDAGLMQGFAYCGFCGARMRIMTSKKTQKYYSCGSKCEKSRLLGLFYTDELIWSLLESICESPKTLKAYIAANQGSAPKAQLPQQNRQKIKKRLDKIQQERKAVMTWFSQSLLGQTEATEKLQALKAEEEKLQAELAAAENAQDTSKALDVNDICEVVKNCPDDKPAKRKVMLAIIDRVDIARLDNNYGHNYDLDLKISFK

SEQ ID NO: 10649 - protein, 491 aa, Unknown
  Description of Unknown: Integrase B10650 sequence
  cd00338,IPR011109,IPR038109,PF07508,Coil, PS51736,IPR036162,G3DSA:3.40.50.1390,PTHR30461,IPR006119, PTHR30461:SF3,PS51737,PF00239,SM00857,G3DSA:1.10.10.2600, SSF53041
MKKVVFYGRYSSVMQNEQSIEGQLHVCRQYAESNGLEIVSEYIDRAMTGTSDKRPEFQRMISDSESGHFESVLVYKLDRFARNRYDSALYKKKLRQNGVSVISATEQLSDTPEGILMEAIIEGMDEFYSAELGRKLRRGREMSFRKGRFIGKRPPFGFAVRDGMIALDEERVPIVREIFERYASGEKQAHIVADLNRRGIPNAAGNPWNKGNLSYMFQCRLYIGEYTLKSVDMVQSCPAIISHELYDKVQAVKADSVHRARECKTDYHYVLTGHMTCAKCGAAVCGVSMSHGKYHYYQCHKHCGLRIPADVLHDRVRDALMHHLTGDKLEELAAAAYAEYAKCEPPAERECIEHELADVEVRLKNAVNAVLSGINSPTLKDTIEALEAEKKSLSKRMEDVSAAPPKFSQEQFRLALEYIIATAQEGDLSKLVSTVIDRIIIDDQSATICINLTDTNNSPPLEQILFRVGEYSCSLTQNIIIHEKGWLIIPA

SEQ ID NO: 10650 - protein, 491 aa, Unknown
  Description of Unknown: Integrase B10651 sequence
  cd00338,IPR011109,IPR038109,PF07508,Coil, PS51736,IPR036162,PTHR30461,IPR006119,G3DSA:3.40.50.1390, PS51737,PF00239,SM00857,G3DSA:1.10.10.2600,SSF53041
MNKAVIYARYSSDKQRTESIEGQLLVCHEFAKKYELDIIKEYIDKAKSAKNDSRLAFQNMIYEAKLGLFSHVIVYKTDRFARKERDAIIYEDQLNSLGITVLYASQPFLNNQGGRIVKAIFRVQDEQYLEYLSERTKLGLRVNFEKGYATNARMPAGYKVVNKKIVIDSEFEFVPKTIFEMYANEISNQDIIDKLIDMGYRKIHSSTIVSTIKNKKYIGTLIFEGKEYPNKIEPIISEELFERANKVLKNKKGARPRAKEKYLLSGYVFNAKGSPYIGTSATSRNGKTHRYYHQGKHYIKKSILENAVIKEILRVISSESEQLSNQIFKKIQSSQVSNDKNLEIKKNIKKIEYELDNIVNAIKQGLFSESLKNEATRLEKQKNTYQIELKSINRYSLSKEDVLDFIRNIKKRHLTEDSKTSLVQMFLDKVIIHDGNGYLWFNITGETISFEDVLMALSNGPIKLHHTNIEIDTSKYIYIYSAFEIEKRAFS

SEQ ID NO: 10651 - protein, 491 aa, Unknown
  Description of Unknown: Integrase B10652 sequence
  cd00338,PF13408,IPR011109,PF07508, Coil,PS51736,G3DSA:3.40.50.1390,IPR036162, PTHR30461,IPR006119,mobidb-lite,PTHR30461:SF3, PS51737,IPR025827,PF00239,SM00857,SSF53041
VERQREIIEDWARRNDHEIVGWAEDLDVSGSLDPFKTPALGPWLNEKKHDWDILCAWKLDRISRRAIPMGNLFGWLLENEKTLVCVNDSIDLSTPMGRLIAYVIATIAEGELEAISDRNRASQKKLRELGRWTGGKPVYGYEAVERDDGGWELVPDSYSAAVLVSIIDQVLAGESLSSIADGLNDRGELSPADYIRARAGREPRGHAWTANNIGRILRSPALLGVTTHKGVTVRDASGLPIRKGRQVISQDLWDQLQAKLEGRSVLSSTRTRKTSPLLGVALCGVCGGRMYHRKVYDAYRYYVCRNGHPVNSVKAEELEEAVGEAFLAAYADVPVVEPVFIPASNHQTELDEAVRAVDEITPLLGTTTSATVRSRLLGQLEALDSRISELEQIPPSEARWETRILDETYGELWERATDAASRRQLLLKWQVSVKVSTVGPSGVVLDITTAHIPENAEKPPAGTSVPEGGDSVQGRTSVSCFGLGADKPEAR

SEQ ID NO: 10652 - protein, 491 aa, Unknown
  Description of Unknown: Integrase B10653 sequence
  cd00338,IPR011109,IPR038109,PF07508,Coil, PS51736,IPR036162,IPR006119,PTHR30461,G3DSA:3.40.50.1390, PS51737,PF00239,SM00857,G3DSA:1.10.10.2600,SSF53041
MKVAIYIRKSREDKDEYKEDTLLRHERLLKEYCNKYDLRYSEKTIYREIVSGDSINNRPEMQKLLKDVENGLYDGVVVVELQRLSRGNGIDQEIIKETFRKSGTIIYTLNKAYDLSSGDELDEDMLELSLFLSRQELKAIKRRMIRGKKQAQKEGYYTGATVPFGYNKEKQNKGYVLVPNEKEAPIVQMLYNKYAYEGINIAELVDYLNDNGIRTRKGLLWQPTLLRRLLKNKINIGYINSTTNGVTTHFKGKHQPLIDEETYNRVLEKFNQNAPKVKSDNILKNPLATFLRCGGCGKVMNMKFKCKTTNKPAMLDCKNKYCSNKGAYFHFVEKKLIEELEEELKNFNYFLENTADETRKIKETKEKEKSFIKSNIEKKKAMIDRCCEMLEEGIYSKDRYLERVQAIEEDLKALNLKYEELNVIEVDEEDRVKKAIPILENVLKEYWNLDPVDKNTLLKTIIERVEYTKTKRKTYKEEIDNNFELKIFLKI

SEQ ID NO: 10653 - protein, 491 aa, Unknown
  Description of Unknown: Integrase B10654 sequence
  cd00338,PF13408,Coil,PS51736, G3DSA:3.40.50.1390,IPR006119,IPR036162,PTHR30461, IPR025827,PF00239,SM00857,SSF53041
MNAAIYIRKSREEKDRPSHRLTVQREQLPAHATAQGWSYEIYDDGHASAARGKAESLKERGRLEADIRAGKIGVILTIELSRLSRDDSLQDYVAWLHLCAERRVKLATMSRILDPSQHSDWMLLLMEGGFSSVEMRVLKGRMKDGYDQAYREGRFLGGTPPPPYVYDPRAKKPVIDPEQLAKLQRLWAMAETMSAISIATELAMPEIAVRRAISDERLLWYQALRPDQSTGEYIVCEWEPCMTAEQASRVGAGRRTRIKGVSRRPYAALFSNLQLLHCGYCGGTAKTWQNSRVKKDGTRNDYYGCQTKNVKNKCAKARLIPQAVLHEKVLAHLFNTLADLDKIKEFWLLQEEGGDSAKDLEDLAKKEQRERAKKQRLVTAIGEGVLEFADAKAAIAKVNQVLEQISAERQALMAQSTEAPEWGALDLTREEFEDLPEDEQREVLQAAIDRITIYENYAVITYPFARTADGSREARIQFPPRQAGYIRLQRK

SEQ ID NO: 10654 - protein, 490 aa, Unknown
  Description of Unknown: Integrase B10655 sequence
  cd00338,Coil,G3DSA:3.40.50.1390,IPR006119,IPR036162, PTHR30461,PTHR30461:SF3,PF00239,SM00857,SSF53041
MRTAVETYELIPAYARLSRKSRGGRIESIPHQFATLDRLAGYRGDTIGLRFADKHLSAWDQSVTRPDWEAFLAELDTGRHRAAMSYHADRLSRNGMDTERLLQIGERWNIVLITPEGVYDLGNGDQRAMFRHLAAMTINQSDATHRRVSDHKDEARLAGLMRDVYGGSPPVGFRQGKDDWEVDPEQADWLREAARLVLADPDHRVGTAYRQLPAIVTNPADPRDPDSVGRPVSLKMLRAALQRPASAGLITSRDGEVMGESDAGGPLDLVTYNRLQLVFASRKPGRPVTARVYPFGPVTRCGKCGNQLTGTPGFQKRGYYSCRNPHLINGVKVGPCRGVSIPAADLHELIRLFIETWADSDAARAAFAENPQTGERRAELDADLDDLGAQLAALSGRRLRERGQVARLTYDGLIGEAEAAIAVVEAELAELDRLDAAPGLPASLDWATMTDAERLRVLAQAARLPIVILPGKSGPKPMPVIDRVILEPQG

SEQ ID NO: 10655 - protein, 490 aa, Unknown
  Description of Unknown: Integrase B10656 sequence
  cd00338,Coil,PS51736,G3DSA:3.40.50.1390,IPR006119,IPR036162, PTHR30461,PF00239,SM00857,SSF53041
VTRCAIYIRKSREEKDKPSHRLTVQRQHLPAFAQSQGWQITIYDDGHASAARGKAINLPERARLEADIRSGKVDIILVIELSRLSRDDTLQDYLSWLTLCADYRVKLATLSRSLDPSQHSDWMLLLMEGGFSTVEMKIMQDRMREGRQEAFRSGKYLGGPCPPPYYYDPAQRKPAVDQVALARCKRLWQLAETNGCSSIARELNMPLIAVRRALQEERLLFSQAIRPDPDTGELIPCDWPAVMTAEQAQLIRQRREDRKRGYSRARYGGMLSNLQAILVCGYCGRTVRSWSNQRKDKKGVSPTWYGCKALENSSICTNARMIAQADLDGPVVTNLLNTMSDPESLRKIWIAAHQADNTAEQLADISLLIADLQTKKQRLVHAIAEGVIELADAKKARAGIETALQSAETKRSGLLASVPIELDWDVLTISRPEFESLCTDYKREFILACIKEIKLYSSYAIITYRFPRDTSGSALARVHLPPPRPTRPQK

SEQ ID NO: 10656 - protein, 490 aa, Unknown
  Description of Unknown: Integrase B10657 sequence
  cd00338,IPR011109,IPR038109,Coil,PS51736, IPR036162,G3DSA:3.40.50.1390,IPR006119,PTHR30461,PS51737, PF00239,SM00857,G3DSA:1.10.10.2600,SSF53041
MKVIGLVRVSTQAQEFESQSVRVKEAILADGYDESDIILIEDKESGSKLSEEERSGLNKLKYYIETEQISSVYVYEISRISRKETVLYSIREYLQLHHVQLVCITPPFKMFNDDWSISDAAAFTFSIFSTLSSQETRIRVARITRGKEKKKAEGKLTCGKPIFGYDVDKDHFIIPHKKNADIVREIFERYCNLESSGSIGKDLYQRNALGNDKSKEITVQTYVCSILKEKRYAKIDEDSIYPPIISKELFYKAKNIRENKGEMFIKKSKTVRTYPLQGYLYTEDGYMLSSSYTNNRYLKMNDASIKRVSLNMNAADGLTKIIMTEYINSGVLDIDREKELKEMSNVLSLNKVKISGIEIKINEMREENERINSRIVKGRMSEKTGDKMIDDNILSMNKLEDEKQELIYQNGVIVNKIDYLSNPLFTPSSTFEINTLEELKDLVMKYLKKAVVHKIGFSRYKIDYYFLDGRMKSGCFYSVQGKGISYYDIK

SEQ ID NO: 10657 - protein, 490 aa, Unknown
  Description of Unknown: Integrase B10658 sequence
  cd00338,PF13408,IPR011109,IPR038109, PF07508,Coil,PS51736,G3DSA:3.40.50.1390, IPR036162,IPR006119,PTHR30461,PTHR30461:SF3, PS51737,IPR025827,PF00239,SM00857,G3DSA:1.10.10.2600,SSF53041
MKKCVFYGRYSSVMQNEQSIEGQLHVCRQYAQQNGLEIIGEYIDRAFSGTTDKRPEFQRMINDSEKGEFETVLVYKLDRFARNRYYSTLYKKKLRDNGVQVVSATEQFTDTPEGILMESIIEGFDEFYSAELGRKLQRGREMSFRKGKFVGKMPPYGYKLIDDRLAVDELTAPIVREIFERYANGEKQAQIITDLNNRKIPNSTGNKWIKGNLSYMFKNKIYIGKYTHGKIPLEMPCPAIISEELFEKVQKAKSESLHRARESKTGFDYILTGHMTCAKCGAAVCGVSMGHGKYHYYQCHKHCGHRLPAEQLQERVLSAIGEYLTDDKLEELAEAAYAEYSKNDWNTERELLEREYEETDKKLKNAINAILNGVDSQMLKDTVEQLETRKNELFVQMNEVSAPAPKFSAEQFRFSLEYIIETAHSKSLKKIIDAFVNRIIIDDDKVIICINLTDKDCLPPLEQIMFSVKEYSYSATQNIIYMNNWILIVA

SEQ ID NO: 10658 - protein, 490 aa, Unknown
  Description of Unknown: Integrase B10659 sequence
  PS00397,IPR038109,IPR006119,PS51737,PF00239, cd03768,G3DSA:3.40.50.1390,PTHR30461,IPR025827,SM00857, G3DSA:1.10.10.2600,SSF53041,IPR011109,PF07508,PS51736, IPR006118,PF13408,Coil,IPR036162,PTHR30461:SF3
VADLENVTDLYIRVSTAEQAEEGYSVGEQEARLRSYCEAYGYIINAVHVDPGYSGATLERPGIKEVIKDVRAGRCNKVIVWKLDRLSRSQKDTLILLEDVFLENSCDFVSLMESFDTSTPFGRCVIGILAAFAQMERENIRARLMMGKQAGLKAGNYYGPTAPIGYKWEMQPNGKRELLVDPFYSQIIQEAYRLYGSGQSLSDVVRVIKAKYGHSFATYQNDAATRLGRVLRNPIYAGRVRMVDREYEGKHEALVSPEIWQAVNNRLSGNAPAYRNRYGNGSKGGGLCSGLLFCGCCGGRLSIRGWGYKSAKVDKYVCYSVSKCNKRMIKDPNCTNRKNHFKVEDLDALIVEEVKKLSLDPAALDALLQDGTGKPGPEEEAAAFRERMENVERQITRLLNLYQAGAVDLEEIAGRLSDLKEERAALSCSLEELENDAPGKMSKEEARAAVASFSSVVASGDPVALFALVHSLIEKIEVLNGDITIFWKFQ

SEQ ID NO: 10659 - protein, 490 aa, Unknown
  Description of Unknown: Integrase B10660 sequence
  cd00338,PF13408,IPR011109,IPR038109,PF07508, Coil,PS51736,G3DSA:3.40.50.1390,IPR006119,IPR036162, PTHR30461,PTHR30461:SF3,PS51737,IPR025827,PF00239, SM00857,G3DSA:1.10.10.2600,SSF53041
MKNAVIYARFSSDLQREESIDAQVRACREYAAKKGLKIIEVYSDEAVSGRTANRTQYQRLLRDCQKKNFEIILIHKYDRIGRSLGEHVNLSARLDKLGIELIAVSQDFGSSAEAKIMKTLVWSMSEYYVDNLAAETKKGLKENALKALHNGGVAPFGYDIVDKKYVINDFEAEYVRKIFSAAIQKKGFTEIIRELSDCGIKGKRDKPIKYSQIYEILRNEKYTGVYVYSVDEEEKRSDRRAKPNAIRIEGAIPVIIDRKIFEEVQEIMNERKQTGKKADYLCSGLVYCKCGAKMHGMKSVRKGHTYHYFTCSEHCGASSVRMEDIDNAVKEYLCNLLSKENQEKISHALRTYKFDEQERSSDFNKILKKRINEKQKRYDNLLANLSTDLLPAPVVADIGKEMEELKSEIECLKNTEPPKSFTADIICNWLDSIKNSPNPSAVRMLVERIDIKDKTVFNIQSTLKTVLGKTGCGGSQHILPKILFKYIFKK

SEQ ID NO: 10660 - protein, 490 aa, Unknown
  Description of Unknown: Integrase B10661 sequence
  PS00397,IPR038109,IPR006119,PS51737,PF00239,G3DSA:3.40.50.1390 ,PTHR30461,IPR025827,SM00857,G3DSA:1.10.10.2600, SSF53041,IPR011109,PF07508,PS51736,IPR006118, cd00338,PF13408,Coil,IPR036162,PTHR30461:SF3
MTELNEKKAAVYIRVSTDDQTEYSPDSQMKLCIAYAKDNNIDILPEHIYRENGISGRTVDKRPQFQKMIANAKKKPKPFNTILVYDFSRFARNREESVTYKTLLRKKLEIEIISITQPIDEKKKESVILESIYEAMDEYYSLNLSENVKRGKKEKATRGEFQGVAPYGYKYDKNTQQLYIDEEKAEIVKMIFKKWIEPDTTIRKLCKFMNDTNFKTTRGHKWCDRSMKLILQNITYTGKVRFTEGGMKRNYDHPDMIISQGKHPPIIDDELWNLAQKKMQEHKDKWYKYKKEYSKNEHWLRGIIKCSECGASLSHVNAMKGRSGHFQCCGYNKGRCLSSHYIRDSVIIPTILEQLKKDYSERLDINIGENTESIELSEISLLKKQLDRLEIKRKRIKDAYINGIDTINEYKENKTELDKEESNLKKELEKLNYNQSVKMRKERTYKICEEAYKILSDDSVPPNIKDTLAHKLFEKIVYNKQEETIEITYK

SEQ ID NO: 10661 - protein, 490 aa, Unknown
  Description of Unknown: Integrase B10662 sequence
  cd00338,PF13408,IPR011109,IPR038109,PF07508, Coil,PS51736,G3DSA:3.40.50.1390,PTHR30461,IPR006119, IPR036162,PTHR30461:SF3,IPR025827,PS51737,PF00239, SM00857,G3DSA:1.10.10.2600,SSF53041
MKKQNNKIINNRAIAIVRVSTAEQATEDRYSIPHQRTHIAQECKARGLDLVHFFEFVQSGAKVLSGTSKERASVIKFITDYGISVVIVHELDRLARSMLDTLLFVDELDKLGVAFISIHDGFDTTTAQGQLQMHILSAFSEYFRKQLASKVIGGMIERAKQGKHMCRRPLGYDIGPNGFVINEEEARMVRMIFSMYLEQNLGLRAIAEHLNSMGLKSLRGNTWAHVSVKEIIKNEVYTGTFTWDVIRVENNHPPIIDPETWKKVQERRIRKGDISGRAQNSFYLLSGLLRCGICKSATMIGRYARKKKAKEGFWEYRYYVCNNYSTRGLGTCNQLYIKANELEALVLNDIQELATQGVSVVGREEIPSNIGLLKEELAFKHKEMDKLKLMTLRAAEAYERGDYDLDFFSERKASIAEQRESLGKDIDRLKAQIEGQVTPEEIAARTGQRQKIAAALLEETDPVKAKALLQTIIDHIEVVSVDDITIAYRS

SEQ ID NO: 10662 - protein, 490 aa, Unknown
  Description of Unknown: Integrase B10663 sequence
  cd00338,PF13408,IPR011109,IPR038109,PF07508, PS51736,IPR036162,IPR006119,PTHR30461,G3DSA:3.40.50.1390, PTHR30461:SF3,IPR025827,PS51737,PF00239,SM00857, G3DSA:1.10.10.2600,SSF53041
MKKQNNKTINNRAIAIVRVSTAEQATEDRYSIPHQRTHIAQECKARNLDLVHFFEFVQSGAKVLSGTSKERASVIKFITDYGISVVIVHELDRLARSMLDTLLFVDELDKLGVAFISIHDGFDTTTAQGQLQMHILSAFSEYFRKQLASKVIGGMIERAKQGKHMCRRPLGYDIGPNGFVINEEEARMVRMIFSMYLEQNLGLRAIAEHLNSMGLKSLRGNTWAHVSVKEIIKNEVYTGTFTWDIIRVENNHPPIIDPETWKKVQERRVRKGDISGRAQNSFYLLSGLLRCGVCKSATMIGRYARKKKAKGGFWEYRYYVCNNYSTRGLGTCNQLYIKADELEALVLNDIQELATHGVPVVGREEIPSNIGLLKEELVFKHKEMDKLKLMTLRAAEAYERGDYDLDFFSERKASIAEQRESLGKDIDRIKAQIEGQVTPEEIAARTEQRQKIAAALLEETDPVKAKALLQTIIDHIEVVSVDDITIAYRS

SEQ ID NO: 10663 - protein, 489 aa, Unknown
  Description of Unknown: Integrase B10664 sequence
  cd00338,IPR011109,IPR038109,PF07508,Coil, IPR036162,IPR006119,PTHR30461,G3DSA:3.40.50.1390,PTHR30461:SF3, PS51737,PF00239,SM00857,G3DSA:1.10.10.2600,SSF53041
MKKMNVVLLRISTDNQETLSQELAINSYCEQHNIIIDKVIKSEGVSGFKVPLNAREDLNEIRNLAIEGKLDKLIVFNLDRIGRRLELVSFLNLLDECNVKIISVTEGELNSGQDSDFLINSIKLWVAQTESKKTSVRVKNGKRANWTDTNYVSGKISFGYKIIDKKIVIDETNAEIVRTIFDLYIKYGTSKCVDYLDSLNLKNLNGKKYTRHSVLGMIKNRSYLGIRKSIAYNEEFYVPSLRIIDDYTFKKANEVLESRTIRKNKFVFTNRCTDNKYESLLYHKCYDGTINKLHSSFTYANDIKYSTVVCSHCKHFKYPIRKTYATKKLFEELDKAIDLRLDSLSSDKIESELKEKKSCVIKELELQININENSLDEDKRLLEGLNQTLDKIFKGELKFDLQQILDRVSDTQKVIIEKERVILELKTNLEIEKNKVENKNKLLERFKNFKNIYDLGTDEQKKMVLRELVNRVIIDGNKNITIELKYIED

SEQ ID NO: 10664 - protein, 489 aa, Unknown
  Description of Unknown: Integrase B10665 sequence
  PS00397,IPR038109,IPR006119,PS51737, PF00239,G3DSA:3.40.50.1390,PTHR30461,IPR025827, SM00857,G3DSA:1.10.10.2600,SSF53041,IPR011109, PF07508,PS51736,IPR006118,cd00338,PF13408,IPR036162,PTHR30461:SF3
MPTAAIYARVSTDRQAEQGYSIETQIAACEKYARDLGASTVTQFVDDGYSGAYLDRPRLDALRDALRAKIYDVVIVYTPDRLARRLSHQLLLTEEIEKAGAALHFVNQEYKATPEGQLFLQIQGAFAEYEREKIRERTMRGMRGKLKSGKPLRNQHVIGYDFKYGQYIINSIESKTVQQIFNMYISSGVGTDEIARRLTEMRIPSPSKLTHWQGASVHRILRNQMYTGEYFALRKVSTKTGAHSRKLSPRSKEEWIPLKCPQIIDAETFAAAQNLLDTNKTQLKRTKDNGVYLLQGLMRCAKCGEKIILTNNRAGRFYACYAHSKRKAAGHTCDARFAKTDIVDNAFWATLRNICSSEKRLAAYIKRTGKTISTKTDTAALKARLAKIEEEKVAVVDWYTNGLLTQQATTDKLSALTSEAKAISAKLAQPDKEKAVDTARIYNIIHNCGDNPENKRNAVRSVIDKIIYERTDGEKKPKAYSISFVIYFK

SEQ ID NO: 10665 - protein, 489 aa, Unknown
  Description of Unknown: Integrase B10666 sequence
  PS00397,IPR038109,IPR006119,PS51737,PF00239,G3DSA:3.40.50.1390 ,PTHR30461,IPR025827,SM00857,G3DSA:1.10.10.2600, SSF53041,IPR011109,PF07508,PS51736,IPR006118, cd00338,PF13408,IPR036162,PTHR30461:SF3
MPTAAIYARVSTDRQAEQGYSIETQIAACEKYAADLGASAVTNYIDNGYSGAYLERPRLDALRDALQAKIYDYVIVYTPDRLARRLSHQLLLTEEIEKSGAALHFVNQEYKATPEGQLFLQIQGAFAEYEREKIRERTMRGMRGKLKSGKPLGNVRVLGYDFVDSQYIINEAESKIVKQIFDMYISSGVGTDEIARQLTDMRIPSPSKLTHWQGASVHRILRNQMYTGEYFALRKISKKTGAHTRTLSPRPMDEWIPLKCPQIIDAETFNAAQNLLDTNKTQLKRSKDNGIYLLQGLMVCAKCGEKIILTNNRAGRYYACFAHSKRKAAGHSCDARFAKVEIVDEAFWSTLRRICSSEKRLAAYIKRTGKAVSTKTDTAALKARLAKIEEEKVAVVDWYTNGLLTQQATTDKLSALTSEAQAIQAKLSQPDKEKAVDTARIYKIVHACGSSLEKKRTAVRSVIDHVVYERTDGEKKPKAYSISFVIYFK

SEQ ID NO: 10666 - protein, 489 aa, Unknown
  Description of Unknown: Integrase B10667 sequence
  IPR011109,IPR038109,PF07508,Coil,PS51736, G3DSA:3.40.50.1390,PTHR30461,IPR006119,IPR036162,PS51737, PF00239,SM00857,cd03768,G3DSA:1.10.10.2600,SSF53041
MFKIIVFSRVSTEKQDLDQQTETLINYCKSIGYKDDEIYVIQVKESAIKLSEEERIGLQRLKEAVLKYKGIDTVICWEISRLSRRMEQIYSMRTFFIEHHIRWIVYYPYMELIDKDGKQSQNANLMMAIYSTFAENEMNLKKERAKRVYEYRKSLGKFAGGKILLGYKVDDEHNVQVDKESSELVKLIFNMYSTGEYSFRSLAKELKSRGYFENSSEHVIYGRISKYLHDERYIGKVFGWPQIIDEELFYKCKNIAEKQNIIQKPVNKREMLCKGLIFSKLRKISLIPEPAKHVYQTHPDYGKPSLTISSKYIDKLILDYTQEQIDKYFNDMRKIEEEWAASQQIFFKKISTFTKNRLKIQEKLNRAEELYIDGGITKERLDKKTRDLKLELAEYTRNIEDLDKEYSERERRFFNQKPVVLSEVSFEEKRKYVKQFISRIEIEKEKPLGRRSKVYIHNIYDNKVYVYLLYSQNSKYERKIKKPELLEVI

SEQ ID NO: 10667 - protein, 489 aa, Unknown
  Description of Unknown: Integrase B10668 sequence
  cd00338,IPR011109,IPR038109,PF07508, Coil,PS51736,G3DSA:3.40.50.1390,IPR036162, IPR006119,PTHR30461,PS51737,PF00239, SM00857,G3DSA:1.10.10.2600,SSF53041
MNVAIYIRKSREDREETREETLQRHENILIDYCSKNNLSIIKKYKEIVSGESIEKRPQMQLLLDDVKNNLYDGVVVVELERLSRGNQIDQAEILEIFKKSKTKIYTLNKVYDLSSEDEFDEEFFEFGLFMSRREYKIIKRRLIRGKKQAQKEGYFISATLPYGYNKEKQGKGYVLIPNEKESQIVQTIFEKYVNQNQSILEIRNFLNNNGINHNTKADKWTTQRVRRILSNKTYIGYIVAETKTENPIYYEGNHLPIIDETTFNKAQEKLKIKLVRTKRGSALQNPLASLLYCSDCGKLLHRNIAGKNPETKYSCRTVGCSNVQEYCYIVENKLISELQSELKNFNYFLSNYESEMKSKQVTINKEINIIENEIIKKENMINKACELLEEGIYSKEKYLNRVNILEQDLKALKSNLNDLKSLNYDETERYTTAIPILEKVLQKYWDLKPKQKNDLLKSIIEKIEYTKTERNKKGNIDPDLVKLKIYLKI

SEQ ID NO: 10668 - protein, 489 aa, Unknown
  Description of Unknown: Integrase B10669 sequence
  cd00338,IPR011109,IPR038109,PF07508,Coil, PS51736,IPR036162,G3DSA:3.40.50.1390,IPR006119,SSF103657, IPR027267,PTHR30461,PS51737,PF00239,SM00857, G3DSA:1.10.10.2600,SSF53041
MNIALYLRKSREEEIETREETLARHERILEDYCTKNNLTIIKKYKEVVSGESIENRPQMQQLLQDVQAGLYDGVVVVELERLSRGNQIDQAEILEVFKKSKTKIFTLNKIYDLSSDNDFDEEFFEFGLFMSRREYKIIKRRLQRGKQQAFKEGYFTSATCPYGFTKTRIDKGFVLIPDEHESKIVKLIFNKFVVEDLGIFAICKYLNDNGIKPRKAIDWQPKRIKMILRNRTYIGYLGCNYYSGYAHDYIKGKHDGFIDETIFNKAQDKLDSQMSKEKPTTRLANPLSTFTKCGVCGRTMRSTYSTHRKKYVLQCLTHNCPTITSSLESVEKQVIKELQDELNNFNYFLENFSDEISKKKIMIDNEIKILKTEINKKENMINKCCEMLEEGIYTKEKYLSRVNVLEEDLKALKSNLEALKSTSFDESDRYEKAIPILSEVLNQYWTLEPAAKNQLLKTIIERINYTKSKKNTRHNIDQNLFELEIFLKI

SEQ ID NO: 10669 - protein, 489 aa, Unknown
  Description of Unknown: Integrase B10670 sequence
  cd00338,PF13408,IPR011109,IPR038109,PF07508, Coil,PS51736,IPR036162,IPR006119,G3DSA:3.40.50.1390, PTHR30461,PTHR30461:SF3,PS51737,IPR025827,PF00239, SM00857,G3DSA:1.10.10.2600,SSF53041
MKRAVAYIRVSTKSDAQLHSYDYQVEYYKDLIERNPNLEYVGIYSDWGISGRWLAKRPQLNQLLEDAKEHKFDVVYTKSVSRLSRNTTELLEMVRELRDLGVKVVFEKENIDTFDPSAEVFLTIAAAVAENDLRVYSENQRWAVRKRFESGYMTIGCRILGYTMDKDTNTLIVNEEEAKIVRRIFELYLQGFGFAPISLILKNEGYINTKGTTEWGRGTISYILKNEKYKGCSLTQKSYNKDGMKYTNHGELTKYYMENTHEPIIEPEVFDKVQRIIYERCSKEQIGREKIPPYPFTGLITCGCCGHKYSHKFTAKDKPWRKAIWSCSHQNNYSRKVCTSSRIVDDVLKEKFVEVYNEFIETKPDNEIVTEIKRRIEELIAEETELNALRVNHLIEITDYNNEVEKVRAEIKENTQELNHHLMRGVTKSDFVKIDEFDETKVNKFIEEIIIDNYQVTFCFTNGISISRKYTNGPSGNQKGWKNKQQRNS

SEQ ID NO: 10670 - protein, 489 aa, Unknown
  Description of Unknown: Integrase B10671 sequence
  cd00338,IPR011109,PF07508,Coil,PS51736, IPR036162,PTHR30461,IPR006119,G3DSA:3.40.50.1390,PF00239, SM00857,SSF53041
MRAALYLRSSKDRHDVSLDAQRDELTKLAETRGLTIAAEFADAVESGSSENRPGFISLLEAIRNPKRGWEVLLVFDTSRIARRRYIAQAVKHEATKRRIQIIYSKLPVDLDPVSEVVLESVFQAMDEVHSLLSAEKGRMGMRQNVKRGFRAGGRAPIGYQLDRIPTGTIRDGQPVTKSKLITSPDAPVVTRYLKARASGLPRSRLIRELGMKWSPSTLIHVEWNALVYAGHTCWNQRVAGKKVSRDEWEITRNTHQPLITDAEAETLIRQLETSDIGRAVAAGKAAVTPHLLTGILMTSLGEKWTVAKGGKVYRIAGKFVQADLVNQAVLDTIRRDLSNLGFWKTLLDAVQKNDPTAGIDKEIKRLERERERAARKAVETDDGGIFVGVVEERTRQINALRRERELASREGGLFELVSRTTPADLAQMALENPSAAVSALVEEVTLNRDLTCQIRYRCVSMASPRGANRYAPVSPVYLDRTPEKRLQRV

SEQ ID NO: 10671 - protein, 489 aa, Unknown
  Description of Unknown: Integrase B10672 sequence
  cd00338,PF13408,IPR011109,IPR038109, PF07508,Coil,PS51736,IPR036162, PTHR30461,IPR006119,G3DSA:3.40.50.1390,PTHR30461:SF3, PS51737,IPR025827,PF00239,SM00857,G3DSA:1.10.10.2600,SSF53041
LKKVVFYGRYSSNNQTEQSIEGQLHVCQKFAELNDMVIVREYIDRAVSGKTDDRPAFQKMIADSKKKQFEGVLVYKLDRFARNSFHAAIYKQKLNENGVRVISATENISDNPEGRMLEGFLIHINQFYSEELSQKVNRGLNESFHKGYYMKKIPPFGYRLENRKLVPDEATAPLAKEIFERYNKGQKIVQIADWLNSLGMANQLGNKWRPMNISTHLHNRIYMGEYYYGQFKEPMPVPALVSAELFNSVREKLKASANRSHKKSDYDFILTGKLICAECGHSVSGSTAHGKNHYYYCRHCKKEKRHCIPADYLHEKVFTALAEYLTEAKMEELAEAAYAVYEKEHQHDERPALERELKQVEKQLQNAVEAVLNGFASESLKVTMQELEDRRDKLRESILASSVPIPKFEKEYFTFLLRHMAEMQEADLLDTVVNHIILKGDDTVIICINLTDETNLPPLEQVLFTVSEREGNRKVNNITFTLGWLYIAA

SEQ ID NO: 10672 - protein, 489 aa, Unknown
  Description of Unknown: Integrase B10673 sequence
  cd00338,PF13408,IPR011109,IPR038109,PF07508, Coil,PS51736,IPR036162,PTHR30461,IPR006119, G3DSA:3.40.50.1390,PTHR30461:SF3,IPR025827,PS51737,PF00239, SM00857,G3DSA:1.10.10.2600,SSF53041
MDIPITKVYADRAISGRTDKRPQFQQMMKDANTGTFHCVIAWKSNRMGRNMLQAMYTEDTLNRLGIRCLYVEEDFEDTAAGRFALRNMMNVNQFYSENMAEDIRRGMMDNAAQCKVNGYIPFGLKKGEDGRYAIDENKAPIVHEVFRRVAEGEQYAAIARDLTARGIRSNYGKEFGRTSLQAMIHNEKYRGVYQFAEVRVENGIPRIVDDDLFYRVQEVVKTKKNPEGAVRNSGDYLLTGKLFCGHCRSPMIGVSGTSRTGNPHHYYKCQKKHRTKDCQKKNVRRDDIETAVTKALMNYALTDEAIEKVADFTMDYFKRKEEESGILLMEEELAGVEKSLGNILKAIESGIINETTQERMLELENERKNLKGKIALAKADYVPVERDTVVEGLKMFREGNADDPRYRMKLFDLFLKAVYVYDDDRIEIFFSYDRNKNGMIVNLGGKISDAIVRMDAKEAHHFNSYEPGIDFYFINGLVVLVSTLSFFLE

SEQ ID NO: 10673 - protein, 489 aa, Unknown
  Description of Unknown: Integrase B10674 sequence
  IPR038109,IPR006119,PS51737,PF00239,G3DSA:3.40.50.1390, PTHR30461,IPR025827,SM00857,G3DSA:1.10.10.2600,SSF53041, IPR011109,PF07508,PS51736,mobidb-lite,cd00338, PF13408,Coil,IPR036162,PTHR30461:SF3
MDTMIPAAAYRRVSTDAQVEDGISLDSQKEEIDRWALSHGYRIVMDFCDAGKRGSDDQREEFVRMRHLATSRTPPFRAIIAWKSNRIARSVEIAAAFRGLLKRHGIDLLFVAEPSVDGPIGSLIAAILDGVNEFYSGQLGEDTLRGMRTCASRGFWQGGKPPYGFRVVEVEGGKALCPDTIEGAIVFDIHNLYAAGLGVNDIARQHNERGIPTRSGAAWTGSMVHHVLFRNREYNLGHMVFNRERKDKSGKRLYVKPRDEWTIANNTHEPIISPDMADAVDTAKHGRFCLRSLVNAEDKRALLVGVIRCGHCGYRMVRGHGHRTGNGRRLYYRCAQRIDAKNHGAGDDWCRAPMIHAEPIEETVLHLIRERYLSGDIAITPPDEPRHDENHAARRDEMTRRRDNLLRAIETGMVEWDEAKTRIDAIRREIARLDAEYEATRPREGKGHTVDLDMLRERLTTGENLRAVVTSTISRIDATKTRLDVSWLV

SEQ ID NO: 10674 - protein, 488 aa, Unknown
  Description of Unknown: Integrase B10675 sequence
  cd00338,PF13408,IPR011109,IPR038109,PF07508, Coil,PS51736,G3DSA:3.40.50.1390,IPR006119,IPR036162, PTHR30461,IPR025827,PS51737,PF00239,SM00857, G3DSA:1.10.10.2600,SSF53041
MNVAIYLRKSRDDQEETREETLARHERMLLDYCKRNNLLIKEIYKEVVSGESIENRPEMQRLLDDVSKCKYEGVVVIEIERLSRGNQIDQAEILEIFKKSKTKILTLNKIYDLSSDNDFDEDFFEFGLFMSRREYKIINRRLLRGRKQAQKEGYFIGTTPPFGYSKERIDKGFVLVEDENADVVRLIFNKFAYENWGLGDLRRYLTENNIKGLINQQRWENRAIKRILSNKVYIGYVNCNTKKAEANSIKGKHKPIIDEKTFSIVQEMLKQRECKTTNNKELVNPLATILKCGNCGRTMSRFTKSDDKRTTVYRCPLYCGNISSNCDLVEHKLIGELKEELQNFNYFLENTGQELNKKKQQIENEKSILLKEISKKETMIDRCCEMLEEGIYTKEKYLKRVNTLESELNALKSNLEGLNNISFDDEEKALRTIPILEKVLDEYWNLTGKQKNEILKSFIEKIEYTKTTPTRGQVANDKPIELKIYLRI

SEQ ID NO: 10675 - protein, 488 aa, Unknown
  Description of Unknown: Integrase B10676 sequence
  cd00338,PF13408,IPR011109,IPR038109,PF07508, Coil,G3DSA:3.40.50.1390,PTHR30461,IPR006119,IPR036162, IPR025827,PS51737,PF00239,SM00857,G3DSA:1.10.10.2600, SSF53041
MSGEANGPLRVAIWCAVSSRQQAGPDKASLDEQERAGHEFAEALGGHVVATYRVPGHSRDYVLWAEAEAEMDAYRRLREDCEEGVFDVLHAVDPDRLGRTAALIHQAIGLVERGGAEVYFASSPHLVGQRATSRLYMHAILAARADEAQEIRRRRHRMGMRRRVKRGLTPTRWPYGYRVVRDSTGRAIGGEFVEEELAALRLMTRLFLQGESYYEIARELTAAGYPPPGGDKWYFSTITSMTKNDVYAGLPVWGDVHAEEPTDRYPILWDEETYKAILQERRYRANNRSRRVSSPLHGVVFCARCGKPTHRCPSPHRVYQRCSTHRKPGETCHRNTTPEDDIWDALLKFLAGLTDLEALREQISRDSEDTETKRQLQELEERRQDIAQQRQRLAYALAQGAMDPLMYRRTDDGLVSRLNAIERERAQVEELRDARPSAEDRIAALEDLRASLAQRFEDMPGNKLNALLRHAGIRVECEDRHVVAIRIE

SEQ ID NO: 10676 - protein, 488 aa, Unknown
  Description of Unknown: Integrase B10677 sequence
  cd00338,IPR011109,PS00397,PF07508,Coil, IPR038109,PS51736,IPR036162,PTHR30461,IPR006119, G3DSA:3.40.50.1390,PTHR30461:SF3,PS51737,PF00239,SM00857, G3DSA:1.10.10.2600,IPR006118,SSF53041
MRAAAYCRVSSLQQKESQTIESQLRVLPEFVASRGWTLAGTYVDDGRTAKAGHLERREAFQRLIADAQAGRFDVVAVVDLDRLTRSEDVQERGYVYGIFQRAKVRIAVQATGQLLDLNSSDGDLLAGIFAWVAAEENRKRREKAHRGREQSILRGRKPAGQTPYGLAWTHEDGWAEDEAEAAIVREIFSRVASGESARSVGMDLERRQVTPPRRGRWYSGVPRIIRKTTYRGQWEADRGRFVSVPPLVDEDTWDAANASMSENRLRGLRTAKRVYFCDRGLAVCELCGERIGAAYLNLNDSTAYYYCNQRRRPRPHAPRCALPMRRSYEVDGRLWFAVERALLGDKFVKRAAELRQMAAADDPGKIRAELKRLAGAEAAVLERFTNGLISDAAMDAHVAKLTAKRAALEQRLASASAGPTDVRALLEELRARLAVTTPAEQRELVRTLIPPKGVTIGSTRIMATIIVGSTEGSGRCSFGRTIAIQVAA

SEQ ID NO: 10677 - protein, 488 aa, Unknown
  Description of Unknown: Integrase B10678 sequence
  cd00338,IPR011109,IPR038109,PF07508,PS51736, G3DSA:3.40.50.1390,IPR006119,PTHR30461,IPR036162,PTHR30461:SF3, PS51737,PF00239,SM00857,G3DSA:1.10.10.2600,SSF53041
MFLRKSREDVEAERAGKGETLAKHRAVLSRLAGDMGIEVSHVYEEIVSGGDLSARAGAQRMLEDVRAGMWDGVLAFDLQRVTRGDMIDQGTVVLAFQLSRTLIITPQKVYDLRDELDGNFAELEMLFGRMELARITRRLTAGKEEAVRQGQYLGSIAPYGYDKAVSGRKKTLVPNDDAERVVSWYRRVADGGATPRKIADEMNDMGIPTPRAGLWDRTLVTKIIRNPVYKGYVRWNGKRTVEAFGPDGQKAKVREKADEIIALGLHEPLVDAELWQRAVDAISVRRHATPDDRTLKDPLASLLVCSGCGRSMQRVRDARRDVAYYNHPSVNRKACWQKSTRMEDVVRAVVAALSEAAADVEARIGRVEAPPATDQIERDLAAEERSAETLFRLVEKGIISDEEFAERKGLSDARLAAIRARLDEAVAAARRSGADGELTVSLKRAIADLGSYEGRAEEVNRFLKTFISRIEYEKDPESGSLRLRVFFR

SEQ ID NO: 10678 - protein, 488 aa, Unknown
  Description of Unknown: Integrase B10679 sequence
  PS00397,IPR038109,IPR006119,PS51737, PF00239,cd03768,G3DSA:3.40.50.1390,PTHR30461, IPR025827,SM00857,G3DSA:1.10.10.2600,SSF53041,IPR011109 ,PF07508,PS51736,IPR006118,PF13408,Coil,IPR036162,PTHR30461:SF3
MTDYIKKNIRVAIYVRVSTQEQAKEGYSIGEQTDRLKKFAEAHDWLIVQVYTDAGHSGADTNRPALQDLLSDVRDGKIDKVLVYKLDRLSRSQKDTLTLIENEFIPHGTDFESMSEKLDTSTPQGRLFLGILAAFAQLEREVIKERMSMGIQARIREGKWRGGAQVPFGYDYEPALEKLVVNEYESMIVKYIFDAFVEGKSIYQISETMMEKGQTFKSGKADHRNIRNLLRRKTYCGYQKHNDEWIKGLHDPIISEETYNKAQEIIIEKKRRFDESGLKVGTAATSTDLGGIIYCARCGARYSKYRTGSKQYGFHYNYGCYSRHKKAKAMIKDPNCMNRNYRKDELDNIIFNEIKKLAIDPEYMQSIKKEAARTDEVQQIHAIEEKIKSINSQLSRFMDLYGIGKYDMDELDEKTTPLREQKNKLQREVERLREESKTMTEDQVLQLVESFEEALNNGDLHDRRSIIEQLINRIEIDGDDITIHWNFV

SEQ ID NO: 10679 - protein, 488 aa, Unknown
  Description of Unknown: Integrase B10680 sequence
  cd00338,PF13408,IPR011109,IPR038109,PF07508, Coil,PS51736,G3DSA:3.40.50.1390,IPR006119,PTHR30461, IPR036162,IPR025827,PS51737,PF00239,SM00857, G3DSA:1.10.10.2600,SSF53041
MNVAIYLRKSRDDQEETREETLARHERMLLDYCKRNNLIIKEIYKEVVSGENIANRPEMQRLLEDVAKQKYEGIVVIEIERLSRGNQIDQAEILEIFKKSKTKILTLNKIYDLSSDNDFDEDFFEFGLFMSRREYKIINRRLLRGRKQAQKEGYFIGTTPPFGYSKERIDKGFVLVEDENADVVRLIFNKFAYDNWGLGDLRRYLTENNIKGLINQQRWENRAIKRILSNKVYIGYVNCNTKKAEANSIKGKHKPLIDEKTFYVVQEMLKQRECKTTNNKELVNPLATILKCGNCGRTMSRFTKSDDKRTTVYRCPLYCGNISSNCELVEHKLIDELKEELQNFNYFLENTGQELNKKKQQIENEKSILLKEISKKETMIDRCCEMLEEGIYTKEKYLKRVNTLESELNALKSNLEGLNNISFNDEEKALRTIPILEKVLDEYWNLTGKQKNEILKSFIEKIEYTKTTSTRGQIANDKPIELKIYLRI

SEQ ID NO: 10680 - protein, 488 aa, Unknown
  Description of Unknown: Integrase B10681 sequence
  cd00338,IPR011109,IPR038109,PF07508,Coil, PS51736,IPR036162,PTHR30461,IPR006119,G3DSA:3.40.50.1390, PTHR30461:SF3,PS51737,PF00239,SM00857,G3DSA:1.10.10.2600, SSF53041
MKKVAFYGRYSSVMQTEQSIEGQLHVCEQYAAANDLQIVRQYVDRATSGKTDNRPQFQQMISDSERRLFESILVYKLDRFARNRYDSLIYKHKLKEQGIRVISATEPLSDTPEGVIFEALIEGMDEYYSAELGRKMKRGKQESFRKGRFIGKLPPFGYKVVNHRLAVDELAAPIAQEIFSRYAAGEKQNKILTDLNRRGIHNAAGRPWNKVNMTMMFKNRIYIGIYSVADYGEAECPAIIDKEVFDMVQKKKQESVHRARANKTDFDYILTGHMTCARCGASVCGCSMQQGKYHYYQCHKHCGHRIRAEELHERVKRALAEYLTEDKMQELAQGAYDVYLNEQVSDERPLLEKELADVEKQLQNAVQAILRGVELDTLNNTIEELKARRDELRAKIEDAPTPLPKLTYDMFVAMLHLIVERAAETDDLAKLLHTVINRIIIDDQDIIICINLTDEDNEPPMEQIRFRVMDKSATLTLNLTQNWLLIPA

SEQ ID NO: 10681 - protein, 488 aa, Unknown
  Description of Unknown: Integrase B10682 sequence
  PS00397,IPR038109,IPR006119,PS51737,PF00239,G3DSA:3.40.50.1390 ,PTHR30461,IPR025827,SM00857,G3DSA:1.10.10.2600, SSF53041,IPR011109,PF07508,PS51736,IPR006118, cd00338,PF13408,Coil,IPR036162,PTHR30461:SF3
MTISAAGYLRVSTDEQAEHGVSLPSQKSRIIAYCQSQGWNLYDLYIDDGYSGKNLNRPGMSKLIDDVKEHKIDAVIVIKLDRLSRRQKDVLYLLEDVFEPNKVGFKSVSEPFDTTTPFGKAAIGMMAVFAQLERETIVERVKEGKKEAAKQGRFMGGPIALGYNFNRDTRKLEINELEAETVRFIFSEYLTSGKGYQYIADELNERCIPTPGTATEWIRGTVRAILRNAFYAGLVEHKNSMHKGQHPAIISEENFYSAQKIKSIRTTYNPDAESGLLTGIIYCGECGARMRMKKVWKNPRKPMLPKVGYYTCYSQDGCAKSMIRDVNCKCGYKRAPEIDRAVVEHLYEYRQNPKLLKEAMDTLLDTNMNKHITKAKAQATKDLNTIKNKLEKWYDAFEKNIISADDLVDRIKDLREQRVFLENKILGYDETLNLNISKAVTVKEISHILKNFDVIWENATNEEHRQLLLSFVKSVTIDKNNNINITFG

SEQ ID NO: 10682 - protein, 488 aa, Unknown
  Description of Unknown: Integrase B10683 sequence
  cd00338,PF13408,IPR011109,IPR038109,PF07508, Coil,PS51736,IPR036162,IPR006119,PTHR30461, G3DSA:3.40.50.1390,PTHR30461:SF3,IPR025827,PS51737,PF00239, SM00857,G3DSA:1.10.10.2600,SSF53041
LKKAVFYGRYSSVNQTEQSIEGQLHVCEKYAEQNGLEIIAQYVDRAQSGKTANRKEFQRMITDSEKGMFEAVLVYKLDRFARNRFDSAMYKRQLRENGVKVISATENISDTPEGIMMEAVLEGMDEYYSAELARKLHRGMAESFRKGYFINRAAPFGYRVENHRLVIDEQKAPLAAEMFRRYASGERFTDLIQWLDGMGIPNGNGRSWQNWNLSVILKNRAYIGEYTRSDMEGFAPCPAITDKETFNKVQNRLAEFAHRARENKTKNHFDYFLSGFLICGECGKHIGGSSVAQKFHYYRCSGCRKKNYNAEKLHERVLTTLAEYLDSDKLDQLAQAAYEAYQQEQETSEVPALEHELQDVEKQLRNAVNAILKGVDTPFLKETMDELEKRRAALKSAILDAPTPLPEFTVNQFRYILEKKLSNSAREMLSTFVNRIILTEDELVICINLTDENNTPPLEQYLCKVGDMSGSPCLHKVIYMSGWLFVAA

SEQ ID NO: 10683 - protein, 488 aa, Unknown
  Description of Unknown: Integrase B10684 sequence
  IPR038109,PS00397,IPR006119,PS51737,PF00239,G3DSA:3.40.50.1390 ,PTHR30461,IPR025827,SM00857,G3DSA:1.10.10.2600, SSF53041,IPR011109,PF07508,PS51736,IPR006118, cd00338,PF13408,Coil,IPR036162,PTHR30461:SF3
MLNEQKRAAAYIRVSTDDQLELSPDSQLKEIKNYAKAHGYTLDEEYIFHDDGISGKNAKRRPGFMLMIATAKKKPKPFDAIIVWKFSRFARSREDSIVFKSQLKKLGISVLSVSEPITDDKMSIIVEGLIESMDEYYSANLSEEVKRGMLEKFSRKQAMTAAPFGYRLENKKYIPEPAEAEIIKECFDRFVNKNDTVWGIARDLNARGIKSKRGNPIERRTVQYWLQNPVYIGCIRYTTDGGGSRMRYSDGNYLLQKDCHEPIIDKATFEAAQKIFKKNREIYKTERTVSFHEYALKGIVKCSECGHNLTFCTHKEAPRVHCPAYVHSKCSSASSVKLDLLNEALLNDLRSALKDEHLTVDFSLADADKNNIQLQLEAELKKEQKKLDRIKTAYADGIDTLEEYKENKTAQLARIAELEKKLKTASAPLSSEQKQKRKKDLRQKIKTAIDALQSTAISEKEKNALLKSFISKALYNSKTKTLTVFYYA

SEQ ID NO: 10684 - protein, 488 aa, Unknown
  Description of Unknown: Integrase B10685 sequence
  IPR038109,PS00397,IPR006119,PS51737,PF00239,G3DSA:3.40.50.1390 ,PTHR30461,IPR025827,SM00857,G3DSA:1.10.10.2600, SSF53041,IPR011109,PF07508,PS51736,IPR006118, cd00338,PF13408,Coil,IPR036162,PTHR30461:SF3
MKTSKAYIRVSTLEQAREDRASIDTQKDRISSFARSQGLELSEQDFYIDTSSGATFVDRPSLERLRQDIRRGRVKHLFVWKQDRLSRTARDTLELLQEFKNYGVTYKSVTEPFDTSSKFSEAIMGIIAVFAQMERDNIAERMITGRYTKVQRDGTNFGSEPPFGYKTIEKRFVIVEEDAEIVRLIYKLYLQYKSDNRVRIELERRGISARVKLDRRQIMRILTNVKYTGRMKVKEIIYEQKHPPIIEIPMFEEVQRIRDANFKGYEASWSCVAPDFILRDVAKCGLCGREMVKREVPSQKKDRGRLGYYACSSCHRRNKKRDCEHRKFHKKEKLEGSVKEMIFEHIGALLNDSRYMQRHLNVTSQQEIDHIKAQIENKQKTLKSKDLAKKKWLQVFEKQDSPPDEFLERYEAIRKEIKELEGDISSLKASLEVEKAKKEDFKQKERFYREFDQNWEEASLQEKRDMINALIKIIRVFPKGNVEIDYNF

SEQ ID NO: 10685 - protein, 488 aa, Unknown
  Description of Unknown: Integrase B10686 sequence
  cd00338,IPR011109,IPR038109,PF07508,Coil, IPR036162,IPR006119,G3DSA:3.40.50.1390,PTHR30461,PS51737, PF00239,SM00857,G3DSA:1.10.10.2600,SSF53041
MLRPAAAGAEPLRAFIYDRNSRDPRRLGTAVRDQGVENQRLCEAYGWRIVEVFEDAGKSASRYATRTRPDYEEMLRRAEARECDVIVAWEASRLNRNTETYLSLRNLCERLGILLCYNGRLYNMERSDDRFATHLDALLAEREADAIRDRNKRTHRLILERGTPPGRLPYGFAREYDARTGALVRQVVDPAQGEVVREIARRVLEGQSCSSIARELNRRGVPAPWTSPAWTLESVKRVVVRPSSAGKRDHRGRVVGDAAWPAILEESDWQACVRVLTDPARLNHRGAQVRHLLSGLVFCGPCGGASRLRPKKVKGAVSYLCQRCYRVSMRAPMLEAFAVELVLGYVEREAFASSLLAVDVERGDVAARAVAEARAYEAQLAEATALAGQLAPGRGGLMVPALSAARLAAMEADLLPKIDAALARARGASVPAVLRDTAGPGARDLWEEDLDIGQRRVVIREVVRLQLNEGGMGARKIAPGRVTYEWLR

SEQ ID NO: 10686 - protein, 487 aa, Unknown
  Description of Unknown: Integrase B10687 sequence
  PS00397,IPR038109,IPR006119,PS51737,PF00239 ,G3DSA:3.40.50.1390,PTHR30461,IPR025827,SM00857 ,G3DSA:1.10.10.2600,SSF53041,IPR011109,PF07508,PS51736 ,IPR006118,cd00338,PF13408,Coil,IPR036162,PTHR30461:SF3
MNDIKRGALYIRVSTDDQTEYSPDSQIKLCYKYAKEHNIEILKEHIYQEDGISGTNVEKRTSFKRMIATAKKKPKPFDVILIYSFSRFARNREDAIMYKSLLRKKLGIDVVSITQPLSEGKESILMEALYEAMDEYYSVDLAEQSIRGKIEKASRGEHQGGTPYGYIYDKNTKTLYPDKEKAEIVKLIFKEWIKPEQSIRGLCRMLNDMNILTTRGCKWSDRSMYLILQNPAYIGYSRFTVGGMKRNYKHPDTITAKGKWEPIIDMETWNLAKQKMDDHDKKWFKYKKHYTKNEFWLRGIVKCSDCGKSLVRCNVKGKPVPFFQCTGFTKGRCQDSHYIRQDQLVPAILEQIKKDYTDKLNIKITEGKDTPQYDQISIIKKNIEKLKTKRERIKEAYINEIDTLEEYKENKKKLDNEEKQLKEQLKELNYKEKQEVRKEKTYELCKTAYEILSDEETSFDLKDDVAHRLFDHITYNKKENTLEIVYK

SEQ ID NO: 10687 - protein, 487 aa, Unknown
  Description of Unknown: Integrase B10688 sequence
  IPR038109,PS00397,IPR006119,PS51737,PF00239,G3DSA:3.40.50.1390 ,PTHR30461,IPR025827,SM00857,G3DSA:1.10.10.2600, SSF53041,IPR011109,PF07508,PS51736,IPR006118, cd00338,PF13408,Coil,IPR036162,PTHR30461:SF3
MNDIKRGALYIRVSTDDQTEYSPDSQIKLCYKYAKEHNIEILKEHIYQEDGISGTNVEKRTSFKRMIATAKKKPKPFDVILIYSFSRFARNREDAIMYKSLLRKKLGIDVVSITQPLSEGKESILMEALYEAMDEYYSVDLAEQSIRGKIEKASRGEHQGGTPYGYIYDKNTKTLYPDKEKAEIVKLIFKEWIKPEQSIRGLCRMLNDMNILTTRGCKWSDRSMYLILQNPAYIGYSRFTVGGMKRNYKHPDTITAKGKWEPIIDMKTWNLAKQKMDDHDKKWFKYKKHYTKNEFWLRGIVKCSDCGKSLVRCNVKGKPVPFFQCTGFTKGRCQDSHYIRQDQLVPAILEQIKKDYTDKLNIKITEGKDTPQYDQISIIKKNIEKLKTKRERIKEAYINEIDTLEEYKENKKKLDNEEKQLKEQLKELNYKEKQEVRKEKTYELCKTAYEILSDEETSFDLKDDVAHRLFDHITYNKKENTLEIVYK

SEQ ID NO: 10688 - protein, 487 aa, Unknown
  Description of Unknown: Integrase B10689 sequence
  cd00338,IPR011109,PF07508,Coil,PS51736, IPR036162,IPR006119,G3DSA:3.40.50.1390,PTHR30461,PS51737, PF00239,SM00857,SSF53041
MLNQKGIYAAYLRKSRADAEAEAVGKFETLAHHQQILTALADREGIKVARWYKELGSGDTIQDRPEMQALLHDVRSGLYDGVLVTEVSRLARGRTADQATVSEAFQVNGTLIITPSKIYDPSDDADETFIDFELFMARQEYKYIRKRMKAGKRQALLNGSYINWRPPFGFDRDEKNMSLTPNEDAPFVIQLLHDFADGKLTVADAIRRMRSYTGQETWSYTSLRYLLTNPAYIGMSQIDVAPTVKVSDGGKVTTKRIESKKPTLVKAKWDGLIDEETHAKILARFGTAPRTKTGTDLRNPFSGLLRCGKCGQTLVLNIPRDAKPRIIHLHGVRSGGCNCASCTLPVLIEGIADALEESLPYQEATFERKQKRVNTAPIRKKIADARKKQERLYDLFEDGTYTAEEFRKRRAYYADQISELETQLEEAEAVRSKPPVTISTKDAIRLIRDPSTPPRIINDYLKSIIEKIDYFRESAAEPPRLFIYPKQ

SEQ ID NO: 10689 - protein, 487 aa, Unknown
  Description of Unknown: Integrase B10690 sequence
  IPR038109,PS00397,IPR006119,PS51737, PF00239,G3DSA:3.40.50.1390,PTHR30461,IPR025827,SM00857 ,G3DSA:1.10.10.2600,SSF53041,IPR011109,PF07508,PS51736 ,IPR006118,cd00338,PF13408,Coil,IPR036162,PTHR30461:SF3
MNDIKRGALYIRVSTNDQVEYSPASQIKLCKKYAKEHFIEIIPEHVYQEDGISGTKADKRPQFQKMIANAKSKPKPFDVILIYDFSRFARNKEESVMYKALLRKKLDIEVVSITQPLTEGKESIILESMYEAMDEYYSVNLSENVKRGKIEKASRGEFQGQAPYGYTYDKNIKNLIINEETADIVKMIFKKWIEPEMTIKKLCNYMNNTGIKTTRGHLWCDRSIKLILQNPAYIGKVRFTEGGMLRNYNHPNMIIKDGKHQPIIDMKTWNLAKQKMDDHHKKWYKYKKEYSAHKHWLNGLLKCDNCGSSLTHVGGMKNRYPHFQCCGYTKGRCKVSHYLRDSQIIPVIIEQLKKDYTEKLDIKIINKESTSEYENIQLLEKQLKRLESKLKRVKAAYINEIDTLEEYKENKKTIEKEKEQINKELEKLNYQQTKEKRKEKTYKLCEEAYKILSNENASEELKDDISHRIFEKIVYNKKEESIEITYK

SEQ ID NO: 10690 - protein, 487 aa, Unknown
  Description of Unknown: Integrase B10691 sequence
  cd00338,PF13408,IPR011109,IPR038109,PF07508, PS51736,IPR036162,PTHR30461,IPR006119,G3DSA:3.40.50.1390, PTHR30461:SF3,PS51737,IPR025827,PF00239,SM00857, G3DSA:1.10.10.2600,SSF53041
MKIVGYVRLSRASREESTSIVRQREVIAKHCELRGLELVEIVEDDNTSATKTRLDRPGLTRVRQLVRDGDADAVMVWRLDRLVRSVVDVGVLLDEGLQIISATESLDTTSPMGRAMVEILQVFASMEAKTTGLRVAASQEHLRQVGRFPGGVVPYGYRAVPHPSGVGRALEPHPEEAAVVRRVADEVLAGSSVYAACVRLNAAEVKPRRAAEWGSTALQRVLRSDAVLGRVRTGSVRAPHPATGKPHIVKPAELIRDENGLPVVFWEPILPVEDVERLRALTDWTPTPGRAEATQRGRRKKAARLLSGMISCPGCGGNLVRKNRRSTTGHDIYACHAAGQGRDCPRGVAVECHRVEEEVERQFLAIVGHYLVVEQRVTVRDVPGLAAVDEALRDTTAALSRPGADLPPLMERLQRLHAERARLDATPAAPSVELVETGETFADTWRRRDMLGRRELLIASGAEVEIAPARQRGKWDPSRVTLTLTAG

SEQ ID NO: 10691 - protein, 486 aa, Unknown
  Description of Unknown: Integrase B10692 sequence
  cd00338,IPR011109,PS00397,IPR038109,Coil, PF07508,PS51736,IPR036162,IPR006119,PTHR30461, G3DSA:3.40.50.1390,PTHR30461:SF3,PS51737,PF00239,SM00857, G3DSA:1.10.10.2600,IPR006118,SSF53041
MIIAAAYVRVSTDEQTDYSPAAQLADIKEYATHNGYHIPEEFIFMDEGISGKRADKRPAFQAMIRQARKKSNHIQYIIVHKFDRFARNKEDSVLYKALLKKDGVKVISVKEPIPQDDKFAVIYESMLEAMAEYYSLNLAEEVNKTMIKKAQAGEWQATAPFGYKNENKSLTIVPEEAKMIRYIFEQYIAGTSMFALSRQMNQMGYRTHRGNVFEHRTIQYILNNPVYKGYLRWTPGKKINRNFNDSASIVAKGDWEPIVSKEIWDAAAARFKNEKRTYYKHKRPETEGIHWLSGMVKCSSCGRSLVVGAKYKSGAAQFQCGGYCHGQCHDSHAVSSNRLIPAILSELEKIAAHPDTEGCRYTIRRELPASDELDVYVPLLAKAQQRLKKAKDAYLNDIDTLEEYRSNKMNIEKEIAELKEHIAEIEERQNMPFDQAAFSTKIASVIEILRDDSRQMEDKRKAFKSVCDKIIFHKHDSSLELFLIDQ

SEQ ID NO: 10692 - protein, 486 aa, Unknown
  Description of Unknown: Integrase B10693 sequence
  IPR038109,PS00397,IPR006119,PS51737,PF00239,G3DSA:3.40.50.1390 ,PTHR30461,IPR025827,SM00857,G3DSA:1.10.10.2600, SSF53041,IPR011109,PF07508,PS51736,IPR006118, cd00338,PF13408,Coil,IPR036162,PTHR30461:SF3
MPELKIAAVYLRVSTDDQKELSPDSQLEALRAWAEKNACVIPEQYVYVDEGISGRSAEKRPKFMEMIGAAKSAEHPFDAVLVWKFSRFARSQEESIVYKAMLSKVGVDVISISEPVIEGPFGSLIERIIEWMDEYYSIRLSGEVKRSMTVNAQRGVPQIAPPFGYRKNPAEGSPFMVPEETEAAVIREVYSDYLSGVPVWKIVDGLNVRGIRTHRGGKIENRTVTYWLQNPVYIGMVRWTPSGRTRRDFHNPDTITAPGDHEPLVSREDFDAVQLLVAAAAETHRPKSRPSFELKDWASGVVRCASCGSTLVFQRPRYFICNGYVRARCKNRNSITVDALHTAILEKLRADSSAAYPLRYKITRSDDTERELRVLRQQADQYDRKLSRIRDAYAAGIDSLDDYRRMKEALDAQHAELLGKIAELESRVDPAAAEAALTESIRKTLETLEDSDTPLHEKNTAAKALFETVIWDKATETLTITYRVFI

SEQ ID NO: 10693 - protein, 486 aa, Unknown; identical to SEQ ID NO: 9864
  Description of Unknown: Integrase B10694 sequence
  cd00338,PF13408,IPR011109,IPR038109,PF07508, Coil,PS51736,G3DSA:3.40.50.1390,IPR006119,IPR036162, PTHR30461,PS51737,IPR025827,PF00239,SM00857, G3DSA:1.10.10.2600,SSF53041

SEQ ID NO: 10694 - protein, 486 aa, Unknown
  Description of Unknown: Integrase B10695 sequence
  cd00338,IPR011109,IPR038109,PF07508,Coil, PS51736,IPR036162,IPR006119,PTHR30461,G3DSA:3.40.50.1390, PS51737,PF00239,SM00857,G3DSA:1.10.10.2600,SSF53041
MNVAIYLRKSREEDNETREETLARHERILLDYCNKNDLLIKQIYKEVVSGESISNRPQMQLLLDDVRNNLYDGVVCVELERLSRGNQIDQAEILEIFKKTKTKIYTLNKIFDLSSEDELDEEFFEFGLFMSRREYKVIKRRLIRGRRQAQKEGYFIGSILPYGYSKEKQGKGYVLIPNEQSKIVQLIFNKYVIENLSSAQICDYLNELGIKSQKLDKWNTTAVRKVLRNITYTGIIQADTEKEVKLFYDGKHEPIISDEIFSQAQSKLKSLTTKKKKDCDLQNPLATLCKCHYCGVTMRRTVTPKVKYPVFKCGTRGCVNMSASLYDVESKVIEELEKKLKDFKYFINNYSDEISNKKKLVNDEIELINKEISKKESMIDKCCEMLEEGIYTKEKYLTRVNILENDLKALKVALNGLKSTNFDESDNILKTIPKLELVLKEYWNLDAENKNRLLKTIINKVTYKKDTRKVRNEPDIFDVEVDIKYI

SEQ ID NO: 10695 - protein, 485 aa, Unknown
  Description of Unknown: Integrase B10696 sequence
  cd00338,IPR011109,IPR038109,PF07508, Coil,PS00397,PS51736,G3DSA:3.40.50.1390, IPR036162,IPR006119,PTHR30461,PTHR30461:SF3, PS51737,PF00239,SM00857,G3DSA:1.10.10.2600,IPR006118,SSF53041
MKIAAAYVRVSTEEQTELSPDSQVKLIREYAKKNGYIVPKEFIFHDDGISGRSTAKRQGFNQMIGTAKLKPKPFDAILLWKFSRFARNREDSIVYKSMLRKLGIDVISISENVGDDKMSVLIEAMIEAMDEYYSINLAEEVKRGMTEKFGRGLKVSGPPLGYDMKNGEFVVNEQGAEIVHRIFDMYVNQDMGYLNIARELNAEGIRTLHGNDFETRTIAYIIKNPVYIGMQRWTPGGGGSKGHYRSAAAENVVVTQAPHPAIIDKEIFEKAQQKAAKARRPYERSGFTKHEYMLRGLLKCSSCGSNLTMGSVKSGTLQCYQYAHGRCKESHAITIGKIDKAVIEDIQGLVDGTATDYKLVDQSPAKPKKDTSKFETQLERERMKLERVKAAYADGIDTLEEYKRNKSEVLASIAELESKLRQAQPPRAQPTADRLPDLKVRAQEVLKVITSPNATPVEKNNALRTIVDKVVFDRKTSSIEMYYLC

SEQ ID NO: 10696 - protein, 485 aa, Unknown
  Description of Unknown: Integrase B10697 sequence
  IPR038109,PS00397,IPR006119,PS51737,PF00239,G3DSA:3.40.50.1390 ,PTHR30461,IPR025827,SM00857,G3DSA:1.10.10.2600, SSF53041,IPR011109,PF07508,PS51736,IPR006118, cd00338,PF13408,Coil,IPR036162
MTDLKIAAAYIRVSTDDQVELSPASQLVEIRKWGAANGYLVPDEFVFVDEAKSGRKVTGRDEFRRLIATAKTKPKPFDAILLWKFSRFARNRDDAVYYKSILRKQLKIEVISIKEPIEDGKMGVIMESMIEAMDEYYSINLAEDVKRGMEEKHRRGELQATPSFGYTVLDNVLVPVPEEAVYVQEIFSRFVSGEGFYTIARWLNSMGVKTHRGSTFENRTVEYILRNPVYIGKLRWNPAGRSRRDYADPNIIVTDGKHEPLVSEETFQQAQTRIAQLKAAMPYKARPLGSNKDWVSGLVRCASCGSTLIFAKPHYWKCNNYVRGRCRASQHISSDLLKKAILDRLHMDAAASAPLSYDVLRVNGRDGDTTAALRTQRASLERRLERLREAFLAGVDTVEEYRQLKEDAQAQIQRIDQELSAAAAENRRAGDVSIMRSAISDALAVIENEDASLEQRCNAARSIIDRITWDKAQNLLTIHYRLMLE

SEQ ID NO: 10697 - protein, 485 aa, Unknown
  Description of Unknown: Integrase B10698 sequence
  cd00338,IPR011109,IPR038109,PS00397,Coil, PF07508,PS51736,G3DSA:3.40.50.1390,PTHR30461,IPR036162, IPR006119,PTHR30461:SF3,PS51737,PF00239,SM00857, G3DSA:1.10.10.2600,IPR006118,SSF53041
MSPNPRIAAIYIRVSTDDQAELSPDSQLETVRAWAGQHGYLVPEQYIYVDEGISGRRADKRPAFNDMIALAKQKDRPIDAILLWKFSRFARNQEESIFYKSMLRRNGVEVVSVSEPIIDGPFGTLIERIIEWMDEYYSIRLAGEVRRSMVLAAQRGQRQTAPPFGYQRNPAGKPFMVPHPEEAEIIKGVFRDYLAGVPVLRMVDTLNAAGVRTHRGGPIENRTIMYWLQNPVYIGKNRWTTTGRARRDFHHPDSVIVDGDHAPLVSQEVFDEVQKRVAEAAAAHRPKARPSFELKDWMGGVCRCATCGSTLVFQRPHYFICNGYVRARCRDRQMITLEDLHDAVLSRLRADGSLSRPLRYTVTSSDETAQELKSLRLQADQYDKRLARLRDAYLNGVDTLEEYKNARDQLNQSQAETQQRIKALESRSDPQLAETALKKSILSTLATLESDADLHEKNAALKMLIDSCTWQKSTKTLEITYRVFL

SEQ ID NO: 10698 - protein, 485 aa, Unknown
  Description of Unknown: Integrase B10699 sequence
  PS00397,IPR038109,IPR006119,PS51737,PF00239, cd03768,G3DSA:3.40.50.1390,PTHR30461,IPR025827,SM00857, G3DSA:1.10.10.2600,SSF53041,IPR011109,PF07508,PS51736, IPR006118,PF13408,IPR036162,PTHR30461:SF3
LLFCYARRNEDRMRVIIYVRVSTAEQAQEGYSIGEQTERLTAFAAAMSWTVVRVCTDPGYSGAKLERPGLKELIRSVEAGQTDKVLVYKLDRLSRSQKDTLYLIEDVFLKNGVDFVSMSENFDTASAFGRATIGILAVFAQLERETIKERMLLGKVGRAKDGYYTGKQILVGYDYVNKLLVPNAYETMLIRTIFDDFLSGRPISTIAAELNKKGLYHRGRPWYSQTVRRILSNRTYIGEVLYQGVWYAGRHEPIIERDVFDRAQRLLQLRAESYTSSNNHVSPLTGFLWCGRCGAKYGRQRWMKRNDGTRKVCYMCYTKSKKCKTMITADHCDNKNWETDELEAVIFNEIRKLGTDPEYLTSEKKRAQEEREATDSAQLIRSEVTGLSSQISRLMDLYSLGSLSLSEVDAKIRPLAERRDKLEAELKAMTTPEGAIPTDEAAQLVQSFGDVIDRGDLTEIRLVLTSLIRKIVLDGDNIEIYWNFT

SEQ ID NO: 10699 - protein, 485 aa, Unknown
  Description of Unknown: Integrase B10700 sequence
  IPR038109,IPR006119,PS51737,PF00239,G3DSA:3.40.50.1390, PTHR30461,IPR025827,SM00857,G3DSA:1.10.10.2600,SSF53041, IPR013087,IPR011109,PF07508,PS51736,cd00338, PF13408,PS00028,Coil,IPR036162,PTHR30461:SF3
MRKAVFYGRYSSANQTEQSIEGQLHVCEKFAAQNDIQIVRHYIDRAISGTSDNRPQFQQMVVDSKQKNFEIVLVYKLDRFARNRYDSAIYKKKLRDNGVRVVSATENITDSPEGIIMEGLLEAMDEYYSAELSRKMMRGKEESFQKGYYLNHVAPFGYKLVDRRLALDEATAPLVPKIFRSYLDGKKIGQIANELNAKGISTAAGTHWKPMDVSRLLHRRLYIGEYTFGDFEGVMPCPQIVPHELYDAVQKYIAEAAARKRKRKDYNYMLTGKLRCAECGKSVCGSTSGKNHYYYCRHCNGARSIDADYLHDKVLSALGEYMTEDKVAEIAAAAYAEYQQEEQMDERPALERELKSVDTQIQNAVNAIVAGAALPELQDKIAQLKERQETLRKALLDVPTAMPRLTEAHFRLVLSEMAKQSSEELFKTVVGLVLLKGDTVIICVNLTDETNIPPLEQILFRVTDAGTSDTQNKAIQMSGWLLIAA

SEQ ID NO: 10700 - protein, 485 aa, Unknown
  Description of Unknown: Integrase B10701 sequence
  cd00338,IPR011109,IPR038109,PF07508,Coil, G3DSA:3.40.50.1390,IPR006119,PTHR30461,IPR036162,mobidb-lite, PS51737,PF00239,SM00857,G3DSA:1.10.10.2600,SSF53041
MKTRVAIWAAVSSKPQAAGDKTSLSDQEHLGRQYAERIGGEVVRIYKVPGHTRDVTFWDEAASAMPAYRELREDAEAGAFDDLWVLDPDRLGRDPALSHQVASLVKKGGQRLWVEDGQYYVSEESSAGGYMFAFQSQRGGEMQRKRVMRHDSGMRGRVKRGLPPNNWPHGYRGVRDENGKVFKGEFVQGEIEAVRLATELYLAGAGIFTIAHDLDASPWKPRQSEHWSFATVRKMLHNSIYAGIVHYGEVRNPKQSDKFPAVWDEATYKEIIREHQRRKRGGTRPASPVSGCMICAREGCGWSMSSLERKGVRYFRCSRHAAYGGCHHNLIRESIIIENLEFAISKELQRPGGVEAALNQIGPGRATIEQEIGAIQAQVAAIEDKQYRLAILAEDGAIDIEAARRRTSELAEQLAAADRSLRQAQEKLTTLPDPGEMCQRLEQVAELVDLRSKPLEVVRNLLLRAGVKVYVENREIVRITFGELS

SEQ ID NO: 10701 - protein, 485 aa, Unknown
  Description of Unknown: Integrase B10702 sequence
  cd00338,IPR011109,IPR038109,PF07508, Coil,PS51736,G3DSA:3.40.50.1390,IPR006119, IPR036162,PTHR30461,PTHR30461:SF3,PS51737, PF00239,SM00857,G3DSA:1.10.10.2600,SSF53041
MQHENFSIDSQRRICAQFCEIRGWKIINEYVDDGFSAKTTSRPDFERMLAAARGSEFDVIVCHKLDRFSRSILDILTTLNELEKYRVAFASATEQHDFTTPLGRVLLTLLAAFAQWYIDNLSVETARGKRERFEQGHHNNRPPIGYTRTDDTIEFDANAPHIKAAFEMYATSNHSDEDIATYLSARVGKPIGKDSAAAILRNPFYAGWVVYRGGGGDKRGSKTKMRLMRGNHAALIDQNTYDEVTRIRASRSRHGGAPKSDRIYLFGEQLAVCAACGRPLRAKALSDRDYAKTYRCTSRERGLECSASQSPVREAFLTDQLERMIAALTLPKNMRDLALSEISSNSLAESVERERKSLEAERERVLKLFQRGHITEAGLDTETERIAADLARLPTPTRQDNAAIAAYLDDTLKIWRGADETAKRDILRILIERVIIDTNSKKIAAFVPRRDFINMFEASKQLRYLVDGSDGFQHITRGIAAYKLP

SEQ ID NO: 10702 - protein, 485 aa, Unknown; identical to SEQ ID NO: 9849
  Description of Unknown: Integrase B10703 sequence
  cd00338,IPR011109,IPR038109,PF07508,Coil, PS51736,IPR036162,IPR006119,PTHR30461,G3DSA:3.40.50.1390, PS51737,PF00239,SM00857,G3DSA:1.10.10.2600,SSF53041

SEQ ID NO: 10703 - protein, 485 aa, Unknown
  Description of Unknown: Integrase B10704 sequence
  IPR038109,PS00397,IPR006119,PS51737, PF00239,G3DSA:3.40.50.1390,PTHR30461,IPR025827, SM00857,G3DSA:1.10.10.2600,SSF53041,IPR011109,PF07508,PS51736 ,IPR006118,cd00338,PF13408,Coil,IPR036162,PTHR30461:SF3
MNEKNNNFLNIEKLYNDYYIKCEENFTKGCAYIRVSTDDQVEYSPTSQLKLILKYALENRIFIEEKYIFHDDGISGTKADKRTSFLKMISIAKSKPKPFDIILVYDFSRFARNKDESVMYKTLLRKKLNINVISITQPLTEGKERVILESLYEAMDEYYSLNLSENVKRGKREKAERGEHLSYAPFGYTQVDKKLVIHEENAKLVKSIYDMFINTENIKHICNTLNDLGIRSTRGKLWGRKTITLILKNKTYAGYVKNRDKYYKGIHEPIIDEEKFEKVQKIWQYRDEHFKKCKNQVQHNHWLRGILKCGECGYGMYYFKRKDRDYAIFNCGGYTYGRCSSHYVKVTDVENAIIKQIKNDFTKKIDINITSNNMNDSEYKIALSNLNSIENKLIRIKEAYINGIDTLEEYKENKVKLQSQLEIANKKIKETQIPSKKVIYKKCEQAYKIFKDPEVDKKIKFDISHELFDKIVYDKKNEKLIITYK

SEQ ID NO: 10704 - protein, 485 aa, Unknown
  Description of Unknown: Integrase B10705 sequence
  IPR038109,PS00397,IPR006119,PS51737,PF00239,G3DSA:3.40.50.1390 ,PTHR30461,IPR025827,SM00857,G3DSA:1.10.10.2600, SSF53041,IPR011109,PF07508,PS51736,IPR006118, cd00338,PF13408,IPR036162,PTHR30461:SF3
MKNVAAYVRVSTQEQADEGYSIGEQQDRLKKYCEAQGWNLVHTYTDPGFSGAKLDRPALQQLLSDIPSGAFDTVLVFKLDRLSRSQKDTMYLLEDQFIKNNIDFCSIMESSLNTSTPLGKAMIGILSVFAQLERNNITERMTMGRIGRAKSGKHSGGVAPFGYDYANGELVINEAEAVQVKLIFDLFLHGLNGKEMSLNQILSYLHERYMIRGAEWIHASTIPRILQNPVYCGMIKFSGKPYPGTHEAIIPLKEWEIAQAKYQSYTSSFSETAANFKKSAHLLTGLIKCGLCGGNFGATTWKNRHVTATSQPYYGYYGCRQRFAKVNKIKCGNSHYGIRQLEDRIIKEIRSLSLDPEELKAVGSDKKTSPEPPAYTAALKHLAEIDKQINKLLDLYQVDGIDISVVSARIKTLNEDKDRTNVILSEFESQRSVHSSSVDEAIEVLRNFDDVVASGDTELLRTAIRSLIDSIVAFPDHIEIHWSFA

SEQ ID NO: 10705 - protein, 485 aa, Unknown
  Description of Unknown: Integrase B10706 sequence
  IPR038109,PS00397,IPR006119,PS51737,PF00239, cd03768,G3DSA:3.40.50.1390,PTHR30461,IPR025827,SM00857, G3DSA:1.10.10.2600,SSF53041,IPR011109,PF07508,PS51736, IPR006118,PF13408,IPR036162,PTHR30461:SF3
MKKVVGYVRVSTHEQADEGYSISEQQDRLKKYCDAQGWTLVHIYVDPGYSGAKLDRPALQQLLSDIPSGAFDTVLVFKLDRLSRSQKDTMYLLEDQFIKNNIDFCSVMESSLNTSTPLGKAMIGILSVFAQLERNNITERMAMGRVGRAKSGKHSGGSTAPFGYDYINGELAINESEAVQVRLIYDLFLNGIDGKDISFQQMLQYLRKRYLKRGMEWAHSSSLSRIIQNPVYCGMIRYSGQTYPGLHDPIVSREIWDKAQVKYSHYITSTAAATNFDKTPHLLTGLIKCGVCGATYRTCTCKNKYLTASSHPYYGYYMCRPSGHHKAKCSNKSYKMDILEEQVLKEIKSLSLNPEELKGMGSEPKTKFSESPLYIAAMKHLEEINKQVRKLLDLYQIDGIDIADVSERIKILNEDKYRTNVIISEFENSIQNPSSSVDDAIEVLKSFDDVSSSGDIELLRTAIRSLIDKIVAYPDHIEIHWSFAG

SEQ ID NO: 10706 - protein, 485 aa, Unknown; identical to SEQ ID NO: 10000
  Description of Unknown: Integrase B10707 sequence
  cd00338,PF13408,IPR011109,IPR038109,PF07508, Coil,PS51736,G3DSA:3.40.50.1390,PTHR30461,IPR006119, IPR036162,PS51737,IPR025827,PF00239,SM00857, G3DSA:1.10.10.2600,SSF53041

SEQ ID NO: 10707 - protein, 485 aa, Unknown
  Description of Unknown: Integrase B10708 sequence
  cd00338,IPR011109,IPR038109,PF07508,Coil, PS51736,G3DSA:3.40.50.1390,PTHR30461,IPR006119,IPR036162, PS51737,PF00239,SM00857,G3DSA:1.10.10.2600,SSF53041
MKPQIGAYCRISYDRDGRELGIERQLADLTSLADKRGWEIAATFIDNDVSAFNKSITRPAFEQLYDRLKSDKTLGIASYDLDRLWRQPRDLERIIDLYENTKRPFATIQGDVDLSTSNGRAMARVMVAFANKSSEDTARRIKRKIQEQAENGQPHWGKRPYGYNLDGTLDPEEAPVVRRIGEQFLNGYSYRDITYRLNEDGIFSRAGKPWTVGNIRRFMVAERFAAIRLHDGVEYVGSWTPIFTRDEWARIQHLVKARKEPYADRPKAKKYLLTGMLYCACGGFLHGMTKRDGKMKSLPEGRLRRTYQCPSSSATERRTKNCASTTVGAEPLEHFLKEAIIMRLDSPELASYLAEDASGNEQLPALLAERAEVDASLNELASDYYTHKLLSRDEFFAARGSTQGRLRALDRTIDSLRVSRFKLDLSAGETVRQAWDERPDSWRRELMEVLIEKVVINKSSMKPYYVFDNKKTRFDANRVEIAWKV

SEQ ID NO: 10708 - protein, 485 aa, Unknown
  Description of Unknown: Integrase B10709 sequence
  PS00397,IPR038109,IPR006119,PS51737, PF00239,cd03768,G3DSA:3.40.50.1390,PTHR30461, IPR025827,SM00857,G3DSA:1.10.10.2600,SSF53041,IPR011109 ,PF07508,PS51736,IPR006118,PF13408,Coil,IPR036162,PTHR30461:SF3
MSIKKISNNRVILYVRVSTQEQAREGYSIQEQIERLTKYCEAMGWTIVHVYTDPGYSGATMDRPGLTKLIKDVKNGLADKIVVYKLDRLSRSQLDTLYLIEKVLLANDTDFISMNENFDTSTPFGRAMVGILAVFAQLEREQIRERMMMGKEARAKEGKFHGSKNIPIGYDYVDGLLTPNQFEKIQVVEAYNLAAAGLSPYKIAKRLKEAGYSHKYGEWTDRAVRRILNNKTYLGYIKHAKDWYKGLHEAFISEETYETAQKILNERSEQHLQYNRRAGLATSYLGGFLYCKKCGAKYSKNTSLYTSKTGKRRYSAFKCNSRDGRKKYLVKDPNCKNKIWKEDVLTDLVFEEIHKLATDPEYIARIQAEKIEDERPAIISAEKEKLEDQISKLMDLYTLGNMPLEMVEKKIHEINDHKAKLETELEKIIQENAAKLTEAEAIELVRTFGDILDRGDFDEIRITIATLIEKIEIDDELVEIHWNFV

SEQ ID NO: 10709 - protein, 484 aa, Unknown
  Description of Unknown: Integrase B10710 sequence
  IPR038109,PS00397,IPR006119,PS51737,PF00239,G3DSA:3.40.50.1390 ,PTHR30461,IPR025827,SM00857,G3DSA:1.10.10.2600, SSF53041,IPR011109,PF07508,PS51736,IPR006118, cd00338,PF13408,Coil,IPR036162,PTHR30461:SF3
MKTGALYVRVSTDDQVEYSPDAQIRLGLEYAKKNNIIIPKQFIFQDDGISGRKATNRPAFQELIAMAKSDEHPIDVILVWKFSRFARNQEEAIVYKNLLKKADVDVVSVSEPIPDGFIGELVQRIFEWMDEYYSINLSGEVMRGMTERASRGGYNAAPPLGYKMQDGIPVIVPEQAEIVKKIFTWYVDDKMSFFDIAVKLNALGYRTKRNGKFQNRTIAYIIRNEFYNGKIIWNRLEHATRNVKDKSEWIVTDGGHDTFISNELFTAAQKRDKATKRPGKKVRPASTYKHWLSGLLVCSACGGRLVRAGKSKSGNTYFQCTAYNHASCNESHLTNENALKPAILEALQKVLDNGTVEYVVHSTNQEEKSESELIENKLNRIDMKEERIKEAYRDGIDTLEEYKANKEILQREREQLTAMLEQYSKKPEDENESILLNKIRSAYDIIKSDNSTDRQKHDALTSVVDKIVYDKKGGALLMYFYIND

SEQ ID NO: 10710 - protein, 484 aa, Unknown
  Description of Unknown: Integrase B10711 sequence
  cd00338,IPR011109,IPR038109,PF07508,Coil, PS51736,G3DSA:3.40.50.1390,PTHR30461,IPR006119,IPR036162, PS51737,PF00239,SM00857,G3DSA:1.10.10.2600,SSF53041
MKKVLLYLRKSRDDENESKEETLARHERMLLDYCSRYDLSIEKIYREVVSGESIAARPEVQKLLDDIQAKDYDGVVVVELERLSRGNPIDQAEILEIFKKSQTKIYTLNKIYDFSVDDDLDEEFFEFGLFMSRREYKVIKRRLLRGRKQAQKEGYFIGSITPLGFEKKKDGKGFVLYPDENANKIITIFDMFVNQSRPLSDIRDYLIHSGLRPARAVEWTSRRVRQILENQNYIGNIKVMGEWQQGKHDGIIPEDVFNAAQVKLQNDLPKVRKQYQIKNPLAGICKCAICERPLQLSANEYAGRTPIKCRTTNCPTVSTYLEILEPMIIEGIQDALEGYRLELDDLPTTAAKRREAMKKEREIYITELEKKQAMLDKASEMLEIGVYSVEKYLERENILRKDISALQANLDALSDTSELEEIEKLENAVPILEKCLDEYWTLKPAEKNEILKSFVDKILYRKSIKNNSHHKNLDDANVEIFLKI

SEQ ID NO: 10711 - protein, 484 aa, Unknown
  Description of Unknown: Integrase B10712 sequence
  PF13408,IPR011109,IPR038109,PF07508, Coil,PS51736,G3DSA:3.40.50.1390,IPR006119, IPR036162,PTHR30461,PTHR30461:SF3,IPR025827, PS51737,PF00239,SM00857,cd03768,G3DSA:1.10.10.2600,SSF53041
MNETRVALYPRVSTQEQAKEGYSIGEQIERLTKYCEAMGWTIYKIYTDAGYSGGSTDRPGLQMMLQDIRDGKVDKVVVYKLDRLSRSQKDTLTLIEDEFLANNVDFVSMNENFDTSTPFGRAMIGILAVFAQLEREQIKERMTMGRDARAKEGLFHGGPKCPIGYDYIDGKLEVNEYEAMQVKELFNKFIAGVPFRSIENSFKKRGLVHKNGDWSNKTLRRVIQNEIYIGKVKFDGEVYDGIHTPILDEETFKKANLLYADRKTQFTTNDRRKTGQFNFLTGFTYCAKCGGRYHHIHYKKKYKKGLTDYNYYTCYSRSKVVLSMIKDRDCKNKNWKREILEGLVFDEIKKLATDPDYISQVKDLKVKDEFIDDSIAILQAEIAKLEKQISKYMDLYSMDSLSYEEVEDKIKPLSARKKSLSSELEVLTEEITPALTEENTITLVQSFEDILERGDYDEIKLTLDTLIKKIVIDGEDVTIYWNFQ

SEQ ID NO: 10712 - protein, 484 aa, Unknown
  Description of Unknown: Integrase B10713 sequence
  IPR038109,PS00397,IPR006119,PS51737,PF00239,G3DSA:3.40.50.1390 ,PTHR30461,IPR025827,SM00857,G3DSA:1.10.10.2600, SSF53041,IPR011109,PF07508,PS51736,IPR006118, cd00338,PF13408,Coil,IPR036162,PTHR30461:SF3
MANTDLTVAAAYIRVSTEDQTDLSPESQLEKVKEYAAKNNMLLPSEFIFHDDGVSGRAANKRPGFQRMIAAAKDPVHPFSVIIVWKYSRFARNQEESIFYKSILRSKCNVDVISVSEPLIAGPFGSLIERIIEWMDEFYSVRLSEEVKRSMTVNAKNGVLQSTASFGYKVENGVLVPVPEEAELIKEIFHRFLSGEGFYPIAQDLNSRGIKTHRGSRFENRTVEYIIRNPVYIGKLRWNPAGRTRRDFHNENIICAKGAHEPLIDEETWEAAQLRVEQLKSQWAYHGRPSSDRKHWLCGIVRCASCGATLIWSQPHFLKCNNYARGSCKTSQHIAVELIEESFIQQLRHDFSFSSEISYQIIDIPKPQDTRAGQLRRNRDRMLSRLARSRDAYMNGIDSLEDYAAIKASIQKEIDQIDAELSTLESASGASTEVSMKDSIKRTLETLESDAPISKKYDAVKRIIDTCTFDKQNMLLSIVYRYEI

SEQ ID NO: 10713 - protein, 484 aa, Unknown
  Description of Unknown: Integrase B10714 sequence
  IPR038109,PS00397,IPR006119,PS51737,PF00239,G3DSA:3.40.50.1390 ,PTHR30461,IPR025827,SM00857,G3DSA:1.10.10.2600, SSF53041,IPR011109,PF07508,PS51736,IPR006118, cd00338,PF13408,IPR036162,PTHR30461:SF3
MNKKVRVAIYVRVSTQEQAKEGYSISEQTDRLTSYARINDYAIVKVYTDAGFSGGNMNRPALSEMISDITAGRIDKVCVYKLDRLSRSQKDTMTLLEDIFLKNHVDFESMTERFDTSTSFGHAMIGILSIFAQLERENIKERMSLGMYARLKQGKWKGGARTPFGYDYDQPNDVLVVNDYESMIVKYIFEAVASGKTLFTVSETLRKNGYAFHNGKVDRKTMRYILRSKTYLGYIKCKDEWIKGLHPAIIDKETYDKVQAILDANQRRFESSGYKTGTSAISTNLGGFIYCAHCGSKYSKYKTGDAKSGWHYNYACYSRHKKVKTMIKDPNCKNKIYRIDDLDGIIFDEIRKLAIDTSYIDAIRQDHRQDETGRQISAIRQQIGSINSQISRLLDLYSTGRYSIDDLDSKTLPLTDQRNRLQATLESLQESTDTMTDAEVIDLVESFSDALDHGTLQERRTIIEQLINKIVIDNDEITIHWNFA

SEQ ID NO: 10714 - protein, 434 aa, Unknown
  Description of Unknown: Integrase B10715 sequence
  cd00338,PF13408,IPR011109,IPR038109,PF07508, PS51736,IPR036162,IPR006119,PTHR30461,G3DSA:3.40.50.1390, mobidb-lite,PS51737,IPR025827,PF00239,SM00857, G3DSA:1.10.10.2600,SSF53041
MARTIKKVEFLPKMPKLLNVAAYARVSSGKDAMLHSLSAQVSYYSEKIQKHTGWKYCGVYADEAATGTKDNREQFQKLLEKCRAGSVDLILTKSISRFARNTVTLLETIRELKDLGVDVYFEEQNIHSLSADGELMLTILASYAQEESRSASENRKWQIRKDFKEGKIGSITIFGYRRNADGILEIEPTEAEIVKMIFSDYLSGMGGLKIAKKLNEMGIRTAQGNLWTSPRIKELLSNEKYVGDMLLQKYFRNNHIEKRKMQNNGELPKYLVEDAHEAIIDRDTFQKVQELIAQRQSKFSHTGSKNRYPLSGMIQCGCCGKNYQRKVFKQGSAWICATFARRGKKYCPAAKQIPENILQSVLCEVLGLEKYDDDAVLKYIRQIIVPEPNELIFIFYNGKQVQKHWENPSRSESWTEEMKQKAKERSLQWHEKSQ

SEQ ID NO: 10715 - protein, 484 aa, Unknown
  Description of Unknown: Integrase B10716 sequence
  cd00338,PF13408,IPR011109,IPR038109,PF07508, Coil,IPR036162,G3DSA:3.40.50.1390,IPR006119,PTHR30461, IPR025827,PS51737,PF00239,SM00857,G3DSA:1.10.10.2600, SSF53041
MARLRPVPQAQPRALALIRVSKEREGMVSPELQDTAIGDYCARRGYVITERMEGLDESGSRSKSRWWAKLDTAVGMIEAGAVDVIVVWKFSRTARHRLRWAVALDRVETAGGRLESATEQVDVSTSTGRFTRGMLAELNAFEAERIGEQWKEAHARRLGKGLPSRGGDRYGYVRDGDAYSPDPTTGPVLAGMYADYLDGVGFSTIARRLNRAGERTLAGQVWSSERVAAVLDSGFGAGQLAIGKRRDVTWVPGVHRPVVDAKTWAAYREARGERRGQPSSGAPLYPLSGLLYCGDCGALMYAARLGRVAGYGFICSRWAKTGEGRCVTVSRAKAERTVLAWLASYAAEVEEQAARQAVRAAAQLVARSDATDLRRQVVRLDERLNKLTAGWTEGLVPDAAYAATRDQLTAQREDLVVRAREAEGRSVALKRPAAPMVTELLATWDEKPAAGIRDMLSHLVRRVVVVRPVDGPVEVRVEPVVDLE

SEQ ID NO: 10716 - protein, 484 aa, Unknown
  Description of Unknown: Integrase B10717 sequence
  cd00338,IPR011109,PF07508,Coil,PS51736, IPR036162,IPR006119,PTHR30461,G3DSA:3.40.50.1390,PS51737, PF00239,SM00857,SSF53041
MKTPSRARRAGLYIRISDDREGAGLGVKRQADDCRELAERLGWKIVETYDDNDLSATDRRKKRKGYARLLADIESGRVDGILAWHPDRLYRQPRELEDLIDLVEAHEVEIKTYTAGEMDLNTPTGRAMARMIGLMAKYEVEHKQERVLRKVQELVQAGAIHNGGHRPFGYERLFDGEGRRRKVIEDRIDETEAKYVRDWAKRALEGESLYSLVTDANTRGIKTSTGGAWSYQGMRFLLSSGRIAGLKEHKRQVVGKAVWPAIISEDEHKALRALLSDRAEQAKASGAQRTSTALKYPLSGLVRCTCTEEGIRMRTAPSSNRKGPVYRCPPKGDGGCGGRTIRIEDLERLVEKLVFAKLEEVEPLDVAVPDDPRPSLEAKVAKWERRVKELKEELLDGDRPAREVREAIDTLNSRITQAQREAAQYSLKDRALEIDAEELRKDWEEYTPAKKQSHYRALIREIRIHPAVPPKNVFNRARVEIRWR

SEQ ID NO: 10717 - protein, 484 aa, Unknown
  Description of Unknown: Integrase B10718 sequence
  cd00338,PF13408,IPR011109,IPR038109, PF07508,Coil,PS51736,G3DSA:3.40.50.1390, PTHR30461,IPR006119,IPR036162,PTHR30461:SF3, IPR025827,PS51737,PF00239,SM00857,G3DSA:1.10.10.2600,SSF53041
METAIYGRVSTEEQAQEGYSIRGQVEKLKSYISAKGWSIYDVYLDEGISGKNITERPAINRMIEDIKAGHIKNVLIFKLDRLTRSVADLVYLIDLFKNYGCAFNSLSESIDTSTASGRMFIKIIGIFAEFERENIGERVRLGKERKAKEGFTTACATISYGYDRAKGEKVQTINEEEAITVRRVFDLYVTNNMSLNGIAKELNKDKIPTKQGTFWNSGTVVTLLKNPNYMGNVRYSMDNRERYFEAEGKHEAIISPELFNEAQTLLEKNKRATPTKRGLERNYYVGLVYCALCGRKLKPHMAVSRTGKTEYSYVCAGRVPGACVAKMVSSRKIETAVFEYITNFPDIVPDTEKEEKEKQAAAARIEEMRDKITTIDAKEKEMLDSYIEDNASLVEYRSVKKLLDEERRKLLQEIETLSPPEENATDPKTKAEIILTFTKSWNNYTDTEKRQFLLKHISKIEIINKPIKDRNEGKCEVQNIEFNL

SEQ ID NO: 10718 - protein, 484 aa, Unknown
  Description of Unknown: Integrase B10719 sequence
  IPR038109,PS00397,IPR006119,PS51737,PF00239,G3DSA:3.40.50.1390 ,PTHR30461,IPR025827,SM00857,G3DSA:1.10.10.2600, SSF53041,IPR011109,PF07508,PS51736,IPR006118, cd00338,PF13408,Coil,IPR036162,PTHR30461:SF3
MNKVAIYVRVSTTMQAEEGYSIDEQIDKLTSYCKIKDWTVYDIYKDGGFSGGNIERPAMERLISDAERKKFDTVLVYKLDRLSRSQKDTLFLIEEVFGKNDISFLSLNESFDTSTAFGKAMIGILSVFAQLEREQIKERMLLGKIGRAKTGKAMMFSKVSFGYTYDKLKDELVVNQAESIIVRKIFEAYLGGLSLNKLRDYLNSNGIYRGDKPWNYQGLRRILSNPVYIGMIRYRGEIYPGNHQAIIDIDDYNKTQEEIKKRQITALEFSNNPRPFRAKYMLSGIAKCGYCGTPLRIILGSKRKDGSRNMRYQCINRFPRNTKGVTVYNDGKKCNSGFYEKADVEEFVINQIRDLQFNINKLDNLFDKHPSIDIKSIERQISSLDNKLKRLNDLYLNDMIDLEDLKKQTQLLRQQKTMLEDELLNNPAITQEKNKKYFKEFLATKDITKLDYETQKNIVNNLINKVFVKSGYIKIEWKIPFKKM

SEQ ID NO: 10719 - protein, 484 aa, Unknown
  Description of Unknown: Integrase B10720 sequence
  PS00397,IPR038109,IPR006119,PS51737,PF00239,G3DSA:3.40.50.1390 ,PTHR30461,IPR025827,SM00857,G3DSA:1.10.10.2600, SSF53041,IPR011109,PF07508,PS51736,IPR006118, cd00338,PF13408,Coil,IPR036162,PTHR30461:SF3
MNKVAIYVRVSTTMQAEEGYSIDEQIDKLTSYCKIKDWTVYDIYKDGGFSGGNIERPAMERLISDAERKKFDTVLVYKLDRLSRSQKDTLFLIEEVFGKNGISFLSLNESFDTSTAFGKAMIGILSVFAQLEREQIKERMLLGKIGRAKTGKAMMFSKVSFGYTYDKLKDELVVNQAESIIVRKIFEAYLGGLSLNKLRDYLNNNGIYRGDKPWNYQGLRRILSNPVYIGMIRYRGEIYPGNHQAIIDIDDYNKTQEEIKKRQITALEFSNNPRPFRAKYMLSGIAKCGYCGTPLRIILGSKRKDGSRNMRYQCINRFPRNTKGVTVYNDGKKCNSGFYEKADVEEFVINQIRDLQFNINKLDNLFDKHPSIDIKSIERQISSLDNKLKRLNDLYLNDMIDLEDLKKQTQLLRQQKTMLEDELLNNPAITQEKNKKYFKEFLATKDITKLDYETQKNIVNNLINKVFVKSGYIKIEWKIPFKKM

SEQ ID NO: 10720 - protein, 483 aa, Unknown
  Description of Unknown: Integrase B10721 sequence
  cd00338,IPR011109,IPR038109,PF07508,Coil, PS51736,IPR036162,IPR006119,G3DSA:3.40.50.1390,PTHR30461, PS51737,PF00239,SM00857,G3DSA:1.10.10.2600,SSF53041
VNYADLVIGDLYARKSTVDQGKSAARQKRHWELDCTREGHQTGRMFVDPDLSASRYSRKDRPDYAALVEHITAGGSEMVCLWEASRGTRQLAEWVAFLDLCRSKGTLIRIFGKDPHTYDPRIQRDRNELVRMGMDAETETEHLSGRVKDGLDDIARAGKPTGRLLFGYARRYDERGNYVEQVILPEQAELIRRMAADTLAGIPLGTQASRLNDAGIPTPAGKKWSGVNIRRMLLNPSYVGTRMHNGEALVTDAWPPILDRSTAARLKLLLSEPGRRLAQDLSLKHMLSGEPRCDECDSRMRSSSYQRYGCVQRGCQKASVQIDTLDRFVSSMVRARIKALRSGGLVAPPTPESGLAEAEADLRSLRERLASFYKAAAGGDLSADGLVHVENQLRPQIAAAKGRVRQLSAPSPLTEYDDIDLVGEWARLPVGVRRSVVHALARLRVVPVGRGGRWTPWRLHKSMWVGESETWGEQWEREGLERP

SEQ ID NO: 10721 - protein, 483 aa, Unknown
  Description of Unknown: Integrase B10722 sequence
  PS00397,IPR038109,IPR006119,PS51737, PF00239,G3DSA:3.40.50.1390,PTHR30461,IPR025827, SM00857,G3DSA:1.10.10.2600,SSF53041,IPR011109,PF07508,PS51736 ,IPR006118,cd00338,PF13408,Coil,IPR036162,PTHR30461:SF3
MVIKSINKTRVLLYIRVSTHEQALEGYSVQEQTERLEKYADAMGWTIVKTYTDPGYTGADTHRPGLREMIRAVEDGRADKVLVYKLDRLSRSQKDTLYLIEDVFLKHNTDFVSMSENFDTGTAFGRAIIGILAVFAQLERETIKERMTMGREARAKNGYYSASARILTGYDYIDGLLKVNEYEAMLIKQIFEMFNGGTPIRTIAEDLNEKGLYHRATKWNDTTIRRLLDNRHYIGEVKYAGKWYPGRQNPIIDKKTFDTTQKILKMRADSYVGSNKHSVALTGFIWCGCCGAKYHRQLWKARNDGTRKANYMCYSKSRKVKSMIVDPNCQNKTYRVDELEEIVFNEIRKLGTDPEYLEKIREDIIQEREADESIKIIKKEIESLTSQISNFMDLYSINRLTLSEVDAKIAPLADKRDKLETDLRIKTKPADGALSPEEIEELVDSFGDILDRGDLDEIRLTLTALIKKIIITGDDITIHWNFA

SEQ ID NO: 10722 - protein, 483 aa, Unknown
  Description of Unknown: Integrase B10723 sequence
  cd00338,PS51736,IPR036162,IPR006119,PTHR30461, G3DSA:3.40.50.1390,PF00239,SM00857,cd03768,SSF53041
MSYAWIYCRVSKKEQAADGTSLPTQWRYCQDYCDRHQLLMGTASNYNNPGVFADPGISAWKVPIFERPGFQKLWSHVQPGDSIAVMTLDRAFRSVNDFSNTWMKFDRNEVTPIFVRENINMGTAMGKMIGHMTATFAQFRSDLMSERTREALAFKRETGQPMGCPSRPAKMTASENSVIAELCAKYRNEQDSGVLLPGRVFGYIRVSTANQKLGAQANIVNGYLDHINQQEGIAVGGTFEDHGVSAFRTSWCERPGGKKLFAAMRPGDTVVVSRIDRVFRSIVDMSKTIRFLTESGIHLVTTCGIDTRTEQGRQCVEILAVMAEWESRTNSFKVKEARKHSRKLRGKWERISEVPRYLTPVTLGNNQWSVHPNMTWLDQARTVRSIREDGNTWDKVSDIMESHLAAIQNRPMIPRYGVDRTFFLRQLKKRGQHTEEQIESLTDWFDGQKPRRDGEFIREWSPSACKAELQHIPFVEDLISETA

SEQ ID NO: 10723 - protein, 483 aa, Unknown
  Description of Unknown: Integrase B10724 sequence
  cd00338,PF13408,IPR011109,IPR038109, PF07508,Coil,PS51736,IPR036162, IPR006119,G3DSA:3.40.50.1390,PTHR30461,PTHR30461:SF3, IPR025827,PS51737,PF00239,SM00857,G3DSA:1.10.10.2600,SSF53041
MKKAVFYGRYSSANQTEQSIEGQLHVCEKYAATNDIEIIAQYIDRAATGTNAQRREFQRMISDSEKNMFEAVLVYKLDRFARNRFDSAMYKRKLSENGVKVISATENISDGPEGIIMEAILEGMDEYYSAELSRKMRRGLEESFRKGRYLSNIAPYGYQKENHKLVVDKTTSPIVKEIFQKYLNGTKELAIVRHLNEKGITNSVGSKWTKSDIDRLLRKTIYKGEYRYADFEGSIPCPAIIEPEVFDRVQELLEDSRRRTRENRTGYNYILTGKLHCVECGTRMSGVSVGGKYFYYTCQTQKHRVRADKLHEKVITAIGEYLVPEKITEFAEAAYKAYKEETAAQPDERPAIEKEIVSVERQIANAVKAILAGVELAELTEKLEELKKRKAVLEKTLLETPTPLPEFSVDQFRAILERIIENTPEEILRVFVNSIYVYDDKAIILINLTDETNEPPLEQILCRVSACGIFATLHKTTLIIIAA

SEQ ID NO: 10724 - protein, 483 aa, Unknown
  Description of Unknown: Integrase B10725 sequence
  PF13408,IPR011109,IPR038109,PF07508,Coil, PS51736,G3DSA:3.40.50.1390,IPR006119,PTHR30461,IPR036162, PTHR30461:SF3,IPR025827,PS51737,PF00239,SM00857, cd03768,G3DSA:1.10.10.2600,SSF53041
MSDVKRVAIYTRVSTQEQSQEGYSLGEQEERLRMYSKAHGWAIYRVYTDPGYSGAKLDRPAIHELVRDCGSGAFDAVLIYKLDRLSRSQKDTLHLIEDVFTPAGIGLISMNENFDTKSAFGRAMIGVLSVFAQLERDQITERTTMGRQARAKEGYYAGGSQAPIGYTYSKGDKILRIDEPEAAQVRLVYDLYLHGLDGHDMTYTAIRGYMHSRYRTRYGSYTHTSTISRMLQDPTYCGMISWGGEYYHGKHEAIIDPDTWQAVQAKIRRSPTNYAERFKGVHLLTGLLRCGICGKPYQIYNHTVHKRQKDGSMRYGKVTLRYVCASRRTGSCGNAPIIAEELESTVIGEIRKLKADPDLVYHAAVAPGDDRKREAIMARIGAIHTQQSRLIDLYQIGSIDMDEVRRRSDALREEEVKLQKDLSDAEVRPAPLAPDDAIRILGNFDGIFGSGSLEDQRALLQSLIEYIEVFPDHIAIHWLFSAQ

SEQ ID NO: 10725 - protein, 483 aa, Unknown
  Description of Unknown: Integrase B10726 sequence
  cd00338,IPR011109,IPR038109,Coil,PS51736, G3DSA:3.40.50.1390,PTHR30461,IPR036162,IPR006119,PS51737, PF00239,SM00857,G3DSA:1.10.10.2600,SSF53041
MLRAMAEWAGIVRVSHMGARREGAQDFHADRDQIALINRAVPKGDRVHILAPELNVSGGLPLEERPALLAAVEGVERGRYAGIIVAYLSRLGRNLKEQLRVYDRVHAAGGQIIVAQEGIDARTRGGRLQRNILAAIHEDEREAHVERFEDLRREATAAGVWQRRQTPLGYSRDPGTRRLAPNRDANRVRAAFAARANGDSVSSIARTLGMTTSGTRHLLRNRVYLGELRVGDHINPSAHPALITEDTWVAAQIPRTVRPALRDREVALLAGLARCCGCGHLMSRMNTSNVVYACHRDHSAGRCAAPAAITARLVDEYVERVAVAQLARLTTRAVRDDGAVERARSAVASAERELAAYVEAVSAADIGAEAFRVGAQARQRAVDDARAGLEATVAARVPSVPADIADRYRGMSVTHRNRLLRSLVETVLVARSGRGRVVPVEARVRVIVAGAGIAGGRHHGGGAPLPLRVIELPDGDDPRVLGV

SEQ ID NO: 10726 - protein, 483 aa, Unknown
  Description of Unknown: Integrase B10727 sequence
  IPR038109,PS00397,IPR006119,PS51737, PF00239,cd03768,G3DSA:3.40.50.1390,PTHR30461, IPR025827,SM00857,G3DSA:1.10.10.2600,SSF53041,IPR011109 ,PF07508,PS51736,IPR006118,PF13408,Coil,IPR036162,PTHR30461:SF3
MSMKKAALYIRVSTLEQAQEGYSIGAQKDRLTAFCKAHDWAIADFYIDGGYSGSNLDRPGIQKLIGEVASFDVVLVMKLDRLSRSQKDTLYLIEEVFLPNNVDFVSMNESFDTSTPFGRAMIGILSVFAQLERETIKERTFMGRLERAKEGLFHGGANYPIGYDYGEDGHLVVNEYEAVQVRKIYEWYLEGTAPDKIAERLRSEGYTNRYGSWSEASGSFRIRHILQSDLYLGTLRFGSVVVENAHEAIIDRESFDKAAALRKKRREVYGDSPYHAKYMLVGMIWCGQCGARYAVKHNYKDYKYYVCYSRARTVKRMIRADHCENKNWRLDELDSVVERRVSRLLFEPGYYEMLKKRNAESKKKAPGNAEAEAIKGKISTLDKQIGRLMDLYQDERMPMDVLSGRIDRLHREKQALEAQLSSLEPPKPRKDFDGDSFMDLLADFASVWKTADVDEKRQIIGSLVKKITLDGENVDIEWAFLDD

SEQ ID NO: 10727 - protein, 482 aa, Unknown
  Description of Unknown: Integrase B10728 sequence
  PS00397,IPR038109,IPR006119,PS51737,PF00239, cd03768,G3DSA:3.40.50.1390,PTHR30461,IPR025827,SM00857, G3DSA:1.10.10.2600,SSF53041,IPR011109,PF07508,PS51736, IPR006118,PF13408,Coil,IPR036162,PTHR30461:SF3
MRPALYVRVSTEEQAVKGNSLYEQEERGIAYCKAMGWRQPVIYIDDGYSAKDIHRPELTRLLESVQNKEHDTVITTKLDRLSRRLLDILKLVDYFEKNSCSYASISESFDTSTSAGKLSLQVLGAVAEFERERIRERVRDNLMSLARQGKLISKASYGYNVVDGQLEINLEESLVVKNIFKWTLEGTGPLNIAGRLNQMGIKSKNGKTWEEKTVRRLLESETYIGQFVYNRKYRKGTVEVVRPRDEWIIAEDHHEPIIDRTTYDKVQEILSARKYVQRQNYNNERYLLTGLVRCEHCGNKMNGREVSRPTNKTKKFDYHYQCSGYGKKAICFFHFIDRGDLEFEVIRQIKLLASSRPRKMNIIISKATPKLSEIQLLESKLTKLDARMQKQLELYEDGDLSKDDFRRARDRIEKERKEIQDTIDELKRIESQSEVAAAQEKARNLLEDIESGDRLKMKQAIASIIESITVKDGSGVSIVFRR

SEQ ID NO: 10728 - protein, 482 aa, Unknown
  Description of Unknown: Integrase B10729 sequence
  cd00338,IPR011109,PF07508,Coil,PS51736, G3DSA:3.40.50.1390,PTHR30461,IPR036162,IPR006119,PTHR30461:SF3, PS51737,PF00239,SM00857,SSF53041
MARSRFDKTESQTNNDEEIRVVIYTRISVDRETEQSIKNQIRECKAYAKLNGWVVVDEFYDRGKSAYKLETERPGFDNALAAINSGKANRLLIWKLDRMTRNARGFMQINDRLESMGAKFASVKEPYFDTGSAIGLSIVMLMAAMAQIEAESIQGRALSWHEGRLLDLMPPTGNRPFGYRRPRKGDNDWKKGGALIPVPDEVAVIEEMAARIVAGESLRAIARDFSERKIPTAQRNSKRQTNTDWSHSTIRSVMLSPTTAGLVEVAKGEFMPSDKWEPIIPEPTWRIIRAILSDGNRCSHIEGGSDARKLKHLLPGLMACGKCGGRMVTASHTRGRQYECSDCGLSIMGDVADSVVTDWIMENVTVDQWNRLRAAGKGSVAVEELQGRINELFIERSLHPNRIPRDIYESTVAELESQIAAAQTDAAIPMPEVTNLGTGWLDMSNADKRTVIGGVIDSIRVLPYRAGVTGRNRISIIGADLR

SEQ ID NO: 10729 - protein, 482 aa, Unknown
  Description of Unknown: Integrase B10730 sequence
  cd00338,PF13408,IPR011109,IPR038109, PF07508,Coil,PS51736,IPR036162, IPR006119,G3DSA:3.40.50.1390,PTHR30461,IPR025827, PS51737,PF00239,SM00857,G3DSA:1.10.10.2600,SSF53041
MSNTVAIYLRKSRDEDNETRDVTLARHEKLLIEYCERNNLYIKKIYKEVVSGESIAARLEMQRLLVDITSGKYDGVVCIELERLSRGNQIDQAEILEVFKKTGTKIYTLNKTYDFSTDNEIDEEFFEFGLFMSRREYKVICRRLSRGRTAALLEGYYTGSSLPYGFFKEKRGKGYVLIPNEDEAKIVRLIFDMYTSGSGIAAIAAYLADNGIKPRIAKAFCTNRIRQILENKTYIGYLKIQNKKIAEDWTLGKHEPLIDPKIFNQAQERLKSGEIKIIRDHSLKNPLSSLVKCGVCGYAMILQHSSNGHYLKCRAFRCSTAASKLDKIEAQVIEELKEELKGFKYYLDNQAEEDRRKALSRQNEINVIKQAIKKKEKAINNCCEFLEDGIYTKEQYFNRVNTLNGEISSLQANLESLETISDDKRETIASTVPILEKCLEKYYDLSIEDRNKVLKSFIERIEYFRTDSTRYAPFNLKIYLKI

SEQ ID NO: 10730 - protein, 482 aa, Unknown
  Description of Unknown: Integrase B10731 sequence
  cd00338,PF13408,IPR011109,IPR038109,PF07508, Coil,PS51736,G3DSA:3.40.50.1390,IPR006119,IPR036162, PTHR30461,PTHR30461:SF3,IPR025827,PS51737,PF00239, SM00857,G3DSA:1.10.10.2600,SSF53041
MKNGFIIVDEYIDRAISGKTDNRPSFQRLIKDSEKHKFEAVIMYTLDRFARNRYDSAVYKAKLKKNGVKVYYAKQPMPDTPEGIILESVLEGYAEYYSENLARSIKRGMTENALHGIAMGTPPLGYVIGEDRKYQIEPVGAKAVQTIFEMYADGHSATQIVKWLNEQGFKTSRGNAFNKNSLDRILRNDRYIGVYRYADIVLENSVPPIIDKTLFEKVQARLKHNFSARARNKAKEDYLLTTKLFCGHCGSPMVGESGTSHTGKLHLYYKCIDRKRKHQCNKKNEKKNWIEELVVRYTVNHVLTDENIEMISTKAWELIEKEMEDTSLLIGLKEALRETNKKIKNLMSAIEQGIITSTTKARLEELEDERRDLEGQIAREENKKPLLSKERIAYWLTSFKSGDINDVEYQRTIIDTLVNSVFVYDEGDKGRKIVLTFNISGNNTLTISGSDIEGITPPNSANPNPIFFVKHVFGFVLIVEEV

SEQ ID NO: 10731 - protein, 482 aa, Unknown
  Description of Unknown: Integrase B10732 sequence
  cd00338,IPR011109,IPR038109,PF07508,Coil, PS51736,IPR036162,IPR006119,PTHR30461,G3DSA:3.40.50.1390, PS51737,PF00239,SM00857,G3DSA:1.10.10.2600,SSF53041
MRNVLLYLRKSRDDENESKEETLARHERMLIDYCKRYDLKVEKVYKEVVSGESIAARPEVQKLLDDVAYGSYDGVVVVELERLSRGNQIDQAEILEIFKKSGTKIYTLNKVYDFSSENDIDEEFFEFGLFMSRREYKVIKRRLLRGRKQAQREGYYTGSVLPFGFTKENDGKGFILKPDANADLVKELFELYVNQGKGISYLRNFLNASGVKPLKAYDWTGTRVRQILQSRCYIGEIKCDGEWYEGKHEPIVDLNTFEAAQVKLLSKETKTKQSKALKNPFATIARCSVCGSVLKLKRSPKRFAIGCSRAFCSNISMLFEDFEMLVISGLQDELEGYKLELGDLPTTAANKREAIEKERKIYLSEIEKKQSMLDKASEMLEIGVYSVEKYLERENILRKDIDALQANLDALSDTSELDEIDRLENAVPIIEKALDEYWSLSPQAQNDILKSFVDKIIYTKTIANHKHHSGRDDASVEIFLKI

SEQ ID NO: 10732 - protein, 482 aa, Unknown
  Description of Unknown: Integrase B10733 sequence
  cd00338,PF13408,IPR011109,IPR038109, PF07508,Coil,PS51736,G3DSA:3.40.50.1390, IPR006119,IPR036162,PTHR30461,PTHR30461:SF3, IPR025827,PS51737,PF00239,SM00857,G3DSA:1.10.10.2600,SSF53041
MKVAAYTRVSKEEQAEKDLSLPAQKERIQMYCQSQDWEIYDVYCDDGYSAKNLNRPEMKRMIQDAKAGLFNAVVVVRLDRISRSQKDVLYLIEDVFEKNNVGFKSVTQSFDTTTAFGKAAIGMLAVFAQLERDQLIERITDAKREAAKQGRHGGGFTLYGYYNNPAAKKLEINELEAKTVQFIYNEYIKGDSYQTISETLNAKKIPSPKNKEWSRVTVRDILLNPKYTGKIKHKGNLYEGKHDAIITQDEWEQVQAIAKSKTKFLPGANPGMLSGIIYCGECGMKMRKKAVWQNYPNTNPKKVTNYYVCYNQDGSYLSNKNCTCGYKHVEVIDKKAVDKLLMYSINPKTIKEELSKMFDKTSDNTKAISQAKRELSQVKMKLDKWYLAFEKGALDPDELTERVKELREQRSYLEQQLVSLEVQTGKMKEKDRHLEQFYTVLKNLKKTWKGASPEERTALFHNLVKKVSVTLEDRVSIEFFED

SEQ ID NO: 10733 - protein, 481 aa, Unknown
  Description of Unknown: Integrase B10734 sequence
  PS00397,IPR038109,IPR006119,PS51737,PF00239, cd03768,G3DSA:3.40.50.1390,PTHR30461,IPR025827,SM00857, G3DSA:1.10.10.2600,SSF53041,IPR011109,PF07508,PS51736, IPR006118,PF13408,Coil,IPR036162,PTHR30461:SF3
MQILGYIRVSTEEQANDGNSLFEQRERLQAYCKAMLWPEPIFFIDDGYSAKDTNRPDLQKLLKIVGENKTELKIMVTKLDRISRKLLDLLTMIELFQNHGASFVSVSEQFDSNTPAGRLTLQVLGAVAEFERERTRERVIDNMDSIAKNTNKALTRPCFGYDIVDGEYQINNSEQKFGDMMLDLAESGDGYRMIAKKLNDAGSRTKKGKPWDQKNVKRWLTGIETIAGIKIRNKRDTQNGKVVFRDEKDWIVVENNHPALVSLERLLKIRDVLKSRSRAHKHAENESYLLTGLVKCKFCGGNMKGATSRNKNNGKEYMYHRYICSAYVSGYGCRYHAVHRDDLELKIIDLVKEIAEGSNADLVIKATVNQSVDERIKEINTQLAKISKRIVKQIQAHADDLISGADLKMASNIAESERVKLNEELKKLTKHEEAPHKVRQTATTILGDISGVDRIKAKNALRLLFERIEIENESISVVVKG

SEQ ID NO: 10734 - protein, 481 aa, Unknown
  Description of Unknown: Integrase B10735 sequence
  IPR038109,PS00397,IPR006119,PS51737,PF00239, cd03768,G3DSA:3.40.50.1390,PTHR30461,IPR025827,SM00857, G3DSA:1.10.10.2600,SSF53041,IPR011109,PF07508,PS51736, IPR006118,PF13408,Coil,IPR036162,PTHR30461:SF3
MITTNKVAIYVRVSTTNQVEEGYSIDEQKDKLSSYCDIKDWNVYKIYTDGGFSGSNTDRPALESLIKDAKKRKFDTVLVYKLDRLSRSQKDTLYLIEDIFIKNNIAFLSLQENFDTSTPFGKAMIGLLSVFAQLEREQIKERMQLGKLGRAKAGKSMMWAKTSYGYDYHRDTGTITINPAQAVAVKFIFESYIRGRSITKLRDDLNEKYPKHVPWSYRAVRAILDNPVYCGLNQFKGEIYPGNHEPIISKEDYDKTQAELKIRQRTAAEKSNPRPFQAKYILSGIAQCGYCGAPLKIMLGVKRKDGSRLKKYECHQRHPRTLRGVTTYNDNKKCDSGFYHKDKLEAYVLKEISKLQDDNGYLDKIFSEDSAETIDRESYKKQIEELSKKLSRLNDLYIDDRITLEELQSKSAEFISMRGTLETELENDPALRKDKRKDEMRKLLNAEKVFSMDYESQKVLVRGLINKVRVTAEDIVINWKI

SEQ ID NO: 10735 - protein, 481 aa, Unknown
  Description of Unknown: Integrase B10736 sequence
  IPR038109,PS00397,IPR006119,PS51737,PF00239, cd03768,G3DSA:3.40.50.1390,PTHR30461,IPR025827,SM00857, G3DSA:1.10.10.2600,SSF53041,IPR011109,PF07508,PS51736, IPR006118,PF13408,Coil,IPR036162,PTHR30461:SF3
MITTNKVAIYVRVSTTSQAEEGYSIDEQKAKLSSYCDIKDWSVYKIYTDGGFSGSNTDRPALEGLIKDAKKRKFDTVLVYKLDRLSRSQKDTLYLIEDIFIKNNIAFLSLQENFDTSTPFGKAMIGLLSVFAQLEREQIKERMQLGKIGRAKAGKSMMWAITSYGYDYHRETGEVTINPAQALAVKFIFESYLSGRSITKLRDDLNEKYPKHVPWSYRAVRTILDNPVYCGFNQYKGEIYPGNHEPIISKEEYDKTQSELKIRQRTAAENVNPRPFQAKYILSGIAQCGYCGAPLKIMLGVKRKDGSRLKKYECHQRHPRTLRGVTTYNDNKKCDSGFYYKDNLEAYVLEEISKLQDDADYLDKIFSGDNAEAIDRESYKKQIEELSKKLSRLNDLYIDDRITLEELQSKSAEFISMRATLETELENDPALRKNKRKADMRQLLNAEKVFSMDYEKQKVLVRGLINKVQVTAEDIVIKWKI

SEQ ID NO: 10736 - protein, 481 aa, Unknown
  Description of Unknown: Integrase B10737 sequence
  cd00338,IPR011109,IPR038109,Coil,PS51736, G3DSA:3.40.50.1390,IPR036162,IPR006119,PTHR30461,PS51737, PF00239,SM00857,G3DSA:1.10.10.2600,SSF53041
MSKCIILSRVSTAKQELDSQTQAIKNEALKQGFKEKDFIIIADVESAIKLSEEERNGLNKMKKAIEEDKKITHVFIYELSRLSRRQLVLFSIRDYLIEHKIQLVCCTPYFRLLEDGKLSQTANLMFSIFASMAESEMSLKQDRMKRGRLRNKMTGKNNCGPVLYGYKTLEDKTIVVDEETMPFVVDMFTMYASGLFTQLEVAKELYLKYGKTSDTKEKMKHKINNLLHRKEYCGTTKYPRVISEDLFDKAQQALITNRITTKKSHREDALLKRIIFDKKTGCHLTYSSNACTQRYTLKQGNTPNVDKNVLDKYIWQLVVALHTNYITDTSKVKNEIREKMDAESQKAITLKLKTVDIQKKLDLVEERLIYGSLSKEKAEQMIANLENEKQTCESEQKLAIEKASNYQKMLDAVTPNELPDYDNLSFDEKVAIVRSMIERIDISKPSYMWVKAEIRTKVDHFLYTLDIETRKKICTMSSRLA

SEQ ID NO: 10737 - protein, 481 aa, Unknown
  Description of Unknown: Integrase B10738 sequence
  IPR038109,PS00397,IPR006119,PS51737, PF00239,G3DSA:3.40.50.1390,PTHR30461,IPR025827, SM00857,G3DSA:1.10.10.2600,SSF53041,IPR011109,PF07508,PS51736 ,IPR006118,cd00338,PF13408,Coil,IPR036162,PTHR30461:SF3
MPEPRIAAAYIRVSTDDQMELSPDSQMEKIREYAAKNGLLLLSEYIFHDDGISGRAAEKRPGFQQMIATAKDPSHPFDVIIVWKFSRFARNQEESIFYKSILRSKCKVDVVSVSEPLIAGPFGSLIERIIEWMDEFYSVRLAEEVKRSMTVNAKNGTLQATPSFGYRVENRQLVIVPEEAEIIREIFRRFISGDAMFRIAKDLSSRGIRTHRGNPFENRTIDYILNNPVYLGKLRWTPTGRTHRNFKNEDSIIADALHEPIIDAETWDAAQARCAELKKSYKRYGKPSSERKHWLCGVVRCSTCGATLIWASPHFMKCNNYAHGRCTTTQHIAVEALEESFLAQLQHDLTFAESVACVVQAAKPAHSDQRLQQQRARIVSRIDRLRESYLDGVETLETYKAARQQMQAQLDDLDAQIAESAAVPVVDAAALLRNAIAAVLETLRSPTATVAQKYESAMSIIDRCTFDKSQMLLAISYKFIF

SEQ ID NO: 10738 - protein, 481 aa, Unknown
  Description of Unknown: Integrase B10739 sequence
  IPR038109,PS00397,IPR006119,PS51737,PF00239,G3DSA:3.40.50.1390 ,PTHR30461,IPR025827,SM00857,G3DSA:1.10.10.2600, SSF53041,IPR011109,PS51736,IPR006118,cd00338, PF13408,Coil,IPR036162,PTHR30461:SF3
METGKFMGGENYIEEVAAYIRVSTQEQKLHGISLEAQVEKLTEYAQNHGMKIVKFYKDEGVSGRKLIKNRPALQEMIQDAEKGKFKRIIFIKLDRFFRSVAEYHECMKRLSVGGVIWTATEEKYDLSTPSGEAFVNMKLTMAQFEADQAGERIRMVNEYKIKSGQPLYGSQCLPFCYAVGCPEEGERHKYIGKRDEEIMRDLIDYVMKNHSVRAGMNYINQKYNRNFLYNAVMNALKNEMICGTYKGNPNYCEPYITREEFNQLQKIISRNPRTTEKRTYLFTGLIRCPRCGYRLSGGQYYTYSRPNKETGKREKRRGYLAYKCGRSRVNNQCDFNNIVQEQRLEKMLLEQLDDIIAGKKLQAISVKSAGKKVSKHDVEALTAELDRLNYAWQKGRIKSVEEYDKSYDDLMEKIHAAENEQAELNQEPDYEKIQAVLSNGWQEIYKELDGEHKRAFWRSFIEEIQVVWSKDKKEIKDIIFF

SEQ ID NO: 10739 - protein, 481 aa, Unknown
  Description of Unknown: Integrase B10740 sequence
  cd00338,PF13408,IPR011109,IPR038109,PF07508, Coil,PS51736,G3DSA:3.40.50.1390,PTHR30461,IPR006119, IPR036162,PTHR30461:SF3,IPR025827,PS51737,PF00239, SM00857,G3DSA:1.10.10.2600,SSF53041
LAAPRNTKRGRKAEAETIGVIYARYSSHNQKEESIEQQVEECTAFALANNIRIIEVYADKAISGKTDKRKNFQRMMRDAEKQKFTVVIAYKSNRIARNMLNALSYENRLESFGIRTLYAKEEFGDTAAGRFALRTMMNVNQFYSENMAEDIRRGMADNAADCKVNGRLPLGYKNVGGHYAIDETTAPIVREIFERFLNEETFASIATDLNGRGIRTSYGNPWNKGSFHRLLQNDNYIGTYRHSGIVKEDGIPAIITKEVFYAVQERLKTKKNPQGRKRDSADYLLTGKLHCGHCKSYMVGISGTGKHGELHYYYTCNDRRTGGGCKKKNVKRDWIEQKIAELTKDLILQDDVIEWIAENALEFQKQARRTVEITTMEDRLAEARKAAKNIVTAIEQGIFTATTRSRLLELEEEISTLERSLTLARSANQPIEKDRIIYALEQLQEGDVQNKSYQAKLINTFVKAVYLWDDKIRIDYYYTGK

SEQ ID NO: 10740 - protein, 481 aa, Unknown
  Description of Unknown: Integrase B10741 sequence
  cd00338,PF13408,IPR011109,IPR038109,PF07508, Coil,G3DSA:3.40.50.1390,IPR036162,PTHR30461,IPR006119, PTHR30461:SF3,IPR025827,PS51737,PF00239,SM00857, G3DSA:1.10.10.2600,SSF53041
MKNDFVVIDEYCDRAISGKTDNRPMFQKLIKDSEKGHFQAVIMYTLDRFARNRYDSAIYKAKLKKNGVRIFYAKQPMPDTPEGIILESVLEGYAEYYSENLARSIRRGMKENALHGVAMGTPVLGYKIVDKKFEIDPVGAKAVQAIFTMYAEGKSQNEIVEYLNAQGYKTSRGNPFNKNSLSRILRNDKYIGVYRFDDVVLEDAVPPIISRELFEKVQALFKHNYAARARNKAIEDYLLSTKLFCGHCGSAMVGESGTSKSGKLHYYYKCVNRKRKHNCDKKVEKKDWIEKLVVQYTVENVLTDENIELIATRAMELIEKELQDTSVLVSLQGMLKETNKKIKNLLTAIEQGIFTSTTKGRLEELEAERRDLEGQIAREEMKKPLLTKERIMFWLASFKKGDINDIEYQRRVIDTLVNSVYLYDYGDKGRKIVLTFNISGANTLTIQCSDIEGIAPPNNANPNTLFFVKHCFGFVFIVEEV

SEQ ID NO: 10741 - protein, 481 aa, Unknown
  Description of Unknown: Integrase B10742 sequence
  cd00338,IPR011109,PS00397,IPR038109,Coil, PF07508,PS51736,IPR036162,IPR006119,PTHR30461, G3DSA:3.40.50.1390,PTHR30461:SF3,PS51737,PF00239,SM00857, G3DSA:1.10.10.2600,IPR006118,SSF53041
MNTDLKTAAAYIRVSTDSQTELSPDSQIKVVREYARKNGYIIPNEFIFRDDGISGRHADKRPEFNRMIAIAKQKPSPFCAVLLWKFSRFARNQEESIFYKSMLRKNGVEVLSISEPMIDGPFGTLIERIIEWSDEYYSIRLSGEVKRGMTEKVERGLPVSIPSFGYSIENKQYVINPETAPIVKKIFADYLNGVPVVTIARQLNDMKIRTTRGGLWENRTVEYILYNPVYIGKIRWNPKRRTRRNYSDKDIMIVDGSHEPIIDTDTFEKVQERLAEQKRAYKRYIKSNITEEYMLHGLVKCSSCGSSLSMCQRGVGLQCVKYTRGQCKTSHYISIKKMNALVISAIEVAFATESIELTVKSAESNESSGLTEIEINALIDKENLKYSRIREAYENGIYNLDELTEAKKQTDDNIKQLKKLLKPEKTTEQIKKQFIHDKQDIISLLKTDNISEGEKNQILRSFIDKIVFNRSDCTVRIFYFI

SEQ ID NO: 10742 - protein, 481 aa, Unknown
  Description of Unknown: Integrase B10743 sequence
  PS00397,IPR038109,IPR006119,PS51737,PF00239,G3DSA:3.40.50.1390 ,PTHR30461,IPR025827,SM00857,G3DSA:1.10.10.2600, SSF53041,IPR011109,PS51736,IPR006118,cd00338, PF13408,Coil,IPR036162,PTHR30461:SF3
MEMKELNSEDLQVRNVLSVECVAAYVRVSTQEQKLHGLSLDAQKMKLTEYAKKNNMRIVEWYVDEGVSGRKLIKNRPELQRMIQDAEKGKFDRIIFIKLDRFFRSVAEYHECMKRIAPVLWSTTEEEYDLTTANGRMLVNMKLTIAEMEADQTGERIRIVNEYKVSTGQPLVGKQSLPFGWMVGRDEKTGRKNVVRDPDEEPILRDLLEHYMKHQSKTKTLTYLHAKHHIAMDHEPLSRLLANPMLYGAYRDNPSYCEAYIDKETFDKIQEIVKRNIKGNTSENRAYLFSGLIKCPECGRLMKGFVCTQKSSAGTILKYKKYRCGIHYLNGRCSYNKVVSENVMERKLLANIGEYLKDAKIRATNIESADTVKIPQYNIEELHNQIDRLNYSWQTGKIRKVEQYEKDYAELMEKLEIAEAERGPAEVKDFSKIDNILQLGWRSVYRNLDDAHKRAFWRSFIQSIEINWTTETKEIVRVNFF

SEQ ID NO: 10743 - protein, 481 aa, Unknown
  Description of Unknown: Integrase B10744 sequence
  IPR038109,IPR006119,PS51737,PF00239,G3DSA:3.40.50.1390, PTHR30461,IPR025827,SM00857,G3DSA:1.10.10.2600,SSF53041, IPR011109,PF07508,PS51736,SSF144292,cd00338, PF13408,Coil,IPR036162,PTHR30461:SF3
MKIDGTTSSGLRVAIYTRVSTDHQAEEGFSMEVQHEKLMEYINRNKLTMFKFYSDPGVSAKNLNRPGIKELLRDFDDDLFDIILVHKLDRLTRNIGDLHNLVEMINERKKKLISYTEDIDTSTPAGRMFVYFLGVIAQMYRENLGEEVTKGMRKRVEKGMHNVTVDLYGYTRDANGDLVIKDDEAQWVKWAFENYVSGMGSTQLSIHLNNMGIIRNRGGRWEQSNVIKMLENKHYIGKVHCKFKRDDETTISEGKHEQIISDELFNKAQRVLERRREGLISMNSYDYIFGGIVKCGACGASYIGRYSVTRSAKRTINRQYVCSNHVKHKTCDQGGISEIKLAKLFFKSIKLIGKNYTRKDMPKKERSEFEEIQKTIKASEERRERWQLAYGDGNMPYEDFSKRMRTEMERIQELEKKLSTIPQQAVSFLTPEDAINQINELQKNWNYLDQLTKKEVVQSLFQQIVILKTGDSWEIVKTILS

SEQ ID NO: 10744 - protein, 481 aa, Unknown
  Description of Unknown: Integrase B10745 sequence
  IPR038109,PS00397,IPR006119,PS51737,PF00239,G3DSA:3.40.50.1390 ,PTHR30461,IPR025827,SM00857,G3DSA:1.10.10.2600, SSF53041,IPR011109,PF07508,PS51736,IPR006118, cd00338,PF13408,IPR036162,PTHR30461:SF3
MGGGFKVGAAYIRVSTVEQTELSPASQLKTIRDYAKNHGYIIPDEYIFQDDGISGKSADKRPAFRLMIATAKEAEKPFDAIFVWKFSRFARNQEEAIMYKNLLRKKGVEVVSISEPSNDSPFSSLIERIIEWMDEYYLINLAGEVRRGMKEKASRGEPTGRCAFGYRVENKCLVPTDDAAIVRMIFEQYAAGKGVFSIVTGLNDSGLKIRGKPFAKNSVQYLLNNPTYIGKIRWEEDGHLKYNRASYIPALDELPDGKHQPIISRELWDAVQERLKNSRQEIRYARAGHDVYMLKGLCRCSACGNTLVKVTQGPSRAPALQCCGYGRGACRVSHYIPIHNADAAVIAALEMVIASSAYKFTPKTPPKSVQAQDWDKLIAAEKTRLSRAKEAYLGSVLSLEEYAEIKAAAGDSITKLEAARYKDSSTAAVDVAAYSARVLQVLDVVRADGVSGEAKNQALRSIIDKIVFNKAGGTFDFFFLP

SEQ ID NO: 10745 - protein, 481 aa, Unknown
  Description of Unknown: Integrase B10746 sequence
  PS00397,IPR038109,IPR006119,PS51737,PF00239, cd03768,G3DSA:3.40.50.1390,PTHR30461,IPR025827,SM00857, G3DSA:1.10.10.2600,SSF53041,IPR011109,PF07508,PS51736, IPR006118,PF13408,Coil,IPR036162,PTHR30461:SF3
MTKKTKVAIYVRVSTQEQAKEGYSIHEQIDRLTKYCEAHSWEVYKVYTDPGFSGGDTNRPGLQAMLKDIKRGRVNKVIVYKLDRLSRSQKDTLNLIEDEFLKTGVDFVSMSENFDTSTPFGRAIVGILAVFAQLEREQIKERMAMGKEARAKLGKWNGGRNAPIGYELIQGELIINAFEKLQVQEAFELASKGESPYKIAETFNKKGYNTRYGEWDNKAVRRVLRSKSCLGYTKYNDTWNKGTHEPIISQKLFDEVQAILDIRSDNYKSNRGHGKITTYLGGYLYCSKCGAKYSKITARRKKPNSNDYYVYEFLGCNSRTKRNKAVIKDPNCKNKNWKLKNLNDLVFSEIKQLALDPDYMHELKEDKAPDERPKILEDRIKDIDKQLSKLMDLYVIGKMPMNILQDKIQELDDQKTRLEAEIDIIQSEIDSKLNQEQIKHIVEDFPDVLERGDFEEIRAVIGDLIEKIEIDNDDITIHWNF

SEQ ID NO: 10746 - protein, 456 aa, Unknown
  Description of Unknown: Integrase B10747 sequence
  IPR011109,IPR038109,PF07508,PS51736,IPR036162, IPR006119,G3DSA:3.40.50.1390,PTHR30461,PTHR30461:SF3,PS51737, PF00239,SM00857,cd03768,G3DSA:1.10.10.2600,SSF53041
VNDTPSKKARQRCAVYCRVSTDERLDQEFNSIDAQREAGHAYIASQRAEGWIPVADDYDDPGFSGGNTERPGLKRLMADIERGLIDIVVVYKIDRLTRSLADFSKMVEVFERRKVSFVSVTQQFNTTTSMGRLMLNVLLSFAQFEREVTGERIRDKIAASKRKGMWMGGVPPLGYDVVNRQLIVNEAEAAIVQRIFKEMLTNGSTTQIAAGLTAEGFTTKSWVTRSGQMRSGTRIDKKFLYKLLRNRVYLGEISHKGNWHPGVHAAIIDHGLWGQVHEILASDGHTRSVETKVRSRTDALLRGLLYAPTGERMYPTYSNKRGRKYRYYFSKSEARFGAESKTYARLPADEVEAATVAQIKTVLSSPESVAGVCQFIRKNGAAVREDMAVMAMRQLGNVWEQLYPAEQHRIVNLVIERVDIVPGGLKVKWRELGWKDLIEEFAQDSIGAELVEMEEA

SEQ ID NO: 10747 - protein, 481 aa, Unknown
  Description of Unknown: Integrase B10748 sequence
  cd00338,PS51736,G3DSA:3.40.50.1390,IPR006119, IPR036162,PTHR30461,PF00239,SM00857, cd03768,SSF53041
MSLTSQFEECRKHVDFKGLQLGSESNYDNPGVFSDPGVSAWKVPIFERPGFKELWRVAKPNDNIVTLSLDRAFRSVMDFTHSWERFESTKIMPIFVRDNVDMSTATGKFMAHIAAAFAQFKSDLISQRTREAFAYRRENKLAEGRVKQKKIRPADNHALAMLHAKASPSELEAAVNDTGRVFGYVRVSTDQQEIEAQHSIVERCMGHMAEDGFQPSTIHVDHGVSAFTKDWKDRAAGKMLWDEMREGDCIVVLRIDRIFRSIRDMAVTTKELLSRGVHLVTSCGIDTRSMAGRQAIEIMAMMAEWESRDIGWRAKLGVQQAAKTRGKWTGRATVPRYMDIVYDKEGEWSVKPNLKLINEFREVQELHELGMSYPEVSDCFEERLAAREGRPMTPPTPFRHNVFSRNKTRQGISKSQKKAMRKWFRENKRHMFRGEYIRSWSWLRVRGSLKLAHEYDEILQAYDIAEPNRLNRSTSQLTAAG

SEQ ID NO: 10748 - protein, 481 aa, Unknown
  Description of Unknown: Integrase B10749 sequence
  cd00338,IPR011109,IPR038109,PS00397,Coil, PF07508,PS51736,IPR036162,IPR006119,G3DSA:3.40.50.1390, PTHR30461,PTHR30461:SF3,PS51737,PF00239,SM00857, G3DSA:1.10.10.2600,IPR006118,SSF53041
MNTDLRTAAAYIRVSTDSQTELSPDSQIKVVREYAKKNGYVIPNEFIFRDDGISGRHADKRPEFNRMIAIAKQKPSPFCAVLLWKFSRFARNQEESIFYKSMLRKNGVEVLSISEPMIDGPFGTLIERIIEWSDEYYSIRLSGEVKRGMTEKVERGLPVSIPSFGYSIKDKQYVVNPETAPIVKKIFADYLNGVPVVTIARQLNDMKIRTTRGGLWENRTVEYILYNPVYIGKIRWNPKRRTRRNYSDKDIMIVDGSHEPIIDTDTFEKVQERLAEQKRTYKRYIKSNIKEEYMLHGLVKCSSCGSSLSMCQRGVGLQCVKYTRGQCKTSHYISIKKMNALVISAIEVAFATESIELTVKSTESNESSGLTEIEINALIDKENLKYSRIREAYENGIYNLDELMEAKKQTDDNIKQLKKLLKPENSTEQIKKQFIHDKQDIINLLKTDNISEGEKNQILRSFIDKIVFNRSDCTVRIFYFI

SEQ ID NO: 10749 - protein, 481 aa, Unknown
  Description of Unknown: Integrase B10750 sequence
  IPR038109,PS00397,IPR006119,PS51737,PF00239, cd03768,G3DSA:3.40.50.1390,PTHR30461,IPR025827,SM00857, G3DSA:1.10.10.2600,SSF53041,IPR011109,PF07508,PS51736, IPR006118,PF13408,Coil,IPR036162,PTHR30461:SF3
MKTMNKVAIYVRVSTTNQVEEGYSIDEQKDKLSSYCDIKDWNVYKVYTDGGFSGSNTDRPALESLIKDAKKRKFDTVLVYKLDRLSRSQKDTLHLIEDVFIKNGIEFLSLQENFDTSTPFGKAMIGLLSVFAQLEREQIKERMQLGKLGRAKSGKSMMWAKTSYGYDYHKETGTVTINPAQALTIKFIFESYLRGRSITKLRDDLNEKYPKHVPWSYRAVRTILDNPVYCGFNQYKGEIYPGNHEPIISKEEYDKTQSELKIRQRTAAENVNPRPFQAKYILSGIAQCGYCGAPLKIMLGVKRKDGSRLKKYECHQRHPRTLRGVTTYNDNKKCDSGFYYKDKLEAYVLKEISKLQDDADYLDKIFSGDNAETIDRESYKKQIEELSKKLSRLNDLYIDDRITLEELQSKSAEFISMRGTLETELENDPALRKNKRKADMRKLLNAEKVFSMDYENQKVLVRRLINKVKVTAEDIVINWKI

SEQ ID NO: 10750 - protein, 481 aa, Unknown
  Description of Unknown: Integrase B10751 sequence
  IPR038109,PS00397,IPR006119,PS51737,PF00239, cd03768,G3DSA:3.40.50.1390,PTHR30461,IPR025827,SM00857, G3DSA:1.10.10.2600,SSF53041,IPR011109,PF07508,PS51736, IPR006118,PF13408,Coil,IPR036162,PTHR30461:SF3
MITTNKVAIYVRVSTTNQVEEGYSIDEQKDKLSSYCDIKDWNVYKVYTDGGFSGSNTDRPALESLIKDAKKRKFDTILVYKLDRLSRSQKDTLHLIEDVFIKNGIEFLSLQENFDTSTPFGKAMIGLLSVFAQLEREQIKERMQLGKLGRAKSGKSMMWAKTSYGYDYHKETGTVTINPAQALTIKFIFESYLRGRSITKLRDDLNEKYPKHVPWSYRAVRTILDNPVYCGFNQYKGEIYPGNHEPIISKEEYDKTQSELKIRQRTAAENVNPRPFQAKYILSGIAQCGYCGAPLKIMLGVKRKDGSRLKKYECHQRHPRTLRGVTTYNDNKKCDSGFYYKDKLEAYVLKEISKLQDDADYLDKIFSGDNAETIDRESYKKQIEELSKKLSRLNDLYIDDRITLEELQSKSAEFISMRGTLETELENDPALRKNKRKADMRKLLNAEKVFSMDYENQKVLVRRLINKVKVTAEDIVINWKI

SEQ ID NO: 10751 - protein, 481 aa, Unknown
  Description of Unknown: Integrase B10752 sequence
  cd00338,IPR011109,PS00397,IPR038109,Coil, PF07508,PS51736,IPR036162,IPR006119,PTHR30461, G3DSA:3.40.50.1390,PTHR30461:SF3,PS51737,PF00239,SM00857, G3DSA:1.10.10.2600,IPR006118,SSF53041
MPEPHIAAAYVRVSTDDQMELSPDSQMEKIREYAAKNGLLLLSEYIFHDDGISGRAAEKRPGFQQMIATAKDPSHPFDVIIVWKFSRFARNQEESIFYKSILRSKCKVDVVSVSEPLIAGPFGSLIERIIEWMDEFYSVRLAEEVKRSMTVNAKNGSLQATPSFGYRVENRQLVIVPEEAEIIREIFRRFISGDAMFRIAKDLSARGVRTHRGNPFENRTIDYILNNPVYVGKLRWTPTGRTCRNFKNEDSIIADALHEPIIDAETWDAAQARCAELKKSYKRYGKPSSERKHWLCGVVRCSACGATLIWVSPHFMKCNNYAHGRCATTQHIAVEALEESFLAQLQHDLTFAESVACVVQAAKPAHSDQRLQQQRARIVSRIDRLRESYLDGVETLETYKAARQQMQAQLDDLDAQIAESAAVPVVDAAALLRNAISAVLETLRSPTATVAQKYESAMSIIDRCTFDKSQMLLAISYKFIF

SEQ ID NO: 10752 - protein, 481 aa, Unknown
  Description of Unknown: Integrase B10753 sequence
  IPR038109,PS00397,IPR006119,PS51737,PF00239, cd03768,G3DSA:3.40.50.1390,PTHR30461,IPR025827,SM00857, G3DSA:1.10.10.2600,SSF53041,IPR011109,PF07508,PS51736, IPR006118,PF13408,Coil,IPR036162,PTHR30461:SF3
MITTNKVAIYVRVSTTNQVEEGYSIDEQKDKLSSYCDIKDWNVYKVYTDGGFSGSNTDRPALESLIKDAKKRKFDTVLVYKLDRLSRSQKDTLHLIEDVFIKNGIEFLSLQENFDTSTPFGKAMIGLLSVFAQLEREQIKERMQLGKLGRAKSGKSMMWAKTSYGYDYHKETGTVTINPAQALTIKFIFESYLRGRSITKLRDDLNEKYPKHVPWSYRAVRTILDNPVYCGFNQYKGEIYPGNHEPIISKEEYDKTQSELKIRQRTAAENVNPRPFQAKYILSGIAQCGYCGAPLKIMLGVKRKDGSRLKKYECHQRHPRTLRGVTTYNDNKKCDSGFYYKDKLEASVLKEISKLQDDADYLDKIFSGDNAETIDRESYKKQIEELSKKLSRLNDLYIDDRITLEELQSKSAEFISMRATLETELENDPALRKNKRKADMRKLLNAEKVFSMDYESQKVLVRRLINKVKVTAEDIVINWKI

SEQ ID NO: 10753 - protein, 481 aa, Unknown
  Description of Unknown: Integrase B10754 sequence
  IPR038109,PS00397,IPR006119,PS51737,PF00239,G3DSA:3.40.50.1390 ,PTHR30461,IPR025827,SM00857,G3DSA:1.10.10.2600, SSF53041,IPR011109,PF07508,PS51736,IPR006118, cd00338,PF13408,Coil,IPR036162
MNENFLDFDSLYNDYYLKSNEYYTKCACYIRVSTDDQVEYSPTSQLKLLLKYALDNDLFIDKKYIFHDDGISGTNTKNRDSFLNMIATAKSKPKPFEKIIVYDFSRFARNKEESVMYKTLLRKKLKIDVISITQPLTEGKERVILESMYEAMDEYYSLNLSENVRRGKREKVERGEHSSYAPFGYTLVDKKLVIHEENAKLVKSIYDMFINTENIKHICNTLNDLGIKSTRGKLWGRKTITLILKNKTYAGYVKNRDKYYKGIHEPIIAEEKFEKVQKIWQYRDEHFKKCKDQVQHNHWLRGILKCGECGYGMYYFKRKDRDYAIFNCGGYTHNRCSSHYIKVTDVENAIIEQIKNDFTNKIDINITTNNNDSEYKIALSNLKSIENKLVRIKEAYVNGIDTLEEYKENKSKLQNQLEVANKKIKESQKPSKEVIYKKCEQAYKILSDPKAEKNLKSEISHNLFEKITYYKESNTLAITYK

SEQ ID NO: 10754 - protein, 481 aa, Unknown
  Description of Unknown: Integrase B10755 sequence
  PS00397,IPR038109,IPR006119,PS51737,PF00239, cd03768,G3DSA:3.40.50.1390,PTHR30461,IPR025827,SM00857, G3DSA:1.10.10.2600,IPR013809,SSF53041,IPR011109,PF07508, PS51736,IPR006118,PF13408,Coil,PS50942,IPR036162,PTHR30461:SF3
MDKINKVALYVRVSTTSQMEEGYSIEEQKAKLESYCDIKDWHIYKVYTDGGFSGSTTERPALEQLIKDAQSKLFDTVLVYKLDRLSRSQKDTLYLIEDIFLKNNIEFVSLLENFDTSTPFGRAVIGLLSVFAQLEREQIKERMQLGKLGRAKAGKSMMWAKTSYGYNYEKETGSMTVNEYEALAVKEIFTSYLAGMSITKLRDKINGEYPKQPAWSYRTIRGILANPVYCGLNQYKGQTFQGTHKPIISLMDFEQTQRELAKRQQTAKELSNPRPFQSKYMLSGLAQCGYCHAPLKVILGQKRKDGTRFKRYECYQRHPRKTRGVTVYNDNKKCESGYYDMELLEHYVLTRIAQLQNDPDKIQELFSDDTSPAVDKQAIQKQIDSLTLKLSKLNDLYLDDRITLDELRTKSADFIKQRSSLEAEIKKASNDEQAGQREKIEKLLDASSVLEMSYDNQKVIVRELIDKVQVTSDKVVIRWKI

SEQ ID NO: 10755 - protein, 481 aa, Unknown
  Description of Unknown: Integrase B10756 sequence
  PS00397,IPR038109,IPR006119,PS51737,PF00239, cd03768,G3DSA:3.40.50.1390,PTHR30461,IPR025827,SM00857, G3DSA:1.10.10.2600,SSF53041,IPR011109,PF07508,PS51736, IPR006118,PF13408,Coil,IPR036162,PTHR30461:SF3
MKSINKVAIYVRVSTTSQAEEGYSIEEQIDKLESYCKIKDWSVYKVYTDGGFSGSNTERPALERLIKDADKKKFDTVLVYKLDRLSRSQKDTLFLIEDVFIKNGIEFLSLQENFDTSTPFGKAMIGLLSVFAQLEREQIKERMQLGKLGRAKAGKSMMWTKTSYGYDYHKETGTMTINPVQSLAIKFIFESYLSGRSITKLRDDLNEKFPKEKPWNYRAVRVILGNPVYCGYNQFMGEIYKGNHEPIISKEDFDKTQKELKIRQRTVAENINPRPFQAKYMLSGIAQCGYCLAPLKILMGMYRKDGTRLVKYECHQRHPRKLRGVTTYNDNKKCDSGFYFKDELEAFVLKEVNKLQHDSEYLESILSDNHKEAIDRESYQKQIRELSKKLSRLNDLYIDDRITLEELQSKSSKFLSMRALLEKELEDDPALKQEETKNTIKQSLSKGDIYKMDYESQKTIVRALIKKVQVTADSIVIKWRI

SEQ ID NO: 10756 - protein, 481 aa, Unknown
  Description of Unknown: Integrase B10757 sequence
  cd00338,IPR011109,IPR038109,Coil,PS51736, G3DSA:3.40.50.1390,PTHR30461,IPR036162,IPR006119,PS51737, PF00239,SM00857,G3DSA:1.10.10.2600,SSF53041
MTVTSVQTRARAGVTYAVGVIRVSQQGKREAERFKSPSEQRDRIAAEIRRQGAELAQCFQEIDISGKLPLARRHGLRQAVEAIEAGHARVLVVAYFDRLVRNLRVQAEVVQRVEAAGGRVLALDFGEVTEKTAAQWLSSTLMGAVAEYYARSVGERLASTAAMAIASGVPVGALPPGYRRDPATRRVVLHEAEAAVMREAFAMRADGASWSAVRGFMAANGIVRSIGNTRTLLHSRTYLGELTLGDVVNPGSHTPLVDLETFERIGRQKGEAFKAAPGRKSELLLSGLRLLRCATCGHSLLASTQTTRFGKSFRLYRCNPGLVCSRRVAIDAALADQAVTDYVRELVANDAETEGPGMELIEARAAVDAAQAALDTAIRGYIAAGVLDEASAQQSLRELREKRDAAADRASDLERAARAVGDGITLNGSADWDALTLADRREIITAVLARVVVAPGGGKVRGASRLTFVTVRDELGGDALG

SEQ ID NO: 10757 - protein, 481 aa, Unknown
  Description of Unknown: Integrase B10758 sequence
  cd00338,IPR011109,IPR038109,PF07508, Coil,PS51736,G3DSA:3.40.50.1390,PTHR30461, IPR006119,IPR036162,PTHR30461:SF3,PS51737, PF00239,SM00857,G3DSA:1.10.10.2600,SSF53041
MSNVAIYLRKSRDEENESRDVTLARHEKMLREYCERNDLIIKKIYKEIVSGESISARYEMQKLLIDVRAGLFDAVVVVELERLSRGNQADQAEILDVFKRTGTKIHTLTKIYDLASDNEIDEEFFEFGLFMSRREYKVICRRLLRGRVSALLEGYYTGSVLPFGFDKERIEKGFVLVPNKDEADIVRLIFTKYVSGDGLTAIAHDLNSYGMKQRNGKDWQPQRIREVLKNKTYIGMLHIKNAKLDAEWTKGKHEPLIDIDLFETAQRKLSSGVPKAKRSLNIVNPLAGLVKCSECGSAVVMKKNVAGVKYLACNTLKCSTCSSKFDDVESQLLLELSEALRGFQKYVDDNSSRIELKASERANLSVKIDAEISKKESMLERCCELLEEGIYTKEKYLSRVKILEEEIAGLTETRNQISYNHDEEEMENIKTGIPILEKCLQKYDQMDVVAKNEILRSLIDKIEYSKQARGKSFDLRIYMKI

SEQ ID NO: 10758 - protein, 480 aa, Unknown
  Description of Unknown: Integrase B10759 sequence
  cd00338,IPR011109,PF07508,PS51736,IPR036162, PTHR30461,IPR006119,G3DSA:3.40.50.1390,PS51737,PF00239, SM00857,SSF53041
MECMTRTSTLGGAPRCAAVYCRISDDREGRGLGVERQEPVCRQLVAANGWVVHDVYVDNDVSAFRGKPRPAFERMVEDIKAGRVNAIAAWAPARLTRHNRELEDLIDLLDANDVEVATHIAGKYDLSSSGGRLVARVVGAVARHESEEKSERIKSKMEQLASHGSFHGGKRPYGYEADGRTIRPEEAENIRFMAQAVLEGASVVKVAAELNERGVPAAQGGAWTHSRVRALLALPRLAGLRIHNGEVVADAGWPAILDRATFEAVQAVVADPKRRHRGYSVHFLTGLLYTPDGRRLVGNRQVYPKAGIEKDAYAAKPGVVDGQRLAGLTIEASAVETWVEEYVLDYTDRVALASGPAVPQPSTEVVDLEAELAELADMRGAGEISFAEWRAAREGINVRLEAARARVPEMPSVPPTMAVVLGQRGELRRRWPSLNTRQRRQALEAVLERVIVKPVGKGWGKGMARGTAPALSDRLEAVLR

SEQ ID NO: 10759 - protein, 480 aa, Unknown
  Description of Unknown: Integrase B10760 sequence
  PS00397,IPR038109,IPR006119,PS51737, PF00239,G3DSA:3.40.50.1390,PTHR30461,IPR025827, SM00857,G3DSA:1.10.10.2600,SSF53041,IPR011109, PF07508,PS51736,IPR006118,cd00338,PF13408,IPR036162,PTHR30461:SF3
MDVKIAACYVRVSTDDQQEYSPDSQLKIVRDYAKREGFIVPDEYVFQEKEGISGKTAEKRPRFRMMIATAKQDPPPFSAIFVWKFSRFARNQEEAIMYKNLLRKRGIDVRSVSEPSSDDPFSSLIERIIEWMDEYYLINLAEEVRRGMKEKSRRGEACGRAPFGYDVQNKILVPNKDAEIVRFIYDRFASGSGIRGITAELVRRGIKTKNGLEPSIRWTRYILMNPVYIGKLRWNESGHLKYERPNVCAGGGDLSDGQHEPIIDMQTWEIAQKKLTGKDPDYYRRTSGTGEVLLRGLVRCSSCGNTLIRITQYGRGYLQCCSYTRGTCKVSHRITEQEANDAVLDALEQCIANETYTIERQKPETPVSPAWEPVIAAEQKKLDRATEAFLNGVFSNEEFKNIRQKIQKKIQDLQLGIENDQKTKEQKTDISQVKERTVKIMDILRSPDVPVTEKNRQLRTVIDKIVFDRSAWTFDVYFKP

SEQ ID NO: 10760 - protein, 480 aa, Unknown
  Description of Unknown: Integrase B10761 sequence
  IPR038109,PS00397,IPR006119,PS51737,PF00239,G3DSA:3.40.50.1390 ,PTHR30461,IPR025827,SM00857,G3DSA:1.10.10.2600, SSF53041,IPR011109,PF07508,PS51736,IPR006118, cd00338,PF13408,Coil,IPR036162,PTHR30461:SF3
MKRVALYVRVSTQEQAEEGYSVGAQLEKMRLYCKSKEWIIVEEYVDGGFSGSNLDRPAMQKLIFDSARSTIDMVLVYKLDRLSRSQKDTLHLIEDVFKPNGVDFTSMQENFDTSTPFGMAIVGILSVFAQLERSQIAERMTLGRDARAKEGRYLGHSKSPIGYDYDLVKGELVVNDYESLQVKEVFRLFTEENMNILAIQKYMNARYTQKYGNYTSDSTIRCILTNPVYTGRFKYKGEIYESNHEPIIDDDTFKKAERILEIRRKKIEKRKSVPFARITLLSGLLYCGECGARMGGETQVHVYKGKKYERHIYSCYTRKRNKKMMTADSCDMRYMNRSELDALIWDEILSLNIKASDGSGNIWKENDHSEEIAIIEKEIKSVDDKILKLMDLYAVGSMPTDLLGKKINAMNKDKEKLINRIKALDESEENIDRDEILDQIRSAKDVKEHGSIDDQRSLIFALIDRITVFQDHIHIKYKFV

SEQ ID NO: 10761 - protein, 440 aa, Unknown; identical to SEQ ID NO: 9754
  Description of Unknown: Integrase B10762 sequence
  cd00338,PF13408,IPR011109,IPR038109,PF07508, PS51736,IPR036162,IPR006119,G3DSA:3.40.50.1390,PTHR30461, mobidb-lite,PTHR30461:SF3,PS51737,IPR025827,PF00239, SM00857,G3DSA:1.10.10.2600,SSF53041

SEQ ID NO: 10762 - protein, 480 aa, Unknown
  Description of Unknown: Integrase B10763 sequence
  PF13408,IPR011109,IPR038109,PF07508,Coil, PS51736,G3DSA:3.40.50.1390,IPR006119,PTHR30461,IPR036162, PTHR30461:SF3,PS51737,IPR025827,PF00239,SM00857, cd03768,G3DSA:1.10.10.2600,SSF53041
MLVGIYTRVSTQEQVEGYSLSEQENRLKAYCTARDWAVANIYSDAGFSGGNTDRPALQKMINDIRNKKIDTVIVYKLDRLSRSQKDTLNIIEDIFIKNNINFISINENFDTSTPFGKAMIGILSVFAQLERDTIKERMRLGAIGRARDGYFHGGGYTPIGYDYIEGKLIINEYEAIQVREIYDLFLKGYPISRIRKILSSKYTNKYGNWYSDSSVKSCLTTPLYYGKITYAGEMYDGQHDPIVSEELFNKVQHRLKELDASKTERAKTPFKPTQLLGGIVWCQNCGARYYTHHINGRKHLKDHKGWDYYSCYSRTKSNKRMIKDPNCKSKNWRVDEVDKLVIGEILKLQFDESYLQAIIDNNKEDNTEDKEKIINQRIKEISSQLDKVMDLYQLGNVPLDKIAERINTLTNERTALETELENIKNDIEDNKKISLTEVNDILKNAKNILESNDLDSKRMLVHSLIDRIELGDDIKIYWAF

SEQ ID NO: 10763 - protein, 480 aa, Unknown
  Description of Unknown: Integrase B10764 sequence
  IPR038109,PS00397,IPR006119,PS51737,PF00239,G3DSA:3.40.50.1390 ,PTHR30461,IPR025827,SM00857,G3DSA:1.10.10.2600, SSF53041,IPR011109,PF07508,PS51736,IPR006118, cd00338,PF13408,Coil,IPR036162,PTHR30461:SF3
MRVALYVRVSTQEQAREGYSIGEQIERLQKYADAMGWIVFKVYTDAGFTGANTDRPALKDLIKDVKNGKVEKVVVYKLDRLSRSQLDTLYLIEKVFLANNTDFVSMNENFDTSTPFGRAMIGILAVFAQLEREQIKERMTMGKDARAKEGKWKGGKCPIGYKYVDGELVVDEFTAMQVKELFKVFTEGMPLRTIERVFNEKGYKNQYGKSWSPRQMRRTLDTKIYIGLIKHKDTWIQGTHEPIIDEETFELAGKVLHERQRVFAESGVKGGIANQSTYLGGLLHCTHCGGRYSKYRTGSSQSKIYCNYGCYSRHKKVKNMIKDPNCKNKSYRVEELDNIIIDEIKKLAIDPSYIYEIKTHHQQTDEIIQKTNIIQEKIADLENQISRFLDLYGKGRFTFEQLDKQIIPLEEQKNKLNEELESLADEETESMSEDEAIEIIESFEEALERGNFDEIRGIITSLINHIDIDNDDITIYWNFM

SEQ ID NO: 10764 - protein, 480 aa, Unknown
  Description of Unknown: Integrase B10765 sequence
  PS00397,IPR038109,IPR006119,PS51737,PF00239,G3DSA:3.40.50.1390 ,PTHR30461,IPR025827,SM00857,G3DSA:1.10.10.2600, SSF53041,IPR011109,PF07508,PS51736,IPR006118, cd00338,PF13408,Coil,IPR036162
MDNFLEFDSVYNDYYLKSNEAYTKCACYIRVSTDDQVEYSPTSQLKLILKYALENNLYIDKNSVFHDDGISGKNTKARDGFLKMIATAKNKPKPFDKILVYDFSRFARNKEESVMYKTLLRNKLSIDVISITQPLSEGKERVILESMYEAMDEYYSLNLSDNVKRGKREKAERGEHNSFAPFGYTTQDKKLVIHEENAKIVRNIFDMFVEHQNVKLICTTLNNLGIKSTRGKLWGRKTIKLILTNKTYIGYVKYKNEYFKGNHEPIIDEKIFDRAQEIWKDRDEHFKRCKEQVQHNHWLRGILKCGDCGYGMYYFQRKNRKYAIFQCGGYTQGRCSTHQLLVKDVEKAVLEQIKNDFIKKVDIDVSKTNTNSEYEIILTNIKALERKLNRIKEAYINGIDTIEEYKENKKQIQEQIDSSNKRLNEIKEPSKEIIYKKCEQAYEILSNPNSENELKSEISHKLFEKIVYYKDSGMLTITYK

SEQ ID NO: 10765 - protein, 480 aa, Unknown
  Description of Unknown: Integrase B10766 sequence
  cd00338,IPR011109,PS51736,IPR036162,IPR006119, PTHR30461,G3DSA:3.40.50.1390,PS51737,PF00239,SM00857, SSF53041
MTTQAALYVRASLDKTGEGESVTRQIEACGALAASRSYSVVDTHADNDRSAKGHVLRPGFEALLKGIAQGRYGVVVATELTRLTRNKRDELRLMEAARDAGVSIALVRGQDIDLASASGRLVAEILASVARQEIDTMSERLSSGLRQRAVKGHPHWSARPYGYTLTGALVAPEAALLRRAYSDLLEGASLAQIGRDLGMPRGTVLKVMKAARNAGLRTYKGEIVGKGEWPAIVDEAAWRAACAVLADPVRDRGGRTPKWLLTGIAVGPEGHTVRTVVSHGRTAYSAPGVSRGAAQADAAVSRLATVVLAMPEARGVLTERETPDLTAARQERAELVRRRDVDLPEGLAAGISVAQVAAATRTINTRVAEIDALLLDTQRAEVFAGLWDEGHLYDDYPTARFDALPLHRRRAILPMLFTRISVVPGRGPEAVHVTPTALALRIVETTTRTDTAHLAELQDAVTALHAIASAQHKALQDCTG

SEQ ID NO: 10766 - protein, 480 aa, Unknown
  Description of Unknown: Integrase B10767 sequence
  cd00338,PF13408,IPR011109,PF07508, PS51736,IPR036162,G3DSA:3.40.50.1390,PTHR30461, IPR006119,mobidb-lite,IPR025827,PS51737, PF00239,SM00857,SSF53041
MTGNGVRAAVYCRISRDSEGSGLGVARQLKACRELAERLGWTVAEVYIDNSRSAYDRTKKRPEYERMLADVQAGRIDGVLCYAVDRLTRHPIELERLVEVFVANRTAVRTVVGGELDLNTEEGQLRARIMGSVARFESGRKGERLRAKAEEMVAAGKRPCGGPRPFGYDRHYDDPGSPHRKITGETVNEREGEAIRDAAVRLLAGESMRSVSAAWSAEGLLTSMGNPWSITSFRQMITSPRLAGMIVHRGRVVDGVQAQWPPILERETHEQLAALLAGRGTPRESNARRFWLTGFVFCSCGTAMSVGKAASGKRRYECKAKAEGGCGGRVVSLPDLERFMSVLVIRRLRDPLLLHDLAVRGDTTKAETKLLMHSIDQDERRLPLLEDQLTDGDPAAIPEIRGALRKVRARIAENRDSLARLVGVDPLTGVDTDDLEDRWDSLDVARRSALLRVARISRIVIKPTSLRGRFDPDRIELVPT

SEQ ID NO: 10767 - protein, 477 aa, Unknown
  Description of Unknown: Integrase B10768 sequence
  cd00338,PF13408,IPR011109,IPR038109,PF07508, Coil,PS51736,G3DSA:3.40.50.1390,IPR006119,PTHR30461, IPR036162,PTHR30461:SF3,IPR025827,PS51737,PF00239, SM00857,G3DSA:1.10.10.2600,SSF53041
MQMAHYKNYIESRADWDFVGMYSDEGISGTNTKKRDGFNQMIEDALAGKIDLIITKSVSRFARNTVDSLQNVRKLKENGVEIYFEKENIWTFDTRGELLITIMSSLAQEESRSISENTTWGKRKQFAEGKTSVGYSAFLGYDKDFEINEEQAKIVRLIYKLFLGGRSFYAITKELETRCIKSPSGKDKWYISTVRSILTNEKYRGDALIQKEYTADFLDKTRRKNTGEIPQYYVEEHHEAIIPPDLFDFVQLEIKRREQNGKHSGVSIFANKIKCGCCGGYYGAKVWHSTDKYRRVIYRCNKKYAHKGKPCSTRHLTEEEIKQIFVKALNSLMEVKENVIAELRALIDSVCQTGELVEEHGRVEQELTLLTERLEKLIRENARVAQDQTTYLKQENEIRALYLEKQGALEKLDKQIAERESKRNILEGMIQVVCGINGEQVAFDEELWGGLLDHIVVKEDGAVVVVFKGGIETAIEG

SEQ ID NO: 10768 - protein, 479 aa, Unknown
  Description of Unknown: Integrase B10769 sequence
  IPR038109,PS00397,IPR006119,PS51737,PF00239, cd03768,G3DSA:3.40.50.1390,PTHR30461,IPR025827,SM00857, G3DSA:1.10.10.2600,SSF53041,IPR011109,PF07508,PS51736, IPR006118,PF13408,Coil,IPR036162,PTHR30461:SF3
MNKVAIYVRVSTKGQAEEGYSIDEQIALLTSYCSIHKWKIHDTYVDAGISGATIERPELSRLSRDAQKKKFNTMIVYDLKRLGRSQRNNISFIEDVLEKNGIGFISLTENFDTSTPLGKAMVGILSAFGQLDRDTIRERMMMGKIGRAKSGKPMMTSTIAFGYTYDKITSSLNINPAEAIIVKTIYKEYLSGRSLTKLRDYLNENDLLRNGKPWNYQGVSRILRNPVYMGMVRFRGEVYQGNHDPIIDSETFEAAQKELKKRQLETYEFNKNTRPFRAKYMLSGIIKCGYCGSPMGVTLGTKRKDGTRNIRYQCVNRFPRTTKGITVYNNGQKCNSGFYEKDDIEIYVLGQVRLLQLNKAKLNKMFETPEIINVEEIENQINSLNNKMKRLNDLYLNDMISLDELKTQTYTFLKQKDLLESELNNNPAIHQEENRKQFQKLLGTKDITQLSYEEQSFAIKNLIDKVFVKPGIIDINWRI

SEQ ID NO: 10769 - protein, 479 aa, Unknown
  Description of Unknown: Integrase B10770 sequence
  IPR038109,PS00397,IPR006119,PS51737,PF00239, cd03768,G3DSA:3.40.50.1390,PTHR30461,IPR025827,SM00857, G3DSA:1.10.10.2600,SSF53041,IPR011109,PF07508,PS51736, IPR006118,PF13408,Coil,IPR036162,PTHR30461:SF3
MNKVAIYVRVSTKGQAEEGYSIDEQIALLTSYCSIHKWKIHDTYVDAGISGATIERPELSRLSRDAQKKKFNTMIVYDLKRLGRSQRNNISFIEDVLEKNGIGFISLTENFDTSTPLGKAMVGILSAFGQLDRDTIRERMMMGKIGRAKSGKPMMTSTIAFGYTYDKVTSSLNINPAEAIVVKTIYNEYLSGRSLTKLRDYLNENDLLRNGKPWNYQGVSRILRNPVYMGMVRFRGEVYQGNHDPIIDSETFEAVQKELKKRQLETYEFNKNTRPFRAKYMLSGIIKCGYCGSPMGVTLGTKRKDGTRNIRYQCVNRFPRNTKGITVYNNGQKCNSGFYEKDDIEIYVLGQVRLLQLNKAKLNKMFETPEIINVEEIENQINSLNNKMKRLNDLYLNDMISLDELKTQTYTFLKQKDLLENELNNNPAINQEENRKQFQKLLGTKDITQLSYEEQSFAIKNLIDKVFVKPGIIDINWRI

SEQ ID NO: 10770 - protein, 479 aa, Unknown
  Description of Unknown: Integrase B10771 sequence
  cd00338,PTHR30461:SF21,IPR011109,IPR038109,Coil, PF07508,PS51736,IPR036162,G3DSA:3.40.50.1390,IPR006119, PTHR30461,PS51737,PF00239,SM00857,G3DSA:1.10.10.2600, SSF53041
VHTALYSRVSQDATGERLAVQRQYDDCAVLADRLGWTIVEHFSDNDISAYDGSARPGFEAMLAAIKRGEVNAIICWQPDRLYRSLKDLERLVDATDRGVQIATVNGGDLDLSHSTGRMLARILGSVSRQESELKAERRRRANMQRAGLDGKGAARRPGRWRADQPRVFGYTQRGEPLEPEATAVRQAILDVLGGRSLRSIAAEWNERGLLTPRSAKRGGGRWSNLTLRRVLVRPVYAGLVVYQGKVVGRGEWQAIIDEDTHRGLVAYLSDEARRPATAFERRHMGSGVYQCGVCDGKLYATFPSAARPMLYSCKPHKHVARLAAPLDELVTEVVLGVLRRDDIASRLRPREGFDVVVMHARREALQSRMDELAAMFARGEIDASQLRSGTAEHRGRVGEIDRILAEQVRTSPTIVLLDGDPDDLENRWDALPPDMQGKVIDELATVIVKPTNGAKGVDRDGIVDLDFVDIIPKKLPGDA

SEQ ID NO: 10771 - protein, 479 aa, Unknown
  Description of Unknown: Integrase B10772 sequence
  IPR038109,PS00397,IPR006119,PS51737,PF00239, cd03768,G3DSA:3.40.50.1390,PTHR30461,IPR025827,SM00857, G3DSA:1.10.10.2600,SSF53041,IPR011109,PF07508,PS51736, IPR006118,PF13408,Coil,IPR036162,PTHR30461:SF3
MNKVAIYVRVSTKGQAEEGYSIDEQIALLTSYCSIHKWKIHDTYVDAGISGATIERPELSRLSRDAQKKKFNTMIVYDLKRLGRSQRNNISFIEDVLEKNGIGFISLTENFDTSTPLGKAMVGILSAFGQLDRDTIRERMMMGKIGRAKSGKPMMTSTIAFGYTYDKVTSSLNINPAEAIVVKTIYNEYLSGRSLTKLRDYLNENDLLRNGKPWNYQGVSRVLRNPVYMGMVRFRGEVYQGNHDPIIDSETFEAVQKELKKRQLETYEFNKNTRPFRAKYMLSGIIKCGYCGSPMGVTLGTKRKDGTRNIRYQCVNRFPRTTKGITVYNNGQKCNSGFYEKDDIEIYVLGQVRLLQLNKVKLNKMFETPEIINVEEIENQINSLNNKMKRLNDLYLNDMISLDELKTQTYTFLKQKDLLENELNNNPAIHQEENRKQFQKLLGTKDITQLSYEEQSFAIKNLIDKVFVKPGIIDINWRI

SEQ ID NO: 10772 - protein, 479 aa, Unknown
  Description of Unknown: Integrase B10773 sequence
  cd00338,PF13408,Coil,PS51736,IPR036162, IPR006119,PTHR30461,G3DSA:3.40.50.1390,PTHR30461:SF3,IPR025827, PF00239,SM00857,SSF53041
MYTVYKQLEEYRQERKQVRVAKYGRCSSDEQKKNGYTISDQLDLMEEFCQENELIGAGEYVDEGISATLEISKRKALAQLIKDAKAGKFDLVIFKCIDRFFRNVGEYYECQKQLRKAGVSWVSIEEPDLDPEDDDAAFKINIYLTMAEYEAKKTSKRIRFNNKMRIKNKQVIAGGQCFLFPWKVVGEKRCRHLERNMERAPELYDILDYFEKFQTKAGTLAWYNMKYAKDMSITSLTNLLTDTLLYGEYKGVPDYVEPFITKERFDRIGEILKRNARYSAKSPGVFLFSGLLKCRGCGRNLVGNYKKPGPTAKTSKGTYNYRCNKHRLEKTCSNNHAISERIIEKQLLDNLEMYITNEIIKVENVSEVAAPKTDHSKKIDGIKKEMDRLNMMFRKGRIEEEEYDRDYYALEKELKQLEALVEKPEERDLEGLKGLLETDYRTLYNELDKEHRKAFWRNIIKEFSMGEDRKVDPESIIFF

SEQ ID NO: 10773 - protein, 479 aa, Unknown
  Description of Unknown: Integrase B10774 sequence
  cd00338,IPR011109,PS00397,PF07508, IPR038109,Coil,PS51736,G3DSA:3.40.50.1390, PTHR30461,IPR006119,IPR036162,PTHR30461:SF3, PS51737,PF00239,SM00857,G3DSA:1.10.10.2600,IPR006118,SSF53041
MDDLKIAAAYIRVSTDDQTELSPDSQIKVVREFAKQKGYLIPKEYIFRDDGISGRKASKRPEFNHMIAVAKQTPSPFSAIMVWKFSRFARNQEEAIFYKGMLKKRGIDVISTSEPIIDGPFGSLIERIIEWFDEYYSINLSTEVKRGMTEKVSRGGAVSIPAFGYDIVDKKYQVNPINAPIVQRIFIKYLNGVGCRAIANELNDLGIKTTRGNNWENRTIEYILRNPVYIGKIRWNPKRRNRRNYDDKDIMIVDGIHQPIIDTDLFDKVQKKLDENKAKYRPYITDRQNGKDYMLKGLVKCSNCGATMSMSCNGLQCIKYTHGTCKVSHYIQLNKLNEVVINAIDDTLKSGDFQLKPKEQPHEEPQELNIDFMIEKENTKLRRIKEAYEEGVYNLAEFKQRKELIESKIHSLQKQNKPPEPKSDHLLAKKKLMSRRKEIISTLKSKSTPEVEKNALLCTFIDKIIFNRSLSSVELFFCF

SEQ ID NO: 10774 - protein, 479 aa, Unknown
  Description of Unknown: Integrase B10775 sequence
  cd00338,IPR011109,PS00397,IPR038109,Coil, PF07508,PS51736,IPR036162,IPR006119,G3DSA:3.40.50.1390, PTHR30461,PTHR30461:SF3,PS51737,PF00239,SM00857, G3DSA:1.10.10.2600,IPR006118,SSF53041
MKTAAAYIRVSTDDQTEYSPESQRKAVIAYAKQHDMIIPEEFIFTDEGISGRSVKRPAFQKMIGTAKLKPAPFDVILVWKFSRFARNREDSIVYKSMLRKQCGIDVISVSEQLSEDKTSVLIEALLEAMDEYYSINLAEEVVRGMTEKAHRGGVMGSQPFGYRAENGKILIDEEQAQIVRSIFADFNNGIPMRKIANALNDSGIRTKFGNLWDNRGIEYLLRNVAYLGKSHWTPEAVKSTHAEKLSEKTIITDSHEAIISEEEFAQAQERIAELKRTHIYKAHPQHGKPFMLKGLCRCSSCGATLVRSSDSGLQCHRYTTGKCTVSHYISFPNINRMVIEKLQEDFENPSFDISAFLKQQTAVKPDTKAQEAQLGKLRQQLKRIKEAYAAGVDTLEEYKENKIRIQNQINAVQETVQKIPVQTITAEELSAQLKTAIQSALIIADSDSSEELKNEVLRTLIQKIIFNRKTSQVVIFYQF

SEQ ID NO: 10775 - protein, 479 aa, Unknown
  Description of Unknown: Integrase B10776 sequence
  cd00338,PF13408,IPR011109,IPR038109,PF07508, Coil,PS51736,G3DSA:3.40.50.1390,PTHR30461,IPR036162, IPR006119,PTHR30461:SF3,IPR025827,PS51737,PF00239, SM00857,G3DSA:1.10.10.2600,SSF53041
MRGVIYARYSPGPHQTEQSIEGQVADCQQYAEEHGIDIIEIYADRHVSGKSVVGRDEFQRMLRDAEKGRFDCVLVWKIDRFGRDRQDIAMGKMALKRAGVKLMYARESVPEGPEGIILESVLEGLAEYYSADLRQKVIRGMKETAKKGQYCGQSLPIGYKVDAERHIVVDEREAAVVREAFKLHIAGGQIRDIVQLFADRGVMGRRGKPVSNAVVYRMLRNEKYLGEFYIQDVKLNVEPIIDQATFLEAARHFKTSRNNAAGRAKVNYLLSCKMFCGYCGSMISAEAGTGKLGKVYRYYKCGDKKRGKKCELKPFPKDHLEDAIILATVNDMLTDEMIEKLTVRILEVQEQENADDPVVGLRRRLDSNKKRQRNLLDAIEEGGARGLVSRLAALEEEEEQLVLEIQRAEIKRPRLTHEVVEAWLRSFRVGDVTDDDFRARLVDTFIARVELRNDEALIFYNIREKGPHSRVRVRPEWWS

SEQ ID NO: 10776 - protein, 479 aa, Unknown
  Description of Unknown: Integrase B10777 sequence
  cd00338,PF13408,IPR011109,IPR038109,PF07508, Coil,PS51736,IPR036162,IPR006119,G3DSA:3.40.50.1390, PTHR30461,IPR025827,PS51737,PF00239,SM00857, G3DSA:1.10.10.2600,SSF53041
MRGVIYARYSPGPHQTEQSIEGQVADCQQYAEEHGIDIIEIYADRHVSGKSVVGRDEFQRMLRDAEKGRFDCVLVWKIDRFGRDRQDIAMGKMTLKRAGVKLMYARESVPEGPEGIILESVLEGLAEYYSADLRQKVIRGMKETAKKGQYCGQPLPIGYKVDSQRHVVIDEREAAVVREAFKLHIAGAQLRDIVQLFADRGIMGRRGKPVSNAVVYRMLRNEKYLGEFYIQDVKLNVEPIIDQATFLEAAQHFKTSRNNAAGRAKVNYLLSCKMFCGYCGSMISAEAGTGKLGKVYRYYKCGDKKRGKKCELKPFPKDHLEDAIILATVNDMLTDEMIEKLTVRILEVQEQENADDPVVGLRRRLDSNKKRQRNLLDAIEEGGARGLVSRLAALEEEEEQLVLEIQRAEIKRPRLTHEVVEAWLRSFRVGDVTDDDFRVRLVDTFIARVELRNDEALIFYNIRKKGPHSRVRVRPEWWS

SEQ ID NO: 10777 - protein, 479 aa, Unknown
  Description of Unknown: Integrase B10778 sequence
  cd00338,PF13408,IPR011109,PS00397,IPR038109, Coil,PS51736,IPR036162,PTHR30461,G3DSA:3.40.50.1390, IPR006119,IPR025827,PS51737,PF00239,SM00857, G3DSA:1.10.10.2600,IPR006118,SSF53041
MRAVAYIRVSTEEQSGPGHVSLEVQEQRCRDYIASRGWTLIGVERDIESGLKPTRAGYQRVIELARAGSIDAVVVMQASRFGRKASEVLLRVEELRSLNVELVSTAEDLTSFLMLGIQAVLNEHETRVILSRTMPAKQQRTRDGYWLAKAPFGTVNVRGVLQPGPHFDLIRLAFQLAADGENVADITRRINEAIAPRTMHYGNVIKLLKNKAFVSVVQWGGITAPAQWDPLIDPELFNRANAAIRARYVQRRQLSRSYPYWILGLAFCARCGHRMHPKVHVTSWGPGVYPYLICGRVEMRGLERPCRGKYVSILDVQAWVLERVEQQTADAGDVARYIARIQERAEEQAAAEDERRRSLRAERSRLEARLQAAKSAHLDAPDTFTIADVRRIDAAVRDSVAAIDRELAVPVPSVRGEQEIRELRQFFEERAWLGLRDTDPQAFRALLQVYIERVDVRGPGAYELVWRDVFAEALTHSRS

SEQ ID NO: 10778 - protein, 479 aa, Unknown
  Description of Unknown: Integrase B10779 sequence
  cd00338,IPR011109,IPR038109,PF07508,Coil, PS51736,G3DSA:3.40.50.1390,IPR006119,IPR036162,PTHR30461, PTHR30461:SF3,PS51737,PF00239,SM00857,G3DSA:1.10.10.2600, SSF53041
MKKVAFYGRYSSAMQTEQSIEGQLHVCEQYAAANGLEIVRQYVDRATSGKTDNRPQFQQMISDSERGLFEGILVYKLDRFARNRYDSFIYKHKLKEQGIRVISATEPLSDTPEGIIFEALIEGMDEYYSAELGRKMKRGKKESVLKGRFIGKLPPFGYKVVNHRLAVDELTAPIAQDIFRRYASGEKQNQILTDLNRRGIHNAAGRPWNKVNMTMMFKNRIYIGIYSVSDYGEAECPAIIEKEVFDMVQKKKEESVHRARANKTDFDYILTGHMTCAQCGASVCGASMQKGKYHYYQCHKHCGCRLRAEELHERVKRALAEYLTEEKMQELAQGAYEVYLKEQTADERPLLEKELSGIEKQLQNAVQAILDGYASDALKDKMNALEVRRDELRALIEDAPAPLPKLTYEMFVAMLHLIVEKAAEKDDLTKLINTVVNRIIIDDQDVILCINLTDEDNEPPMEQIKFRVKDKSISSPVLR

SEQ ID NO: 10779 - protein, 479 aa, Unknown
  Description of Unknown: Integrase B10780 sequence
  cd00338,IPR011109,IPR038109,PF07508,PS00397, Coil,PS51736,G3DSA:3.40.50.1390,PTHR30461,IPR006119, IPR036162,PTHR30461:SF3,PS51737,PF00239,SM00857, G3DSA:1.10.10.2600,IPR006118,SSF53041
MKNAAAYLRVSTEKQDEYSLDSQLKLIRDYAARNDYIVPDEFVFVDDGISGRNAKKRPAFQNMIGWAKDKSHPFDAILVWKFSRFARNQEESIVYKSMLARSGVEVISISEPLAAGPFGSLIERILEWMDEFYSIRLSGEVKRGMSEKVSRGEVVTIPSFGYDIVNKNYQPNADADIVRRIYRDYLSGVGMGTIARQLGLDGVLTRRGNPPDNRWVEYILTNPVYIGKIRWTKDGKSNYQRGGDSSRSYLTDGHFEPIIPVPTWEEVQAMIAEKKAGRPKYARSEQNADWMLKGLCRCSACGSTLVYSSTACPTMQCHKYSRGQCQTSHALSIAKANRLVIAALEYAADNCLFSMDPSSLPAPALGPDYEKQIAVERTKLRRVQEAYEAEVYTLEEFRERKEKLSEGIRRLEEQAAASRAEAEAKAFDPLDYQKKVRNVLTLIQDPDQSEDAKNTALRSILSYIVYEKADRRLALYFYP

SEQ ID NO: 10780 - protein, 479 aa, Unknown
  Description of Unknown: Integrase B10781 sequence
  PS00397,IPR038109,IPR006119,PS51737,PF00239, cd03768,G3DSA:3.40.50.1390,PTHR30461,IPR025827,SM00857, G3DSA:1.10.10.2600,SSF53041,IPR011109,PF07508,PS51736, IPR006118,PF13408,Coil,IPR036162,PTHR30461:SF3
MKKVVLYVRVSTKEQAEEGYSVGAQLEKMRYYCKSKEWIITEEYVDGGFSGSNMDRPALEKLIRDASHHKMDMVLVYKLDRLSRSQKDTLYLIEEIFNANGVDFTSMQENFDTSTPLGMAMVGILSVFAQLERSQIAERMMMGKDARAKEGRYLGHETPPIGYDYDQIKGELIPIEYEALQVREIYRMFIEENMPILAIQKAMHEKYTNRYGDYGFDSTIRNILTNPVYTGRFMYKGEIYNSTHEPIIDDETFAKAGELLDLRKKKNDRRKSAPFKPTTLLAGLIWCGQCGARLGGDTQQHRYKDKKYSKRFYACYTRKKNPKMMTADSCDMRYIDRDELDAFVWDEILSLSLKVKNGEDVFEEPDHDEETKIIEKEIKSVDEKIMKLMDLYSVGSMPTDLLTSKIQKLNEDKQKLVDQITELETPNENINKNEILDHLRSAKEIKENGSLDDQRALIFALIDRITINQASIHIKYRFN

SEQ ID NO: 10781 - protein, 479 aa, Unknown
  Description of Unknown: Integrase B10782 sequence
  cd00338,IPR011109,PF07508,PS51736,G3DSA:3.40.50.1390, IPR006119,PTHR30461,IPR036162,PS51737,PF00239, SM00857,SSF53041
MPPRPAVNAGPVRAGIYCRISLADEGDYVKTDDQERICRELAERHGWEVGDGYGHPYPTGVYTDHKRSAWQRNRRRPAWDAMLADVDKGVINGIIVYHGDRLVRRGQDLARLLTLSESKGVRLASPSGTRDLDTERFELWIRAAVAEEESQRTSERRIAQYERWRRAGKVRPGGRGGRAFGFATDGTTHVEAECEVIREMARRVLAGETVGSVSRDVSARGHRTPAGNEFSHATVRKMLARPRYAGLMPDGEAKAAWEPVLDRATWERLCLVLEAKAAGFAYATNARKWLLSGIARCGRPLGDGECGAPMRLNPSKGKDGTRVNGYQCTRRGCSTYRSAELLDAYVSGRALGALNSGGTPQAHAPATPDAAPEWRALATERAATAALLADYGKSAGRAALLMERLDGIDARMGQLREREAGDARSRLLARYRGITREEFGALALDVRRSLVAALVSVTVLPASKRGPGFRVQDVRVEER

SEQ ID NO: 10782 - protein, 479 aa, Unknown
  Description of Unknown: Integrase B10783 sequence
  cd00338,IPR011109,IPR038109,PF07508, Coil,PS51736,IPR036162,IPR006119, PTHR30461,G3DSA:3.40.50.1390,PS51737,PF00239, SM00857,G3DSA:1.10.10.2600,SSF53041
MADHIETFKKIKKVAGFLRISTEKTDFEGKKTDAEETLKNHTETMTTFFAQWGIELVLYSEVLSGGSDFEDRKALQDILNDLKDENQNFDAMAIIELERLARDTYVSGIIKKALEESGAKLIVLEPFQVLDMNNSSDSLMFGLASVIAEHNRKIASNRVKLNKLAMARQGLNSSGSVPYGYVRNPQTKKLEIETIETVDEKGNKIKVESDKPKIVRQIFQWHVEGMGQRSICDKLNEMGILNKQGNKWVPQSLRYLLTCETYIGTLTAKSNQKIKGKLVPAEIVTMENNHPPIIDEDIWEKSQRLRNAKRDRSGVDQRSNDWNSKRNTSTLDGLIYCGCDSCNRKSTIKWYSSKNKFYIVKCTRFDAHGGKDCNNGGIAVGEVEQEIFQKILEYKQEVEKRISSFESNDFASRNTELQDTKEMLEKQMNQLKVNARSIRQQEIAYFQKRDETGIVDEFEEEMIAEDKQINHAKRMSVQQ

SEQ ID NO: 10783 - protein, 479 aa, Unknown
  Description of Unknown: Integrase B10784 sequence
  PS00397,IPR038109,IPR006119,PS51737,PF00239, cd03768,G3DSA:3.40.50.1390,PTHR30461,IPR025827,SM00857, G3DSA:1.10.10.2600,SSF53041,IPR011109,PF07508,PS51736, IPR006118,PF13408,Coil,IPR036162,PTHR30461:SF3
MNKVAIYVRVSTKGQAEEGYSIDEQIALLTSYCSIHKWKIHDTYVDAGISGATIERPELSRLSRDAQKKKFNTMIVYDLKRLGRSQRNNISFIEDVLEKNGIGFISLTENFDTSTPLGKAMVGILSAFGQLDRDTIRERMMMGKIGRAKSGKPMMTSTIAFGYTYDKVTSSLNINPAEAIVVKTIYNEYLSGRSLTKLRDYLNENDLLRNGKSWNYQGVSRVLRNPVYMGMVRFRGEVYQGNHDPIIDSETFEAVQKELKKRQLEAYEFNKNTRPFRAKYMLSGIIKCGYCGSPMGVTLGTKRKDGTRNIRYQCVNRFPRTTKGITVYNNGQKCNSGFYEKDDIEIYVLGQVRLLQLNKAKLNKMFETPEIINVEEIENQINSLNNKMKRLNDLYLNDMISLDELKTQTYTFLKQKDLLENELNNNPAINQEENRKQFQKLLGTKDITQLSYEEQSFAIKNLIDKVFVKPGIIDINWRI

SEQ ID NO: 10784 - protein, 478 aa, Unknown
  Description of Unknown: Integrase B10785 sequence
  IPR038109,PS00397,IPR006119,PS51737,PF00239, cd03768,G3DSA:3.40.50.1390,PTHR30461,IPR025827,SM00857, G3DSA:1.10.10.2600,IPR013809,SSF53041,IPR011109,PF07508, PS51736,IPR006118,PF13408,Coil,PS50942,IPR036162,PTHR30461:SF3
MNKVALYVRVSTTSQLEEGYSIDGQKAKLESYCDIKDWNVYKIYTDGGFSGSTTDRPALEQLVQDAQSKLFDTVLVYKLDRLSRSQKDTLYLIEDVFLKNNIEFVSLLENFDTSTPFGRAVIGLLSVFAQLEREQIKERMQLGKLGRAKSGKSMMWAKTSYGYDYDKETGSMTVNEFEALAVKEIYASYLSGISITKLRDKMNAEYPKKPAWSYRTIRGILANPVYCGLNQYKGQTFQGSHKAIISLDDFEETQRELKKRQQTAQERLNPRPFQAKYMLSGIVQCGYCHAPLKVVLGQKRKDGTRTKRYECYQRHPRTTRGVTVYNDNKKCESGYYYMDVLEHYVLTRIAMLQNDPDKIHELFLDSTSQTVDKQAIQKQIDGLTLKLSKLNDLYLDDRITLDELRNKSSDFIKQRATLEEEIKKATSDKQVSKRKKIEKLLDASSVFDMSYDDQKVIVRELIDKVQVTSDKIVINWKI

SEQ ID NO: 10785 - protein, 478 aa, Unknown
  Description of Unknown: Integrase B10786 sequence
  cd00338,IPR011109,PF07508,Coil,PS51736, G3DSA:3.40.50.1390,IPR036162,IPR006119,PTHR30461,mobidb-lite, PS51737,PF00239,SM00857,SSF53041
MDTPKSAGVYCRLSYSPDGSLEKVERQEADCRALGGRLGWGIREVYSDNSRSAWKRDRKRPQWDRMLADIKAGLLDGILVYHGDRLIRQPWDLELLLSLADDKALPLASPSGTRDLNREDDRFILRIEAAAACRSSADTSRRVKRDNDARAIAGRPSGGGNRPFGYGLPTGKNGVTGKPLHDLTQQVPEEAAVGREAVERLLAGQSQGGVIAWLNTVSTTTNGNRWKPPAFRAWLKTPRLAGLIEHKGSLMPGAWEPIVTREQWEDVQALLKASSELHGEQGRVRVHLLSGIAECSSCGGKLRTKPVTGKSPNARQYFCAAPECPHRVSRNIIHLDAYVTGRVLRRLNDPAFIAALHANDDQPGVGAEIISLERRKAEAKKVLEELADHPDIDPALQAKSLMGFDRKIAQLRDHLTTTTRQRLLARLAGVTLEQWDAEPVDVRAETARSLFRVVVLPATRRGPGFDPASVRVERVEVT

SEQ ID NO: 10786 - protein, 478 aa, Unknown
  Description of Unknown: Integrase B10787 sequence
  IPR038109,PS00397,IPR006119,PS51737, PF00239,G3DSA:3.40.50.1390,PTHR30461,IPR025827, SM00857,G3DSA:1.10.10.2600,SSF53041,IPR011109,PF07508,PS51736 ,IPR006118,cd00338,PF13408,Coil,IPR036162,PTHR30461:SF3
MKTAAAYIRVSTEDQTEFSPDSQLKAIRKYAKEHDLILPDEFIFADEGISGRKTDKRVQFQRMIGTAKLKPKPFDVILLWKFSRFARNREDSIVYKSMLRKQCGIDVVSISEQLSEDKTSVLIEALIEAMDEYYSLNLAEEVRRGMNEKFSRGGVVSQPPFGYRMQDGIFFPDETAAPIVQMIFNDYLAGMPTKRIALKLNDMGIRTRHGNPWENRTVEYLLTNPVYIGKLRRSKDGDRSDRFHEQDECIDGQHQPIITPAIYDAVQAKRADTKKNYRKYARQGQPVQFMLKGLVRCDHCGATLVMCQSGASKFLQCNNYNRGKCKVSHAISVTKINPVVLEKIRADLDDQNLRLKLEAQCAPKSPDAASRLPAAIEREEKKLLRIREAFEAGIDTLEEYRENKQRITERIAVLRQTLAEEQPPQIDTAAFIGKVRSGLRILEDAGASEIIKNDVLHTFVEKIIFMKPSGRIEIVYHL

SEQ ID NO: 10787 - protein, 478 aa, Unknown
  Description of Unknown: Integrase B10788 sequence
  PS00397,IPR038109,IPR006119,PS51737,PF00239,G3DSA:3.40.50.1390 ,PTHR30461,IPR025827,SM00857,G3DSA:1.10.10.2600, SSF53041,IPR011109,PF07508,PS51736,IPR006118, cd00338,PF13408,Coil,IPR036162,PTHR30461:SF3
MKTAAAYIRVSTEDQTEFSPDSQLKAIRKYAKEHDLILPDEFIFADEGISGRKTDKRVQFQRMIGTAKLKPKPFDVILLWKFSRFARNREDSIVYKSMLRKQCGIDVVSISEQLSEDKTSVLIEALIEAMDEYYSLNLAEEVRRGMNEKFSRGGVVSQPPFGYRMQDGIFFPDETAAPIVQMIFNDYLAGMPTKRIALKLNDMGIRTRHGNPWENRTVEYLLTNPVYIGKLRRSKDGDRSDRFHEQDECIDGQHQPIIMQDVFEAAQAKRADTKKNYRKYARQGQPVQFMLKGLVRCDHCGATLVMCQSGASKFLQCNNYNRGKCKVSHAISITKINPVVLEKIRADLDDQNLRLKLEAQCAPKSPDAASRLPAAIEREEKKLLRIREAFEAGIDTLEEYRENKQRITERIAVLRQTLAEEQPPQIDTAAFIGKVRSGLRILEDAGASEIIKNDVLHTFVEKIIFMKPSGRIEIVYHL

SEQ ID NO: 10788 - protein, 478 aa, Unknown; identical to SEQ ID NO: 9818
  Description of Unknown: Integrase B10789 sequence
  cd00338,IPR011109,IPR038109,PF07508,Coil, PS51736,G3DSA:3.40.50.1390,IPR006119,IPR036162,PTHR30461, PS51737,PF00239,SM00857,G3DSA:1.10.10.2600,SSF53041

SEQ ID NO: 10789 - protein, 478 aa, Unknown
  Description of Unknown: Integrase B10790 sequence
  IPR038109,PS00397,IPR006119,PS51737, PF00239,cd03768,G3DSA:3.40.50.1390,PTHR30461, IPR025827,SM00857,G3DSA:1.10.10.2600,SSF53041,IPR011109 ,PF07508,PS51736,IPR006118,PF13408,Coil,IPR036162,PTHR30461:SF3
MNSEKRVFLYVRVSTQEQAKEGYSIDEQIDRLKKYSEAHGWIIVKKYVDAGYSGGNTNRPSLQDMIESIRRGMADIVLVYKLDRLSRSQKDTLELIEDVFLANNCDFVSMNENFDTSTPFGRAMIGILAVFAQLEREQIKERMSMGREGRAKEGKYIGGGLAPIGYDYIDGELVINEFEAMQIRDLFDMYLTGASFKKIEQTFADKGYYHKYGKWTAKRMSGIIQSRLYIGDVKFARNTYKGNHQAIIDDETFRKANEIKSMRSDMYSRGGGKKKGGQLSLLGGMIYCKNCGAKYGYSYSEWKGKRYNYYSCYSRRRQNLSMIKDPTCKNKTYRQDDLDQIIFDEIRKLSTDPEYIAEIRDENLTPDDRDRERIIKKEIESIDTQRSRFLDLYGLGKYSMEELQKKTDPLDDRKMKLERELQSLRKSEMAVEEATDIISSFGDILDRGSFDEIRLTIETLIDRIIIDGDDIIIKWKFA

SEQ ID NO: 10790 - protein, 478 aa, Unknown
  Description of Unknown: Integrase B10791 sequence
  cd00338,IPR011109,IPR038109,PF07508,Coil, IPR036162,PTHR30461,IPR006119,G3DSA:3.40.50.1390,mobidb-lite, PS51737,PF00239,SM00857,G3DSA:1.10.10.2600,SSF53041
MPTQPPEQPLRAFIYNRASRDPKRRGRSTKDQSAENHAECEDQGWTVVGEFTDDNRSASRHARRTRDQFEAMAVRIRAGECDVLVTWESSRANRTMDGYVELRKLIEESGVLWRYGGHTFDMNDRRDRREATRDAAQAEDEAEQIRERNLRTVRLNAAKGRPHGRIPFGYMREYDPHTGELVAQRLHPTEGPDLETAYKRYAAGESAPPIAAWLNERGHTTRTGKDWDGDALLKVFRSQTNIGKRIHQGKVIRNADWPELIDPATFWAVQAMLSTPGRNDGAGRPLSHLLSGIAVCGVCGRADLYILKNRGRSTYVCRPRAHVAILETRLDAYVESALVSWLSSPAAVEAFKPADPGSSVSAILAEVDELNAELQEARLLAASRKLSAVSLAAVESGILPQIERLQDRVQRAMVPPVLRGLLGAPDADARWNALVLERRRMVLRACVAVTVSPGRRGVRRIEPGRVDLRFGPQVPDVL

SEQ ID NO: 10791 - protein, 478 aa, Unknown
  Description of Unknown: Integrase B10792 sequence
  cd00338,IPR011109,IPR038109,PS00397, PF07508,Coil,PS51736,IPR036162, IPR006119,G3DSA:3.40.50.1390,PTHR30461,PTHR30461:SF3, PS51737,PF00239,SM00857,G3DSA:1.10.10.2600,IPR006118,SSF53041
MKTAAAYIRVSTDDQIEYSPDSQLKAIRKYAKEHDLILPEEFIFVDEGISGRKADKRPSFQRMIGTAKLKPKPFDTILLWKFSRFARNRQDSIVYKSMLRKQCGIDVVSISEQLGEDNTSILIEALIEAMDEYYSLNLAEEVKRGMNEKFSRGGVVSQPPFGYKMKDGIFAPDEVNAPIVQMIYSDYLSGMGTREIALKLNDMGLRSAKGNLFENRTVEYILTNVTYTGKLRRSRNGRDNLDRFHESENTLIVDGKHEAIISQEIFQAVQKKRSEHKKTYTRYSRQAPVEFMLKGIVRCDTCGATLTMCAGKTSLQCYNYAHGTCKVSHSVTLKKLNAAVIEHLKSDFEQQSFAIDVIAAEPERKTSAPDLSALIEREKKKLSRIREAYMAGIDSLEEYQENKKNIQERINELTAAAPPAPMSEEEIKAAISGRITAGLQILEDEDTSETLKNLTLRSIADRITFIKPKGIIEIFYKI

SEQ ID NO: 10792 - protein, 478 aa, Unknown
  Description of Unknown: Integrase B10793 sequence
  cd00338,PF13408,IPR011109,IPR038109,PF07508, Coil,PS51736,G3DSA:3.40.50.1390,IPR006119,IPR036162, PTHR30461,PTHR30461:SF3,IPR025827,PS51737,PF00239, SM00857,G3DSA:1.10.10.2600,SSF53041
MNVAIYTRVSTQQQAEHGYSIEEQENACRKKALELGATSIKVYRDSGFSGAYLERPALDDLRDAVAQKLHDLIVIYDIDRLSRDTMHLLLLTEEMEKNAQLVYVNSEYSRTPEGQLFFEIRGSFAKYERVKIQDRFQRGKRGKLRKGLPISDHHIFGFDWNGENYIVNPVTADIVRSIFDRYANHIGGIQSVADWLNGKGIPSPQGKVWSSTAVNRLLRQEMYTGEYFSYKMYHKKVSARKFTQIPRDSSEWIPMQCPSVISRELFDRAQNKLHRNKTQKIHETNHIALFSGVLYCADCGRKMLPTWNSKKSYRYYQCFSRVQKTPCKNHVVGVDVLDAMVWEIIQKTCRNETMLKRYIAQKQPKPKDDSDAIKKQLAGIETKRQAIMSWFSANLISDEESTQKLQALKKQEQNLTERLQTKKEDIPTDQIVKDVRHRITPEDKRQFVLDHISKVIVLRKDFVNRYDVDLDVTIIFGS

SEQ ID NO: 10793 - protein, 478 aa, Unknown
  Description of Unknown: Integrase B10794 sequence
  cd00338,PF13408,IPR011109,IPR038109,Coil, PS51736,G3DSA:3.40.50.1390,IPR036162,IPR006119,PTHR30461, IPR025827,PS51737,PF00239,SM00857,G3DSA:1.10.10.2600, SSF53041
VKPWAGYIRVSHVGGRTGDRFRSPTDQAQAIKDWARRRGEPVILLPPELDESGGRADRPILTDAVRRIEAGEYRGLVVAYLSRAGRSVRHMLELWDRIERAGGEIHAVAENIDTTTPAGRLTRTMLAAIAEHELDLHRERFEALRAEATKAGIWQRRQTPRGYRRDPRTRRLVPDRDAPLVRRAYAARLAGASWSELARMLGMTAAGAQRLIANRVYLGELRVGRHINPRAHPPLVDAEIWHAAQRTTVARPPRSGRLALLAGLVRCAGCGHMMSRSDQKRAVVYACHGWHSAGRCPAPASITMRRLDEHVEPIALAALARLQASSTHDDRALKQARAALREAEAELAAYLEAVSAADIGPEAFAAGAKLRRQRVDTARARLARLIAAAPAGAVSGDIIERWPTLTVEQRNHLLRHLIEAVLVRKAGRGVLLPPAQRVRIVAHGVGLVRPYKGGGGPMPIQPIWIDDPDDPRTLRMQG

SEQ ID NO: 10794 - protein, 477 aa, Unknown
  Description of Unknown: Integrase B10795 sequence
  cd00338,Coil,PS51736,G3DSA:3.40.50.1390,IPR006119, IPR036162,PTHR30461,PF00239,SM00857,SSF53041
MFESYGNEIKQAIKYTRVSTNQQDDKGSKEIQDLKINEFAIKNNFDIVASFSDTDHGDNPLRPGINSLKDYLRINREVKYVICLYADRFTRSFREAMENLYFLEDLGVTLVTLNEGIIKIDGSFQSIASMVHFMGAQEEKKKIVKKTKDSMYNYAITSNRFLGGSVLPWFKVVRGNLNGVRCSLIVKNEETWDFYKKVFIDVIKFSSVKKSSETNNIPYPTLREWLHKPEIAGYRTFGKRGRNENNYKKGRRKTYQISEEKLLPALLDDDEMEKIRNIYANSFSYYQKKSYPYLFTKLAHCVCGGKYYGNHFISRGSSYNYYKCEKCNKRYLAKKLEKIIIENLMNDDSLKMLNDYDFRISDLLDEITKLEQQKSIEQKKENDILNLITEDLISMDTAKEKLKGLKDVIRNIQKEISKIEEDIEREKNKEITSDMLESFRYLLLNYDEDTLEELQQILNLIIKKIIIHSYNEIEIVY

SEQ ID NO: 10795 - protein, 477 aa, Unknown
  Description of Unknown: Integrase B10796 sequence
  IPR038109,PS00397,IPR006119,PS51737,PF00239,G3DSA:3.40.50.1390, PTHR30461,IPR025827,SM00857,G3DSA:1.10.10.2600,SSF53041, IPR011109,PF07508,PS51736,IPR006118,cd00338,PF13408,Coil, IPR036162,PTHR30461:SF3
MMNRNKVAIYVRVSTQGQVDEGYSLDEQVDLLTNYCKLKAWTLYDVYVDPGISGKNMHRPEIERLTRDAKHKLFDIVLIYDLKRLGRSQKENIVLVEDVFNKNGIRLVSFTENFDASTPVGKMVFGMLSAYAELDRANIAERMMMGKIGRAKAGKAMSWGMPPFAYDYNKETGNLELDEAKAPIVEMIFSDYLKGASVNQIVQKLNSMDYNGKDHEWKHHAVTVILENPSYCGMTRYIDQIYEANHKPIIDKVTFDLVQIERKKRLSKYHDNDLVGPFQRKYIGSKFCYCGLCGANLKSEKDKRNKHTGIRPISFYCPNTRSRGTNDCTNKRFRQDILEGYILKEVAKLQQQPEKLRVIKPKKDAENESKLDNYKNKIQQNTSKLSKLNELYINDLMPIDELKKRSKTLYDENEFLEKQIEQLSSTTREDELRNKIDTFLAFPDILTADYETQKQAIEIVVSRVEVTKNGIDIFFNF

SEQ ID NO: 10796 - protein, 477 aa, Unknown
  Description of Unknown: Integrase B10797 sequence
  IPR038109,PS00397,IPR006119,PS51737,PF00239, cd03768,G3DSA:3.40.50.1390,PTHR30461,IPR025827,SM00857, G3DSA:1.10.10.2600,SSF53041,IPR011109,PF07508,PS51736, IPR006118,PF13408,Coil,IPR036162,PTHR30461:SF3
MNKVALYVRVSTTSQLEEGYSIDEQKDKLISYCDIKDWNIYEIYTDGGFSGSNTERPALEQLIRDAERKKFDTVLVYKLDRLSRSQKDTLYLIEDIFLKNNIEFVSLLENFDTSTPFGRAVIGLLSVFAQLEREQIKERMQLGKLGRAKSGKSMMWAKTSYGYDYQKETGSLTINPAQSLVVKYIFERYLAGRSITKLRDDLNEKYPKEISWNYRVVRGILSNPVYCGYNQYKGQLFPGEHEPIISEDEYKRTQEELKIRQMAAAEKTNPRPFQAKYMLSGLAQCGYCHAPLKLIMGGIRKDGTRFIRYECYQRHPRKTAGVTVYNNNQKCHSGAYEKDDLEKYIITEISKLQHDQNYIEQLFSTKSSTIDRDSYQKQIEDLTKKISRLNDLYIDDRITLDELQKRSSEFMTMRTALEEELKNDPEIQGQERRNNIKQVLDCEDIASIDYDGQKAIVRALIEKVQVTSERVVINWRI

SEQ ID NO: 10797 - protein, 477 aa, Unknown
  Description of Unknown: Integrase B10798 sequence
  PF13408,IPR011109,IPR038109,PF07508,Coil, PS51736,G3DSA:3.40.50.1390,IPR006119,IPR036162,PTHR30461, PTHR30461:SF3,PS51737,IPR025827,PF00239,cd03768, G3DSA:1.10.10.2600,SSF53041
VLVFKLSRFGRNAADVLNSLQLMQDFGVNLICVEDGIDSSKDAGKLMISVLSAVAEIERENIRTQTMAGREQKAREGKWNGGFAPYGYKLENGNLVIAEDEVEVIRVIYDRYIHTNEGVAGVAKYLNRNGFIKKLRQNNTIPGFSRNFVQDVLDNPVYMGKIAYGRRRTEKKQGTRNEMHVVEQSEFPVYDGQHEAIISEEDWYLAQEKRKINSFKREKVNNPDHAHILSGILKCPCCGKSMYGNIAKAHSKDKKTRYYYYCKNTVTPTGHECSFRLNIEQAEINKFVAKVISAMVNNPRFVEAIQAKIGTAVDTEDMEKQIDVLQGQLKQAFGTKSRLERQMDTLDINDAHYDRKILDLQRRYDEQYDTIEEIEVQISELQSRIRSIQQEKISGDNIYRLLLAFDEVYHSATEAEQKEFMKAFIERIEMFPEKRKDGSWIRKIVFNFPVPVDGEEVKELPLETETTVETVCLLSRK

SEQ ID NO: 10798 - protein, 477 aa, Unknown
  Description of Unknown: Integrase B10799 sequence
  IPR038109,PS00397,IPR006119,PS51737,PF00239,G3DSA:3.40.50.1390 ,PTHR30461,IPR025827,SM00857,G3DSA:1.10.10.2600, SSF53041,IPR011109,PF07508,PS51736,IPR006118, cd00338,PF13408,IPR036162,PTHR30461:SF3
MLKKRVFVYVRVSTAHQAEEGYSIPQQIERLQKYCDAMGWQLVKIYTDDGYSGGSLDRPAMNQMIQEIEAGHADIVLVDKLDRLSRSQFDTLYMIQKVFDANGVAFVSRNEAFDTSTPFGKAMVGILAVFAELERSRIKERMMDGQEGRAKEGKFRGGGFIPTGYDYNLDKGILEINDYEAMQVREVFELFNNRMPIFTIMTTLNDKGYRTKYGEWKEQTIRGMLSRRIYIGEIVHKGKIYEGQHEAIITREVFDKAQKIIAEREKANENRKIGKAYKSPLGGMIYCGHCGSRYHFRSGANNKDGSRRNYYTCYSRSKGDKKYIKDPNCKNKNYRDNILDEIVFNEIRKLKSEPTYIPAIQDSVDNSHRIGMIEDRIKQIDGQISRFMDLYSVGGMDLDAIGGKIKPLNDEKKSLEQELESIEVPEAPISKEEIISLVDAFEEVLIEGDCQKIHGAVSTLIEKVEIDGEDIRIHWAF

SEQ ID NO: 10799 - protein, 477 aa, Unknown
  Description of Unknown: Integrase B10800 sequence
  cd00338,IPR011109,IPR038109,PF07508,Coil, PS51736,IPR036162,PTHR30461,IPR006119,G3DSA:3.40.50.1390, PS51737,PF00239,SM00857,G3DSA:1.10.10.2600,SSF53041
MRNLRPVADTPPRAIIYLRQSTYREESISLDLQERACRDYAERCGYDVISVLADPGISGRTWSKRPKVQAVMTEIEEGRADVILLWKWSRLSRSRKDWAVAADRVDVAGGRIESATEPIDTATASGRFARGVMTEYAAFQSEQMGEVWEDVRQRRLSLGLPASGRLPFGWVWAGGGKIEPHPERAPHVVEMFQRYLSGSGYAEIAKWLNDNGVPGPLGNAWTRTRPKTVMDSPIHVGLIPYRGATYPGAHEGIIDSETWNAYLAERSRRTTRGEKQRRAEYMLSHLMRCACGERMSGKGAITGGKWYGGYICAHRSTHPHDGRAYVSALAIEPAITTWLMGFDIDDSDAEGDDPLAAVSSRRDRLVRQLAQLEDEAVQILRARTRGDAPASTYDRALALISDERQKLDDDLRKVDENLRRRPDALVVHEIRRDWQLWPVTEQNRALRRLVARIELRPDGRSADVYPSWGGLPSRVSW

SEQ ID NO: 10800 - protein, 477 aa, Unknown
  Description of Unknown: Integrase B10801 sequence
  IPR038109,PS00397,IPR006119,PS51737, PF00239,cd03768,G3DSA:3.40.50.1390,PTHR30461, IPR025827,SM00857,G3DSA:1.10.10.2600,SSF53041,IPR011109 ,PF07508,PS51736,IPR006118,PF13408,Coil,IPR036162,PTHR30461:SF3
MIKTGLYVRVSTHEQAKEGYSIGEQIDRLTKYAEAHGWLIIKVYNDAGYSGSNMDRPALQEMIEDVKAGRIDKVVVYKLDRLSRSQKDTLNIIEDVLLANSCDFESMSEKFDTATPFGKAMVGILAVFAQLEREQIKERMALGIEARIKEGKWRSGCSRPYGYDYDAENGKLVINEYEAMIVKKIFDEFLAGKSVYTIYTEFKNVGYVVRNGKIDTRNIKYILRNKTYCGYQKHNDDWIKCNHEAIISEDSYNQAQEILDEKKRKSDESGHRNESSTLLGGIIFCARCGARYGKYKTGSPQYGFHLNYCCYSRSKRSGTMVMDPNCKNKIYRIEELDNIILNEIRKLAMDPDYINSIKDPEPEDSTATIATLQKQIDSLSHQTSRLMDLYSLGTFSIEELEAKIKPLQEQRTKLKEQVESLQSTRHTMTNDQVIHLIQSFDEVLDKGTMADKRIIIDQLIDRIDIDGDDVIIHWNFA

SEQ ID NO: 10801 - protein, 477 aa, Unknown
  Description of Unknown: Integrase B10802 sequence
  IPR038109,PS00397,IPR006119,PS51737,PF00239, cd03768,G3DSA:3.40.50.1390,PTHR30461,IPR025827,SM00857, G3DSA:1.10.10.2600,SSF53041,IPR011109,PF07508,PS51736, IPR006118,PF13408,Coil,IPR036162,PTHR30461:SF3
MIKTGLYVRVSTQEQAKEGYSIGEQIDRLTKYAEAHGWLIVKTYTDAGFSGSNMDRPALQEMIEDVKAGRIDKVVVYKLDRLSRSQKDTLNIIEDVLLANSCDFESMSEKFDTATPFGKAMVGILAVFAQLEREQIKERMALGIEARIKEGKWRSGCSRPYGYDYDAENGKLVINEYEAMIVKKIFDEFLAGKSVYTIYTEFKNVGYVVRNGKIDTRNIKYILRNKTYCGYQKHNDDWIKCNHEAIISEDSYNQAQEILDEKKRKSDESGHRNESSTLLGGIIFCARCGARYGKYKTGSPQYGFHLNYCCYSRSKRSGTMVMDPNCKNKIYRIEELDNIILNEIRKLAMDPDYINSIKDPEPEDSTATIATLQKQIDSLSHQTSRLMDLYSLGTFSIEELEAKIKPLQEQRTKLKEQVESLQSTRRTMTNDQVIHLIQSFDEALEKGTMADRRIIIDQLIDRIDIDGDDVIIHWNFA

SEQ ID NO: 10802 - protein, 477 aa, Unknown; identical to SEQ ID NO: 10767
  Description of Unknown: Integrase B10803 sequence
  cd00338,PF13408,IPR011109,IPR038109,PF07508, Coil,PS51736,G3DSA:3.40.50.1390,IPR006119,PTHR30461, IPR036162,PTHR30461:SF3,IPR025827,PS51737,PF00239, SM00857,G3DSA:1.10.10.2600,SSF53041

SEQ ID NO: 10803 - protein, 477 aa, Unknown
  Description of Unknown: Integrase B10804 sequence
  cd00338,PF13408,IPR011109,IPR038109,PF07508, IPR036162,IPR006119,PTHR30461,G3DSA:3.40.50.1390,PTHR30461:SF3, PS51737,IPR025827,PF00239,SM00857,G3DSA:1.10.10.2600, SSF53041
MRAVIVAAVSTGAQASEERYSIPQQLDLCRGMCAQRAWQVVGEITIAGHSRAYNWLDELCADCAEYGNLLRTIRADATDLVVCRDYDRLWRTDALRAQLMAVCREHRVQIYALNQPVEPVDPALLAHSSDSSLIITAVSGVVSQLENESRKRRTMAGLRGRVARGLPPGAAKPRYGYARVDKHLVVNEAEARWVRWIHERYAEGQGAPALTFALNDMGIPGPTGGRWHRDTVRHIIAHPVYAGMVRYGDILTKGQHEAIVSPELWQRCHDAQQRRHVPQMRNPAYILSGLVRCGYCGGALTYATPHHGIAILRCATYAHWGGRQCQVNSIRAVELEGYVLYQVKAALDNPLAFAEAQRVDKRVDESAELATYQAAYVANADKWARWDRLYEAGGIDANELLTHRAEIQAAQQALQARITAIESIAQREASRHNRLVELASTLDTLDTLPPERLSQLYRLLIARVIVHRAYPPCIEWL

SEQ ID NO: 10804 - protein, 476 aa, Unknown
  Description of Unknown: Integrase B10805 sequence
  cd00338,PF13408,PS00397,Coil,PS51736, IPR036162,IPR006119,G3DSA:3.40.50.1390,PTHR30461,PTHR30461:SF3, IPR025827,PF00239,SM00857,IPR006118,SSF53041
MSPKNKKIERIACYIRVSSQEQKLHGLSLDAQRDTLTRYAEAHGLNIIEWYEDEGVSGRKLIRRRPALQRMLNDAKAGKFDRIIFIKLDRYFRSVAEYYECQKILEANKVTWTATEEKYDLTTANGRYWVTQKLAMAEYEADQTGERIDLVNEYKVRTGQPLAGAQNQGLAFTVGRDEQTGLKNVIPDPETKDMITDYINYFLVHQSVAGSVAYINNKYGTTYEYARLRKVLTDTKLWGHYRGNDFYCKGYVDKATFDKIQTILKGNVRKRSSNRVYLFSGLMYCPCCGRKLTGITSVNRKTVKPNGKVYIHTNPIYQYRCNKFKMSKTCTFNKYPNEERMEKALLNNLNRYINNHITHVKITANTNTHTDGVKNSIANLQAEMNRLNTMFRKGRVKEEEYDREYEALERQLAELQASLTPVEERDVTVYEELLAKDDWKELYNALNRENKRAFWRKYIKAIKLDTEGKIDEIIFF

SEQ ID NO: 10805 - protein, 476 aa, Unknown
  Description of Unknown: Integrase B10806 sequence
  cd00338,PF13408,IPR011109,PS00397, Coil,PS51736,G3DSA:3.40.50.1390,IPR036162, PTHR30461,IPR006119,IPR025827,PS51737, PF00239,SM00857,IPR006118,SSF53041
MSPVNKKYQRIACYIRVSSQEQKLHGLSLASQRDILQRYAEKHGLKIVEWYEDEGVSGRKLIRRRPALQRMLNDAKAGKFDRIIFIKLDRYFRSVAEYYECQKILEANKVTWTATEEKYDLTTANGRYWVTQKLAMAEYEADQTGERISLVNEYKIRTGQPLTGAQSLGLAFTVGRDEVTGLKNVIPDPETKELVTDLIKHFLVHQSVSGTVSYINNKYGTKYEYQTVKRVLTDTKLWGHYRGNDFYCTGYVDKATFDKIQKILKGNVKKRKTNRVYLFSGLFTCPSCGRKLTGVCSVNRVNKKASGKVYVYSDPIYQYRCNKSKMSKLCTFNKYPSEEKMEKALLNNLNRFINNHITHIKVTANTNTHTDGVKTAIVNLHAEMSRLNTMYRKGRVKEEEYDRDYEELERQLGELQDSLTPVEERDLTIYEELLEKDDWKELYNALNRENKRAFWRKYIKAIKLGTDGKLDEIIFF

SEQ ID NO: 10806 - protein, 476 aa, Unknown
  Description of Unknown: Integrase B10807 sequence
  cd00338,PF13408,IPR011109,PS00397,Coil, PS51736,IPR036162,G3DSA:3.40.50.1390,IPR006119,PTHR30461, PTHR30461:SF3,IPR025827,PS51737,PF00239,SM00857, IPR006118,SSF53041
MSPVNKKIERIACYIRVSTQEQKLHGLSLDAQRDALRRYAEAHGLNIIEWYEDEGISGRKLIRRRPALQRMLNDAKAGKFDRIIFIKLDRYFRSVAEYYECQKILEANKVTWTATEEKYDLTTANGRYWVTQKLAMAEYEADQTGERIRLVNEYKVRTGQPLTGAQAFTIAFAVGKDEETGLKNVIPNPETKELVTDFINHFLTHHSLSSSTEYINTKYGTKYEYGQLKKVLIDTKLYGHYRGNDFYCTGYVDKATWDKIQEIARGNVKKRKTNRIYLFTGLLQCPCCGRKLTGICSANRKTVKPNGKVYISPNTIYQYRCNKAKMSKLCSFKKYPNEERMEKALLSNLNRFINNHITHVKITANTNTHTDGVKNSIANIQAEMNRLNTMFRKGRVKEEEYDKDYEALEKQLAELQESLTPVEERDVTVYEELLAKDDWKELYNALNKENKRAFWRKYIKTIKLDTEGKIEEIIFF

SEQ ID NO: 10807 - protein, 476 aa, Unknown
  Description of Unknown: Integrase B10808 sequence
  cd00338,IPR011109,IPR038109,PF07508,PS51736, IPR036162,IPR006119,PTHR30461,G3DSA:3.40.50.1390,PS51737, PF00239,SM00857,G3DSA:1.10.10.2600,SSF53041
VKRAAIYARYSSHNQRDVSIDIQVENCRAYCKERGWQVVGEYCDHAVSGRTSERARFRKMMDDAEKGLFDVVVIWKVTRIMRNRDEMALVRLSLKAAGVDIAYAGESFPDGSSGLLMLGMLEVLAEWESVQTAERIQAGIRKNAEGLKASGVRLIGYTVDDSDNFVIDEETAPAVRLAFRMAADGETVAAIVRALAGYRSKWGRPISQQSVTNMLRNRRYMGEYSYAGVVKEDGMPAIIDRDTFDKVQRVLDSRNPKPRDRGHRYVLVGRLFDPDGQPMTGTSATGRNGKRHYYYRTKAGKRVRCDVVERCVADAVAAALADTATRERIADLFGEYQDANEVDASETSEAREMRQIDAKIARIETAIEDGLPFDRDRLLALHDRRAELEKMRADSSPRKYGRGEVLGLLEKAAQMDSERAIDVFVAAVVHGDDRTAVHFSFDDAPPERLAQVVNWWRRWEDKPTVHPVPGGFVMVA

SEQ ID NO: 10808 - protein, 476 aa, Unknown
  Description of Unknown: Integrase B10809 sequence
  PS00397,IPR038109,IPR006119,PS51737, PF00239,G3DSA:3.40.50.1390,PTHR30461,IPR025827, SM00857,G3DSA:1.10.10.2600,SSF53041,IPR011109,PF07508,PS51736 ,IPR006118,cd00338,PF13408,Coil,IPR036162,PTHR30461:SF3
MNVAIYARVSTEQQAEKGYSIVTQIEACQKKAMEMGADTIKVYKDDGYSGAYLERPALDSLRDALAAGLHDVVIVYDTDRLARDTMILLLITEEIEKHARLVFVNAEYSRTPEGQLFYEIRGSFAKYERLKIQDRMARGRRGKLKAGKPLKEYKIYGYDYVNGQYVINEAEADLVREIYRLYLENTVGLHSIPELLYKKGIVALSGKKFHHSTIHKILTHQHYTGTYYSYRTYNKKTGANSHTILKRDSSEWIQMHCPRIIPQDTWDAVQNKLARNRAEHIRDNKYNALFQGVLYCECCGHKMRLTRYKTAMYYACGQNRDAPGSCESKMIRAEVLDALLWRTIFDICKDEATMKKYLKRNAQPPKKTENIEERLEAIAKIRTAIMGWYSNNLIDMETCTRKLEELKRQENALRQRAVPADDKPVDITAAVRSVKVLNADYTTKRNIITKIVAKAYVKKEGNSRKNYSLNFNIIFA

SEQ ID NO: 10809 - protein, 476 aa, Unknown
  Description of Unknown: Integrase B10810 sequence
  cd00338,PF13408,IPR011109,PS00397,PF07508, Coil,IPR038109,G3DSA:3.40.50.1390,IPR006119,IPR036162, PTHR30461,PS51737,IPR025827,PF00239,SM00857, G3DSA:1.10.10.2600,IPR006118,SSF53041
MRIGAAYIRVSTDDQLDISPESQLDEIQRYAKSHDILIPEEYIFMERTGRSGKRADNRPEFQRMIATAKEKPQPFEVILVWKFSRFARNQDESTFYKGMLRKKLKIDIESVSEPIMEGMYGRLIEMIIEWQDEFYSYNLGVEVKRGMAKKAELKGYQLVPPLGYAAVGNGKPYVIREDEYKIVEMIFHMYAVDRLDMTAIARQLNASGYLTRRGNPFEKRSIDRIIQNRFYVGTVEWNGYSFEGTHKTRASVTDLFEQCQERRKAEFRPMRHRNVSTCKHWLSGLMRCSVCGATLSYTGSGAVPYFTCWKYSKGLHPESCSISVKKMERIVLRSLDGILESGHFEYTPAASASGSPADPSNEIQSIHTQLDRLRHQEERARIAYENEVYTLDEYKESKARLRSEIQRLSDELQRLLEQPAESAPPQKELLDRVRNVRDLLASPSVGFETKGNALRSILKCIVFDRKTEHFDFQYYA

SEQ ID NO: 10810 - protein, 476 aa, Unknown
  Description of Unknown: Integrase B10811 sequence
  PS00397,IPR038109,IPR006119,PS51737,PF00239,G3DSA:3.40.50.1390 ,PTHR30461,IPR025827,SM00857,G3DSA:1.10.10.2600, SSF53041,IPR011109,PF07508,PS51736,IPR006118, cd00338,PF13408,Coil,IPR036162,PTHR30461:SF3
MITAIYVRVSTEEQAKEGYSIGEQTERMKAYCDAKGWKNIKVYTDPGLSGSNMNRPALQKMLTDIDRKEVDRVVVYKLDRLSRSQKNTLFLIEDVFIKNGVDFVDITENLDSSTPIGRMMIGVMSAFSQLEREWIKERMAMGHEARAKAGLYHGGGPAPIGYDYEDGLLVLDPYEAMQIKYLYEEYAKDTSLRELKRLMNEKYKTKYGAWTSDSSIRRSLSQKLYIGKIDFKNDTYDGLHEPIVSKELFDKVQSKLLERSWGKRHAGKSRPFTAKSLLTGLLYCGHCGARYFGRSQLYVYKDKREPRHYYTCYSRCGYPAHMVKDPTCKNKNYPVKKLDTKILNEIKILSLDLDSLDTMVTRQNETSQKSILQSQLNKLDKQISKLLDLLQNDKMPFEAVSKRLETLNTDRKIILNDIDNLKVEPKLAVPEAKRIITSIGESFDDLDLIKKRKLIHDLINKITITDDDITIQWAFI

SEQ ID NO: 10811 - protein, 476 aa, Unknown
  Description of Unknown: Integrase B10812 sequence
  cd00338,IPR011109,IPR038109,PF07508,Coil, PS51736,G3DSA:3.40.50.1390,IPR006119,IPR036162,PTHR30461, PS51737,PF00239,SM00857,G3DSA:1.10.10.2600,SSF53041
MKAILLIRVSTEAQDLVQQREKVVDAAKRDGYDELILIEDKESAVKLSEEERNGLNRLKEAIEKDSSIKAVYSYEISRISRQAKIVYSIRDFLINHHIQLVILNPYFKMLKDDGTLSETSNIFFGIFASMAENEGYIRKARMRRGVQKKKELGMHAGGQVMYGYKTIKTENGHKYIIDEAQATIVKRIFTDYVNGKSMRMLTRDLQEEGHFKGVKYLTAVQEVYNILHRDCYCGRKKGMPAIIYESLYDKSVEMRKHNELKVSRTSNMSLCKGILRDSDSGLLLSSNTAANMYYSKRCKGVSVSMHIMDPIIWEYSVELHKEYNKMDVEQLLNGLIRRRQMNERKMKTLYEKEKELEEKKDKIEERLIMGKLSEKKADELEEQINNEIKDIRERAREIMDDNMNIETEGNRIYSTRDVKINYEELNKEQRYDIVHAVIDKVMLKRTERAILEINIYNKVNNEVKSLTYNSFKRKFT

SEQ ID NO: 10812 - protein, 476 aa, Unknown
  Description of Unknown: Integrase B10813 sequence
  cd00338,IPR011109,PS00397,PF07508, Coil,IPR038109,PS51736,IPR036162, IPR006119,G3DSA:3.40.50.1390,PTHR30461,PTHR30461:SF3, PS51737,PF00239,SM00857,G3DSA:1.10.10.2600,IPR006118,SSF53041
MQTAAAYIRVSTDDQIEYSPDSQLKAIRKYAKEHSFILPEEFVFIDEGISGRKADKRPAFQRMIGTAKLKPKQFDTILLWKFSRFARNRQDSIVYKSMLRKQCGIDVVSISEQLGEDNTSILIEALIEAMDEYYSLNLAEEVKRGMNEKFSRGGVVSQPPFGYKMKDGIFAPDEVNAPIVQMIFSDYLSGMGTREIAIKLNDMGIRTTKGNFFANRTVEYILTNVTYTGKLRRSKNGRDALDRFHESENTLIVDGKHEAIITPEIFEAVQKKRSEAKRTYTRYARQAPVEFMLKGIVRCDSCGATLTMSSGKTSLQCHNYAHGTCMVSHSVTIRKLNSAVIEHLKSDFEHQNFTIDVEEQKQTSAAPDITAMIEREKKKLSRIREAYMAGIDTLEEYQQNKKIVQSRIDELTAAIPPAPLSEEKIRETISGRIQAGLQILEDEDTSETLKNITLRSIVDRIVYIKPKGIIEIFYKL

SEQ ID NO: 10813 - protein, 476 aa, Unknown
  Description of Unknown: Integrase B10814 sequence
  IPR011109,PS00397,PF07508,Coil,IPR038109, PS51736,IPR036162,IPR006119,PTHR30461,G3DSA:3.40.50.1390, PTHR30461:SF3,PS51737,PF00239,SM00857,cd03768, G3DSA:1.10.10.2600,IPR006118,SSF53041
MTVGIYIRVSTEEQANEGYSISAQRERLKAFCLAQNWHDYKFYVDEGISGRDTKRPQLKKMMEDIRAGHIKVLLVYRLDRLTRSVRDLHRILDELEKYSCTFRSATEFYDTSTAMGKMFITIIAAIAEWESANLGERVTMGQVEKARQGEWAAQPPYGFFKDDKHKLQIHKEEINAVKLMVKKIREGMSFRQLAFYMDSTQYKPKRGYKWHVRTLLSLMHNPALYGAMYWKEQIYENTHQGIMTKEEFNQLQKIISSRQNYKSRNVSSHFVYQTKLICPDCGSRCTSERYTWKRKTDNVVEVRNSYRCQVCALNNPKTTPFSVREVKVDEALIEYMVNFTVAPSEAVELNENDQLLDIKNNLRKIENQREKYQRAWANDLITDDEFKVRMDESRLQFDSLQNELKNIEGEKYDVVDIERYKEITKSFNDNYLNLTQEERRTFIQTFIESVKVEIVEHTKGKGYRNQKIRIADVSFY

SEQ ID NO: 10814 - protein, 475 aa, Unknown
  Description of Unknown: Integrase B10815 sequence
  PS00397,IPR038109,IPR006119,PS51737,PF00239,G3DSA:3.40.50.1390 ,PTHR30461,IPR025827,SM00857,G3DSA:1.10.10.2600, SSF53041,IPR011109,PF07508,PS51736,IPR006118, cd00338,PF13408,Coil,IPR036162,PTHR30461:SF3
MKREIKDDNYTKLGRKDPKRVAIYIRVSTDEQAKHGLSLPSQRKTLEDYCKKHGHRIVDTYIDEGLTARKTLRKRVEFNRMIEDVKKDKIDLIIFIKLDRWFRNVRDYYNTMDILEAHNCTWIATEEDYDLTTSTGRLNLNIRLSISQNESDQTSDRINFVFANNRAEGRVVSGACPFGYKIEDKRYVIHEENAERVRDIFDHFTKQGSLMKTLTYYRDKYNNRLSYNAIKKYVRNTAYIGEYRTEKGELIEDYTPAIIDRDTFEFAQTLLKKNIKQSRNNSDPAEFIFTGLLKCGLCGSNYARNCKVKRNSKGEIKQYYYYRCYRVAGMNCNNKTTANQEKLEEDLLAMVKIEAEKYIAENKIKGTKQVNKPVDNTGKIKTKLKNLRELFIDGDIEKEEYLQRKQKLEKELNENIALLNSADTPKDTRHLEALINSDFETIYHSLTKENKRRFWASIIDKAYVLDKKIVKIDFL

SEQ ID NO: 10815 - protein, 475 aa, Unknown
  Description of Unknown: Integrase B10816 sequence
  IPR038109,PS00397,IPR006119,PS51737,PF00239,G3DSA:3.40.50.1390 ,PTHR30461,IPR025827,SM00857,G3DSA:1.10.10.2600, SSF53041,IPR011109,PF07508,PS51736,IPR006118, cd00338,PF13408,Coil,IPR036162,PTHR30461:SF3
MVTTNKVAIYVRVSTSSQAEEGYSIDEQKAKLEAYCEIKDWKIYDTYIDGGFSGANTQRPELERLISDAKRKKIDIVLVYKLDRLSRSQKDTLFLIEDVFAKNDVAFISLQENFDTSTPFGKASIGMLSVFAQLEREQIKERMMLGKEGRAKNGKSMSWTTIPFGYDYSKETGILSVNPTQALIVDRIFTEYLNGKSVVKIIRDLNAEGHVGRKRPWGETITKYLLKNETYLGKVKYKDQVYEGQHEPIITQELFDLVQLEVEKRQISALEKYNNPRPFRAKYMLSGLMKCGYCGASLGLKYTRKDKNGISHHKYQCRNRHSKDLEKRCESGWYSQEELEKDVIKELERLKLNPKYRNETLAKKEETIKVEEVKKQLDKLNNQVSKLTELYLDEVITRKELDEKNAKIKTERQFLEEQLENQKSNVLSIRKRKLTRLLKDFDVEKLSYEDASKIAKNIIKEIIVTKDGMSITLDF

SEQ ID NO: 10816 - protein, 475 aa, Unknown
  Description of Unknown: Integrase B10817 sequence
  cd00338,IPR011109,IPR038109,PF07508,Coil, IPR036162,IPR006119,G3DSA:3.40.50.1390,PTHR30461,PS51737, PF00239,SM00857,G3DSA:1.10.10.2600,SSF53041
MQAGPQNLSAAIYTRLSKGFGRSIEEQEAEDRAECGRLGWGIADVYSDASRSASRFATKGREDWARLLADLDSGRFGVLMLWEPSRGDRDAESWLGLLNLCRRRGVKIHITSHGHTYDMTRRRDWRALADEGIDSADESEKISERIRRDVRANAALGRPHGKTPYGYERIYDSRTKQLAEQRPDPRTAPVVAEIYWRVGSGEPVLAIARDLNARGEPAPGGKQWSRVMIRNIATSPVYAGRRVWKGEQIPGIWQPLVDEAAWHRAKRVLTDPSRARVRPTRARHLLSYIGQCGECGAPLAAAPRGAKRNLYGCSERGCVFIREDWLDDEVTRRVIAILSSAEIYRARQGASDAAVLAAMAEADKLQERLDEMAGQAARGEIELRALSIGEAELRPKIRAAHDRANAAAVPLEIRDLAEHRESMPDVWLTMPLARKKQLLRTLIADGALCVKVRKPQPGGVRGKFDPARVVTEPGR

SEQ ID NO: 10817 - protein, 475 aa, Unknown
  Description of Unknown: Integrase B10818 sequence
  IPR038109,PS00397,IPR006119,PS51737, PF00239,cd03768,G3DSA:3.40.50.1390,PTHR30461, IPR025827,SM00857,G3DSA:1.10.10.2600,SSF53041,IPR011109 ,PF07508,PS51736,IPR006118,PF13408,Coil,IPR036162,PTHR30461:SF3
MKTTNKVAIYVRVSTSYQAEEGYSIDEQKDKLEAYCKIKDWKIYDVYVDGGFSGSNTKRPELERLIDDTKRKRFDIVLVYKLDRLSRSQKDTLFLIEDVFLKNDVAFISLQENFDTSTPFGKASIGMLSVFAQLEREQIKERMILGKEGRAKKGKAMSWTTIPFGYDYSKETGILSVNPTQALIVNRIFTEYLNGKSVVKIIRDLNAEGHVGRKRPWGETITKYLLKNETYLGIVKYRGQKYEGQHEPIISQELFDLVQLELKKRQIDALKRNNNPRPFQAKYMLSGLLKCGYCGGSLGLYVTSKNRKGKAYQRYQCRHRFDKDKSKRCNSKWYDKQELEEKVIERLSKIKLEPKYRKEMLAKNDETMKVEEIKEQLKKLNNRLEKLTELYLDEIITRKELNAKNEKLKIEKAFLEEQLESKKKNTINIRQRKLARLLKGFNPEKLSYEDASKIVKSVVNEIVVTKEEMTITLDF

SEQ ID NO: 10818 - protein, 475 aa, Unknown
  Description of Unknown: Integrase B10819 sequence
  PS00397,IPR038109,IPR006119,PS51737,PF00239, cd03768,G3DSA:3.40.50.1390,PTHR30461,IPR025827,SM00857, G3DSA:1.10.10.2600,SSF53041,IPR011109,PF07508,PS51736, IPR006118,PF13408,Coil,IPR036162,PTHR30461:SF3
MKTTNKVAIYVRVSTASQAEEGYSIDEQKSKLEAYCEIKDWKIYDTYIDGGFSGANTQRPELERLISDAKRKKIDIVLVYKLDRLSRSQKDTLFLIEDVFAKNDVAFISLQENFDTSTPFGKASIGMLSVFAQLEREQIKERMMLGKEGRAKNGKSMSWTTIPFGYDYSKETGILTVNPTQALIVKRIFTEYLNGKPVVKIIRDLNAEGHVGRKKPWGETITKYLLKNETYLGKSKYKGKVFEGQHDAIISQELFDLVQLEVERRQITTLEKNNNPRPFRAKYMLSGLMKCGYCGASLGLYVAPKNKNGVSKYKYQCRHRYHKDKAVRCNSGWYSKVELEKRIIKELERLKFDPKYKEETLAKKDETIKVEDIKKQLERINKQVSKLTELYLDEIITRKELDEKNAKIKTERQYLEEQLENQKSNVMSIRKRKLSRLLKDFDIEKLSYEEASKIVKSVIKEIVVTKDDMTITLDF

SEQ ID NO: 10819 - protein, 475 aa, Unknown
  Description of Unknown: Integrase B10820 sequence
  IPR011109,PF07508,PS51736,G3DSA:3.40.50.1390,IPR006119, PTHR30461,IPR036162,PTHR30461:SF3,PS51737,PF00239, SM00857,cd03768,SSF53041
MRIGLYARVSTGSDEQEAALEQQLDRLRAAAAGHETVEFIDVASGTKDDRQQLNALMAACRAGQLDRVICTRLDRLSRSMAHGAELLSYFSAEDTPSLLALDDALDLATIGGRLVARMLINLGQAESERLSERVRHGRAYQRKLLIPLGPKAPYGYRFNAERTNYELDPETAEAARWLVQQFLESGQLRPLLRQAKELPGCPWTSVPGMRSWLMNPTLAGYRVYGHDETYRDQDGRLKKRRLKAGVYKEVVPDAHKPLISAVEHAKVQARILEHVDRKRSGLLKGYVRELTKLVVCSHCGRFMSYQHHVRLGPIYLRCTYWPCASEKRNRIKVQTVKDAIWSKLKASREQLIAYLTASNGMKNGQLDDAIKLDEEIRELEGRQDPDLQEAILHKRMKLSALMQMHGHRLDVEATAVEMRKQLGNETAWSLMANDEEATREMFVRFVEKVLVRERAVEAVVLRLDGCGAISSLGLG

SEQ ID NO: 10820 - protein, 475 aa, Unknown; identical to SEQ ID NO: 10433
  Description of Unknown: Integrase B10821 sequence
  IPR038109,PS00397,IPR006119,PS51737, PF00239,G3DSA:3.40.50.1390,PTHR30461,IPR025827, SM00857,G3DSA:1.10.10.2600,SSF53041,IPR011109,PF07508 ,PS51736,IPR006118,cd00338,PF13408,Coil,IPR036162,PTHR30461:SF3

SEQ ID NO: 10821 - protein, 475 aa, Unknown
  Description of Unknown: Integrase B10822 sequence
  Coil,PS51736,IPR036162,IPR006119,G3DSA:3.40.50.1390, PTHR30461,PTHR30461:SF3,PF00239,SM00857,cd03768, SSF53041
MKAFLYNRVSHKDSKASDISIPDQMVRTTNYATSVIPEAEQVVVTDAGVSAWSKSFAGRPGGGRIIEQVKPGDHVICLQIDRLCRNLRDFCNLMHFFEEKGIFVHFINNQINTTTASGKLQANILAAMAQYASDVTSERIREALLIKRLQNSQSSNTKPKVKWMNSEFVLPQKIKTERPTGTIRMYERVSTEPQYVSGLGLKWQGTANAKYAEDLAEKLQCPVGPVYSDPAISAFSVPFMEREAGKRLMNDLQPGDDVVIYRMDRGWRNTLDAMKTIAEIQRKGAYVHFVCERIRTDTGQGKEWISLMASIAQLESQMKSNRNKETAAWCQANGRPNGLPRAGFKIEQISEHQKRLAVDKKQLLQAGQIWVMKYELGLSTTQIEDMIIAIKARELGVKANLTMLKRSYVQRRLRQIDIMHEMIGSSLWGKCKHKARLSLKKPFSADHLRLIHRWKWTHSPVLPSASKPRASRSRA

SEQ ID NO: 10822 - protein, 475 aa, Unknown
  Description of Unknown: Integrase B10823 sequence
  PS00397,IPR038109,IPR006119,PS51737, PF00239,cd03768,G3DSA:3.40.50.1390,PTHR30461, IPR025827,SM00857,G3DSA:1.10.10.2600,SSF53041,IPR011109 ,PF07508,PS51736,IPR006118,PF13408,Coil,IPR036162,PTHR30461:SF3
MIALYCRVSTREQTKEGYSIGEQQERLKNYCAAMNWKKYKLYVDGGYSGGNMERPALKNLISDIKKGLVEKVVVYKLDRLSRSQKDSLVLIEDVFLKNNVDFISMSENFDTSTAFGRAMVGILSVFAQLEREQIKERMIMGIEARAKEGKYCGSCSPVGYDYIDGELKINDFEALQVKEAFELTLEGLSPYKVADILNKKGYRTKFGIWSEYRVRWVVRSPLYIGRVKYSGEYFDGIHEPIVSEELFNDVQNYLEKRAAENAKCNYCAGKATTYLGGFLICAHCGGKYSKQLQLSKKADGTYLRYYYYICQSRSKKKKSQVKDPNCKNKNWNIEKLTNIIFDEIRKLSLDPNYFEEVREVSIQEDKKNILVAEIEKIDGQLSGIMDLYVFDNIPMKTLEEKTNALNEQRLKLEQELEGLQEQRLDKLSKEEAEEIFQNFDDIIKRADFQEIRSVLSALIEKIVLDGENIEIHWRF

SEQ ID NO: 10823 - protein, 475 aa, Unknown
  Description of Unknown: Integrase B10824 sequence
  cd00338,IPR011109,IPR038109,PF07508,Coil, PS51736,IPR036162,G3DSA:3.40.50.1390,IPR006119,PTHR30461, PS51737,PF00239,SM00857,G3DSA:1.10.10.2600,SSF53041
MYKVISFTRVSSQQQNLESQNKEVHDAIIRHGYSEDEILYVQQKESAIKLSMEERVSLQQMFNLIKQYNTIEYVFVYEISRLSRQPKMLYELRDFFIEHKVNLKSLKPELTLLDDDFKLSQTASIMFSIFASLSESEMMLKKERMARGREYKRAQGLYAGSPIAIGYKQDKDKIVIDEPNAALVRRIFTDYISGKSVRTLAKELQNEGWRKNTKFLTLCQSILNILHREYYCGDKLHPAIITREQFEQAKQVAQSKTIYRTSRTNALLKGLIYDKESGYLMSSNMSNGQYYSRRYGHCTISMKAADTLVSGVAREWYEQIYVVKADEYRQMIESEIERNKRIISTMTDNITNNQDKIDRIEERYIDGKISKEKADELERKAFEELNYYKSNLENAKVQVDILQQKLQNYNLRTDDIYDIVHDVINRIYCRRLSKYVCEVTIINKYTGEQRIYEYNTRKMQIVHFEVVTRPALYLL

SEQ ID NO: 10824 - protein, 475 aa, Unknown
  Description of Unknown: Integrase B10825 sequence
  PS00397,IPR038109,IPR006119,PS51737, PF00239,cd03768,G3DSA:3.40.50.1390,PTHR30461, IPR025827,SM00857,G3DSA:1.10.10.2600,SSF53041,IPR011109 ,PF07508,PS51736,IPR006118,PF13408,Coil,IPR036162,PTHR30461:SF3
MNRCAIYVRVSTQEQARDGYSIGEQRERLKLYCESHDWTVVKDYVDAGYSGASTDRPFLNQMIEDVTRGMIDKVVVYKLDRLSRSQKDTLHLIEDIFLANGCDFVSMNENFDTSTPLGRAMIGILAVFAQLEREQIKERMMMGKEARAKDGKFNSGKTPIGYDLIDSDLVVNDYERIQVQRIFQEYASGKSPVAIARDLTESGYSHKYGAWQPETIRHLLTNQTYTGVICYNGTVYQGEHDVIIDDELFQRVQSKVSRKREEHLHLNRRAGKASSYLAGLLVCGCCGAKYSKLSHKETKGGRTYTYAYYKCNSRAKKSAHLVKDPDCKNRIWRMQDLDELIFGEIRKLATDPDRISDLSDDIDVDKQSVLRDEISGLNRKIERLIGLYAVEDMPLDVLQKQVSDLEEQKSRLEAEMERLSDEQSKKASIADAIDAVSSFGEVLDKGNYDEIRTVLCALIDKIVLDGDDITIHWRF

SEQ ID NO: 10825 - protein, 475 aa, Unknown
  Description of Unknown: Integrase B10826 sequence
  cd00338,IPR011109,IPR038109,PF07508,Coil, PS51736,G3DSA:3.40.50.1390,IPR006119,IPR036162,PTHR30461, PS51737,PF00239,SM00857,G3DSA:1.10.10.2600,SSF53041
VQPRLVPDTPPRAVIYLRQSVHKDDSISIEMQEFAGRDYCARMGYTVVAVEADEGLSGRRWDNRPAVKRAIDLIEGRNADVIILWKWSRLSRSRRDWALASDRVDVAGGRIESATEPIDTGTASGRFARGVMTEYAAFQSEQIGEQWEEVRQRRIRNGLPVSGRLPWGWEKHEGQLRPVPEQAAYVVEMYAKFLGGQGSASIARWMNAQGIPSPEGKIWSRERPGTLLDSPIHAGLIPYRGEVHEGAHEGIIDRATWDEYLATRASRREGKQKPRMSKYLLSSLVRCHCGYQMSGRGHRKNGHWYSGYACQSMAPDHGPNYISSRKLDPLVHQWLATIAKELDDVVDVVALVEMTTDLDQLRREHTALQKQLTNLTLQLAADIVPEAAYSEARAQIEARQTEIMAAIDRHGRQQSLASRVSNEFIRGLVRDWEFMPFDGRRDTIRTVLERITVTPGPAATVEFTSRWGTSAVLRV

SEQ ID NO: 10826 - protein, 475 aa, Unknown
  Description of Unknown: Integrase B10827 sequence
  cd00338,IPR011109,PS51736,G3DSA:3.40.50.1390, IPR036162,IPR006119,PTHR30461,mobidb-lite, PS51737,PF00239,SM00857,SSF53041
MTVTAHSYARISTRKQRSIERQHTDNTAAATEHGWAVGRRYEDTGSASSYSQKPRGDFQRLMADLRAGNIPSQDVLILWESSRGSREQVEWGTLLNLLRDNRIGVHVTSHRRTYDLTNPRDRRSLDEDGVDSAYESGKTSGRVHIAAVENAQTGRPWGPVPFGYTRVFDPVTGRLIGQEKDPKRAPIVAELFARLEAGHSLRSIAADFAERGITRAPREGRPEGPISAAQLRNMAMQAGYAGIRASDTIGQTFDAVWPAIVTPRQYHAVHRILTDSARKTSRPGRGKWFLSMIGKCGADDCDSPLSVRYRRGPRYRCHEKSHVLIDMEELDQVAETVILDYLNRNDVVEALSAAWSAEDQRLATIRDQLDTVRAELRELAAGVGAGKVTLDFAAMAEPGVRRRIKDLEAQERDAALPAVLRGLVGVGLTRAQWRAKPMSTRREVARLLLSPKYLGELRVGRVDELRIRFDRAAVA

SEQ ID NO: 10827 - protein, 475 aa, Unknown
  Description of Unknown: Integrase B10828 sequence
  cd00338,IPR011109,IPR038109,PF07508,Coil, PS51736,IPR036162,IPR006119,G3DSA:3.40.50.1390,PTHR30461, PS51737,PF00239,SM00857,G3DSA:1.10.10.2600,SSF53041
MTHTLTAHPDPAIIYLRQSLDRTGQRLAVARQLEANQSLCAARGIPVLEVIEDNDVSASSRKRRPGFERLVGMITSGQVRTIVAYAVDRLTRTLLDLERLIDLVERYQVTVVTVSGDLDLSTPVGRAVARILASIARQEVEVKAARQQLRNKQALTDGMPLASGMRTVGYVDAALSAVIPNEVTLIQEGYAQLLAGASTSSIARLWNAQGLRTSRNGKWTASTVKIALTNPRYSGISAYRENRQTKQVMGTGRWTAIIDMDTWEAAQSILNDPARKTTTGPARKYLMSGMALCAVCGEHSVYSAHVSGKLVYRCPKLHLSRRIEQVDGYVREVVAEYLRQPGGPQLAADTSDAKALRQEAAAVRARLDRLTAMFMDDRITEAQLDRGTADARARLEAISNAQAANAGLGALAPLLAAVDPGQAFLDAPLDVQRTLVDMLVTVRLSSLGRGKGRAPFDPSTIQLDWKVSEATAVAA

SEQ ID NO: 10828 - protein, 474 aa, Unknown
  Description of Unknown: Integrase B10829 sequence
  IPR038109,PS00397,IPR006119,PS51737, PF00239,G3DSA:3.40.50.1390,PTHR30461,IPR025827, SM00857,G3DSA:1.10.10.2600,SSF53041,IPR011109,PF07508 ,PS51736,IPR006118,cd00338,PF13408,Coil,IPR036162,PTHR30461:SF3
MLRAAAYIRVSTDEQTEFSPDAQLKAIQKYCNDNELALDREHIYIDEGISGRKAEKRPAFQDMIKHAKKKEFDVILVHKFDRFARSREDSVVYKSLLKKECNVRVISITESIEDDKFSVILEAMLEAMAEYYSLNLADEVKKGMTEKAMRGGYQTYAPFGYTMKDKKLVIKEDEAKAVKTIFNEFIKGTGYLPIAKMINNMGFKTRFGNKFENRTIEYILRNPTYKGYARWTPTGRVRRNFANEDTLIVKSEHEPIIPEETFDQVQELVAKRKTIHRKYFKGINPANLHWLNGLVRCSTCGKTLVRSTKVYYQCNGYSKGTCPTSQMVKITDIEQAILQQLKKDMTAGLNLAKRSKVISTDNTDTFIVQLNKLPEKEARAKEAYINGIDSLEEYKQNKINIENQRKMLEAQIKSSKKEVYNPKTLQKQIKKLYEILTDENISMKQKHEVSHLVIDKIVFDKSAQTLHLTYLYQM

SEQ ID NO: 10829 - protein, 474 aa, Unknown
  Description of Unknown: Integrase B10830 sequence
  cd00338,PF13408,Coil,PS51736,IPR036162, IPR006119,PTHR30461,G3DSA:3.40.50.1390,PTHR30461:SF3,IPR025827, PF00239,SM00857,SSF53041
MYKQLERYRAEKGRVRIAKYSRCSSDEQKKNGYTVKDQLDFIEIFARENELIVVEEYVDEGISATLEINKRKALAQLIEDAKAGKFDIVVFKCIDRFFRSVAEYYECQKQLQKAGVTWVSIEESDLDPEDDDAAFKINIYLTMAEYEARKTSKRIKFNNKMRIKNKQVVTGVQCFHFPWVVCGEKKNRHLEKNTEKEHILFDMLKHYETHQSKRGTLVYINMKYNMDLSITTITNILTSTLLYGEYKGVPDYVEPYITKERYNGIQAIMERNARHSDKSPAVFLFSGILKCPGCGRNMAGSYKKPDNKKLIGYNSYRCNKYRQARTCNNSKSFSEKQIEQQLLTHLKQYITNEIVKIESIKEKTTPVSDNTKRIESLKKEMTRLNTMFRKGRIEEGEYDSEYAALESELKQLDKKEEKPAERDLDMLKGLLEMDYKTLYAGLDKAHQKAFWRKIIKSFTMGEDRKIDPDSIIFF

SEQ ID NO: 10830 - protein, 474 aa, Unknown
  Description of Unknown: Integrase B10831 sequence
  cd00338,PF13408,PS00397,IPR038109, Coil,PS51736,G3DSA:3.40.50.1390,IPR006119, IPR036162,PTHR30461,PTHR30461:SF3,IPR025827, PF00239,SM00857,G3DSA:1.10.10.2600,IPR006118,SSF53041
MTTFDKERKIKRAFDTSKVIRTAAYIRVSTDEQAKHGFSIEAQKEGLQKYADEHGYRIVDWYIDDGKSARKKTSKRKEYLRLIEDAKKGKFEMIIFKCLDRWFRNISEYYKAQSVLDDKGIGWECSEEDFDTTTRDGRWKLHIYLMLAQDEADKTSERINYVFAHKIQNREAISGSQPYGFKVKEIDGIKRVVKDKTVSHIVDDIFDNFELFNSKRAALYFVQDKYDIKVEYKLISNILTNSYYYGHYRGVDDYIWGGSYITKERYDRIQKMLKKNVKARKNKKNQDYIFSGLLVCSICGCKLSAHSSRFPLADGSEKTYLFYRCNRSAMANKCTSRGTFSEIKLEQKLIQSIEEEIEDYICEYELDIKKEKKPQIDTKSIKEEIQRLNISWRKGRMEEAEYDYEFERLQKKLQKAQEELPEKHDLTPLYDFLNSGWKDIYDTLTSVEKRALWRSVIDEIKVDVLNKEFKIKFI

SEQ ID NO: 10831 - protein, 474 aa, Unknown
  Description of Unknown: Integrase B10832 sequence
  PS00397,IPR038109,IPR006119,PS51737,PF00239, cd03768,G3DSA:3.40.50.1390,PTHR30461,IPR025827,SM00857, G3DSA:1.10.10.2600,SSF53041,IPR011109,PF07508,PS51736, IPR006118,PF13408,IPR036162,PTHR30461:SF3
MKRVAIYIRVSTQEQADEGYSIPEQTERLKKYCEAMKWTVVQIYTDGGFTGSNINRPALSSLISDTKSNLVDIILVYKLDRLSRSQKDTLYLIEDVFLKNNVEFVSMCENFDTSSPFGRAMIGILSVFAQLEREQIKERLAMGHVGRAKEGYWRGGSGVPIGYDFTDGNLIINEYEALQVKEIFDLFLQGKSMNGICDIMRSKYSNKYSSWNNHGAISKILQNKIYIGAIKYKNNEYDGQHVSIIQKDIFNTVQSKLKEYQKTFTEHYKTPFRGSNLLSGLVFCGTCGARYFTISTMSKIHGTYQYYKCYSRDGNRQMKKIDGCKNPNYKKSELDDIITNEIMELAFDETEIDRMAAQTKSKPSDKNGTLKNRIVDIDKQIGKLMDLYQVGGIPLEQIGGRIKPLQKERDVLEAELQSNVEPVILSTTEAKKIVHKAEKILNSGDLSKKRQLIDSLIRKIVIYPDTIKIFWKFI

SEQ ID NO: 10832 - protein, 474 aa, Unknown
  Description of Unknown: Integrase B10833 sequence
  cd00338,PF13408,IPR011109,IPR038109,PS51736, G3DSA:3.40.50.1390,IPR006119,IPR036162,PTHR30461,PTHR30461:SF3, PS51737,IPR025827,PF00239,SM00857,G3DSA:1.10.10.2600, SSF53041
MWILGSKKPCRVKRQGDEMKRNDFGNQCLYYYYSTDSPQMEGDAMKRTAIYMRVSTDKQAQEGDSIPAQREALTKYVTDHADLVLAGEYLDDGVSGQKYQRDELQRLLDDVRQGKIDQICFVKLDRWFRSVRHYTATQEVLDKYGVGWTAIWEPIYDTTTPSGRLIVNQMMSIAQFEAENTSQRIRQVFRYKAAKGEVLSGNQPFGFSIENKRLVPNQDAEKVVDLFNFFRANPCYSELAKYAHIKYGLTKKQANWKRMLQETKYIGVYKGVSDYCEPIIPIALFEAVQRQMQAPVKASTRHVYIFSGIFFCAECGCAMNGTSRTDGYLVYRCQRHFCAVPACDNQKTMFEKTLEKELLSRITLQGSLEAQVMERKPKKNIKSLERKIERLKELFVNDLISLDEYKADREAIEAQITALQAPYSPKHEALDKIIGQDVQTLYKGFNSEEKRLFWRSIVKEIRMDASKQLTVEFA

SEQ ID NO: 10833 - protein, 474 aa, Unknown
  Description of Unknown: Integrase B10834 sequence
  cd00338,IPR011109,IPR038109,PF07508,Coil, PS51736,IPR036162,PTHR30461,IPR006119,G3DSA:3.40.50.1390, PTHR30461:SF3,PS51737,PF00239,SM00857,G3DSA:1.10.10.2600, SSF53041
MGTIIYLRKSRADETKADSLENHRKVLTNLCKNNNWEYEILEEIGTSQSIAKRVQMTELISLIKQHKVHRVVVIDVDRLSRENYDLAYLRKIFTEYNIELVTPQKVYDWSNEVDLMMFGFNSIIGENEYRQIRKRMLLGKQLGAESGIWVTGEPPLGYKKNKDTKLLELVPAETKLYRYIIDSYISGQYSAHSLAIHLNTIGYRGRRGALWDASRVQNLMNNKCYLGMVKYDNKWYVGKHQALITEEDWNKVQQQLKGNRIVSPRTTIKKKKKVSGICKCGVCGRTMTVIVDYKRGKNFIKCHYKDKMNGKRCGNRAVQENYIVEQLEKAIEQHIHALEQHVADGQNEYQNEQLKNYLNQISDIDSQISKMNNRIANTKEMTKEGLLTLLEAKEEMKACENNIQSLLDNRSELEFIINNLSKNKEKELATFKDGYRYLKEQKDTELYNEAIRLLINNVTVTRLVDDIDISINFL

SEQ ID NO: 10834 - protein, 474 aa, Unknown
  Description of Unknown: Integrase B10835 sequence
  cd00338,IPR011109,IPR038109,PF07508,Coil, PS51736,IPR036162,IPR006119,G3DSA:3.40.50.1390,PTHR30461, PTHR30461:SF3,PS51737,PF00239,SM00857,G3DSA:1.10.10.2600, SSF53041
MKNLAGYIRVSRVAGRSGERFISPDVQRERVEAVAVAGGHKIVRWFEDLDESGAKADRPGFQKCLGLIESGELDGIVVAKLDRFSRSVADAADALRRIDAAGGALLSAEDSLDTSTPMGRFALHMMLAVAELEWERRRESWAVSRGRAVARGVHIASRTPTGYDRLPDGRLVPNDFAPRIEESFRMKARGASWAEIRKQMAGVPTPYGSVEWADRSLSHVLANRVYLGEARSGEFVNAEAHAPIVDAGTFQLAQRKEQKASPRHGKSLLTGLLRCAGCRYCLKSDTMGPKFEERRVRSYRCRGTRAAGRCQAPCSTLARKVEPFVVDAFLARHAKVGERQVVDDTEAQEARLEVARAVTQRDAFLTLDIADAKAAQRELNRRQELVDAAESHLASLTIPDALDMSMLVETWPELDNDEKRELLRAGIGAIFLRRAPSRGHWPIEDRVKILWAGDEPDGLPGPGRRNLPLVSFDW

SEQ ID NO: 10835 - protein, 474 aa, Unknown
  Description of Unknown: Integrase B10836 sequence
  cd00338,IPR011109,IPR038109,PF07508,PS51736, IPR036162,IPR006119,PTHR30461,G3DSA:3.40.50.1390,PTHR30461:SF3, PS51737,PF00239,SM00857,G3DSA:1.10.10.2600,SSF53041
VYLCKQWSPCGNLVAMAHHTPPRGKLRVILLARISKEKEEGTDTSIPTQVAIGTAYVNTKPGWELVKVITEEGVSGFKENVSRPKLEQALRMIETGQADVLLVWKLDRLTRSLLRFMGYWGRIQKAGGEFASVVESFDTTTTMGKLMLLIVATFAEMESEMKRDRALPWHEHRREQGLPVGGPRPYGYLRSKNALTVIDEEAAVIRDMAEAVLEGETLSHIAGRLIAAGIHGPYVDKQGQPVNLTVKGIKGILTGPTVAGLRKNLDGTFVPAQWTAILERDEWEQVRTVLHDPARRTNFADGKPAYLLTGFAECSECHVKLTRKNHPKGLRLLCRKCNSSLPMKVADDAATLWLMDNIDAQAWQNLKEQGRGFDPEVVAALEAEKSEIAQMKADGDIDLAQFKILNRDLNARIAAAHDETPLDLPDIADLQTGWETLNLADQRSVIQTLLETVAISQHSSDCQGRDRVMIERAI

SEQ ID NO: 10836 - protein, 474 aa, Unknown
  Description of Unknown: Integrase B10837 sequence
  cd00338,PF13408,IPR011109,IPR038109, PF07508,PS51736,G3DSA:3.40.50.1390,IPR006119, IPR036162,PTHR30461,PTHR30461:SF3,PS51737, IPR025827,PF00239,SM00857,G3DSA:1.10.10.2600,SSF53041
MTGARHDRPGYQAMLAAAEAREFEVLLVDDLSRLSRDELESKRAIRALRFWGIRVIGVSDGIDTDRKGHKIEVGLRGLMSELYLDELADKTHRGLMGRALAGSSAGGLPFGYRVAGAGQRVIDQAQAAVVCLIFTRYASGQTPRAIAADLNRLGTPGPRGGSWCMTAIYGDWRRGIGILANPIYRGQMIWNRSKWSKDPFTGRRRRSEKPESEWVSVEHPELRIIDEDLWNAVQRRFAEVNARTQGRRNPGAKPKYLLSGLMKCGTCGASMVVVDRYRYGCAANKDRGADVCDNGIRVARARAEAVLLQAVREELLSAEAYRAFEAEARRVLRETIPDPKAAHRELAEAQRIRANLVENIRQGVVSPTVRAELFKAEGAVATAQAALEQLQRCGPTQLLPRARETWERLVQQLDRVDDVDGARAALRELLGEIRLVPEAGRLVAEMAGGVSEIGMVAGAGYGLNLIASPLRLPL

SEQ ID NO: 10837 - protein, 473 aa, Unknown
  Description of Unknown: Integrase B10838 sequence
  PF13408,IPR011109,IPR038109,PF07508,Coil, PS51736,G3DSA:3.40.50.1390,PTHR30461,IPR006119,IPR036162, PTHR30461:SF3,PS51737,IPR025827,PF00239,SM00857, cd03768,G3DSA:1.10.10.2600,SSF53041
MTTAIYARVSTESEDQAHALEQQLSRLREQAEKLGEPVVEFVDVASGTRDDRPELKRLLECCDQGLLNTVLCTRMDRMSRSTVHGGKLLRLFNQDSWPNLICLDQSIDLSTAMGRFYANLLMGMAQMESELIGERVHHGQVYARKQLKPQAGKPPFGYRYTEGKLNYELDPETAPVARQIVEHFLASGSLRDAFDYQYKECAQAFRSLEGLRRWLLNPAIAGSRVYGTFRWKLDADGNKSRLLNKPGEVEEIHPHAHEGLVSHEEQVEIQQVMQSLRVRSTTPIRQRRSRVLTGLVHCGHCGGLMHYHQPRQPGPIYLRCTHEVCPVRPHKGIKEETVLEAVLQRLWEKRELLAYSSVVDELRLKQRLSPEIKQLQGQISDLRLLEDADLAEVIERKEQRLSTLLQDCVSDGGSRFTLSDALEALDQPQVWAEMTRTPEQTRRLLSQWVDRVVVSDGAVQQVRLRAGEAAAHP

SEQ ID NO: 10838 - protein, 473 aa, Unknown
  Description of Unknown: Integrase B10839 sequence
  PS00397,IPR038109,IPR006119,PS51737,PF00239,cd03768 ,G3DSA:3.40.50.300,G3DSA:3.40.50.1390,PTHR30461,IPR025827, SM00857,G3DSA:1.10.10.2600,SSF53041,IPR011109,PF07508, PS51736,IPR006118,PF13408,Coil,IPR036162,PTHR30461:SF3
MYAAIYVRVSTEEQAEQGYSLDVQKERLIAFCKSQGWDDTKIYIDDGYTGTNLERPAMKRMIRHIEEKKIHTVVVFKLDRLSRKQKDVLKLLEDVFEPNNVVFKSATEPFETSTAFGKAMIGVLAVFAQLERDMIVERTTSGRREKIRQGIWSGGRIPFGYSWNKSLQKFEIVPEEAWIVKEIFRRYLLGNSRLSIAEWAADRTNERTIDHSTIRDMIARPVYKGDLVNADQTYEGSHEPIIDPEVWEAAQRETLKRKEGATPIGEYLLTGLLKCGVCGGNIVHVLRKDKKYGKVYIYNYYTCKNQHVRKKDSTNNCSLNYIPRERIEKFVIDEIKETFLYPSRMKSLLESSDQEDEFDYSEKNIKERVKKIEADLENLYDAIQSGDIKASAVSSRIKKLEEEKEFLENDLDEINLNNYTSTISKNEFKAAIKDVGVAWDYMTEEEQKNALRRLISTVTLNRDSDPVIEWNFF

SEQ ID NO: 10839 - protein, 473 aa, Unknown
  Description of Unknown: Integrase B10840 sequence
  cd00338,IPR011109,IPR038109,PF07508,Coil, PS51736,IPR036162,IPR006119,PTHR30461,G3DSA:3.40.50.1390, PS51737,PF00239,SM00857,G3DSA:1.10.10.2600,SSF53041
MINDVAIYLRKSREDEELKEETLARHEKMLLDYCARNKLNIVQIYKEVVSGESIANRPEMQRLLDDVATGIYNGVVCVEIERLSRGNQLDQCEILETFKASNTKIHTLTKIYDLSKDEIDEEFFEFALFMSRREYKMINRRLQRGRRQARQEGYYIGSILPFGFDKIRGEKGYILTPNANAEIVKYIFNQYLDGVNVATIANYLNDNGIRSQFQNKEWTTATVRNILKNKIYLGMINTDNRNNYVKGKHEAIIDELTFNRAQEQLAKAPRVTNKRKLANPLAGLMYCSECGRTMIRKINAMKFEYITCPSLRCANRSLKLETAEDLIINELKAELKGFNYFIDNYADEIKTQRLKIDNELSLLEAELNKKVDMIERACEMLESGIYTKELFTRRVGVLENDIEAIKDNINKLKETTIEDDGRAYKAIPILEKVLEKYHGLNSQEKNLILKSIIESIEYTRLKDDVALNIKLLL

SEQ ID NO: 10840 - protein, 473 aa, Unknown
  Description of Unknown: Integrase B10841 sequence
  cd00338,PF13408,Coil,PS51736, G3DSA:3.40.50.1390,PTHR30461,IPR006119,IPR036162, PTHR30461:SF3,IPR025827,PF00239,SM00857, SSF53041
MYTNYKQLERYRHNDKVIRIAKYGRCSSDEQKKNGYTINDQLELIDEFAVENELVAVETYVDEGISATLEINKRKALSELIKDAKKGKFDIVVFKCIDRFFRNVGEYYECQKQLRKAGVTWLSIEESDLDPEDDDAAFKINIYLTMAEYEAKKTSKRIKFNNKMRIKNKQVITGSQCFLFPWIVEGEHRNRYLVKNKEKEEMLYDLLEFFETHQSKSATLGYINVKYATTMTITTLTNLLTDTLLYGEYKGVADYVEPYITKERFDKIQETLKRNARMGTTPHRVFLFSGLIKCPVCGRNLTGNYSRPQPTRDYHGYRCNQYRQQKTCTFNRSISELQLEKQLLNNLERYITNEIIKIEGVQDTTPKNNNEIKIAKIKSEMERLNVMFRKGRIEEKEYDEDYFKLEKELKTLEVEEKPVKRNIDNLKGILETDYKGLYDQLTKENKKAFWRNLIKEFSVDDNKKIIEDSIVFF

SEQ ID NO: 10841 - protein, 473 aa, Unknown
  Description of Unknown: Integrase B10842 sequence
  cd00338,PF13408,IPR011109,Coil,PS51736, IPR036162,IPR006119,PTHR30461,G3DSA:3.40.50.1390,PTHR30461:SF3, IPR025827,PS51737,PF00239,SM00857,SSF53041
MYKQLERYRKEGKPIRIAKYSRCSSDEQKKNGYTINDQLDLLEDFCQEYELIGAGVYVDEGISATLEISKRKALAQLIADAKAGKFDIVIFKCIDRFFRNVGEYYECQKQLRKAGVTWISIEESDLDPEDDDAAFKINIYLTMAEYEAKKTSKRIRFNNKMRIKNKQVTTGSQCFLFPWHVVGEKRQKHLERNMDNAPILYDLLEFFETHQSKSATLGYINMKYSMSMSVGTLTNLLTDTLLYGEYKGVSEYVEPYITKERFDNIQAILKKNARYSKNANRIFIFSGLLVCPECGRNLVGNYTRNKANGGAGTFSYRCNKYRQEKTCSFDKSTSERIIEKQLINNLDKYITDEIIAVENISEKKEQLPDNKKRIEKLKNEMDRLNMMFRKGRIEEEEYDREYFALETELKKIDVVDKPVQRNLEPLKELLASDYKALYDQLDKAHKKAFWRKLIKEFSIDENKKIIPESIIFF

SEQ ID NO: 10842 - protein, 473 aa, Unknown
  Description of Unknown: Integrase B10843 sequence
  cd00338,IPR011109,IPR038109,PF07508, Coil,PS51736,IPR036162,PTHR30461, IPR006119,G3DSA:3.40.50.1390,PF00239,SM00857, G3DSA:1.10.10.2600,SSF53041
MLQKDGIYAMYLRKSRADVEAEARGQFETLAHHLQILTDLADKYEIHVQKIYKEIVSGDSIEGRPEVKKLLQEVSAGVYDGVLVTEVSRLARGRTKDQGIVAEAFRSTGTLIITPSKIYDPSDDADETFFDFELFMARQEYKYIKKRMQRGRELSFQNGNWIFPHVPIGYRKEGLRLVPGEYSDIIRSVMFAYRDGKRTFTETVVFLRAAIPSRKWATNTIRRMLTNPIYAGYLSRSTKIPNAKNLDTSGYIPANCEPLITLQDHVDIIARIAPSPRLKNGTELKNAFAGLVVCQKCGYKMIYNNDHGYPVLMHQSSMDVPRCRCSPISYPVAYKALTEKIIEDLPYMEQDADQKPDPEAIAALRAQLRRAETIKADLFEKLENGLYTASEFRERKILREQEIQGLKRALEGLEEQNKKVETTKVSTDDIKAILRNGSPQEVNSILKILIDRIEYSKPSRKDDPSFTIIYARS

SEQ ID NO: 10843 - protein, 473 aa, Unknown
  Description of Unknown: Integrase B10844 sequence
  IPR038109,PS00397,IPR006119,PS51737,PF00239,G3DSA:3.40.50.1390 ,PTHR30461,IPR025827,SM00857,G3DSA:1.10.10.2600, SSF53041,IPR011109,PF07508,PS51736,IPR006118, cd00338,PF13408,Coil,IPR036162,PTHR30461:SF3
MKLVKNGKKVFIYVRVSTQEQAKEGYSIDEQIDRLKMYCKAMGWVVVKIYVDGGYTGSDMNRPALQDMIKDIKAGKADSVVVYKLDRLSRSQKDTLHIIEDILLKHSTDFVSMNENFDTGTSFGRAMIGILAVFAQLEREQIKERMTMGKEARVKSGKWGGSCNAPVGYEYKDGELVINDFEAMQVRKIYELYLKGLNFCQIERELNDKGYTHRYGKWNRTLVRNAMVNKIYQGYVKYNEEYHKGNHEPIIDEKTFEKANTLYQSRDFSKFKNNGRSTYLGGLIFCECCTARYTLSKNGNYRYYICHSRRKSTRHMVKDPNCKNKIYKLEVLDNAILEEIKKLALNPDEIEVLQKANLSDEMKEKEMLIKKELDRLHAQKSRFMDLYGVGEFTLEEVNAKVKPINEHREKLEKELQGLNGNRNMTKKEVIEIISNFEDIINRGVFEEIRLMIASLIEKIEINGDNVNIFWRFA

SEQ ID NO: 10844 - protein, 473 aa, Unknown
  Description of Unknown: Integrase B10845 sequence
  cd00338,PF13408,IPR011109,IPR038109,PF07508, Coil,PS51736,G3DSA:3.40.50.1390,IPR006119,IPR036162, PTHR30461,IPR025827,PS51737,PF00239,SM00857, G3DSA:1.10.10.2600,SSF53041
MINDVAIYLRKSREDDELKEETLARHETMLLDYCKRNNLNIVKIYKEVVSGESIANRPQMQRLLDDVSRGLYAGVVCIEIERLSRGNQIDQVEILEVFKSSDTKIYTLNKIYDLSKEDIDEEFLEFALFMSRREYKIINRRLQRGRNQSRQEGYYIGSILPFGFNKVRGERGFILVPNDNAKVVQFIFNQYLDGVNVATITNYLNDNGIKPQNHNKIWTPPTVRNVLKNKLYIGMINTNNRGGTVKGKHEPIIDELTFNRVQEQLAKTPKVTNRRKLSNPLAGLVYCSECGRTMIRKINTLKFEYITCPSLKCNTRSLKLETLESILLDELKKELKGFNYFLDNYGEQIKTEKEKVAVELKLLETELTKKTSMIETACEMLESGVYTKELFTRRISVLKEDIKAIQENISKIKNNPLKDDTRAYKAIPILEKVLEKYHTLNAKEKNLLLKSIVERVEFTRLEENASLNITLLL

SEQ ID NO: 10845 - protein, 473 aa, Unknown
  Description of Unknown: Integrase B10846 sequence
  PF13408,IPR011109,IPR038109,Coil,PS51736, G3DSA:3.40.50.1390,IPR036162,IPR006119,PTHR30461,PTHR30461:SF3, IPR025827,PS51737,PF00239,SM00857,cd03768, G3DSA:1.10.10.2600,SSF53041
MTTAIYARVSTESEDQAHALEQQLSRLREQAEKLGEPVVEFVDVASGTRDDRPELKRLLECCDQGLLNTVLCTRMDRMSRSTVHGGKLLRLFNQDSWPNLICLDQSIDLSTAMGRFYANLLMGMAQMESELIGERVHHGQVYARKQLKPQAGKPPFGYRYTEGKLNYELDPETAPVARQIVDHFLASGSLRDAFDCQYKECGQAFRSLEGLRRWLLNPAIAGSRVYGTFRWKLDADGNKSRLLNKPGEVEEIHPHAHEGLVSHEEQVEIQQVMQSLRVRSTTPIRKRRSRVLTGLVHCGHCGGLMHYHQPRQPGPIYLRCTHEVCPVRPHKGIKEDTVLEAVLQRLWEKRELLAYSSVVDELRLKQRLSPEIKQLQGQISDLRLLEDADLAEVIERKEQRLSTLLQDCVSDGGSRFTLSDALEALDQPQVWAEMTRTPEQTRRLLSQWVDRVVVSDGAVQDVRLRAGEAAAHP

SEQ ID NO: 10846 - protein, 473 aa, Unknown
  Description of Unknown: Integrase B10847 sequence
  IPR011109,IPR038109,PF07508,PS51736,IPR036162, IPR006119,G3DSA:3.40.50.1390,PTHR30461,PTHR30461:SF3,PS51737, PF00239,SM00857,cd03768,G3DSA:1.10.10.2600,SSF53041
MKPNMTRSTITPKRRCAVYTRKSTDEGLDQEYNSLEAQRDAALAFISSQRHEGWIVIDDGYDDGGFSGGNMNRPALKRLLADIEDGRIDVVVVYKIDRLSRSLGDFAKIVDLFDAHGVTFVSVTQQFNTTTSMGRLTLNILLSFAQFEREVTGERIRDKLAASKAKGMWMGGVPPLGYDVQDRKLIINEPEAALVRDIFTRYAEHGSAAQLVRELQIEGHTTKAWVTQGGRHRQGRTIDQQYLFSMMRNRLYLGEISNHGQSYPGQHQAIISRELWDVVHAIIQKRKKGPRIHNTENPALLAGLLYAPDGQRLIPSHTTKKDGRRYRYYVPYLEKRQSAGASNQPGRRGMGALPAAEIESAVLAQVHQILQAPEMIIGVWQASMALRDRDAFDEPTILVAMRQISTVWGQLFPAEQHRIMRLLIERVQLRDDGLDIIWRDDSWHQFRRELERHPFVEEQRDGALEGIDEMETV

SEQ ID NO: 10847 - protein, 473 aa, Unknown
  Description of Unknown: Integrase B10848 sequence
  IPR038109,PS00397,IPR006119,PS51737, PF00239,G3DSA:3.40.50.1390,PTHR30461,IPR025827, SM00857,G3DSA:1.10.10.2600,SSF53041,IPR011109,PF07508 ,PS51736,IPR006118,cd00338,PF13408,Coil,IPR036162,PTHR30461:SF3
MKLVKNGKKVFIYVRVSTQEQAKEGYSIDEQIDRLKMYCKAMGWVVVKIYVDGGYTGSDMNRPALQDMIKDIKAGKADSVVVYKLDRLSRSQKDTLHIIEDILLKHSTDFVSMNENFDTGTSFGRAMIGILAVFAQLEREQIKERMTMGKEARVKSGKWGGSCNAPVGYEYKDGELVINDFEAMQVRKIYELYLKGLNFCQIERELNDKGYTHRYGKWNRTLVRNAMVNKIYQGYVKYNEEYHKGNHEPIIDEKTFEKANTLYQSRDFSKFKNNGRSTYLGGLIFCECCTARYTLSKNGNYRYYICHSRRKSTRHMVKDPNCKNKIYKLEVLDNAILEEIKKLALNPDEIEVLQKANLSDEMKEKENLIKKELDRLHAQKSRFMDLYGVGEFTLEEVNAKVKPINEHREKLEKELQGLNGNRNMTKKEVIEIISNFEDIINRGVFEEIRLMIASLIEKIEINGDDVNIFWRFA

SEQ ID NO: 10848 - protein, 473 aa, Unknown
  Description of Unknown: Integrase B10849 sequence
  IPR038109,PS00397,IPR006119,PS51737,PF00239, cd03768,G3DSA:3.40.50.1390,PTHR30461,IPR025827,SM00857, G3DSA:1.10.10.2600,SSF53041,IPR011109,PF07508,PS51736, IPR006118,PF13408,IPR036162,PTHR30461:SF3
MKKKTRVLLYVRVSSQEQMINGYSVGEQTDRLQQYAAAMDWTVIRTYTDPGYSGATTDRPALQELIRAVRSGNVDKVAVYKLDRLSRSQKDTLYLIEDEFLANGTDFVSMSENFDTSTPFGRAMVGILAVFAQLEREQIRERMLMGRVARAKAGGYHGGSRAPLGYQYIDGQLVVDDFTAMYVRKAFYDFVRGKKLTTICKEFLAAGVTTQFWPNQNLKRMLSNRHYLGEVAFDHQWYPGHHEPIIDQETFDAAARRLEIYKENAESVKGHLLTGLLFCAHCGGRYFFATRHDRGKIRTYYYCYSRAKAVKRLIKDPNCMNKNWRSKDLEELILGEVRKLAVDQDYLNRITQEHEAAPEPDRKAILQAEADALTNKIAHYMDLYALDRLTLTDIDRAIAPLTEKRAAIEAQLRNMEPAEEAPDLSKQDARLLLDSFGDIIDRGDQDEIRLLLTTLIRKIVIDGEDIIIHWRFA

SEQ ID NO: 10849 - protein, 473 aa, Unknown
  Description of Unknown: Integrase B10850 sequence
  IPR038109,PS00397,IPR006119,PS51737,PF00239,G3DSA:3.40.50.1390 ,PTHR30461,IPR025827,SM00857,G3DSA:1.10.10.2600, SSF53041,IPR011109,PF07508,PS51736,IPR006118, cd00338,PF13408,Coil,IPR036162,PTHR30461:SF3
MKIAAAYIRVSTDDQTELSPDSQIKQIREYAKSHDYIVPEEFIYRDDGISGRKTKNRPAFAQMIATAKSKKPPFEAILVWKFSRFARNREDSIVYKSMLKKQGIDVISISEPVGDDKMSVLIEAMIEAMDEYYSLNLSEEVTRGMLEKLSRGKCVNSAPLGYYFKDGELVIDEEKAEIVRWIYADFLDGVPIVQIARNLNAEGIKTLYGKQFENRSIEYILRNPLYCGKLRFTKGGGSKSHYHKCEDVMIVDGTHEPIIALDDWNRAAEKIQAIKAKHRKYYHEYANKHTLMLTGLLRCSTCGASLTHSADGYQCIKYIHGFCNVSHYVSQNKIHKAVIAALSDASIGDIHISPKVQKPKTTDNTAKLIAREEAKLDRVKDAYAAGIDTLEEYKENKQKIIAEIERLKSTQAQEKPAAINMEDIQAKRLSFLEMASDPEASPEMLNSALKEFIDYIVYDKASEHITIFYSRTL

SEQ ID NO: 10850 - protein, 473 aa, Unknown
  Description of Unknown: Integrase B10851 sequence
  cd00338,PF13408,IPR011109,IPR038109,PF07508, Coil,PS51736,G3DSA:3.40.50.1390,IPR006119,PTHR30461, IPR036162,PTHR30461:SF3,PS51737,IPR025827,PF00239, SM00857,G3DSA:1.10.10.2600,SSF53041
MSETTQIGVIYARYSSDKQRDESIDGQIRECMAYAEREGITITNTYIDRALSAKTDDRPEFRQMILDSNKQAFNYVLVYQLDRFSRNRYDSAIYKAKLRKNGIRVISVKENIKDDPSGIILESVLEGMSEYYSAELSQKVMRGMTDNVLQGKWVGTVVPYGYKLSNNRQLEINEHEANVVRKLFDMYLQRHTLSEMASYMNANGHLTHKGKPFNTNSIKAIISNEKYIGVYSWGSERIENAIPPIIDKNIFEKAQHKRNLRAKKKGNRSELYQLCGKLECGRCGGNYVGSTGTSKTGALHHYYVCSNRRRKNACKAQNIRRDALDDIVISQTLAILNKPNVVNKIAKYAASSGKNLQSETVAQIDIIDAHIRDLKKSLDNYMTAIANGFISDVLKHRIESTEQELKDQIEIKTNLENTIIPVELTEDHIRFFLLKMAKENPSTLRGRARIIEAFVHHVTIYEDHIEIVFNYKN

SEQ ID NO: 10851 - protein, 472 aa, Unknown
  Description of Unknown: Integrase B10852 sequence
  PF13408,IPR011109,IPR038109,PF07508,Coil, PS51736,G3DSA:3.40.50.1390,IPR006119,IPR036162,PTHR30461, PTHR30461:SF3,IPR025827,PS51737,PF00239,SM00857, cd03768,G3DSA:1.10.10.2600,SSF53041
MQTKRKVAIYSRVSTLHQAEEGYSIGQQIEALAKYCQAMDWSIYDNYSDAGFSGGKLERPAMQKMIQDAESGKFDTVVVYKLDRLSRNVRDTLYLVKDVFNANNVDFVSLQENIDTKSAMGNLFITLLSAIAEFEREQIKERMQLGVKGRAKSGKTTSWTTPPFGYEYDTNTQLMTINHYQAEIVRDMFDKIISGWSIMGITTHLRKTNNKKWTHVRVKRILENVAYIGKVKYRDEIFDGEHAPILTEEIFYKAQKALEERTSKKDNTRPFQGLYMLSNIAKCGYCGTPLKIDSYKPRKDGTRKRTYTCINRNPKRIKTATYNDGKQCKESGRYDVKDVEKYVLTEISKLQLNPKSIESLYRDKPEENIAAHQERLKKLETKLSKLNDLYINELISMEVLKQKSAELLKEKSSLETFINNNKRKTNNKPAFEKLAKMDDIFKMSYDDQKRIVKTLIKRVEVKRDEINVIFKL

SEQ ID NO: 10852 - protein, 472 aa, Unknown
  Description of Unknown: Integrase B10853 sequence
  IPR011109,IPR038109,PF07508,PS51736,IPR036162, IPR006119,G3DSA:3.40.50.1390,PTHR30461,PTHR30461:SF3,PS51737, PF00239,SM00857,cd03768,G3DSA:1.10.10.2600,SSF53041
MRTSRTSVASAPSFIPKKRCAIYTRKSTDEGLDQEYNSLEAQRDAGLSFVSSQRHEGWLALDDTYDDGGFSGGNIDRPGLKRLMADIEARKIDVVVVYKIDRLTRSLPDFAKLVEVFDRNNVSFVSVTQQFNTTTSMGRLTLNILLSFAQFEREVTGERIRDKIAASKAKGMWMGGTPPLGYDVVDRKLLVNEREASLVQDIFRRYAEHGSAARLVRELDIEGHSTKSWITQSGQHRAGRPIDQQYLFCLLRNRIYLGEISHKGEYFPAQHASIISQELWEGVQAFVNKRKQGPRERKDEYPALLGGLLFAPDGQRMIHHYTKKKNGRMYRYYVPYLEKRRSAGATQDGSAQSIGALPAAEVEAAVLNEIELALMEPEALIGVWRSCLQHSAGADLQEDKVVVSMRRIADVWKQLFPAEQQRIAQLLIERVDFKDGSLDIHWREDGWIGLDPSIVAHPYVEEAKEYADEVVA

SEQ ID NO: 10853 - protein, 472 aa, Unknown
  Description of Unknown: Integrase B10854 sequence
  cd00338,PF13408,IPR011109,IPR038109, PF07508,Coil,PS51736,IPR036162, IPR006119,PTHR30461,G3DSA:3.40.50.1390,IPR025827, PS51737,PF00239,SM00857,G3DSA:1.10.10.2600,SSF53041
MKRLTSVSTSATGPVRCGIYTRKSTSHNLDRELNSLEVQREACLRYIAAHAHEGWRAVDTRYDDGGYTGANLERPAFQQLMADVAAHRLDVVVVYKVDRFSRSLLDFATVMHRLDQGRCAFVAVTQNFSTADAMGRLTLNMLMSFAEFEREMIAERTRDKIGAARRRGMWTGGSVPLGYRTEDRKLVPHAAEAAVVQQVFAQYQLLGSARAVAAELNRTGVKRRGRLRTDGQGRRARAWDKSDVLRMLTNVVYAGRIAAGADVVDGAHPAIITPAVFDAVQATLAAKRQERASADRVVYPLRGRLRCGGCGMAMTPATAKRGDASHRYYRCSTRDKQGISACPVAPVRASMLEDAVVGEVAQAARDPAVLALVQDAVRARLENRRQALLDDRRVAEAESLAPDELARLDRALAELGQRQRDAGWIAETLTRLDDVWAVMTPENRARLIGAVVTEVRFDPDGTASVSLVRGDG

SEQ ID NO: 10854 - protein, 472 aa, Unknown
  Description of Unknown: Integrase B10855 sequence
  cd00338,IPR011109,IPR038109,PS51736,IPR036162, IPR006119,G3DSA:3.40.50.1390,PTHR30461,PTHR30461:SF3,PS51737, PF00239,SM00857,G3DSA:1.10.10.2600,SSF53041
MASKRKSQQTIDSEIKRVAIYVRYSNLGGRNKETLTTLDTQESGCRAHCAYKGWEVVKVLADPGRSAFKKNTPRPEYDEALRMIQTGQIDAIVVWKVDRFTRSLHQFTKDWHDIESAGGHFVSVMEQFDTSIPMGRLMLTLVVGFAELESEMKSERAIPMHAFLKENGKVGPGPRPYGYDRTNSKNGEGACLTVNRKEADLLQTAAKWVLDGKSLSSFIHTYQPNSSVANKKMTYHGLRSSLINPTTAGLRTWDESPDGYKEGNWTPIIEREMWNKVVALITDPARRAHLNSTSKSHLLSGLMVCPECNKNVHARGWVSNTTKQRTKRYACPTCYRSVDMAAADPVAVEMLFDAVPESKWQAWQSAGTGWDIDVIKGYEAKLALIDKQYSDDIIGDDRWMTMTADIQAKIDSANNSEPLDIPMIPHLRNGWDELSLHDKQRVFRQAFASIHILPAKGAERFNVRTRIAMNER

SEQ ID NO: 10855 - protein, 472 aa, Unknown
  Description of Unknown: Integrase B10856 sequence
  IPR011109,IPR038109,PF07508,PS51736, IPR036162,IPR006119,PTHR30461,G3DSA:3.40.50.1390, PS51737,PF00239,SM00857,cd03768, G3DSA:1.10.10.2600,SSF53041
VSGTEVSVPKILRCAIYTRKSGAEKMDRDFGSIESQRALCAAHIFSQSEAGWSLIDKRYDDEGFSGGNLKRPAVKELMSDASSGGIDIIVVYKIDRMSRSLRDFLDMIAVLDANNVAFVSVTQSFSTASPMGRLTLNVLLSFAQFEREVIGERLRDWFAGARERGIWTTRRPFGYQLDKDRRLIVDPAEADLVKHIFQRYAKLRSARLIAAELNRAGLKTYLGNFFSTNQITRVLQNRLFIGERVCRGRVQPGFHEPIITRRLFDKTQELIEHNGRYKKRHCRATRTGMLNGIIFTTNGYKCVHAWVKGRGRVFRYYLSDSDPQVSLRLVAEQIEEHMLSLVWKMTGGEPYRSDDRLGRGEGLIRGIIERIEVGSSEMAVVLKSGARLHGPLIGRAAPRKPKYTLRTPPEWLDDAYQLLDEGLDWSSIARRLGVDVGSFHSIFPRFLAERHLPIASNANRMSGSRSSRGSSS

SEQ ID NO: 10856 - protein, 472 aa, Unknown
  Description of Unknown: Integrase B10857 sequence
  cd00338,PF13408,IPR011109,IPR038109,PF07508, Coil,PS51736,IPR036162,IPR006119,PTHR30461, G3DSA:3.40.50.1390,PS51737,IPR025827,PF00239,SM00857, G3DSA:1.10.10.2600,SSF53041
MIKVALYLRKSRDEENEDKEIVLKRHETQLIDYCKRNNLTIVAVYREIVSGDTIENRPEMQRLLEAVSQKEYDGVVCMEIERLSRGNQIDQVEILETFKASGTKIYTLNKIYDLTNEDIDEEFFEFALFMSRREYKIIKRRMQRGKRQALKDGYFTGSVLPYGYDKARIGRGFVLVPNKDAEIIKETFSRFLSGQKLTNIARWLNTTDLKPHYAKAFTSDMVKKILLNDTYTGKIRSKKDNISYQGKHTPIISEETFSKTQALLNVKNTKVNTFVGLVNPLAGVLRCGVCGKVMQVANSGGRYYFCHTLDCPTTGASIEKVETVLLNELKAELNNFNYFVENYETEEGEDTEKEIKRFRSELAKRQKMATRACELLEEGVYTKEKYLERVTALDKEIESLKMQIEELNNSSRDKTSIKQAIPKLAKVLEIYPELPVEDKNRLIKSICERIDYHKTAKTRRLEDIKLDIYLLI

SEQ ID NO: 10857 - protein, 472 aa, Unknown
  Description of Unknown: Integrase B10858 sequence
  IPR011109,IPR038109,PF07508,PS51736,IPR036162, PTHR30461,IPR006119,G3DSA:3.40.50.1390,PTHR30461:SF3,PS51737, PF00239,SM00857,cd03768,G3DSA:1.10.10.2600,SSF53041
MRANRTIATPSSTIVPKKRCAIYTRKSTDEGLDQEYNSLDAQRDAGLAFVASQRHEGWVVVGDGYDDGGYSGGNLDRPGLKRLMADIDAGEIDIVVVYKIDRLTRALSDFAKLVDVFDRNGVSFVSVTQQFNTTTSMGRLTLNILLSFAQFEREVTGERIRDKIAASKARGMWMGGMPPLGYDVVERKLVVNAAEADLVRGIFCRYAEHGSAAQLVRELAIEGQTTKSWVTQGGLHRPGRPIDQQYLFAMLRNHIYLGEMVHKGESYPGQHQAIVSPELWNAAHAFIERRKQGPRGHRTEHPALLAGLLFAPDGQRMIHHFTKKKNGRLYRYYVPYLHKRRNAGATLQPGTEDIGALPAAEIENAVLEQIHLALRSPEMLVATWRACQRHPAGADLDEAHVVIAMQRIGAVWEQLFPIEQQRITQLLIERIQVHGQGLDILWREDGWIGPGADIARHPLVEEMKESPEESYA

SEQ ID NO: 10858 - protein, 472 aa, Unknown
  Description of Unknown: Integrase B10859 sequence
  cd00338,IPR011109,IPR038109,PF07508, PS51736,G3DSA:3.40.50.1390,PTHR30461,IPR036162, IPR006119,PTHR30461:SF3,PS51737,PF00239, SM00857,G3DSA:1.10.10.2600,SSF53041
VKDKIVKKVEHLPQLTDVKRTDKLIQRVAAYARVSTEKEEQQTSIEAQKDYYSTYIKTHVGWEFVGVYADEGISGCSTKRRVQFNQLMNDCRDGKIDMVLTKSISRFGRNTVDTLNAIRELKSNGIGVYFEKEQIWTLDSKGEFIITLMSSLAQEESRSMSENILWAVRKRYAQGKGSFAYSRVLGFDRGKEKFEIVINPKEAVQVCKIFRMFLQGLTPHTIGIAMTAAGIPSPGGKDKWNSATVRRMLSNEKYKGDMLLQKEFTVDFLSKKKKKNEGELPQYYVSNNHEPIIDPWLFDYVQEQLQKRTRTKEHRYSGIGYLNSKIFCTKCGAAFGPRPWHSTSYNNIVWQCRNRYSDVKCKTVNIYDNLLFYVLHDVARKKIVAKDIRTAIVEFAVDEVSPKKLKAIEQYLTDFETMSPLEMLSDADDLSFVIQRIMVKPDRQLEVKWLDGSMDRYEIPKYTPRRGIEKPV

SEQ ID NO: 10859 - protein, 472 aa, Unknown
  Description of Unknown: Integrase B10860 sequence
  cd00338,IPR011109,IPR038109,PS00397,Coil, PF07508,PS51736,IPR036162,IPR006119,PTHR30461, G3DSA:3.40.50.1390,PTHR30461:SF3,PS51737,PF00239,SM00857, G3DSA:1.10.10.2600,IPR006118,SSF53041
MKTAAAYIRVSTDDQIEYSPASQLEKIREYAKRNDYILPDEYIFVDEGISGRNTAKRAAFNRMIGTAKQKPKPFDAILLWKFSRFARNREDSIVYKSMLRKQCKIDVISISENTGDDKMSVLIEAMIEAMDEYYSINLSEEVKRGMNEKASRGEALTIPSFGYTIRKGVYIPDPDTAPLVRQIFSDFLSGVPVRTIATKLNDSGFRTRRGNPFENRTVKYILQNPVYIGKMRWNPDGKTDYTGAAADTNVIPAHHAPIIDMKTWDETQKKIKGSPRTKYMRSGDPKEPFMLQGLCRCSACGATLTRATSSGVQCYAYAHGKCRHSHSISIKKLNAAVIDALRISGVDGDLKINPISQQKKPETENYDAQIAKEKKKLDRIRDAYESEAYTLSEFKTARQKILDRIAHLEQQQATTPEAVPDVHKLRSRIMSILPSLTSPAVPESTKNQLLKSIIERIVFYRSTCDIEIYFYT

SEQ ID NO: 10860 - protein, 471 aa, Unknown
  Description of Unknown: Integrase B10861 sequence
  IPR038109,PS00397,IPR006119,PS51737,PF00239, cd03768,G3DSA:3.40.50.1390,PTHR30461,IPR025827,SM00857, G3DSA:1.10.10.2600,SSF53041,IPR011109,PF07508,PS51736, IPR006118,PF13408,Coil,IPR036162,PTHR30461:SF3
MISNTVVALYIRVSTQEQASEGYSIDEQRERLVKYAEAQSWSVYRVYSDPGFSGGSLERPGLRSLILDVNAGKVNKVVVYKLDRLSRSQKDTLYLIEDVFLPASVDFVSMTENFDTGTPLGRAMIGILSVFAQLEREQIKERMSLGREGRAKSGLFHGSNRIPIGYRYEDGQLVVDPYEAEIVRRIYREFNSGKTKASIASGFQREGITTHFGKITAGTVHSVVTNRVAIGIIVHNGTEYPGQHEAIIDREEYDRAADRLKRQAATDQNHFNFQKHASAITGLCYCVNCQKKMIIQHKGRRRKDGTIGRALCCPGKTKTGCTTPRYDLGVIERYVLDQIKKLRLDPEYFKETRSNTQTAGDLERIEILEDRIKGNDVKISRLMDLYTIGGIDLASIKDKIETYNLESNTLREEIERIRETLSEEIGDEEIRRLAESLEADAEDPEKARIACKALIDRIDFDGQDITIQWTF

SEQ ID NO: 10861 - protein, 471 aa, Unknown
  Description of Unknown: Integrase B10862 sequence
  IPR038109,PS00397,IPR006119,PS51737,PF00239,G3DSA:3.40.50.1390 ,PTHR30461,IPR025827,SM00857,G3DSA:1.10.10.2600, SSF53041,IPR011109,PF07508,PS51736,IPR006118, cd00338,PF13408,Coil,IPR036162,PTHR30461:SF3
VKNKNVVGLYVRVSTQEQAKEGYSIDEQKERLTKYADARDWIVYRVYADPGFSGAKIERPGLKEMIDDIVSGKLDKIIVYKLDRLSRSQKDTLYLIEDIFLENSVDFVSMTENFDTATPFGRAMIGILSVFAQLEREQIKERMSLGREGRAKSGLFHGSTKVPIGYRYNNGLLIVDPYEARIVRRIFQEYVDGRSIYSIVADLKADGLTSSYGMISRPTIQYILRNPVYTGVIRHVNNIYDGQHEAIITEDLWERASARIESMRDCPNGYNFNKHTSIITGLCYCASCGRKMRFNWGQKRADGHRIRYITCPDKKVSNCPVTPVHAVAVEEYLLNQLKKLTFDPKYFEKIRCKSDPIDRSEEILFFNERIKENKSKISKLMDLYTIGGIDFSIVADKIQLLTREVNTLTREIDQIREETSGVSEEEIKERLYTLDEILEEGDIEKTRNVVMALIDRIEIGEHKTVTIKWSF

SEQ ID NO: 10862 - protein, 471 aa, Unknown
  Description of Unknown: Integrase B10863 sequence
  PF13408,IPR011109,IPR038109,PF07508,Coil, PS51736,G3DSA:3.40.50.1390,IPR006119,IPR036162,PTHR30461, IPR025827,PS51737,PF00239,SM00857,cd03768, G3DSA:1.10.10.2600,SSF53041
LEKEFNSLDAQREAGEAYIASQKHEGWICLPDQYNDGGFSGGNMERPALERLLNDVRDGKVDCVVVYKIDRLSRSLMDFAKIVEVLDQHNASFVSVTQQFNTKDSMGRLTLNILLSFAQFEREIISERIRDKVAASRKKGKWTGGMPTLGYDIDHTTGRLVVNEEEADQVRQLFNLYLELKSLRRVVVEASERGWTTKTWMTKRGTLHQGLSFTNQRLSYLLRNTIYIGKIRHKDQLYEGEHQAIIDEDTWNEVQAQLKLGSQIPDQPRNRYQSLLQGMLHCTACNTSMVHLPVTKKGNKLYRYYVCRNAQANGFDKCPNPTLPADEVERFVLERLVDLGSNEHLLDEVVKQVQILQDERIENLQREARRIQLRIETLQQGDEPEDKRQRRSLEAQLRSLNERVEELKTHSIKPEQCENALGQFETLLANLTVDEKSWLIKLVFERIDFDSESGTLKFHLHDKELLTTSAE

SEQ ID NO: 10863 - protein, 471 aa, Unknown
  Description of Unknown: Integrase B10864 sequence
  cd00338,IPR011109,PF07508,Coil,PS51736, IPR036162,IPR006119,G3DSA:3.40.50.1390,PTHR30461,mobidb-lite, PS51737,PF00239,SM00857,SSF53041
VCASITHVRAVLYARQSLDKAGTGLAVARQLAEDERLCELRGYEVVARESDNDMSGYSGKARPGYERVIALMRSGAVDVVVVWAVDRLTRRLADLIALIDLCEQTGVRVATVSGDLDLSTPSGKLVARLLGSVAQGEVETKSARQQLAERQAAQAGKPRLGTPRPFGWQPDRVALDEAEAAAVADACTVLLCGGTITGVCRDWEARGLRPHQAPFGPLREHPWTTTSVRAILRNPRNAGIAVYKGAEVGRGQWQEIVAEPTWRAVAALLADPGRKPSQGVRSLLGRVALCRCGTYVTGSRGANGQPSYRCHIPARAGREGPHVFTSRAPVDAYVEAATVAWLARPGNAERLAPARGDGAGPLREEAAAIRARLARLGPLFAAGLISEQDMTGGRAAGEARLAQIGARLAEMGRESALAPFAAGRDVRETWAALLPDRRRAVIAAVWEVTLLPSGRGNRVFRTETVRLMPRA

SEQ ID NO: 10864 - protein, 471 aa, Unknown
  Description of Unknown: Integrase B10865 sequence
  PF13408,IPR011109,IPR038109,PF07508, Coil,PS51736,IPR036162,PTHR30461, IPR006119,G3DSA:3.40.50.1390,PTHR30461:SF3,IPR025827, PS51737,PF00239,SM00857,cd03768,G3DSA:1.10.10.2600,SSF53041
MIAIYTRVSTTEQAQEGYSLQEQEVRLKSYCEAMKWNPCQIYTDPGYSGGSMKRPALQQLIRDVKAKKISRVVVYKLDRLSRSQKDTLYLIEEVFLANNCDFVSMTENLDTGSALGKAMIGILAVFAQLERETIKERMVMGKIARAKEGKWCGGSTAPYGYNYTDGQLITDEVEKFHVMEAFNLAERGWSTSKISTTFNRKGYTPKRGVNCWTDITIRRMLNNQVYIGKVNFYGEQYDGQHEPIISNEQFERVQNVLKKRSEHYERFNPDPHRRVSYFGGYIRCARCGAGYQLFTANSKRNGKSYKYKYFVCNSRSKRNPALVRDPSCKNDYWKPELLEETVFGEIRKLTIDQIDEHHLTLRPEDIQKKSIKAEIDQIDRKVQKLLELFLMDGIPKDRVQEQMNALSVQRGHLQEELDSIPETDIDEVKTTIKNIPDILDHGSYEDIRDLISVLIDYISIDGQNLTIYWTF

SEQ ID NO: 10865 - protein, 471 aa, Unknown
  Description of Unknown: Integrase B10866 sequence
  PF13408,IPR011109,IPR038109,PF07508,Coil, PS51736,G3DSA:3.40.50.1390,IPR006119,IPR036162,PTHR30461, PTHR30461:SF3,PS51737,IPR025827,PF00239,SM00857, cd03768,G3DSA:1.10.10.2600,SSF53041
MRKVAIYSRVTTINQAEEGYSIQGQIEALTKYCEAMEWKIYKNYSDAGFSGGKLERPAITELIEDGKNNKFDTILVYKLDRLSRNVKDTLYLVKDVFTANNIHFVSLKENIDTSSAMGNLFLTLLSAIAEFEREQIKERMQFGVMNRAKSGKTTAWKTPPYGYRYNKDEKTLSVNELEAANVRQMFDMIISGCSIMSITNYARDNFVGNTWTHVKVKRILENETYKGLVKYREQTFSGDHQAIIDEKTYNKAQIALAHRTDTKTNTRPFQGKYMLSHIAKCGYCGAPLKVCTGRAKNDGTRRQTYVCVNKTESLARRSVNNYNNQKICNTGRYEKKHIEKYVIDVLYKLQHDKEYLKKIKKDDNIIDITPLKKEIEIIDKKINRLNDLYINDLIDLPKLKKDIEELNHLKDDYNKAIKLNYLDKKNEDSLGMLMDNLDIRKSSYDVQSRIVKQLIDRVEVTMDNIDIIFKF

SEQ ID NO: 10866 - protein, 470 aa, Unknown
  Description of Unknown: Integrase B10867 sequence
  IPR011109,IPR038109,PF07508,PS51736,G3DSA:3.40.50.1390, PTHR30461,IPR006119,IPR036162,PS51737,PF00239, SM00857,cd03768,G3DSA:1.10.10.2600,SSF53041
MKSHRNTPAPPTLAPRKRCAIYTRKSTDEGLDQDYNSLEAQRDAGLAFVSSQRHEGWTAVQDGYDDGGYSGGNLDRPALKRLMADIEDGRVDIVVVYKIDRLTRSLPDFAKLVDVFDRNGVSFVSVTQQFNTTTSMGRLTLNILLSFAQFEREVTGERIRDKIAASKAKGMWMGGMPPLGYDVVERKLVINTPEADLVRDIFRRYAEHGSAAEIVRELAIEGRTTKAWETQGGLFREGRPIDQQYLFKMLRNRIYLGEIQHKGTSYPGQHDAIIDQKLWDAAHAFVERRKHGPREGITQHPALLAGLLHAPDGQLMIHSYTRKKNGRLYRYYVPYLHKRRSAGATLAPGSVDIGSLPAAEIETAVLEQIHKALRAPELMVATWRSCQKHPKGANLEEAQVVVAMQRIGAVWDQLFPKEQQRITRLMIERVQLHERGLDILWREDGWIGLGADIASHPLVEESASTEGAYA

SEQ ID NO: 10867 - protein, 470 aa, Unknown
  Description of Unknown: Integrase B10868 sequence
  IPR011109,IPR038109,PF07508,PS51736, IPR036162,PTHR30461,IPR006119,G3DSA:3.40.50.1390, PTHR30461:SF3,PS51737,PF00239,SM00857, cd03768,G3DSA:1.10.10.2600,SSF53041
MKSHRNTPAPPTLAPRKRCAIYTRKSTDEGLDQDYNSLEAQRDAGLAFVSSQRHEGWTAVQDGYDDGGFSGGNLDRPALKRLMADIEDGRVDIVVVYKIDRLTRSLPDFAKLVDVFDRNGVSFVSVTQQFNTTTSMGRLTLNILLSFAQFEREVTGERIRDKIAASKAKGMWMGGMPPLGYDVVERKLVMNAPEADLVRDIFRRYAEHGSAAEIVRELAIEGRTTKAWQTQGGLFREGRPIDQQYLFKMLRNRIYLGEIQHKGTSYPGQHDAIIDQELWNAAHAFVERRKHGPREGITQHPALLAGLLHAPDGQLMIHSYTRKKNGRLYRYYVPYLHKRRSAGATLVPGTVDIGSLPAAEIETAVLEQIHKALRAPELMVATWRSCQKHPKGANLDEAQVVVAMQRIGAVWDQLFPKEQQRITRLMIERVQLHERGLDILWREDGWIGLGADIANHPLVEESALTEEACA

SEQ ID NO: 10868 - protein, 470 aa, Unknown
  Description of Unknown: Integrase B10869 sequence
  cd00338,PF13408,IPR011109,IPR038109,PF07508, PS51736,G3DSA:3.40.50.1390,IPR036162,PTHR30461,IPR006119, PTHR30461:SF3,IPR025827,PS51737,PF00239,SM00857, G3DSA:1.10.10.2600,SSF53041
LNVVIYTRVSTAEQANDGYSIHEQKERLEMYARAQGWNVIYVYSDPAYSGGSLNRPSMQKLISDASTGAFSKVIVYKLDRLSRSQKDTLYLIEDVFLANNIDLVSMTENFDTGSPFGRAMIGILSVFAQLEREQIKERMNLGKDARAKGGYFHGGGRIPIGYDYIDGELIVNDYEAYQIRLIYDLAESGMPIYSVYKHMRDEGYQTKHGLWAESNVRDVLKNNLYTGMISWKGNIYKGRHKPIISAERYEAMQERLNLRKTQFPKHPFARTSLLGGLIFCGNCGARYFVKQNTAKHPGVTAQKYYTCYSRGKTCKRLIRDPNCKNKSFNTAVLDGIIINEVMKLAADPGALNSFVEDPYQDNTAAINKRMEEIETQIRKLIDLYQVDGIDFEVLNMKVSDLNRERKTLEDGKDQRPAPRVSIPAAKEILSTVPDILSRSDKEELKAAVHALIDGIIIRPDDGVEIHWAFA

SEQ ID NO: 10869 - protein, 470 aa, Unknown
  Description of Unknown: Integrase B10870 sequence
  cd00338,PF13408,PS00397,Coil,PS51736, G3DSA:3.40.50.1390,IPR006119,IPR036162,PTHR30461,PTHR30461:SF3, IPR025827,PF00239,SM00857,IPR006118,SSF53041
MNNVMEEYKKWQRVIRVAFYIRVSTSEQVSKENSLPAQKLALEKYAEENGMKCVGLYADEGKTAAKQIKKRKAIHEMLADIRDGKIDLVIFTRFDRFTRNPAEYYKMMETFDAAGVQWRATAQPELDLNTPMGQTLILFYLGIGQQEIANISERIKATAQVRIQKGSPITGAQSLPFTHTIGLNDHGEKIVIPDPEQLLIFWTYVEHFELYHSKRAAMIHTNETFGISYNYNTYGNAMKNTLIYGHYKGVDDYCLPIASKERWESWKKIGKKNVRKRSSNIEYIFSSLCICAQCGHRMSGSASNPRGKEYYYYRCNWHTTHGACDHSKRINELKIEEYLIEQIKPDIKRYIAEFKIAKKEPIKKASNADKIKKLEKRLQRVNYQYEEDRISQEEYDRKYKALVEEITKAREEQNEPEITQRDLEPLRAFLQLDLNEIYKTLSREEKRALWRSVVSEIYIYPDGRIEPKFF

SEQ ID NO: 10870 - protein, 470 aa, Unknown
  Description of Unknown: Integrase B10871 sequence
  IPR038109,PS00397,IPR006119,PS51737, PF00239,G3DSA:3.40.50.1390,PTHR30461,IPR025827, SM00857,G3DSA:1.10.10.2600,SSF53041,IPR011109, PF07508,PS51736,IPR006118,cd00338,PF13408,Coil,IPR036162
MEKIRTGALYIRVSTADQAELSPDAQKRLLLEYAKKNHIIIGEDFIYEESVSGRHAQKRPRFQEMIAMAKSQAHPIDVILVWKYSRFARNQEESIVYKSMLKRDHVDVISVSEPLIDGPFGSLIERIIEWMDEYYSIRLSGEVLRGMKEKALRNGYQSVPSLGYQAVGKGKPFIINKDEIEIIKFVMDSYDNKNLDPSGIARRCNAMGYRTKRGNLFERRTIERILRNPFYAGTVAWNGVEFEGDHETIISKEQYNNRIKLMDARKKTQSHDVSTCRHWLSGLVKCSTCGASLGHNTAKTPFFQCWKYAKGYHDGSCYISERKLERMVLQYFEDILNGKEFTYKSRADKATINNDELTFLKHELDKIDTKESRVKDAYENEIDSLEEYKENKERLNKQRDEIKDKIEAIKKKTVDKPVPRDEALKEIKNVYEILKNPTASYEVKGNFIRSIVDKIVFDRKKCLLFFDINL

SEQ ID NO: 10871 - protein, 470 aa, Unknown
  Description of Unknown: Integrase B10872 sequence
  cd00338,PF13408,IPR011109,Coil,PS51736, IPR036162,IPR006119,PTHR30461,G3DSA:3.40.50.1390,PTHR30461:SF3, PS51737,IPR025827,PF00239,SM00857,SSF53041
MYKQLERYRQEGKPIRMAKYVRCSSDEQKKNGYTINDQLDLLEEFGQEYELIGAGEYIDEGISATLEINKRKALAQLIKDAKAGKFEIVIFKCIDRFFRNVGEYYECQKQLRKAGVTWISIEESDLDPEDDDAAFKINIYLTMAEYEAKKTSKRIRFNNKMRIKNKQVVTGAQCFHFPWHVTGDKKSRHLERNMDEAEALYDLLDYFERHQSKAGTVAYINMKYNKTLAVNTMDKLLKDTLLYGEYKGVPDYVEPYITKERFDKIQETLKRNARYSEVNDRVFLFSGLLKCPHCGRNLVGNYLKNNFNGTYSYRCNKYRMEKLCIYNQSTSERKIEKQLLDNLETYITNEIIRVESLSEQSAPKTDHSKKIESLKKEMDRLNTMFRKGRIEEEEYDKEYFALEKELKKLDVEEKPAERNLDTLKGLLEMDYRSLYSELDKEHKKAFWRNLIKEFTLDDNKKIVPESIIFF

SEQ ID NO: 10872 - protein, 470 aa, Unknown
  Description of Unknown: Integrase B10873 sequence
  cd00338,PF13408,IPR011109,IPR038109, PF07508,Coil,PS51736,G3DSA:3.40.50.1390, IPR006119,IPR036162,PTHR30461,PTHR30461:SF3, PS51737,IPR025827,PF00239,SM00857,G3DSA:1.10.10.2600,SSF53041
LIPAIEYTRASTDHQEYSVGDQHKFNLDWAKRNKYKIVKTYSDDGISGGTVAKRPGFLQMIEDITTGRLPDIKALLIWDSFRFSRNMVEFLTYKQMIRQHGISVIAVSEPMVQDEDAQLYIDAINGASGELYLRKLSKDSKRGIRAKVVDRKEHLGFAPFGYRMDRNARQLVIVDDEAEWVRYIFQQVIDGVPYLQIAKKLNENGCKTRKGYNWTNTQIRYTLKNRTYCGQLEVNLDGQHGIYDGKHPPIVEKETFDKVQTIMEERAAKRKPYEHSTNEYVHWLSGLLRCPYCGGSFSYQKGYGGRGSRYRCNNTVSGAVCGNLTIPVKTVENLVFEKLKEICDFPEVICNLHLTRPQPKSIIDYEAEIKKLKNQLSRAKKAYIEEIDTLEEYRENKVRLTAAIEKMEARRDSIAQPQFDQTAFQEKCLSALSLLQSDVPMDQKAAASHALIEKITADNVKKEITIYFYA

SEQ ID NO: 10873 - protein, 470 aa, Unknown
  Description of Unknown: Integrase B10874 sequence
  cd00338,PF13408,IPR011109,IPR038109,PF07508, Coil,IPR036162,PTHR30461,IPR006119,G3DSA:3.40.50.1390, PTHR30461:SF3,PS51737,IPR025827,PF00239,SM00857, G3DSA:1.10.10.2600,SSF53041
LKNGFVVVNEYIDRAISGKTDNRPSFQRLIKDSDKGHFDAVIMYTLDRFARNRYDSAIYKAKLKKNGVRVFYAKQPMPDTPEGIILESVLEGYAEYYSENLARSIKRGMKENALHTIAMGSLGLGYKIGEDRKYEIDPVGAKAVRAIFTMYAEGKSKTEIVNWLNEHGFKTSQGNQFNKNSLSRILRNDKYIGVYRYADVVVENAIPPIIDKHLFDKVQALLKHNFASRARNKAKEDYLLSTKLFCGHCGSPMIGESGTSKLGRVYHYYKCSKRKRERDCSKKVEKKDWLEELVVRYTVHHVLTDENIELIATKAMELIEKDLQDTSVLVGLQGMLKDVNKKIKNLMSAIEQGIITSSTKERLEELELERLNIEGQIAREEMKKPLLSKERIVYWLTSFKSGDIQDIEYQRRIIDTLVNSVFVYDDDGNGRRIVLTFNISGNNTLTIECSDIEGIAPPKKGLAFQQVLFP

SEQ ID NO: 10874 - protein, 470 aa, Unknown
  Description of Unknown: Integrase B10875 sequence
  IPR011109,IPR038109,PF07508,PS51736,G3DSA:3.40.50.1390, IPR006119,IPR036162,PTHR30461,PTHR30461:SF3,PS51737, PF00239,SM00857,cd03768,G3DSA:1.10.10.2600,SSF53041
MKRTTKEAPTLTPKKRCAIYTRKSTDEGLDQEYNSLEAQRDSALAFISSQRHEGWIANDDGYDDGGFSGGNTNRPALKRLLADVEDGRIDVVVVYKIDRLSRSLSDFAKMVDLFDARGVTFVSVTQQFNTTTSMGRLTLNILLSFAQFEREVTGERIRDKIAASKAKGMWMGGTPPLGYDVRERKLVVNESEAVLVRDIFARYAETGSAAQLVRELQIEGHTTKVWITQTGKRHDGKVIDQLALFTMLRNRLYLGEMTHKGQAFPGQHEPIVTPELWAAVHAYVDRRKMGPRIQHKKEPALLTGLLYAPDNQRMLPTYTQKKNGKRYRYYVPYLEKRQSAGATYDPTIRNIGPLPALEIEAAVLAQVHKALQQPEMIVGVWQAGMALRERQQMDEPTVLVAMRQMSTVWDNLFPIEQNRIMRLLIERVQLHEDGMDIIWRDDSWQRFCRELERNEFVAEQRAPIDAETVE

SEQ ID NO: 10875 - protein, 470 aa, Unknown
  Description of Unknown: Integrase B10876 sequence
  IPR011109,IPR038109,PF07508,PS51736, G3DSA:3.40.50.1390,PTHR30461,IPR006119,IPR036162, PTHR30461:SF3,PS51737,PF00239,SM00857, cd03768,G3DSA:1.10.10.2600,SSF53041
MSSPRATPQPAVTPKKRCAVYTRKSTDEGLDQEYNSLQAQRDAGLAFITSQRHEGWITVDDGYDDGGYSGGNMERPALRRLMADIEAGRIDTVVVYKIDRLTRSLADFAKLIEVFDRNGVSFVSVTQQFNTTTSMGRLTLNILLSFAQFEREVTGERIRDKIAASKAKGMWMGGVPPLGYDVVERKLVVNEREAALVRDIFRRYGEHGSAARLVRELAIEGHTTKAWVTQTGRQRPGGSIDQQYIFKMLRNRIYLGEISHNGRWHAGQHAPIVTPELWDAAQSFIERRKQAPREHAAQHPALLAGLLFAPDGQRMQHSFVKKKSGRQYRYYVPYLHKRRSAGASLSPSAPDIGHLPAAEIENAVLAQIHAALATPQMLIAVWKSCQQHPAGAALDEAQVVVAMQRIGEVWAQLFPAEQQRITRLLIERVQLHGQGLDIVWREDGWIGFGADIGAHPLVEEAREQTEEALA

SEQ ID NO: 10876 - protein, 470 aa, Unknown
  Description of Unknown: Integrase B10877 sequence
  IPR011109,IPR038109,PF07508,PS51736,IPR036162, IPR006119,PTHR30461,G3DSA:3.40.50.1390,PTHR30461:SF3,PS51737, PF00239,SM00857,cd03768,G3DSA:1.10.10.2600,SSF53041
MSSVRRNQTPAITPKKRCAVYTRKSTDEGLDQEYNSLEAQRDAGLAFIASQRHEGWLAVDDGYDDGGYSGGNMERPGLRRLMIDIEAGKIDTVVVYKIDRLTRSLPDFAKLVDVFDRNGVSFVSVTQQFNTTTSMGRLTLNILLSFAQFEREVTGERIRDKIAASKAKGMWMGGVPPLGYDVVERKLVVNEREAVLVRDIFRRYAEHGSAARLVRELEIEGHTTKAWVTQSGRERLGRSIDQQYLFTLLRNRIYLGEICNHDTWYSAQHDPIISQELWDAAHAFIERRKQAPREHRAKHPALLAGLLFAPDGQRMLHSFVKKKNGRQYRYYVPYLHKRRNAGASLAPHTPDVGHLPAAEIEEAVLAQIHAALSSPQMLIAVWRSCQQHPVGAALDEAQVVVAMQRIGDVWSQLFPAEQQRITRLLIERVQLHGHGLDIVWREDGWIGFGADISTHPLIEESQERVEEVWA

SEQ ID NO: 10877 - protein, 470 aa, Unknown
  Description of Unknown: Integrase B10878 sequence
  cd00338,PF13408,IPR011109,IPR038109, PS00397,Coil,PS51736,G3DSA:3.40.50.1390, IPR006119,IPR036162,PTHR30461,IPR025827, PS51737,PF00239,SM00857,G3DSA:1.10.10.2600,IPR006118,SSF53041
MDKNISLKYKQNKNGIIFVAIYVRVSTEEQVKFGFSIQAQIDALVKYCNEHNYKYEIFIDEGISASTMKRPALQRILSKIEQFDMVLFTKLDRLSRNVLDANTINQILKENKCVMKAIDEDDVDTSTADGTFIFNLKVSLAQREIGKTSERIKFIFESKRQRGEVTSGTRKYGYNIVNKHFEINEEEANNIRKLYKEYINNNGNLKETYNYFVDHFPNKGYDAMSNYLKDSAYIGKYKLYRQNKYLDNYIPAILDLKTWEKVQTLRTRKTIERKHNYIDLFSGLLYCSVCGHRLSKHIDYRVKNPVARYECFSVNKFKVNSTERVCNNNKTIRESKIETFLLNNLNNSIANFVAKVSIEQSSIIKKDNSQQLKRIQTKINKLKDLYLDDLIDKDSYKKDFEKYQQELANLKESEILEVPKRDLSHLNNILNSDYKTIYNNLNTKNKKKFWLSIIDKIYIENGEIQEVTFL

SEQ ID NO: 10878 - protein, 469 aa, Unknown
  Description of Unknown: Integrase B10879 sequence
  IPR011109,IPR038109,PF07508,PS51736,IPR036162, IPR006119,G3DSA:3.40.50.1390,PTHR30461,PTHR30461:SF3,PS51737, PF00239,SM00857,cd03768,G3DSA:1.10.10.2600,SSF53041
MKTPATRSPALTPKKRCAIYTRKSTDEGLDQEYNSLEAQRDSALAFISSQRHEGWIAIDDGYDDGGFSGGNTNRPALKRLLADVEDGRIDVVVVYKIDRLSRSLSDFAKIVDLFDEHGVTFVSVTQQFNTTTSMGRLTLNILLSFAQFEREVTGERIRDKISASKAKGMWMGGTPPLGYDVRDRKLVVNEPEAALVRDIFARYAETGSAAQLVRELQIEGHTTKVWVAQNGRRHEGKIIDQQCIFTMLRNRLYLGEITHKGQSFPGQHEPIVSTELWTAVHAFVDGRKQGPRTRYKKEPALLTGLLYAPDGQRMLPTYTQKKNGKRYRYYVPYLEKRHSAGATYDPTRPNIGPLPALEIETAVLAQVHKALQEPEMIIGVWQAGMALRERQEMDEPTVLVAMRQMSEVWENLFPIEQNRIMRLLIDRVQLHEDGLDIIWQDDSWQRFCRELERHQFVAEQRAPADEETV

SEQ ID NO: 10879 - protein, 469 aa, Unknown
  Description of Unknown: Integrase B10880 sequence
  IPR038109,PS00397,IPR006119,PS51737, PF00239,G3DSA:3.40.50.1390,PTHR30461,IPR025827, SM00857,G3DSA:1.10.10.2600,SSF53041,IPR011109, PS51736,IPR006118,cd00338,PF13408,Coil,IPR036162,PTHR30461:SF3
MSTFPDDATCKSIRAALYVRVSTEEQKVHGLSIESQTEALDEWAKTHSVKVVGHYNDAGISARRRYTKRPELLRLLEDVKAGKIDLIVFTKLDRWFRNIAEYYKVQEILEANHVNWKTIHEDYDTSTASGRLKINIMLSVAQDEADRTSERIKAVFDAKKKNGEPVTGHVPTGYLLDGKKIVFDPEWQEAVTAFFSEYLASGSPSQARKAALARSGKVISYQLATLMLKNQAYSGSFHGVPGMCPQYISEAQFARVQQLRQSNPKAAPTGRTYLFSGLIFCGECGRRLSGACRKVSRNDGSIYEFKYYICQNHYVRSGCPNNSCTRERYIEEELLKLLPAEVDQAIVDTSGARLLSKQGNADLSKMKRRMARLQELYLNELIDLAAYSKEYNEIKGRMQAAEAAKAAESREADLRMLSGLDWAALYSTMNGHEQRELWRSLLSKVFVSKDKAISVELNPDIGGALIHVK

SEQ ID NO: 10880 - protein, 469 aa, Unknown
  Description of Unknown: Integrase B10881 sequence
  PF13408,IPR011109,IPR038109,PF07508,Coil, PS51736,IPR036162,PTHR30461,IPR006119,G3DSA:3.40.50.1390, PTHR30461:SF3,PS51737,IPR025827,PF00239,SM00857, cd03768,G3DSA:1.10.10.2600,SSF53041
MIALYSRVSTQEQAAEGYSIGEQQERLAAFALSFGWKDFRHYTDPGFSGASLDRPAMQEMIRDVKAGKVSRVIVYKLDRLSRSQKDTLFLIEDVFLAHGCEFVSMSESFSTETPVGRATIGLLAVFAQLERETIKERLTVGRIARAKAGLPHVGAEKPCGYAYQDGHLSVIEDEAAQVREIYRLYLSGLSLREIAISMTDRGHLFRGGPWNQKHVKAVLGNVLYTGKVHFAGEVYPGQHEAIIDQETFDRVQDLMATRRRALREKGERTHSGKSLLTGLVYCAKCGCRLTPSVTFKRGRRYEYLKCPARRDSMVARKIGHRCDAKAVRSEKLEEAVLSQIKLLQADPAAMIPKRKEEPDERPGLRAQVARLDSQISRLLDLYADGSFSLDVLTEKTEALRAARASCQAELDAAEKKAASSGADRAQEALRSFPEAIEAMDAPRLKMIIRDLIDRIEYADDDLRIFWKIK

SEQ ID NO: 10881 - protein, 469 aa, Unknown
  Description of Unknown: Integrase B10882 sequence
  PF13408,IPR011109,IPR038109,PF07508,Coil, PS51736,IPR036162,IPR006119,PTHR30461,G3DSA:3.40.50.1390, PTHR30461:SF3,PS51737,IPR025827,PF00239,SM00857, cd03768,G3DSA:1.10.10.2600,SSF53041
MIALYSRVSTQEQAAEGYSIGEQQERLAAFALSFGWKDFRHYTDPGFSGASLDRPAMQEMIRDVQAGKISRVIVYKLDRLSRSQKDTLFLIEDVFLAHGCEFVSMSESFSTETPVGRATIGLLAVFAQLERETIKERLTVGRIARAKAGLPHVGAEKPCGYAYQDGRLSVIEDEAAQVWEIYRLYLSGLSLREIAISMTDRGHLFRGGPWNQKHIKAVLENVLYTGKVHFAGEVYPGQHEAIIDQETFDRVQDLMATRRRALREKGERTHSGKSLLTGLVYCAKCGCRLTPSVTFQRGHRYEYFKCPARRDSMVARKIGHRCDAKAVRSEKLEEAVLSQIKLLQADPAAMIPKKKEEPDERPGLRAQVARLDSQISRLLDLYADGSFSLDVLTEKTEALRAARASCQAELDAAEKKAASPGADRAKEALRSFPEAIEAMDAPRLKMIIRDLIERIEYADDDVRIFWKLK

SEQ ID NO: 10882 - protein, 469 aa, Unknown
  Description of Unknown: Integrase B10883 sequence
  IPR038109,PS00397,IPR006119,PS51737,PF00239,G3DSA:3.40.50.1390 ,PTHR30461,IPR025827,SM00857,G3DSA:1.10.10.2600, SSF53041,IPR011109,PF07508,PS51736,IPR006118, cd00338,PF13408,Coil,IPR036162,PTHR30461:SF3
MNEKTVVGLYIRVSTQEQASEGYSIEEQKERLTKYADAQDWTIYRLYSDPGFSGGSIERPGLKTLIADVVAGKLDKVAVYKLDRMSRSQKDTLYLIEDIFLPNGVDFVSMTENFDTGTPLGRAMIGILSVFAQLEREQIKERMSLGREGRAKSGLWHGSSRIPVGYLYENGQLKIEPFEAEIVRRIYREFNNGRTVAAIVADFRREGITTKYGRIQPSTVRSVIRTKTNIGVVSHNGVEYQGQHDPIISREEYDRANQRLDDQAQTDVNHYNFRKHVSPITGLCYCAVCQSKMMIQYKNSRSKEVNRVITCLHKGATGCNNPRYPLLEVESYVIDQIKKLRLDPEYFKETRSQTQTAGELERIEILEERIKGNDVKVSRLMDLYSIGGIDLSALKDKIEILNLESTTLRSEVEKLRRQLSETLSDQDIQDLVYSLEETVEDPEQARIVVKALVKRIEFQGQDISIYWNF

SEQ ID NO: 10883 - protein, 469 aa, Unknown
  Description of Unknown: Integrase B10884 sequence
  PS00397,IPR038109,IPR006119,PS51737,PF00239, cd03768,G3DSA:3.40.50.1390,PTHR30461,IPR025827,SM00857, G3DSA:1.10.10.2600,SSF53041,IPR011109,PF07508,PS51736, IPR006118,PF13408,Coil,IPR036162,PTHR30461:SF3
LKRAFLYVRVSTQEQAKEGYSIDEQIDRLKNYCKAMHWSIVDTYVDAGFSGAKTDRPALQSMLRDIKDGKGDIVCVYKLDRLSRSQKDTLSLIEDNFIANGVDFVSMTENFDTSTPFGRAMIGILSVFAQLEREQIKERMKMGKMGRSKEGKWKGGLTPVGYEYINGTLVINEYEAMQIREIHELYQKGNGFHEIVRRFDAKGYAHRYGKWTVKRVRDAMLNETYLGKIHHKGELLQGIHEPIIDEKIYKKTLDVYNSHDYKQKGKHLSRVALLGGLIYCSKCGARYGYYNYGGNKYRYYACYSRRRYAQMSKADTCDNHIWKAEELENLIIGEIQKLADDPTCIHGMRTNSESLESQNKTLILEREIEKINSQKSRFMDLYGLGEFTAQELTAKIAPLNERRQALEHEISLIQSDDTALSEDEAVKIVRSFSDVLERGDFNETKILIQSLVEKVEIDGQNVDIFWKFA

SEQ ID NO: 10884 - protein, 469 aa, Unknown
  Description of Unknown: Integrase B10885 sequence
  cd00338,PF13408,IPR011109,PS00397,Coil, PS51736,G3DSA:3.40.50.1390,IPR006119,PTHR30461,IPR036162, PTHR30461:SF3,PS51737,IPR025827,PF00239,SM00857, IPR006118,SSF53041
MLEKILRVALYIRVSTQEQVMHGYSLEAQEAALYDWCKNFKNDRAYKDYEGIEIVDIFKDEGKSAFKPCKKRPEFMRLINDFVIPEKVDLIIFIRLDRWFRRVGEYHEMQKILEDHNVHWKAILEEYETATSNGRFMVNIKISTAENEAENTRNRILDVNRYKRRIGKVMSGNQPFGYTVGIVDGSKRPVIHEIKGKIYRDMISYFFLSGSVGKTADYCNQKYHMNSNYSWYSKVLNNIDTYLGYSEGIGGYRPPLLSLDEAEKLKNLLGNNARRPRSQRIYIFSGLLTCPVCGNRLTSCMSVYTDSNRKKKYYKRYRCQNAKVSHLCSFSTSFSERKIEAALLKGVGSAFADFETACQKNMKKNRDSAEELKKIQGQLDRLNKIFLMGNIQEDEYEAASFSLKKRMESLRLSPSRIDKKTADLLKTGEFIDYYKLLDDEHKQFFWRGIIKSVTLCNDHSNMISSILFL

SEQ ID NO: 10885 - protein, 469 aa, Unknown
  Description of Unknown: Integrase B10886 sequence
  cd00338,IPR011109,PTHR30461:SF21,PF07508,PS51736, G3DSA:3.40.50.1390,IPR006119,PTHR30461,IPR036162,PS51737, PF00239,SM00857,SSF53041
MTPRRKRAAIYVRISRDREGAGLGVERQEAECRDLVAGRGWSVAEVFRDNDLSAYSGKPRPGYRAMLDAIAAGTVDVVVAWHTDRLHRAPAELESYIGACEPRNVATHTVKAGDLDLSTASGRMMARMLGAVARHDVEHNIERITSAKAQAAAAGKYRGGRRPYGYEADGLTVRPPEAAVVVRIADRIIAGASVRSIVAELNTEGATTSTGGPWRTDAVVSVIKRARNAGLIEQRGQVLGPAQWPAILDEDTWRAVLGILGDPARRTNPGGQVRWLLSGIARCGECGAGCHVTNVGSRPSLRGVPSYCCPDKHVVRNAAELDAFVAGLIVARLSQPDAVDLLLGNTTVDTGALHTELTVIRERLDGLAREYAEGTIDARQLAAGSAHLRAREVDVTAAIADASRGSVLSGVVAAPDVAEVWNALPLGRRRAIIEALVTVTVLRAQRGRRPGWRPGESYFDPRAVAIEWQ

SEQ ID NO: 10886 - protein, 469 aa, Unknown
  Description of Unknown: Integrase B10887 sequence
  cd00338,IPR011109,IPR038109,PF07508, Coil,PS51736,G3DSA:3.40.50.1390,IPR036162, IPR006119,PTHR30461,mobidb-lite,PS51737, PF00239,SM00857,G3DSA:1.10.10.2600,SSF53041
MTPNAAIYARQSIDIAEGIDRQLARCRALAAARGWQVAEEYVDNDTSASKDRGAGTAWGRMLAELRPGHVVIAVDLDRLIRRMEDLTVITATGASVLTVDGEVDLTTADGAFRAQMLTALASFEVRRKGERQRRANEHRTAQGRPVPGRRRYGYETDGVTPRPDEAAIVRRVFTHVAEGGTLRSMARALTAEGVSPAPGRSWSARRLGELARNEHYSGRVTHLGVTVQSDVVVPIVPEEQAAEVRAILTDPSRRTSTAGPKPRHLLSGLLKCGICGGNIYHMRGYLCRLDPAHVHIAKHIIEPFVLTHLGDALLAIGPGGVSAPASSGVATLVERHGRNADAVAATLADRDEGLVTPQGARRRLIELREVRESIEADLERLRGERSAAGALGAVAHELLGGVAEMTGAAYADRRDAVLQRLAEMDMERQREVVRALVDVEVHKGRGTGRVLVTHKVAEHLNPDTIDPEW

SEQ ID NO: 10887 - protein, 469 aa, Unknown
  Description of Unknown: Integrase B10888 sequence
  cd00338,PF13408,IPR011109,IPR038109,PF07508, PS51736,G3DSA:3.40.50.1390,IPR006119,PTHR30461,IPR036162, PTHR30461:SF3,PS51737,IPR025827,PF00239,SM00857, G3DSA:1.10.10.2600,SSF53041
MQVEGGTSLPSQLSECRSMAARQGLEVVAEYIDSGESARTDERPQFQQMVADARHGRFGAIITWDNSRFARNREDAVTYKALLRRHGVRLLFVNEPLIEGPVGSLVDSVLEAVAEFYVANLGESTRRGLEETVRQGYFSGGPPLFGYRREVVSASGKRKSRLVPDPVNSRAVRDVYRWYASGMSLRDVARRLNSAGVTPPRAKEWTPAAVQHILFKYRDQYLGTFSFGRKPEAGRPEPTVSIQVEPLVDPALAEAVDAAARGRRNIGKFGSEPRLLTGLAHCGNCGRRLMVGGGPGAGGKRVGYYHCPGKCGQGWIRCETAERFVLDSLSSFLEGEGPEGLVDAMARQYAARLGRVEQDRASVMSAIAELSRRRDNLLFALENGSVAPEDVRDRLLDLRQKIAVQRSTLEKMEYEPRKSIMTADIMRKKIIALLSSGSRRGKRAALNVLLERIDFHDGLPRITFALPEG

SEQ ID NO: 10888 - protein, 469 aa, Unknown
  Description of Unknown: Integrase B10889 sequence
  cd00338,IPR036162,G3DSA:3.40.50.1390,IPR006119,PTHR30461, mobidb-lite,PF00239,SM00857,SSF53041
MNPIYNTLQNMTQQQGNQGMPQQPFIINNQGQYIPVMMMPANQQQIQQNPFMVMNQPQNIMPVPMVQQQQQYQQPQFMNAGQNPFIMLQQQQQQPIIQGNPIGNPIGNPIGNPIGVVGNPIGGGDDNIIANIMGNVALNQQDKPIKPKKDNSFKPSKDNSNVIKSIEPINDNEAHFDATNFPNEKYRTMTLNGEEQEREATDINDYTLETGKIIYKHNNNIPQNIMKGYASIYVRCSNPNGISIDTQMKECLKYAKERDLIIQGIYIDDGVSGRNGKNLKNGEIGFWKEHIENYSNLLIYSVDRLTRHLFSGLQFLNTMQEKNIDVHFVNNKIIYNKSISAMNKSSIQQELQTAEKYSNDTSEKIKGTINRLKNEGKYLPGRIPYGYKRIKINGQLKQVENSIEKETINIIKTQYNKIWNNFNDYSNDIPKKSQYYIFQYLKQWCAQQHIKDRNQNYFTESSIKNIIYK

SEQ ID NO: 10889 - protein, 468 aa, Unknown
  Description of Unknown: Integrase B10890 sequence
  PS51736,IPR036162,IPR006119,G3DSA:3.40.50.1390,PTHR30461, PTHR30461:SF3,PF00239,SM00857,cd03768,SSF53041
VGVVLGAATNCDKAGVILDGGRSAFSKPFATRPGAMLLAGALQQGDTVVVTSLTRLFRRVAEAATIMERWVQIGVSVTFVDYPSLSFDSANGRCLVYCMAAVAQLKSELIAARVREGRARKKGLPAEPNRPAKPAKVLLPAAQQPIAEVIRRMAEKRPSSRSGRVCVYARVSTDEQSVDTQLAILRQAYPGAVEYVDHGVSAWKTSLPDRPEGGRMLRELQPGDTIVVLRPDRVFRSLKDAATQIDAIQKVGAFLHIHEGGIKSDELFGRLLLGMLSAFAQLESEETSRATKHAMAIACGTNDAALQARLPKPLLRDVPPKTKHYVFDDVFDSGERQQMWLTVHLTKANYCSLGVCILDATNRSLYEKGLPPLTSQSMDMRDYRQALREVGTKKAKALIPKIENYARVASPVGSSQNFPKAEKRYEHFMRVFGELPREQRDLRLLTMMQSPKAVAAFADATKRAVETV

SEQ ID NO: 10890 - protein, 468 aa, Unknown
  Description of Unknown: Integrase B10891 sequence
  IPR038109,PS00397,IPR006119,PS51737,PF00239,G3DSA:3.40.50.1390 ,PTHR30461,IPR025827,SM00857,G3DSA:1.10.10.2600, SSF53041,IPR011109,PF07508,PS51736,IPR006118, cd00338,PF13408,IPR036162,PTHR30461:SF3
MLYGKPQNYSWYRARVVLYIRVSTDEQARHGYSLGAQREALREFCDTFQCQIVAEYSDDGVSARKEIRRRPGLLRVLEAVKAGGVDYVLFIKLDRWFRSVREYYRVQDVLEAAGTNWKAILEDYDTSTTNGRLNLNIRLSVAQDESDRTADRIKFVFAERVKNGGAIFGSKSLPYGLEVADHRVQIVESQADAVRGMFDHYEATNSTRETHAWLRDQYGVDLPYNTIRNMLRNSLYCGEYRGNVNYCPAIISREQFQNIQKIVSRQGANRTRQSKYSYVFTGLLRCPVCGCTLKAFPQTDYKFHRVYLRYRCTQHWIDKRCTWKTTPWEPRLEDWLLDHIQPQLDAYIAQFDVQEAQRRRAVVDVGAIQRKLSRLQDLYVDGMIDRAAYDEKYQALIRQQEAAQTAQQGQSAGRDLEPLRQLLAGDFRSIYATLSPQERHTLWASVIDHIVVKDGRYGHFDLDVIFLP

SEQ ID NO: 10891 - protein, 468 aa, Unknown
  Description of Unknown: Integrase B10892 sequence
  cd00338,IPR011109,IPR038109,PF07508,PS00397, PS51736,G3DSA:3.40.50.1390,IPR036162,IPR006119,PTHR30461, PTHR30461:SF3,PS51737,PF00239,SM00857,G3DSA:1.10.10.2600, IPR006118,SSF53041
MLYGKPQNYAWYRARVILYIRVSTDEQARHGYSLGAQREALREFCDTFQCQIVAEYSDDGVSARKEIQRRPGLLRVLEAVKAGGVDYVLFIKLDRWFRSVREYYRVQDVLDAAGTNWKAILEDYDTSTTNGRLNLNIRLSVAQDESDRTADRIKFVFSERVKNGGAIFGSKSLPYGLEVRGHRVQIVEDQAVIVRAFFDHYEAVHSARSTQVWLRDQCGVDLPRNAIGRMLRNGLYCGQYRDNKNYCPAIISPDQFQRVQEILARQASGHTRQSKYSYVFTGLLRCPVCGCTLKAFPQFDHKLNRLYLRYRCTQHWIEKRCSWKTTPWEPRLEGWLLDHIQPQLDAYVAQFDVQEAQRRQAVVDVGAIQRKLSRLQDLYVDGVIDRAAYDEKYHALIQQQDAAEAVRAAQSAGRDLGPLRQLLAGDFRSIYATLSPQERHTLWASVIDRIVVKDGRYGHIDLDVIFLP

SEQ ID NO: 10892 - protein, 468 aa, Unknown
  Description of Unknown: Integrase B10893 sequence
  cd00338,PF13408,IPR011109,IPR038109,PF07508, Coil,PS51736,IPR036162,IPR006119,G3DSA:3.40.50.1390, PTHR30461,PTHR30461:SF3,PS51737,IPR025827,PF00239, SM00857,G3DSA:1.10.10.2600,SSF53041
MRVALYPRVSGHEQEDNYSIPEQIDRMKKYCDARDWMVYKIYTDSGFTGSNLDRPGLQELIKDAESGKIDMVLVYKLDRLSRSQRDTLYLIEDVFEKNGVGFSSMTENFDTSTPFGKAILGVLAVFAQLEREKIKERTMMGKQARAEEGKWHGGSTPPIGYDYIDGELILNEYEAMQIKEAADLFLKHTPVRTIERMMDAKGFKHKYGDWTAKTIRFILSNPLYLGMMKHRDKFYQGTHTPIFTQDEFDAMQEIMDERREKHAPGRREHSTLLGGMLYCKHCGGKYAKLDYNGNYLIYSCYSRSKKIKRMIKDPNCKNKNYRMIELDAAIITEITNLSLDPSYIDEVRENKPINDVSDKIKAINQEIEGITAKISKLMDLYADGEMDMSLISNKVAEHNKTKMRLQKELDSLDVPQTDQEGMTNEQIQNLATLINDKDLSLMDKRNIVQSLIYYIEIDNEEVTIHWKF

SEQ ID NO: 10893 - protein, 468 aa, Unknown
  Description of Unknown: Integrase B10894 sequence
  cd00338,IPR011109,PS00397,PF07508,IPR038109, PS51736,IPR036162,IPR006119,PTHR30461,G3DSA:3.40.50.1390, PTHR30461:SF3,PS51737,PF00239,SM00857,G3DSA:1.10.10.2600, IPR006118,SSF53041
MLYGKPQNYSWYRARVVLYIRVSTDEQARHGYSLGAQREALREFCDTFQCQIVAEYSDDGVSARKEIQRRPGLLRVLEAVKAGGVDYVLFIKLDRWFRSVREYYRVQDVLDAAGTNWKAILEDYDTSTTNGRLNLNIRLSVAQDESDRTADRIKFVFSERVKNGGAIFGSKSLPYGLEVRGHRVQIVEDQAVIVRAFFDHYEAVHSARSTQVWLRDQCGVDLPRNAIGRMLRNGLYCGQYRDNKNYCPAIISPDQFQRVQEILARQASGHTRQSKYSYVFTGLLRCPVCGCTLKAFPQFDHKLNRLYLRYRCTQHWIEKRCSWKTTPWEPRLEGWLLDHIQPQLDAYIAQFDVQEAQRRQAVVDVGAIQRKLSRLQDLYVDGVIDRAAYDEKYRALIQQQDAAEAARAAQRAERDLGPLRQLLAGDFRSIYATLSPQERHTLWASVIDRIVVKDGRYGHFDLDVIFLP

SEQ ID NO: 10894 - protein, 468 aa, Unknown
  Description of Unknown: Integrase B10895 sequence
  PS00397,IPR038109,IPR006119,PS51737,PF00239, cd03768,G3DSA:3.40.50.1390,PTHR30461,IPR025827,SM00857, G3DSA:1.10.10.2600,SSF53041,IPR011109,PF07508,PS51736, IPR006118,PF13408,Coil,IPR036162,PTHR30461:SF3
MRKPKETKATERVVIAKYIRVSTDKQREEGYSVDIQKERLDSYARSLFPESTYDVEYREYVDDGFSGGSLERPQMTQLIEDVKNGVITHVIVMKLDRLSRSQKDTLYLIEDIFLPNNVAFISMGESFNTDTPFGRAVVGILSVFAQLERENIFERTRSGMQKRVELGYWPGGGAIPFGYDYDANQGILIPNGNADTVRTVFELYTRGYSAQYIANLLGLKYDKLVNNILTRKTYTGAIVYNSIEYKGKHQPIISEELYEKVQAMIQDRSSKRFVSATTNLLTGMVYCGRCGAKMRYIKWGKHGRSRLMCYSQEKSKPYLVKDPDCENEKPWADDVEDTVIKLLFERAHVNECNNTNEEQADPVKMLQSQRVSLVNKLKRLYIIYAEGDDAITQVINETKEEVAKIEKRIEGEIAKRATTIIEQDIQEKLSSLEESWQYLDVSEKQNIVRSLINKVTITGHRIHIDFKI

SEQ ID NO: 10895 - protein, 468 aa, Unknown
  Description of Unknown: Integrase B10896 sequence
  cd00338,IPR011109,IPR038109,PF07508,Coil, PS00397,PS51736,IPR036162,IPR006119,PTHR30461, G3DSA:3.40.50.1390,PS51737,PF00239,SM00857,G3DSA:1.10.10.2600, IPR006118,SSF53041
MEKLKAVAYCRVSTIMQEEGRSLEFQIKKCQDYCEFQNYELIEIIQDVESGGNDDREGFLELREKVRAKAFDVLVVFESSRISRVTLTMLNFVLELQKSNIHFVSISQPELNTTTPTGMLFFTIQATLSEYERKQISVRVKSNKWARAKAGIWQGGKLPLGYTKDPEDNNNILIDEENSFIVQNIFEYYIKTQSLAKTAKYFNRHLESIRWILTNPFYIGLFRYGKKENNINTGIVKTNSDYQYFEGVHPPIITEDIFNKVQSIINLKKKNIKSTFKLLFTGMITCTCGGKYFASKNGKKYNYRCSDCGKSISYRKMESSIIKNIFNMSELEDLNNANIKTENYQKEIDTIKKLIEKDKKNREKTLLLFKNEIISIDELKKEIDIIDSGINGKFKEIEKLESVIKYQNNNSEKINNIKILKETLEYMEDEDRENIYEIFKLLIKEIILLNKDEINLKNDNLKLQIFLN

SEQ ID NO: 10896 - protein, 468 aa, Unknown
  Description of Unknown: Integrase B10897 sequence
  cd00338,IPR011109,PS00397,PF07508,IPR038109, PS51736,IPR036162,IPR006119,PTHR30461,G3DSA:3.40.50.1390, PTHR30461:SF3,PS51737,PF00239,SM00857,G3DSA:1.10.10.2600, IPR006118,SSF53041
MLYGKPQNYAWYRARVILYIRVSTDEQARHGYSLGAQREALREFCDTFQCQIVAEYSDDGVSARKEIQRRPGLLRVLEAVKAGGVDYVLFIKLDRWFRSVREYYRVQDVLDAAGTNWKAILEDYDTSTTNGRLNLNIRLSVAQDESDRTADRIKFVFSERVKNGGAIFGSKSLPYGLEVRDHRVQIVEDQAVIVRAFFDHYEAAHSTRSTQVWLRDQYGVDLPRATIGRMLRNGLYCGQYRDNKNYCPAIISPDQFQRVQEILARQASGHTRQSKYSYVFTGLLRCPVCGCTLKAFPQFDYKWNRLYLRYRCTQHWIERRCSWKTTPWEPRLEGWLLDHIQPQLDAYVAQFDVQEAQRRQAVVDVGAIQRKLSRLQDLYVDGVIDRAAYDEKYRALIQQQDAAEAARAAQSAGRDLEPLRQLLAGDFRSIYATLSPQERHTFWASVIDHIVVKDGRYGHYDLDVIFLP

SEQ ID NO: 10897 - protein, 468 aa, Unknown
  Description of Unknown: Integrase B10898 sequence
  cd00338,PF13408,IPR011109,PS00397,IPR038109, PS51736,G3DSA:3.40.50.1390,IPR036162,IPR006119,PTHR30461, PTHR30461:SF3,IPR025827,PS51737,PF00239,SM00857, G3DSA:1.10.10.2600,IPR006118,SSF53041
MTKTVKRAALYIRVSTDEQARYGLSLGEQRRDLEDYARRKGYIVAGIYADEGTSARKSLHRRKELQRLLADIRAGKIDVVVVKDLERWMRSVRDFYKVQDILDEHNVGWECSQDRYNTTTANGKMQLNMRLAIAQDESDRDSERIRYVFEGKRKRKEVLSGAIPRGMSIVDKHIVFNEEADMVRAIFNHVYNGGSVRSCIALAKEEYGVELTYRTIRRSLANRAYIGELHGEPGYIESMIPLDVFNRVQIKLKKYCSSFRNKSTGSRVYLFTGLISCPHCGSTLSGYRGDKKADGTYRTYWYRCGRANGNAGVGCNYTRCLYERKVESFLLDNIQSLLSNHMYQIEQRRIAKQKFRSEMTEENIQAKLARLKDLYVDGLIDKPTYLRDYNKFQQQLLEIASDEVIPLTTIPPEAQSFVSSADFREVYQSLTQENKRDFWASIIKRITYEDTPATHGRGGVYDFHVEFY

SEQ ID NO: 10898 - protein, 467 aa, Unknown
  Description of Unknown: Integrase B10899 sequence
  cd00338,IPR011109,IPR038109,PF07508,PS00397, IPR036162,IPR006119,PTHR30461,G3DSA:3.40.50.1390,PTHR30461:SF3, PS51737,PF00239,SM00857,G3DSA:1.10.10.2600,IPR006118, SSF53041
MKIGAAYIRVSTDEQTELSPSSQLEQIREYAKKNDIIVPDEYIFIEGDGEKGYSGRKASNRPKFQQMIAIAKEKPKPFDIILLWKFSRFTRNMDEATYYKSILRKKCGIDVVSISEPIMQSVYGRLVEMIIEWSDEFYSINLATEVKRGMSAKAKAGEFCSYAPIGYKMVDKKLVIDEEKAPLVKSIFQEYAAGGKARQMAIRLNEQGVRTKFGNPIDNRFITYMVSNPLYKGYIAFSTDGRRKRGETIDTDKVIYQKGIHEPIIDEELWQKCYNRYLLERTKDRRESRKNEYALRTLLKCSNCGATLTHGIGGRLQCSKYNRGVCNVSHSIEVKAAEEAVLKQMRVDAQILAGKPRSVEKPSVDNTQAINAIKKKIARLDDAYLNEVYTSDEYKSMRKTLVSQINELEAAQYIPVNKGITKLDIMNVLKTYDKQSEREKNQSLMKIIEKVIAHKTSEGYNFEIFYK

SEQ ID NO: 10899 - protein, 467 aa, Unknown
  Description of Unknown: Integrase B10900 sequence
  IPR038109,PS00397,IPR006119,PS51737,PF00239,G3DSA:3.40.50.1390 ,PTHR30461,IPR025827,SM00857,G3DSA:1.10.10.2600, SSF53041,IPR011109,PS51736,IPR006118,cd00338, PF13408,Coil,IPR036162,PTHR30461:SF3
MSIIKRAALYIRVSTEEQARHGLSLGEQRRDLEEYAKRNNYAVVGIYADEGTSARKAIHRRKELQRLLDDIRADKIDIVVVKDLERWMRSVRDFYRVQDILDEHNVGWECSQDRYNTTTANGKMQLNMRLAIAQDESDRDSERIRYVFEGKKKRKEVLSWAVPQGMSIVNKHVVFNERADMMRDIFNHVYNGGTVRSCITLAHERYGVKLSYMMVRRSLANRAYIGEMYGEPNYIEPMIPLDVFNKVQARLEKYQKSYRNQTNSDCRVYLFTGLIKCPYCGHALTGYRGDKKADGTYSSFFYRCNVANNNTNHHCNYYRCLYEFKVENFLLENIQKLLSGHLYHVKQHRVKKAKNRSELTAENIEAKLTRLKDLYVDGLIDKATYLEDYKKLQQQLVEITRPEKPLTMITPETQSFISSDDFRELYQSLTRENKKSFWQSIIKNITYEDTPASHGKGGVYDFQVEFY

SEQ ID NO: 10900 - protein, 467 aa, Unknown
  Description of Unknown: Integrase B10901 sequence
  cd00338,PF13408,IPR011109,IPR038109,PF07508, IPR036162,IPR006119,G3DSA:3.40.50.1390,PTHR30461,PTHR30461:SF3, PS51737,IPR025827,PF00239,SM00857,G3DSA:1.10.10.2600, SSF53041
MGLKPAGGWLRVSTTAQDEQLQRADLLRFAADHGLGIAVWYRAHAKSASKGEHDADMSDALEDTRAGRIRVLLATALDRTERRGIEAQFRVIREFREAGGDVWSVLESPVNGKPLEEVGLTLATIADMNRRKAELAAFNTKRGHDAIDANGAFRGRVPFGYEAAGAKYHKQLIPTQIGRDWIPQIFERIIAGWSLGEVCWWLDSLKIRFRKDGTLAPWWPATVAQVIRNPVYVGHYSDGEGRWVHECEGLIDATVFRVANEKLSGRARKPIGPRGRPEYRARLRGALTCPDCGGGMGKNASPNTRTSGGGISKPYYRCRGTGGPMQKGCGNNVSLELVDKAVDRVIRTEFHSPVLLRVLVKGGDHQAEIDQVDLELRQLPARGLGRAAEQAERERLWAEQDRLGGLPVEEDRWEEVPTGEMYDRVWAGLPDAERGAWLVRHGFRVYASKAGVRVTFRERDLRSRFRA

SEQ ID NO: 10901 - protein, 467 aa, Unknown
  Description of Unknown: Integrase B10902 sequence
  PS00397,IPR038109,IPR006119,PS51737,PF00239, cd03768,G3DSA:3.40.50.1390,PTHR30461,IPR025827,SM00857, G3DSA:1.10.10.2600,SSF53041,IPR011109,PF07508,PS51736, IPR006118,PF13408,IPR036162,PTHR30461:SF3
VRRAALYIRVSTLEQAQEGYSVGEQRERLIAYCKAQDWLIADIYVDGGYTGSNLNRPGIQKLMSETEKFDVVLVYKLDRLSRSQRDTLYLIEEIFRPNKVDFVSMQESFDTSSPFGKAMIGLLAVFAQLEREQIKERTWMGRVARAKTGLHHGGGNIPIGYDYEDGKLIVNPYEAEQVRKIYEWYLSGASLKAITDKLQDAGYTNKYSSYNSWSSVRNILENETYIGRLHFGGVVVDHAHEAIITEEQFNAAQILRGKRREQFGSHAFQSKHVLTGLLFCGHCGGRYYLRNTGKYSYYACYSRTKQMKNMIKDPNCQNKIWRAQDLEPIIEEKILALLRNPQIAEELAAGKPKAAAPVSKNTDIERRIREIDRQIGKLMELYQQDDIPPELLGEKINRLYGEKTALENSIAPVKETDAMPLDLVAELITNAAEIWDFADENQKRRILQSLISRIVLTDDQVDIEWAF

SEQ ID NO: 10902 - protein, 405 aa, Unknown
  Description of Unknown: Integrase B10903 sequence
  cd00338,PF13408,IPR011109,IPR038109,PF07508, PS51736,G3DSA:3.40.50.1390,IPR006119,IPR036162,PTHR30461, mobidb-lite,IPR025827,PS51737,PF00239,SM00857, G3DSA:1.10.10.2600,SSF53041
MRIKVIKPTKAVHQQKKKVCAYVRVSTDSLQQEESLENQTTYFKSFITANPEWEFVGIYSDQGISGYKENRPGFQKMIEDARAGNIDLIVVKSISRFARNTETVLKFTRELKSIGVGIFFELQNINTLSGAGELMLTILAAFAQAESEGASANAKMTYKRKFESGIPAHGLESTFGYKANAQGDIVVDEEKAAVVRQMFDLAEQGIWPSKIKQYLNKNGVPGCAGGDWDDTAVFRVLHNVSYKGDLILQKTYRDSRRKQRKNEGQVDQWYIAENHQPIVPPKQWDKVQEILRKRSEHLQKPAPPKPDKPRSSRNTYPLSNLIYCPICGEKLIHKWGKGKNEYWACKTNLKVGKDACKGVWLPAEVANDWGEITEPIVAVQYEDEYGMRRFTAYPKDEYDAFKRED

SEQ ID NO: 10903 - protein, 467 aa, Unknown; identical to SEQ ID NO: 10490
  Description of Unknown: Integrase B10904 sequence
  cd00338,PF13408,IPR011109,IPR038109,PF07508, PS51736,G3DSA:3.40.50.1390,IPR006119,IPR036162,PTHR30461, PTHR30461:SF3,IPR025827,PS51737,PF00239,SM00857, G3DSA:1.10.10.2600,SSF53041

SEQ ID NO: 10904 - protein, 467 aa, Unknown; identical to SEQ ID NO: 10491
  Description of Unknown: Integrase B10905 sequence
  cd00338,PF13408,IPR011109,IPR038109,PF07508, PS51736,IPR036162,IPR006119,PTHR30461,G3DSA:3.40.50.1390, PTHR30461:SF3,PS51737,IPR025827,PF00239,SM00857, G3DSA:1.10.10.2600,SSF53041

SEQ ID NO: 10905 - protein, 467 aa, Unknown
  Description of Unknown: Integrase B10906 sequence
  cd00338,PF13408,IPR011109,IPR038109,PF07508, Coil,PS51736,G3DSA:3.40.50.1390,IPR006119,IPR036162, PTHR30461,PTHR30461:SF3,IPR025827,PS51737,PF00239, SM00857,G3DSA:1.10.10.2600,SSF53041
MDKAVFIYTRVSTREQADEGYSLGEQEERLKKYSEAMGWKVTGIYTDPGYSGSNMERPALQQMLSDISKKHPDIVLVDKLDRLSRSQYDTLYLIKKVFAAAGASFVSRAEAFDTSTAFGRAMLGILSTFAELERERIKERMMEGRQGRAKDGLYMGSQAPLGYDYSPENGLTINESEAGIVRFIFEQAAQRRPFTCIAEDCANMYDVDFFWSLASITRILNSKLYIGQVLFCGKWTQGKHAPIISEETFEKAQEVLSERKENFSKFTGKKTKNLLSGLIYCEYCKTRFHKIQTGKYIYYVCYSRSSVKGSMIVNRDCSAKRLNLRKTDALVLAQIKRIRTDVAFYDSVKQAKGSADQTVESLGKKIASINTRINRLISLYSLEQIDIEQVKAQIDPLTAQKKELQKKLDAAESKKNDYVKREDAVTLSQAVEEAYNSGNINEARALISQLIKYISVNADSISIHWRF

SEQ ID NO: 10906 - protein, 467 aa, Unknown; identical to SEQ ID NO: 10576
  Description of Unknown: Integrase B10907 sequence
  cd00338,PF13408,IPR011109,IPR038109,PF07508, PS51736,G3DSA:3.40.50.1390,IPR006119,IPR036162,PTHR30461, PTHR30461:SF3,IPR025827,PS51737,PF00239,SM00857, G3DSA:1.10.10.2600,SSF53041

SEQ ID NO: 10907 - protein, 467 aa, Unknown
  Description of Unknown: Integrase B10908 sequence
  PS00397,IPR038109,IPR006119,PS51737,PF00239,G3DSA:3.40.50.1390 ,PTHR30461,IPR025827,SM00857,G3DSA:1.10.10.2600, SSF53041,IPR011109,PF07508,PS51736,IPR006118, cd00338,PF13408,Coil,IPR036162,PTHR30461:SF3
MKIAAAYIRVSTDSQTELSPDSQIKLIREYAKSHDMIVPDEYIFRDDGISGRTTAKRPQFNAMIGTAKKKPKPFDVILLWKFSRFARNREDSIVYKSMLKKIGIDVVSVSEPVGDDKMSVLIEAMIEAMDEYYSINLSEEVNRGMLEALSRGKCVNSYPLGYKMIDKQLIINEETAPIIRRIYAEFISGKNMLPIARGLTADGYRTLYGKPFETRTIEYILRNPIYKGYLRYTPGGNGSKQHYHGIEPMIFKGVHDAIIPPDMWDKAAERMESIKKAHQKYRRDTAQKYDLMLRGLLKCSNCGCTLTYTSKGYQCGNYNRGKCSVSHYVSENRINEAVVNAVRTLNINGRINIVPPKEPMIQDNTADLIKREENKLKRIKEAYLNGIDTIEEYKANKQKITADLEKLKAKQKKPEPKPELETRRFDFIRMFDEGTFTPGELNAALKAFIAYIIYDRLNDNITLFLNP

SEQ ID NO: 10908 - protein, 466 aa, Unknown
  Description of Unknown: Integrase B10909 sequence
  PS00397,IPR038109,IPR006119,PS51737,PF00239,G3DSA:3.40.50.1390 ,PTHR30461,IPR025827,SM00857,G3DSA:1.10.10.2600, SSF53041,IPR011109,PS51736,IPR006118,cd00338, PF13408,Coil,IPR036162,PTHR30461:SF3
MNKKILRAGIYIRVSTEEQAKHGYSIDSQRTRLKEWCKEHNYQIIDVYADEGKSARTKLANRKELARLLDDVRNNKIDRIVIWRLDRWFRNVADYYRIQDILDKYNVDWECSDEDFNTSTSNGRLYLNIKLSIAQNESDQTSDRIKFNFDNMVKNKRPISGALPVGYKIEGEKQNKRVVKDPELSQMAIDMFDKFEETLSLHATTQYLIENYPQRPIRYERVKHMIKNSMYHGVYRDVEDYCEPYISKERHQRIIDIIKKNQRVNVPSGFKFKFSGLIWCYDCHLRMAGSSAGRMHADGSRFRFGMYKCNNHYLDSRCTNNHVVNENKLEKWLIDNFLIKLNEYVVSIETLEEKSGNENLQKRISYYKSKMTRLNDLYIDGRISREKYEADYDEAQSKLNALNEDASVSINPDNIKKYKQLIESSTVIDIYNKLDPENKLAFWGEYIDHIEQDPDNPCDNWIVFFK

SEQ ID NO: 10909 - protein, 466 aa, Unknown
  Description of Unknown: Integrase B10910 sequence
  IPR038109,PS00397,IPR006119,PS51737,PF00239, cd03768,G3DSA:3.40.50.1390,PTHR30461,IPR025827,SM00857, G3DSA:1.10.10.2600,SSF53041,IPR011109,PF07508,PS51736, IPR006118,PF13408,Coil,IPR036162,PTHR30461:SF3
MKRAALYIRVSTQEQAQEGYSIGEQKERLIAYCKAHDWLIADVYVDGGYSGSNLDRPGIKKLMDETDKFDVVLVYKLDRLSRSQRDTLYLIEEAFLPHDVDFVSMQESFDTATPFGKAMIGLLAVFAQLEREQIKERTRMGRIARAKSGLYRGGGNVPIGYDRTDGKLTINLYEAEQVRKIYDWYLAGLSIQRIRKLMAEAGYTTRYGNYSSWSTVRSILCNAVYTGRMDFGGITVEHAHEAIITKEQYQAARELQAKRHQHSSNFQTKNLLTGLLFCGHCGGRYYTKASSNRRYYSCYSRTKQMPTMIKDPNCKNKHWRKDNLEAIIDRKVREVLQSPELAAEIAASHQPKPVLSGKNADIEKRIKAIDKQIAKLMELYQLDDIPPNVLGESINKLYTEKTALEAAIVPDEKKTNHISFDLAQELIADAAQVWDFADKAQKRRILESLVSRIILDNDNVTIEWAF

SEQ ID NO: 10910 - protein, 466 aa, Unknown
  Description of Unknown: Integrase B10911 sequence
  cd00338,PF13408,IPR011109,IPR038109,PF07508, Coil,PS51736,G3DSA:3.40.50.1390,IPR006119,IPR036162, PTHR30461,IPR025827,PS51737,PF00239,SM00857, G3DSA:1.10.10.2600,SSF53041
MNVAAYLRMSTDKQDDSIETQLGILMEYASRENLNIVGVYSDEAVSGGKSIVSRSGFKKLLSEQNTKGFTGILLVRLDRLSRNMLDFMQFEQEAAKHKLDIIYATEHYTNDASGWLLKHINALFAHHARTITGERTKEKCRQLAARGQWASGYPPLGFAYDKTTKILSIDQDRAEDVIQVFRTYIACSGNKSATAHKLNQLGVRTQRGGLWRDDGVGTILRNPIYRGRIRYADIDWATDKVPPIIPPDLLVRADILLQNTIGKRIKGTNSTHAYSGLLYCAQCGYSYKIADCRKGHEQYICRGRKEYGVCDAPKITDSWLDQLIPLGVKRALSRQIAILERYKVENDKLAEQDINVRRIANLRAVAKRKQEMYAVGIINDIDELKRELADIDGEIVELSKSDIKSEVFGHEELVYLATHINEYWEKVHPFELHKVLLIISPKIYIHHSPKRVVLDTTFSCGKIEVE

SEQ ID NO: 10911 - protein, 466 aa, Unknown
  Description of Unknown: Integrase B10912 sequence
  PF13408,IPR011109,IPR038109,PF07508,Coil, PS51736,G3DSA:3.40.50.1390,IPR006119,IPR036162,PTHR30461, PTHR30461:SF3,IPR025827,PS51737,PF00239,SM00857, cd03768,G3DSA:1.10.10.2600,SSF53041
MRVALYPRVSGHEQEDNYSIPEQIDRMKKYCASRDWMVYKIYTDSVQSGADMDRPGLQSLIKDCEAGKFDMVLVYKLDRLSRSQKDVLYLVEDVFEKHDVGFTSMTENFDTSSPFGKAVLGVLAVFAQLERDKITERTTMGKKARAAEGKWHGSKWIPIGYNYENGMLIPNEYEKMQILEIADLFLQRTPVRTIANMMTEKGYKHKYGEWDAKAIKRVLSNPVNLGLIKDGEHLHPGLHDAIIDQETYDAIQVIMNERKERYGATARPHKSLLAGFLYCKHCGGRYARQTNSDGRQYYSCYSRNKSQKKMIKDPNCKNKNYRSEELDLAILFELNKLALDPEYVDHVRANKPKNDVNEKIKSITSEIDKIDTQISKMMDLYALGTIDMDVISTKVAELNKTKSALQKELHSLDVPDEDEMSVEEVQSIAAMMADEKLTLPDKRNIIQSLIYYIEIDNDDVMIHWKF

SEQ ID NO: 10912 - protein, 466 aa, Unknown
  Description of Unknown: Integrase B10913 sequence
  PS00397,IPR038109,IPR006119,PS51737,PF00239, cd03768,G3DSA:3.40.50.1390,PTHR30461,IPR025827,SM00857, G3DSA:1.10.10.2600,SSF53041,IPR011109,PF07508,PS51736, IPR006118,PF13408,Coil,IPR036162,PTHR30461:SF3
MRAIIYIRVSTQEQARDGYSIGEQKDRLTKYCEAMNWTVVATYSDPGYSGANTDRPGLMDLIRDVEAGKTDKVVVYKLDRLSRSQKDTLYLIEDVLLKNGVDLVSMSENFDTGSAFGRATIGMLSVFAQLEREQIKERMQLGADARAKDGRYHGGPYAPIGYDYADGELVINPYEAMQVKKIWTYAEDGLPVYRISKLMDAAGYRHKYGTWTDSSIRSVLTTPVYAGRIVWKNETYPGRHEAIIEPDRFDAYDFKRRDTGKYKTVNVFNRTTLLGGLIFCGRCGARYYCKQNTKTRTGGPAQRYYTCYSRGKGSRRLVRDPNCKNKTYNVKTLDKMILDEIRKLSLDPDRIDSSAAAPDDNADIINDRLREIDNQVERLISLYQLDGLPIETLNERIKTLNIEKRTLEEELAAPPELTHEETRVILSTAGDVLDRAEPEELRTIVETLIEAIIIDGEDITIKWRFS

SEQ ID NO: 10913 - protein, 466 aa, Unknown
  Description of Unknown: Integrase B10914 sequence
  PS00397,IPR038109,IPR006119,PS51737,PF00239, cd03768,G3DSA:3.40.50.1390,PTHR30461,IPR025827,SM00857, G3DSA:1.10.10.2600,SSF53041,IPR011109,PF07508,PS51736, IPR006118,PF13408,Coil,IPR036162,PTHR30461:SF3
MKNKTIERVAGYVRVSSDKQAEEGYSIDEQIERLTAYCKAMDWRIVKIYTDAGYSGGNMNRPALTDLIEAAQSRLIDAVVVYKLDRLSRSQRDTLTIIEGFLDNGVDFVSMTENFDTSTPFGKATIGILSVFAQLEREQIKERCSLGRAGRAKEGKYRGGGYVPIGYDYANGSLTVNETEAAQIREIHRLYQQGESFRSIAMIFKERGYTHKYGSWEVYRIARLIKNPLYAGYVTYKGETFKGEHEPIISEECYQHTMSVYNGKDTLKSPHLGRSMLGGLLFCGRCGARYGISRNGGHNSRYQYYCCHSRRKISPHMVKDPNCKNKNWKKNELEKLVLDEIKKLQNEPLKVPDQSDQDDRTAYILAEIEKTDRQKSRLMDLYGAGLFEMDELEAKIRPLNDQKERLAAELERIQAEPTNKTATALVETFADALEQGDTEQVRILVRALIHKIVIDGEDIEIYWTFG

SEQ ID NO: 10914 - protein, 466 aa, Unknown
  Description of Unknown: Integrase B10915 sequence
  cd00338,IPR011109,PF07508,PS51736,IPR036162, PTHR30461,IPR006119,G3DSA:3.40.50.1390,PS51737,PF00239, SM00857,SSF53041
MSSTDKGPTRAALYCRMSVADMGDLEKVERQEEDCRAVCDRMGWIPVETFVDNNKSAWKRNRKRKRWDAMLEGIREGRFDAIVVYHGDRLIRQPHDLEKLLSLADGSGIRLASPTGTRDLDSPDDRFILRIEAAQACRESDNTSRRVRRAKEARRAEGIATRGGTRAFGRNDDGSIFEAEAEAIRDVFARLLSGETVTSLWSDWCTDGVPTVKGGRWLYGSFRQMLARPDLAGLVAYKGKPLGVAKNLKPIVERETWDGVQALLAKSGGEHPGQPRPRKHLLSGIAVCSGCGTGMYPSVTVSGVQRYRCLAPECPRPTSRNMLLLDEYVIAFVLRRLADGRLWARLERRREAVAVGSEDTARELAGLRARREKVVEEFADDDDMDPALLRKMLARLDQRIEAVQLRAGSQRAVSVLDGLRGLSREGWDELPLDRRRAVVRELCTVTVRPSAKGPRFDEKSVDVEDA

SEQ ID NO: 10915 - protein, 466 aa, Unknown
  Description of Unknown: Integrase B10916 sequence
  IPR038109,PS00397,IPR006119,PS51737, PF00239,cd03768,G3DSA:3.40.50.1390,PTHR30461, IPR025827,SM00857,G3DSA:1.10.10.2600,SSF53041,IPR011109 ,PF07508,PS51736,IPR006118,PF13408,Coil,IPR036162,PTHR30461:SF3
MTVALYIRVSTDEQAKDGFSIEHQKQRLAAFCESQGWNSYEFYIDDGYTGTNLNRPQLTRLIRHVRNRSVNIVLVHRLDRLSRKQKDVLYLLEDVFDSNDVAFRSATEPFDTSTPLGKAMLGILAVFAQLERDTIVERATSGKHERIRQGLWYGGPIPYGYDWSTEEQRLVVNPAQARIIQEMYEHALRGQPYTTIAKWASRRSRERLFGHHKTLLYMLTNPLYMGKLNQRGVHINGLHEAIVSEETWQAVQKEIRIRKNGRAIYGKYLLSGILVCGVCGSSMKHIRIQDRRFNPPKIRDYYLCSTKHSGHSCSSRYVPQQELEDRVINTLKDKSVDPDMVIQELSARREDINSVESTIDALNRQLDEVKVKLERWYAAIESGMDLGKVMPRIHELEDEQKAIMLQLDELDGADYEETNTRILDSLHQIGQQWDNMTNEERNAVLHAAVKTITVNSDGTLVFTWDA

SEQ ID NO: 10916 - protein, 466 aa, Unknown
  Description of Unknown: Integrase B10917 sequence
  IPR038109,PS00397,IPR006119,PS51737,PF00239,G3DSA:3.40.50.1390 ,PTHR30461,IPR025827,SM00857,G3DSA:1.10.10.2600, SSF53041,IPR011109,PF07508,PS51736,IPR006118, cd00338,PF13408,Coil,IPR036162,PTHR30461:SF3
MNKIIRVAIYIRVSTDEQAKHGYSIDSQTQRLKSYAKEKGYKIYKIYADEGKSARSNISARKELLNLLNDVRQHKVDRIIFWRLDRWFRNIQDYYKVQEILDKNNVDWECTDEEYNTTTSNGRLYLNIKLSIAQNESDQTGDRIRFNFENMIKNKKAIIGTRNCPIGYKVEGTPKDKHIVKNPDDEDFINDLFSKYIDTMSINATTKFLSEKYPNYHFVYRSIRNILTNPLFYGCYRDVENYCEPYLTKKEWDNIQNILKTKNQKCKTGKVRDYIFTGLLTCPECGRRLGANGSVRTRPNGETYTRANYRCPKHWTDGQCSNKRVLQENLIEEWLLNNYKQLLQEYIYQVDEIKEQIEKKDNSKKIKNLEEKVSRLNELYIDGLIDRKKYDEDRLRYTNEINNLKQTIEDVSNVDIENIKNIINDSTPLEIYKELSIANKRAFWNSFIDRIVFCGNRDYDFIVYLK

SEQ ID NO: 10917 - protein, 466 aa, Unknown
  Description of Unknown: Integrase B10918 sequence
  PS00397,IPR038109,IPR006119,PS51737,PF00239,G3DSA:3.40.50.1390 ,PTHR30461,IPR025827,SM00857,G3DSA:1.10.10.2600, SSF53041,IPR011109,PF07508,PS51736,IPR006118, cd00338,PF13408,Coil,IPR036162,PTHR30461:SF3
MIVAIYARVSTQEQALHGYSIDEQVNRMQKYCESMNWSVYRAYVDAGYTGSNMNRPELRHLIHDVQEKRVEKVLVYKLDRLSRSQKDTLYLIEDVFVANGCGFASMNENFDTGTPLGIAMIGILSVFAQLERSQITERMMLGKSARAKQGKFAGGNHIPIGYDYDPDTGYLKVNEYEAMQVKRIFKEFLSGKPIFTIAKDLNAEGYTHKFGTWSTRTIRNVLESRTYLGELKYQGAWNKSEHAPLITEEEHADALRILRRNKDSHNTASVHSYLGGLLFCSKCGARYSKITANLGKDGKRLCYYKCNSRAKRHPTMIKDPSCSNKIWRMEDLDNLIFEEIKKLALEPTKPTEPEENNNLVVLTTELQKVEKQIDRLIDLYALGSISRSTLDAKIASQNAQKAHLEQELDNLRKSLPKSKEAFKSQINGFSEMLEKGTPEQIRQIITALIRRIELNGDDVTIYWNFK

SEQ ID NO: 10918 - protein, 465 aa, Unknown
  Description of Unknown: Integrase B10919 sequence
  cd00338,PF13408,IPR011109,IPR038109,PF07508, PS51736,G3DSA:3.40.50.1390,PTHR30461,IPR036162,IPR006119, IPR025827,PS51737,PF00239,SM00857,G3DSA:1.10.10.2600, SSF53041
MSERAVLYLRQSVAREDSISLELQEHEGRAYAKRQGYEIVAVEADPGISGRTWNRPAVKRVMELIDSKQAEVIVLWKWSRLSRSRLDWAVAADRVQVAGGRIESATEPLDTTTSTGRLARGMLTEFAAFESERIGDGWKESHARRIRQGLPINGKPRFGYQYARGDWFTIAPLEGAVLAEAFRRYIAGESVYSLVQWMNHGPTRPVGGYGVKGDGLWSDRTLRRVMDSGFAAGFIRNGDELMPGAHEALIDPSEWDAYQEARQRRRVYRRVERSQYLFSGLVRCSCGSAMTAGQFGAQHTAKYRCVAAKEKRTHTGGYVMESTVEANVLAWLTDRELRLSAEIATASKTPRTVKKIESVDIDAKLAVVASRLDSLSERLIDSDIPHDSYVRLRDKYLAEQQALRQARLTVTVQAKVEPIRVIPVLLENWHLGKVEEKREILRALIDHVEVFPGHPRARIVVHPRE

SEQ ID NO: 10919 - protein, 465 aa, Unknown
  Description of Unknown: Integrase B10920 sequence
  PS00397,IPR038109,IPR006119,PS51737,PF00239,G3DSA:3.40.50.1390 ,PTHR30461,IPR025827,SM00857,G3DSA:1.10.10.2600, SSF53041,IPR011109,PS51736,IPR006118,cd00338, PF13408,Coil,IPR036162,PTHR30461:SF3
MAYDYIEEVAAYIRVSTQEQKLHGISLDAQVEKLTTYAQNNNMKIVEWYKDEGVSGRKLIKKRPELQRMIQDAEKRRFKRIIFIKLDRFFRSVAEYHECMKRIDPVVWTTTEEKYDLSTAQGRMLVNMKLTIAEMEADMAGERVNIVNEYKLSTGQPLTGSVPFCYKIAKGEDGRKRIVKDPEMEEITEDILAHFQMHQSIHKTVLYINAKYTLKIMYKTISNLLHNEMLCGEYKGNPNYIAEPYMDRDAFDRMQQMITRNDKVNTRNREYIFGGLVRCPKCGNIMRGTTHHNKRDNGKTYIYKMYRCSRWAVARTCSYNKVVNENTLEKLMLTNIERYFEDEKVKAEEIQDSDAFKIPKKNIEDIHDRIDRLNYSWQTGKIRKVEQYEKDYAELMKQLEQAEAEQAEVVVKDFSKIEAILHTGWRELYNALDDEHKRAFWRSFVDRIEVDWMGKEKEIKRVTFF

SEQ ID NO: 10920 - protein, 465 aa, Unknown
  Description of Unknown: Integrase B10921 sequence
  PS00397,IPR038109,IPR006119,PS51737,PF00239,G3DSA:3.40.50.1390 ,PTHR30461,IPR025827,SM00857,G3DSA:1.10.10.2600, SSF53041,IPR011109,PF07508,PS51736,IPR006118, cd00338,PF13408,IPR036162,PTHR30461:SF3
MKKVVIYIRVSTARQDQEGYSIPMQKERLISYCRAQGWVVSGMYIDPGHSGATLERPGMESLIQGVKAGKYDVVLVYKLDRLSRSQKDTLYLIEDIFMKNDVAFVSMQESFDTSTVFGLAMVGILSVFGQMERSTIVERTLLGRSGRAEDGLWHGGGTEPIAYKYIDGELVVDPVEAQQVRDVYSMYADGYSVTEISRRMEGRTTKHGDWSHTGTVGNVLDNPLYAGYIHFDGVLERGQHEAIVPEELNRKVKSRRKRLRHAEASGDSDYLLTGIVYCDCCNARYFPNKRPNKKVVYSCHSRAKKAKNMVKDPNCKAPHIPMSTLDTMVEEEVLRLIREPELVEDVIKKRAASDGSSDSSRSVEVERLDAEINKLMDLLQYDQLTSVGEIAERIDKAHAERMRIMPKSQADAPRYFDVSGFKTVLRDAAFSWEAANLRGRRSFLFQLIDGVYINAEGELRIEWSL

SEQ ID NO: 10921 - protein, 465 aa, Unknown
  Description of Unknown: Integrase B10922 sequence
  PF13408,IPR011109,IPR038109,PF07508,Coil, PS51736,G3DSA:3.40.50.1390,PTHR30461,IPR036162,IPR006119, PTHR30461:SF3,IPR025827,PS51737,PF00239,SM00857, cd03768,G3DSA:1.10.10.2600,SSF53041
MIALYTRVSTQEQAREGYSIDEQAARLNSYCDAMNWRDVKLYTDPGYSGGSTDRPALQQLIRDVEAGMVSRVVVYKLDRLSRSQLDTLYLIERVFLAHGCEFVSISESFDTGTPFGRAMIGILAVFAQLEREQIKERMTMGREARAKEGKYHGGSSAPTGYDYTDGELVVYPPEAMQVREVFRLYASGLSLRQIAQKFLAAGISHRHGIWSECTISKVLQNPVYIGRIVFSGQTYEGHHEPIIDRALFDAVHDRLSVRSEQARKKQAVSGRNHLLSGLIWCARCGARYGVHKTNYSIYYACYSAMKRNASMIRDPNCKNTYWRETELDALILDQIAKLSTNPSELKKTSSQPPTDERMAMLEASLADVRRQKDRLLDLYVTKTAFSATELQNRVDPLAEREKRLQGEIEALTAYRGMDTKKAAQIVATFADVIARDVYAEKRSLVESLIDRIELDGRSITIRWKF

SEQ ID NO: 10922 - protein, 465 aa, Unknown
  Description of Unknown: Integrase B10923 sequence
  cd00338,PF13408,IPR011109,IPR038109,PF07508, Coil,PS51736,IPR036162,IPR006119,PTHR30461, G3DSA:3.40.50.1390,PTHR30461:SF3,PS51737,IPR025827,PF00239, SM00857,G3DSA:1.10.10.2600,SSF53041
MKGNAGDTIVKKIDLSPELVRVALYIRVSGEEQKIKGLSLEAQQERLEAYARERGWVIVGIYIDAAKTARKNIHKRTDFQRMMDSVKRDEVDILLFCRLDRWFRSVADYYKIMEVLEAHNCDWKTTDEEYDTTTANGRLYINVKLSIAQNEADIDGERIDVVFDSKIAHGTVVSGSAPFGFRVNEEKRLEVVPEDAAIVQDAFNYFETSISQRATVRYIRETYGVNWCDATFRRMLKEKLYTGVYDRGGRFNDHFCPAIISKQQFDRVQALLERNARSVPSGKVYIFTSILTCAECGHKLVGYKSSDYYYYRCNQHFQRGRCSHNHSAREDVVEKWLFEHLAEELERCQLEWEVAAAKKKVSIARTDKAALKRKLTKLKELYVNDLIDIEDYKRDYQIYTAALKQIPEPSIEPPPDFAAVRRLLDNDFKTIYENLTREEKRTLWRSVIKEIRIDNDQNITGVVFG

SEQ ID NO: 10923 - protein, 465 aa, Unknown; identical to SEQ ID NO: 10471
  Description of Unknown: Integrase B10924 sequence
  cd00338,PF13408,IPR011109,IPR038109,PF07508, PS51736,G3DSA:3.40.50.1390,PTHR30461,IPR006119,IPR036162, PTHR30461:SF3,IPR025827,PS51737,PF00239,SM00857, G3DSA:1.10.10.2600,SSF53041

SEQ ID NO: 10924 - protein, 465 aa, Unknown
  Description of Unknown: Integrase B10925 sequence
  IPR038109,PS00397,IPR006119,PS51737,PF00239,G3DSA:3.40.50.1390 ,PTHR30461,IPR025827,SM00857,G3DSA:1.10.10.2600, SSF53041,IPR011109,PF07508,PS51736,IPR006118, cd00338,PF13408,Coil,IPR036162,PTHR30461:SF3
MVKYSISLPENYCKEDIRMKRTAIYARVSTDNQAKEGDSIPAQVTALKAYVDAHKDLRLVGEYIDEGISGRKFQQRDELQRLLDDVRAGKIDLIAFTKLDRWFRSVKHYSATQELLDKYHVDWIAIWESMLGTATPSGRLIVNQMVSIAQYEAENTGSRIRQVFEYKVQQGEVISGHVPRGYVIQNKHLSPGPEADTVVSLFEFFSRNGNLTQAANFFHEKTGAGLSNAAIKAILQNPKYIGEFRGNPNYCPPLISRELFEDVQRKLTNNIKNSAKYDYIFSGLIVCEECGRRFGSYRDKKSRKEGHVIYPAYRCKNHYTGLKTCSNTKVILEKTMEAYLLDNLPELAQKCKIEYSQKQKPAQDIEKQKQAILRRMNRLKELYLNELISLDEYKNDREQYSKQLEELDRAEAPKPRDFSALNKLTGMDLKTVYGTLSNAERRYLWRSVIQEIRIDRERNIAINFL

SEQ ID NO: 10925 - protein, 464 aa, Unknown
  Description of Unknown: Integrase B10926 sequence
  PS00397,IPR038109,IPR006119,PS51737,PF00239, cd03768,G3DSA:3.40.50.1390,PTHR30461,IPR025827,SM00857, G3DSA:1.10.10.2600,SSF53041,IPR011109,PF07508,PS51736, IPR006118,PF13408,IPR036162,PTHR30461:SF3
MKRVAIYVRVSTSKQDEGYSIPLQKERLIAYCKAKGWVVAGLFVDPGHSGSTMDRPGLVNLMDGIAAGKYDVILVYKLDRLSRSQKDTLYLIEDVFMANGVDFVSMQESFDTTTIYGRAMVGILSVFAQMERETIAERTLMGRAGRAEEGLWHGGGTDPIGYDYVDGELVVNAAEAEQVRMVYGFFADGFSVTEISRRMDGYRTKHGDWSHTSTVGNVLDNPLYAGTVHFDGVLSRGRHTAIVPEDVDRRVKARRARQKRAEASGDSAYLLTGLIYCASCGARYFPHKRPNGRVVYSCHSRAKKNKKMIKDPSCMAPHIPVEELDAMVEAKVLHLASDPTQVDEIVKKRAAMAGSSVAGPKSGEFERLTEEINRLMDLLQHDALASVSEVADRIGQAHAERMKVAPEVRVDVPKQYDVNGLRSVLRDVAFGWNDADIRGRRVLLFQLVDSIHINGGDVRIEWSL

SEQ ID NO: 10926 - protein, 464 aa, Unknown
  Description of Unknown: Integrase B10927 sequence
  cd00338,PF13408,IPR011109,IPR038109,PS51736, G3DSA:3.40.50.1390,IPR006119,IPR036162,PTHR30461,PTHR30461:SF3, PS51737,IPR025827,PF00239,SM00857,G3DSA:1.10.10.2600, SSF53041
MNSTYFRPQPELFGLRVVKYIRCSHDGQVLHGDTLEAQDALLDEFIAVNRMVLVDTFIDEALTARKKFTRRKEFVRLLDGVRSRSFDMILFTKLDRWFRNIGDYHKIQEILEANGVQWKAITESYDTTTTNGRLHINIRLSVAQDECDRDSDRIKDVFAYKLKNKTYLSGSLPRGLKLDDEKHVIIDPEWKQFALDMFDHFEQTNSKRGTLLYLKEKYGIYLCYDTISRNLRNSLYKGMYRDDPDFCEPLIEPERFDRIQVLGKRNVRQRYSNRTYIFTGLLICSSCNHYLVGQTTHRTLSDGTEKHYPSYRCNQRYQSHSCDRNHSYREDYVEEYLLQHIRPALSEYVAEYEVTGTNPARKNPAAEAAKIRTKMQKLYELYMDDLIDRDTYKRDYSAFQEKLKELDSIVVAPSRDLADLRKLLEQDYEEIYRTFSPQEKNAFWKSFVQSITVHEDGEMDIVFL

SEQ ID NO: 10927 - protein, 464 aa, Unknown
  Description of Unknown: Integrase B10928 sequence
  cd00338,PF13408,IPR011109,IPR038109,PS51736, G3DSA:3.40.50.1390,IPR036162,IPR006119,PTHR30461,PTHR30461:SF3, IPR025827,PS51737,PF00239,SM00857,G3DSA:1.10.10.2600, SSF53041
MNSTYFRPQPELFGLRVVKYIRCSHDGQVLHGDTLEAQDALLDEFIKVNRMVLIDTFIDEALTARKKFTRRKEFVRLLDGVRAHNFDMILFTKLDRWFRNIGDYHKIQEILEANGVQWKAITESYDTTTTNGRLHINIRLSVAQDECDRDSDRIKDVFAYKLKNKTYLSGSLPRGLKLDDEKHVIIDPEWKQFALDMFDHFEQTNSKRGTLLYLKEKYGIYLCYDTISRNLRNSLYKGMYRDDPDFCEPLIEPERFDRIQVLGKRNVRQRYSNRTYIFTGLLICSSCNHYLVGQTTHRTLSDGTEKHYPSYRCNQRYQSHSCDRNRSYREDYVEEYLLQHIRPALSEYVAEYEVTGTNPARKNPAAEAAKIRTKMQKLYELYMDDLIDRDTYKRDYSAFQEKLKELDSIVVAPSRDLADLKKLLEQDYEEIYRTFSPQEKNAFWKSFVQSITVHEDGEMDIVFL

SEQ ID NO: 10928 - protein, 464 aa, Unknown
  Description of Unknown: Integrase B10929 sequence
  cd00338,IPR011109,IPR038109,PS51736,G3DSA:3.40.50.1390, IPR006119,IPR036162,PTHR30461,PS51737,PF00239, SM00857,G3DSA:1.10.10.2600,SSF53041
LYARVSSDPSGYGVSVSKQDAENREVCARMGWTIVASFCDNDASASRYATKGRPEFEQMRAALGPGRVLVARESSRFQRDLAVYVQLRDLCADRGAKLCYGGRIYDLTRGDDRFATGLDALLAEREADIIQERNLKGAQATLRAGRQHGRVPYGYSLVFNNATGLHDRVLDEKRAPILQDAARRVLAGESLRSIEADLIARGVWKARGQLRKRLLNPTYAGFRTSRGEIVKQGKWPPIFTPEEFQELSALLRSDQHTVSHRGTEPKHLLTGIAVCGVCGEAVIRGKNGSTASAKRRFEPYEIYCCPKRHVGRLIQRVNTFVEEFIIFELSQPGALEKLEQTEEVEEDPGGETAAELEKRLDGFAAEAAAGRISPQMIGKIEADLRAQIAEAELREAGRKRVVSPVLRGVAGPNAREEWEALTVPEKREGIRNFAVVTINPVRSRWGGVGVTVRPIRAGRIDRAV

SEQ ID NO: 10929 - protein, 463 aa, Unknown
  Description of Unknown: Integrase B10930 sequence
  IPR011109,IPR038109,PF07508,Coil, PS00397,PS51736,IPR036162,IPR006119, PTHR30461,G3DSA:3.40.50.1390,PS51737,PF00239, SM00857,cd03768,G3DSA:1.10.10.2600,IPR006118,SSF53041
MKKVAIYVRVSTQEQAENGNSLEFQIEKLKAYCQLHEFKIVGEYVDAGVSGATSERPALNKLKSNIDNIDIVLIYKLDRLSRSIKDTMFLIEDLFKPNNVNLISLSENFDTSQAMGMATIGMLSTFAQLERETIKERMLAGKKQAVKSGKNLNKTPFGYVKKDGKLFKDESTKESVEFIFEKMQQGKSLNDVVNLLEVHGYGNVRNWSFPIVNRLVRNKVYCGHTETMGILVENTHEPYITDEQQQFIIELLRERKNHSSKSNRNKLPALFRGLISCPCCHRKLSPAVKKLASGNSSIYYKCTYCPIEKRVYFSISEKKLEKKLLHFLKFDFNIKIEKSEIERKDYSKLLDNLESKKFKLQKAWLNELLTDEELQKLQNELNAQIKIIEEEQKQYNFMLENEKKQNGISKIVSSFEDIYKKMNVDEKIEFLNTIIKTVETDVKIEKRKVLNKSEINIVNVIFK

SEQ ID NO: 10930 - protein, 463 aa, Unknown
  Description of Unknown: Integrase B10931 sequence
  cd00338,IPR011109,IPR038109,PF07508,Coil, PS51736,G3DSA:3.40.50.1390,IPR006119,IPR036162,PTHR30461, PTHR30461:SF3,PS51737,PF00239,SM00857,G3DSA:1.10.10.2600, SSF53041
MQVESDSPAIHLSRAMDYCRDRGHEVNEIHQLDGVSGCAIWDLPVAQKMRFNIETGKSQGLVFTALDRLGRDTLELLQFERFFRDHGACLISIFDNIDTSTSDGMRYFQGLAAQAEYERRKLSERVTRGILTRQKRGEIFAHKAPFGYVKEQKRLYLHPVEAPIVELIFELFLQSQSTARVAKELNLRGYRTSAGKEFSYMSVSSVLRNPTMKGDHYVNRYLGRHNKKPREQWVKIEVPAIVSEEVWAKANAILKRNHKPHKKAVNAYSGLLRCHCGTVMYFRGRYGGKNKPQYFCRTCANKIQAPDLDQAIASVINSFALDQLPKEATFEISTEFEQKKRLLAGLTASVQKLEREKDKLIELFTAEALTMEEFKAKKEPLAQRLAEVDKERAALEYELNDLRGQQLAERGLKQALKSLPWNEIREQRKNEVLHTFVREITLNQDTIELQLLYVPANLKEKNV

SEQ ID NO: 10931 - protein, 463 aa, Unknown
  Description of Unknown: Integrase B10932 sequence
  PF13408,IPR011109,IPR038109,PF07508,Coil, PS51736,IPR036162,IPR006119,PTHR30461,G3DSA:3.40.50.1390, PTHR30461:SF3,IPR025827,PS51737,PF00239,SM00857, cd03768,G3DSA:1.10.10.2600,SSF53041
MEQATDGYSIGEQKDKLLHYASAQGYAVVDTYSDEGFSGKDLLRPNMERMLNDIQHGKINTVLVYKLDRLSRHVKDVLELVETFDKCNVTLYSLSENFDLASPFGRAALKMMATFAELERETIVERMEMGKIARAKDGKYTCPGTRCPFGYRHDKKNDRLLIEESEAEIIRKIFDLYVNHGYTFRKLYDYCREAYPDVKYFNNQMCCKPIIERPLYAGYFRYRGGELTKGTNFEAIISYELFLQAQAQVDRNRTKRLSDSSPYLLTGLLICGRCGNRYVGKMYERYTKKPDGTHTKHYRYRDYGCAARLKRDKNYHPAKCDNDIYRAEELEKIVEDYVLNLNIDDYNKADFSPGLIDKMMSEIGAIKRSQSKLLDLYLSGDIDKDTFLIRKIEYDSKIAELQNLIEKETESVQSAPTNAEAIKKSIAEYSMLNRRQKRTLLEYLIKNIIVDGSRITVNLRLKK

SEQ ID NO: 10932 - protein, 463 aa, Unknown; identical to SEQ ID NO: 9603
  Description of Unknown: Integrase B10933 sequence
  cd00338,PF13408,IPR011109,IPR038109,PF07508, PS51736,G3DSA:3.40.50.1390,IPR006119,IPR036162,PTHR30461, PTHR30461:SF3,IPR025827,PS51737,PF00239,SM00857, G3DSA:1.10.10.2600,SSF53041

SEQ ID NO: 10933 - protein, 463 aa, Unknown
  Description of Unknown: Integrase B10934 sequence
  IPR038109,PS00397,IPR006119,PS51737,PF00239, cd03768,G3DSA:3.40.50.1390,PTHR30461,IPR025827,SM00857, G3DSA:1.10.10.2600,SSF53041,IPR011109,PF07508,PS51736, IPR006118,PF13408,Coil,IPR036162,PTHR30461:SF3
MQRVAIYARVSTQEQAENGNSLEFQIDKLKAYCQLHEYKIVGEYVDAGVSGAKSERPALNKLKKDIDKIDIVLIYKLDRLSRSIKDTMYLIEDLFKPNNVNLISLSENFDTSQAMGMATIGMLSTFAQLERETIKERMMAGKIQAVKNGKNINKTPFGYIKKDGQLIKDERTKDCVDFIFKKMLEGKSLHETVKLLEMSEYNNLRKWSFVFINRMTKNKVYCGHTESLGEIIKNTHDNYINDKEYKYINELLLERKTHSSKSQRNKLPAIFRGLISCPNCNRKLTPFTRKRKNGDKTMYYRCNNCASEGKKTISITEKVFEKKLLNFLKYDFKIEFKKTKIEKKDYSKILNNLENKKFKLQKAWLNELLTDRELEKLQNEVNEQIKSIKAEEQEYNLMVEDSEKQSNITGIVSNFESLYLTMNVDEKIEFLNTIIKNIVTEETVKKVNIYDKHTINIVDIIFR

SEQ ID NO: 10934 - protein, 463 aa, Unknown
  Description of Unknown: Integrase B10935 sequence
  IPR011109,IPR038109,PF07508,PS51736,G3DSA:3.40.50.1390, IPR006119,PTHR30461,IPR036162,PTHR30461:SF3,PS51737, PF00239,SM00857,cd03768,G3DSA:1.10.10.2600,SSF53041
MSDIASTKARKRCAVYCRVSSDERLDQEFNSIDAQKEAGHAYVASQRSEGWIPVADDYDDPGFSGGNTDRPGLKRLMADIERGQIDIVVVYKIDRLTRSLADFSKMVEVFERHGVSFVSVTQQFNTTTSMGRLMLNVLLSFAQFEREVTGERIRDKIAAAKRKGMWMGGVPPLGYDVDNRLLVINEAEAAVVRRIFEEMLTIGSPTQIAVNLTADGITTKAWTTQEGQTRKGTRIDKKYLHKLLRNRIYLGELSHKGNWYPGAHPPIIDQELWDKVHTVLARDGHARSVETKIRSRTDALLRGLLYAPSGERMYPTYSRKNGRKYHYYVSKSESRFGAPGKSYERLPAPEIEAAVVAQIRTVLTSPESIASVVRHIQQNQKTKGGQIDEATTVMAMGRLNDVWDQLFPVERHRIANLMIERIDLVHVGEVQGIKVKWRELGWDALIGEFARRGIGAELVEVEA

SEQ ID NO: 10935 - protein, 463 aa, Unknown
  Description of Unknown: Integrase B10936 sequence
  PF13408,IPR011109,IPR038109,PF07508, Coil,PS51736,G3DSA:3.40.50.1390,PTHR30461, IPR006119,IPR036162,IPR025827,PS51737, PF00239,SM00857,cd03768,G3DSA:1.10.10.2600,SSF53041
MKTALGYIRVSRDREGDKLSPGLQRQRITDYCSAKGWRLVKVHEDINVPGGSFDRPGWSSLMAEVEPGDIIVCNEFTRIGRHLRETLASIEDLRDRGVEIVSLEGEFDTTTAAGKLQYQILLVLAEFERNRMSERLRQAHDQIAHEGLWKGGGIPPLGYSYTPGTGRLEVESEEADTVRLIYDLRDKGWSIRAIVRHLADQGTPGKKGRMNYTSVRSTLRNPAYVSKRFYQGALLPMNHEPIIPAEQWERVQARNRSSDQKARKYLLSGFLVCGDCGARMVHQSQGPGRRQYYACKRYAEFGTGRRLTVEEHVADQWVIEKFFAHIDPVKLEAAEKKIQGRQPKKFVKVEKLEARLQRSEAALDRLVTDYYDSDTPPIPPEQFRNQITELVRRRDTLVGELQKFKDARLLETPPPIGLVETWPLMTLDERRESLRLFIEKITVMPVRSGKRIDPARLKIKWRF

SEQ ID NO: 10936 - protein, 463 aa, Unknown
  Description of Unknown: Integrase B10937 sequence
  IPR038109,IPR006119,PS51737,PF00239,cd03768,G3DSA:3.40.50.1390, PTHR30461,IPR025827,SM00857,G3DSA:1.10.10.2600, IPR013809,SSF53041,IPR011109,PF07508,PS51736, PF13408,Coil,PS50942,IPR036162,PTHR30461:SF3
MEEGYSIEEQKAKLESYCDIKDWHVYKIYTDGGFSGSTTERPALEQLIKDAQSKLFDTVLVYKLDRLSRSQKDTLYLIEDIFLKNNIEFVSLLENFDTSTPFGRAVIGLLSVFAQLEREQIKERMQLGKLGRAKSGKSMMWAKTSYGYDYDKETGSMTVNEYEALVVKEIYSSYLAGMSITKLRDKINDEYPKKPAWSYRTIRGILANPVYCGLNQFKGQTFQGTHKAIISLEDFEQTQRELAKRQQTAKELLNPRPFQAKYMLSGMAQCGYCHAPLKVILGQKRKDGTRTKRYECYQRHPRSTRGVTVYNDNQKCDSGYYYMDILEHYVLTRIAMLQNDPDKIQELFSDDTSPVIDKQAIQKQIDSLTLKLSKLNDLYLDDRITLDELRTKSADFIKQRNALEEEIKKASNDKQAGQREKIEKLLDASSVLDMSYDNQKVIVRELIDKVQVTSDKIVINWKI

SEQ ID NO: 10937 - protein, 463 aa, Unknown; identical to SEQ ID NO: 10533
  Description of Unknown: Integrase B10938 sequence
  cd00338,PF13408,IPR011109,IPR038109,PF07508, PS51736,G3DSA:3.40.50.1390,PTHR30461,IPR006119,IPR036162, PTHR30461:SF3,PS51737,IPR025827,PF00239,SM00857, G3DSA:1.10.10.2600,SSF53041

SEQ ID NO: 10938 - protein, 463 aa, Unknown
  Description of Unknown: Integrase B10939 sequence
  IPR038109,PS00397,IPR006119,PS51737,PF00239,G3DSA:3.40.50.1390 ,PTHR30461,IPR025827,SM00857,G3DSA:1.10.10.2600, SSF53041,IPR011109,PS51736,IPR006118,cd00338, PF13408,Coil,IPR036162,PTHR30461:SF3
MRRKTTAPVEKILLRVAIYIRVSTDKQVKDGDSMRDQLATGQKYIDSHENMILVDTYIDDGISGQKLKRDDFQRLIDDVRAGRIDLIIFTRLDRWFRNLRHYLNTQDILDKHGVSWTAIEQPYFDTSTPHGRAFVNNSMIWAELEAQNDSDRILGVFDDKVDNGEVLSGSTPLGYKIVNKHLVPDDDAPTAVAIFQYYRKTGNLSMTLRYMESEFGLVRSAASLKNMLTNTKYIGEFRDNKNYCPAIIDRDLFFDVQRLLKINIKSGKKHDYIFSGLVVCDDCDHIMSGCQQRAGGRVRSDGTRIVYKYSVYRCRQGVNLHRCPNRKLVFETTLEKMLLERIRPELENYIAEYEVANLPALRTDAKRRSVEGKMQKLKDLYLNDLITMDEFKLDREKLLMQLEKINAEDSRPVKDLSYLKNFLKMDFESVYDSLSIPERRELWRSIVKEIRVDHDKNIHIIFL

SEQ ID NO: 10939 - protein, 463 aa, Unknown
  Description of Unknown: Integrase B10940 sequence
  IPR038109,PS00397,IPR006119,PS51737,PF00239,G3DSA:3.40.50.1390 ,PTHR30461,IPR025827,SM00857,G3DSA:1.10.10.2600, SSF53041,IPR011109,PS51736,IPR006118,cd00338, PF13408,Coil,IPR036162,PTHR30461:SF3
MRRKTTAPVEKILLRVAIYIRVSTDKQVKDGDSMRDQLATGQKYIDSHENMILVDTYIDDGISGQKLKRDDFQRLIDDVRAGRIGLIIFTRLDRWFRNLRHYLNTQDILDKHGVSWTAIEQPYFDTSTPHGRAFVNNSMIWAELEAQNDSDRILGVFDDKVDNGEVLSGSTPLGYTIVNKHLVPDDDAPTAVAIFQYYRKTGNLSMTLRYMESEFGLVRSAASLKNMLTNTKYIGEFRDNKNYCPAIIDRDLFFDVQRLLKINIKSGKKHDYIFSGLVVCDDCDHIMSGCQQRAGGRVRSDGTRIVYKYSVYRCRQGVNLHRCPNRKLVFETTLEKMLLERIRPELENYIAEYEVANLPALRTDAKRRSVEGKMQKLKDLYLNDLITMDEFKLDREKLLMQLEKINAEDSRPVKDLSYLKNFLKMDFESVYDSLSIPERRELWRSIVKEIRVDHDKNIHIIFL

SEQ ID NO: 10940 - protein, 463 aa, Unknown
  Description of Unknown: Integrase B10941 sequence
  IPR038109,PS00397,IPR006119,PS51737,PF00239,G3DSA:3.40.50.1390 ,PTHR30461,IPR025827,SM00857,G3DSA:1.10.10.2600, SSF53041,IPR011109,PF07508,PS51736,IPR006118, cd00338,PF13408,Coil,IPR036162,PTHR30461:SF3
MVNVALYIRVSTMEQATEGYSIGEQKERLTRYSEAMGWQIYDTYTDPGFSGGSMDRPGLQRLIRDVKAHKVDKVLVYKLDRLSRSQLDTLYLIEKVFLVNNVDFVSMNENFSADTPFGRAALGIMATFAQFEREQIRERLMMGKQARAKTGKFSGGNNIPYGYDYIDHELVPNEKEAEIVRDIFRRYLSGGSVTKIVKDYEKAGIRSRGGKFHDSTIRNVLANRNSVGEVRFQGEWIQGTHPAIVDKDIFEAVQHIMAKKRKEALLHNSRIGKANSYLSGLLFCSRCGARFSKKTYMRTCKGVPYNYARYGCNNRVRDKRRRVCECDNKIWTMTELDDLIFGEIKKLKLDPDAQPAEQAPVKDIYASEIEDIDRRIQRLMDLYESGTIDMQEISERIKNLNSRRQLLETEQETTKDVKVAQRAVQSFSEVLENGTLEQVRILLFDIIRRIDIDGEDVTIQWDF

SEQ ID NO: 10941 - protein, 463 aa, Unknown
  Description of Unknown: Integrase B10942 sequence
  IPR038109,PS00397,IPR006119,PS51737,PF00239,G3DSA:3.40.50.1390 ,PTHR30461,IPR025827,SM00857,G3DSA:1.10.10.2600, SSF53041,IPR011109,PF07508,PS51736,IPR006118, cd00338,PF13408,Coil,IPR036162,PTHR30461:SF3
LKTAVAYIRVSTEMQTEYSPDSQLKLIKDYATKNDMILSEVYSDEGISGRTAEKRPAFNRMISDAKQNKFNVIIIYHTSRFARNHEESIVYRNMLKRDGIDVISITQPSVDYKTDILMNALYAVMDERYSIELSENVKRGLKEKASKGIYFSRSPFGYCRPVKKQPLVEDEAESHLVKWIFNRFEDGLTTYEISRELNAKGYKTRTGLNFYKTGIIEILKNPVYKGFLLYNCDGETFFRKADHKPIIDEEQFDRVQEIIEARAKITPRYARESSACQHWLVGIMRCVVCGSTYVHVKHTRGVNRFRCGRFGMGACKNSRSLGVPDAENIVLNYLENLPIDSCNFVTSAKEAEPLKNKSQESTKQLEKALERAKQAYLRGIDSIDEYETNKENITAEISKLRQTQAIGNTPVIDKLEFMKRIVGLVELVHSDVDTKTKNKAMRRCISKISIDPETKKFTFYFFA

SEQ ID NO: 10942 - protein, 463 aa, Unknown
  Description of Unknown: Integrase B10943 sequence
  cd00338,PF13408,IPR011109,IPR038109,Coil, PS51736,G3DSA:3.40.50.1390,IPR006119,IPR036162,PTHR30461, PTHR30461:SF3,IPR025827,PS51737,PF00239,SM00857, G3DSA:1.10.10.2600,SSF53041
MYMTQSAPELYGVRVVKYIRCSHDDQVLHGDTLEAQNEILDDFIARNHCVLIDTFIDEALTARKKYTNRKEFVRLLDGVRRHDFDVILFTKLDRWFRNIGDYHKIQEVLEANGVQWKAVTESYDTTTTNGRLHINIRLSVAQDECDRDSDRIKDVFAFKLKNKSFVTGSVPRGLMLDAEKHVVPDPEWKQFALDAFDMLEVTGSVRKSLFALQERYSCIYSYSSFIRMLKNPLYKGMYRDDPQFCDPLIDPDRFDHIQTLIKKNVRQRRSGTQFIFSGLLTCDVCGRSIAGYTTGRRRKDGSITRKPRYRCTAWNMNHSCTNNKSWMEEVLEDRVLALVRPSLSAYIADYDVEDGGSRGRNPAADAARIRTKLKKLYDLFMDDLIDRDLYKSEYDQLNAQLQEALTAADHPRKDVSELKKFLSQPWEDVYRDFSVQEKNAFWKSFVDTIRIREDGSIADIIFL

SEQ ID NO: 10943 - protein, 463 aa, Unknown
  Description of Unknown: Integrase B10944 sequence
  cd00338,PF13408,IPR011109,PF07508,Coil, PS51736,G3DSA:3.40.50.1390,IPR006119,IPR036162,PTHR30461, PTHR30461:SF3,IPR025827,PS51737,PF00239,SM00857, SSF53041
VKAALYVRLSSYRGAADPSTSPERQEEIGRNYAAARGWNVSTVIRDLDVSGSSKGERLDRSGLRDVRNLFGQIDVLIVSKVDRLARDTLDFLAFAEECDRNGVALVSVAESLDMTTPGGKFTATILAAFAEMEAKTISERTAAGRAGTISAGRYPGGRVPYGYRTVPHASGAGRGLDVVPEEAAHIRSAAAHVIAGGTLYSAVQLIGAHGSVPRTAPTWTSASLRVVLMNTVLLGYQKEQGRDVLSSDGTPAVYWPPIIDTETHRQLVARLTPTKQRRRARADYLLSGVLTCANCGHVLYATNRSRYATYRCPTETGCVGRVEIQCGLAESEVVGDFLARYGYEEVYYTITETAPEHSHRLAAVESGLRATADELTRPGADMAGLLERLNALRDERELLAAKGPTIVNRRVSAGMTVADLFAELGETPGSVRECRERIAEHLVSAVVSGRAASGNRRIVTVWR

SEQ ID NO: 10944 - protein, 463 aa, Unknown; identical to SEQ ID NO: 10115
  Description of Unknown: Integrase B10945 sequence
  cd00338,PF13408,IPR011109,IPR038109,Coil, PS51736,G3DSA:3.40.50.1390,PTHR30461,IPR006119,IPR036162, PTHR30461:SF3,IPR025827,PS51737,PF00239,SM00857, G3DSA:1.10.10.2600,SSF53041

SEQ ID NO: 10945 - protein, 463 aa, Unknown
  Description of Unknown: Integrase B10946 sequence
  cd00338,IPR011109,PS00397,PF07508,Coil, IPR038109,PS51736,G3DSA:3.40.50.1390,IPR036162,IPR006119, PTHR30461,PTHR30461:SF3,PS51737,PF00239,SM00857, G3DSA:1.10.10.2600,IPR006118,SSF53041
MRVAIYVRVSTDEQAKEGFSIPAQRERLRAFCESQGWEIVQEYIEEGWSAKDLNRPQMQRLLKDIKKGNIDIVLVYRLDRLTRSVLDLYLLLQTFEKYNVAFRSATEVYDTSTAMGRLFITLVAALAQWERENLAERVKFGIEQMIDEGKKPGGHSPYGYKFDKDFHCTIIAEEADIVRMIYRMYCDGYGYRSIADRLNELGVKPRIAKEWNHNSVRDILTNDIYIGTYRWGNKVVLNNHPPIISESLFRKAQKEREKRKVDRTRVGKFLLTGLLYCGNCDGYKMQGSFDKREQKTYYRCLKCNRITNEKNILEPLLDEIQLLITSKEYFMSKFTDQYDHQEMIDVSALTKELEKIKRQKEKWYDLYIDENNPIPKEELFSKINELNKKEEEIYSQLNEIEPEDNEPIEEKYNRLSRMLDFKKQFEQANFFTKKELLLSIFEKVVIYREKGKFKKITLDYTLK

SEQ ID NO: 10946 - protein, 463 aa, Unknown
  Description of Unknown: Integrase B10947 sequence
  cd00338,PF13408,IPR011109,IPR038109,PF07508, Coil,G3DSA:3.40.50.1390,IPR006119,PTHR30461,IPR036162, IPR025827,PS51737,PF00239,SM00857,G3DSA:1.10.10.2600, SSF53041
MQDRVPARLRAVGVIRVSEVGKRDRESESFITAREQREQFTSWCARHAADLVEVVNEIDVSGKLELAKRRGLLRALELIEGGIANVLLFAYFDRSFRNLDVQNSVLARIIEAGGATYACDFGEIRFGTPAERFATTVQGAANQLTSDQAAYKAMNAKRDAVARGVPPFSRLCLGYVRGPDGHVAVDPTLAPLVTKMFNMRADGATLKECQQFLADNGVVRSYSSVKATLASKMVLGELHAGKHVTPNLESHTAIVDRVTWQRVQRAKVPRGRVPLPDGRLLGRMGLLRCGGCGRAMSSGGSRSGGKTYRTYVCGMRADCPRPVSINATLVERLVADECRRYIAGRTQSASLDSKVREAEDRVAHAEAALDGAIGLLAGIERPSARTRLLELQHDLAEAIDALNVVQRQAGPLELVRGDVDWDRLSLDERRGLIRAIFRSITVHPTQAGIPRDASALTFEPFVE

SEQ ID NO: 10947 - protein, 463 aa, Unknown
  Description of Unknown: Integrase B10948 sequence
  cd00338,PF13408,IPR011109,Coil,PS51736, G3DSA:3.40.50.1390,IPR006119,IPR036162,PTHR30461,PTHR30461:SF3, IPR025827,PS51737,PF00239,SM00857,SSF53041
MYMTQSAPELYGVRVVKYIRCSHDDQVLHGDTLEAQNEILDDFIARNHCVLIDTFIDEALTARKKYTNRKEFVRLLDGVRRHDFDVILFTKLDRWFRNIGDYHKIQEVLEANGVQWKAVTESYDTTTTNGRLHINIRLSVAQDECDRDSDRIKDVFAFKLKNKSFVTGSVPRGLMLDAEKHVVPDPEWKQFALDAFDMLEVTGSVRKSLFALQERYSCIYSYSSFIRMLKNPLYKGMYRDDPQFCDPLIGPDRFDHIQTLIKKNVRQRRSGTQFIFSGLLTCDVCGRSIAGYTTGRRRKDGSITRKPRYRCAAWNMNHSCTNNKSWMEEVLEDRVLALVRPSLSAYIADYDVEDGDGHGRNPAADAARIRTKLKKLYDLFMDDLIDRDLYKSEYDQLNAQLQEALTAADHPRKDVSELKKFLSQPWEDVYRDFSVQEKNAFWKSFVDTIRIREDGSIADIIFL

SEQ ID NO: 10948 - protein, 463 aa, Unknown
  Description of Unknown: Integrase B10949 sequence
  PF13408,IPR011109,IPR038109,PF07508, PS51736,G3DSA:3.40.50.1390,PTHR30461,IPR006119, IPR036162,IPR025827,PS51737,PF00239, SM00857,cd03768,G3DSA:1.10.10.2600,SSF53041
MACRSFAEARGYEVVLVSDVDVDVSGGRLARPGLDEVRARWDEFDVLIFFKLDRLSRSLLDFISILEEARGHNVALVSATEPLDMTSPIGEAMVKVLAIFAELERKTIAFRVTGAIAHLRSSGRIAGGPIPYGMRKAPNPAGAGYVLAIDEEKAVYALEMVDRVLAGESYRSICRLMNERGIPTPRGRGDTWRPNTVKAILKNPALWGAIVHQGQIVRGEDGMPILSAAIVSRDTWDSVQTEVERRGKPSERNGSLRQGLLSGLLVCDHCGTRLGMNRGGPKTRERVYTCPTKGHGGKCVGVAITAARVEEYVTARFLEKYGTWSMPLPVFFEEEAEVRTEPEELRAVETAMADLEADRYERGLFGGENGAHRFAEMYQRLELRRDVLLTEVRATPDGDNFEILSTTMGEYWGTAGPEDRRLMEDRRLLLRGLVGSIRVKKGQPGRKGLDPARVIFEKGLAGS

SEQ ID NO: 10949 - protein, 462 aa, Unknown
  Description of Unknown: Integrase B10950 sequence
  cd00338,PF13408,IPR011109,PF07508,PS51736, IPR036162,IPR006119,G3DSA:3.40.50.1390,PTHR30461,IPR025827, PS51737,PF00239,SM00857,SSF53041
LLLDVRTVIYARLSRRSDVNALNLDDQIVRCREYATRQGWTVVAERSDYGESAFERDAIEDRPGFGDVLTLVRDRQVDAVLAWRPDRLFRDPIEQALFFRECQRHGVATVATVAEGQRDPANPGDEMVGTIVAAVARYESNAKRARLLAKHRQLAEAGKVSGGGTRPFGFEDDRVTIRPDEADVIRWAAKEILAGTSLRTVCRMLTDRGVATVTGKPWTSTVLKGTLTRARIAGLREHRGTVTRAVWPAIVTPDDLAQLRATLLDPARATRHGRGRVYLLTGGVAVCGHCGAPLVARPKSGGRPAYHCARGVNFTGCGKISRLAIPVEDEVAARLFAAIDDGTLADAEPEPAPELDGVTLADIEARLTDLSRDHYVLRVISRAEFLAARDPLAAEADRLRARLSTPRGPRHPLHGLREVWPVLSMGERRQVVAEVIDRVVLLPALKGRNRFDPSRIEVVWRV

SEQ ID NO: 10950 - protein, 462 aa, Unknown
  Description of Unknown: Integrase B10951 sequence
  IPR011109,PS00397,IPR038109,PF07508, Coil,PS51736,IPR036162,IPR006119, G3DSA:3.40.50.1390,PTHR30461,PTHR30461:SF3,PS51737, PF00239,SM00857,cd03768,G3DSA:1.10.10.2600,IPR006118,SSF53041
MTVGIYIRVSTEEQAREGFSISAQREKLKAYCISQDWQDYKFYVDEGKSAKDTNRPYLKLMLDHIQQGLINVVLVYRLDRLTRSVKDLYKLLDLFDKNNCIFRSATEVYDTGSATGRLFITLVAAMAQWERENLGERVTMGQVEKARQGQYSAPAPFGFKKQDETLVKDKKQGYILMDMIDKVKKGWSIRQIAKYLDQSYLPIRGYKWHIATILSILHNPALYGALRWKDELNETSHEGYLTKEEFEELQNILYSRQNFRKRQIESAHIFQMKLVCPQCGNRLGCERSVYFRKKDQKNVESLHYRCQSCALNERPSISVSEKKLEKALLLFMKNVKFDLEPVVKEEKNETTEIQNAIVKIERQREKFQKAWASDLMTDEEFTARMSETRKAHENFTKRLSEIQRATPLPIDIKKAKKLVNEFKINWAYLNTEEKREFVQSFIEKIEFTKKDQNPHILNVSFY

SEQ ID NO: 10951 - protein, 462 aa, Unknown
  Description of Unknown: Integrase B10952 sequence
  cd00338,PF13408,IPR011109,IPR038109,PF07508, Coil,PS51736,G3DSA:3.40.50.1390,IPR036162,IPR006119, PTHR30461,PTHR30461:SF3,IPR025827,PS51737,PF00239, SM00857,G3DSA:1.10.10.2600,SSF53041
MARKKKVSPGNRLVAYYRYSGGSQQTEQSIEGQRRDCEAYARQHGLTIVHEYIDRHISGRGVESRLAFQQMIADSSKHLFDLVICWKTDRFARNRYDSAVYKKKLRDNGVRILYAAESSVEGPEGIILEGLMESLAEYYSAELAQKMRRGMRESALKGRAINPSRPLGLTTDEHKRFIIDEKNAPTIRFIFEHYAAGESSASIVDQLNAAGLRTSKGNSFNKCSIPRIIQNEAYHGVYICKAYDVRIDGAIPAIIDDDLWKRAQKMLTLNKQHRAPHSSHADYLLSGKLFCGCCHSLMRGISGHNCRNDVYYYYACGNKADGGTCKKKNIPKDVAENLVVNAICENILRPDTLEDLADAIAAAQQAEVNQPDPERAMLEQNLADVHRKINNIIESIENGTASSRLSARLADLEQQESTLNYQLESLKEVHPPVLDRERILFLLEQFLISPNERTEDYNRRII

SEQ ID NO: 10952 - protein, 462 aa, Unknown
  Description of Unknown: Integrase B10953 sequence
  PS00397,IPR038109,IPR006119,PS51737,PF00239, cd03768,G3DSA:3.40.50.1390,PTHR30461,IPR025827,SM00857, G3DSA:1.10.10.2600,SSF53041,IPR011109,PF07508,PS51736, IPR006118,PF13408,Coil,IPR036162,PTHR30461:SF3
MIACYARVSTTEQAVNGHSIDEQNDRMQKYCDAMGWKPCKLYTDGGYSGASMERPALQKLIKDVKAHKIERVLVYKLDRLSRSQRDTLTLIEDVFLQNNCEFVSMNENFDTATPFGRAMIGILAVFAQLEREQIKERMIMGKEARAKQGKYHGSDRLPIGYDYIDGELVINESEAAQIKQAFDWFVGGMSIPKIVKAFNAAGIEHRYGRWQESVLRHVLTRKTYIGYIYSKGTWYKGTHEPILDDETFNAAQAIIERTHAESIKYNRRYGKASSYLGSLIYCAECGNRFAKMTATRNGNKWVYYTCNTRRSKSLAKGRTCSNPSWKLDELESLVFGEIKKLQFEKVKPTTDKRPQTLSKSLSEVEQKISRLIDLYASGTLSRADLEGKIKALNEKREKLNNELDRLIKERQDQLTQDDIISYAKSFDDVLKRGNYDEIRAVLTALVDRIEIGRDGITIYWNF

SEQ ID NO: 10953 - protein, 462 aa, Unknown
  Description of Unknown: Integrase B10954 sequence
  PS00397,IPR038109,IPR006119,PS51737,PF00239, cd03768,G3DSA:3.40.50.1390,PTHR30461,IPR025827,SM00857, G3DSA:1.10.10.2600,SSF53041,IPR011109,PF07508,PS51736, IPR006118,PF13408,Coil,IPR036162,PTHR30461:SF3
METDLTALYVRVSTYAQAEEGYSVEAQKEKLIQWCKLKDHDNYRIYEDGGWSGSNIDRPALKQLISDCVNHVVTRVVVYKLDRLSRSQRDTLYLFEDVFIANDIEFVSLNESLDTSTPYGMTMVGILSAFAQLERQNIRMRTRMGMHERVKDGYWMGGARTPFGYDYDPAKNILVPNEHADEVREIYDLYLKGYSATKLSQLYHLSGDNHVTAILDRITYTGKISYNGEILQGRHEPIIDEVTWLRVQEERSKRSTKGIQTSQYLLTGFLVCGKCGAKMRYQKWSSGKTRICCYSQIPSSKASLIKDPNCDNAKCYAEDVEPVVLEDLFSITDLITVDMDNADKMNSVTLGRESTVKTLQNRYDVIASKIKRLYNLYAESGNDILLETIKENQESLQKLSEMIENEKASAAALSEIVKRNETVHNLRDKWDAMTMTEKRAALSICIDKIMITNGEIEMFYNI

SEQ ID NO: 10954 - protein, 462 aa, Unknown
  Description of Unknown: Integrase B10955 sequence
  IPR011109,IPR038109,PF07508,PS51736,IPR036162, IPR006119,PTHR30461,G3DSA:3.40.50.1390,PS51737,PF00239, SM00857,cd03768,G3DSA:1.10.10.2600,SSF53041
MSDAAQIASPKARKRCAVYCRVSSDERLDQEFNSIDAQKEAGHAYVASQRAEGWIPVADDYDDPGFSGGNTDRPGLKRLMADIERGQIDIVVVYKIDRLTRSLADFSKMVEVFERHGVSFVSVTQQFNTTTSMGRLMLNVLLSFAQFEREVTGERIRDKIAASKRKGMWMGGVPPLGYDVENRLLVINDAEAAVVRRIFEEMLTIGSPTQIAANLTLDGITTKAWTTQDGQTRAGARIDKKYLHKLLRNRIYLGELSHKGKWYPGAHSAIIDPGLWGRVHEVLARDGHARSVETKIRSRTDALLRGLLYAPSGERMYPTYSRKNGRKYHYYVSKSESRFGARGKSYERLPAPEIESAIVAQIRTVLTSPESVASVVRHIQRNGAQIDEAATVMAMGRLNDIWDQLFPVERHRIANLMIERIDLVHAGEVQGIKVKWREIGWNTLIDEFAPHNIGAEMLEVEA

SEQ ID NO: 10955 - protein, 462 aa, Unknown
  Description of Unknown: Integrase B10956 sequence
  PS00397,IPR038109,IPR006119,PS51737, PF00239,G3DSA:3.40.50.1390,PTHR30461,IPR025827, SM00857,G3DSA:1.10.10.2600,SSF53041,IPR011109,PF07508 ,PS51736,IPR006118,cd00338,PF13408,Coil,IPR036162,PTHR30461:SF3
MKAGLYVRVSTTEQANEGYSIQEQTERLNRYAEAMGWYVYDTYTDPGFSGGSMDRPGLQRLIRDVKARKVDKVLVYKLDRLSRSQLDTLYLIEKVFLANGVDFVSMNENFSADTPFGRAALGIMATFAQFEREQIKERMMMGKQARAKSGKFSGGNNIPYGYDYTDGELIVNEHEAEIVREVFRRYIAGVPTSRISKDLNASGISSRAGKWHDSQIRNIIDNRNSIGMVRFQGDWLHGTHEPILDTETFDAAQLIRRKRQKEALLKNARIGKASSYLSGLVYCARCGARYSKKTYHSTVNGKKYLYSRYGCVNRVRDKARRTCACDNRFWNEKDLDSLVFDEIRKLKLDPNATGRSPEPKADIFAMEMEDIDKRIKRLMDLYEAGTIDLDEISERVKTLNQKRQVLADEQEDAHDRKVAEKAVQSFSEALENGTLEQVRVLLFDLIRRIDIDGDDVSIYWNL

SEQ ID NO: 10956 - protein, 462 aa, Unknown
  Description of Unknown: Integrase B10957 sequence
  cd00338,PF13408,IPR011109,PS00397,Coil, PS51736,IPR036162,IPR006119,PTHR30461,G3DSA:3.40.50.1390, PTHR30461:SF3,PS51737,IPR025827,PF00239,SM00857, IPR006118,SSF53041
MAVKKIRVASYLRVSTEEQKRHGDSLATQRGHIQKYFNENTNAIHVGEYADEGISANKLKKRTELQRLLNDVKNGKIDLIIFTKLDRWFRSVSKYYKIQEVLNENNVSWQAILEDYETLTANGRFKVNIMLAVAEQERDRDSDRIKDVFQYKVSQGQPITGAQPFPFMIKEIDGIKRVVHNPKTEAMTYDWIEHLKTYNSLRGSNVYINEKYDKAFDYTTISNLIKNTMLYGSYRGNDNYCPPYMTKKEFDTLQDALKKNVRVRTTNHIHLFTKMVKCPYCGQNLIGFNSRYISKKTGKTTISYMLRCENRYRPHKKDNPCKYKHSIYEHEIEDYLIQNLNKLIESYISSLDIKEEKKKIVSIDKQKKKLKEEMERLNTMYQKGRITYEKYDTSYEELENKLKALVPVEAQKDVSRLKKILDTNYIENYKKADKADKKAFWNSIIKEIHVNDKKEITNIIFW

SEQ ID NO: 10957 - protein, 461 aa, Unknown
  Description of Unknown: Integrase B10958 sequence
  IPR038109,PS00397,IPR006119,PS51737,PF00239, cd03768,G3DSA:3.40.50.1390,PTHR30461,IPR025827,SM00857, G3DSA:1.10.10.2600,SSF53041,IPR011109,PF07508,PS51736, IPR006118,PF13408,Coil,IPR036162,PTHR30461:SF3
VKPMIAIYVRVSTNEQAENGHSITEQIDRLCKFCDALNLGKPKVYNDSGYSGANTDRPALQLLISDVKAKKINKVIVYKLDRLSRSQKDTLMLIEDIFLSNGCDFVSMSENFDTSTPLGKAMIGVLAVFAQLEREQIKERMSMGREARAKQGKYAGSWRLPLGYDYIDGELVPNDFEKIQIQKIFSDYASGKAPVTIAKELNGKGLTHRYGIWQTEVIRSILRRKTYIGYVAFNGEWYKGTHEPIISEELFDKVQKRLKKVGEDFKEHNRRPGKALSYLGGLVYCKRCGEKYFKYNRRSNQYSYDYYCCFNRYPRDRKGTCKNDNWRMEELDKLIFDEIKKLSFESSTPSILPDNSDTINDRINELNKQIERLMNLYTLDEIPFDVLQKKIHSISEQKGKLEKSLIQEPATITTEEAEEIVTSFDDVLATEDIDTIRTAITSLINRIEIDGENVYIYWNFD

SEQ ID NO: 10958 - protein, 461 aa, Unknown
  Description of Unknown: Integrase B10959 sequence
  cd00338,PF13408,IPR011109,IPR038109,PS00397, PS51736,IPR036162,IPR006119,G3DSA:3.40.50.1390,PTHR30461, PTHR30461:SF3,PS51737,IPR025827,PF00239,SM00857, G3DSA:1.10.10.2600,IPR006118,SSF53041
MEDLYKAPNVLRAALYIRVSSAEQAMHGYSLEAQKEFLEAYAKEKKMRIVGVYADEGKSASKRLYQRKELLRMVEDMEAGLIDVILFKDITRWSRNSSHYHKIQDRIDAAGGYWIAVQQEHLETKTPTGRFQVTVMLGTAQLEAEQTSERIKFVNASRIPKGGVPWGANSCPLGYTVAKIDGMKRVVKDPSKAEIIMAFFNHFLTYSSCRGAIMHLATEYDYRLEEKSARKILSNTLYIGEYKGFSGYCEPYLTTEQFDQIQKIIAKRTYTPNDPKRVYLFSSLLKCAECGRNLAAYHTKNGRTKKVYLYYRCKNYTMYKSCPHSRGIGEIKTEKWLLENIENEMDKYVQSVKIEELGKPKDVEKKRKALEGKLKRNKELYIEGEIDKEEFSNNKEEYIAQLAALPADEKKDTSEIEAFLNSDWRNLYANLEKHEKRAFWRSIVDYIEVDKDLNFIPHFFN

SEQ ID NO: 10959 - protein, 461 aa, Unknown
  Description of Unknown: Integrase B10960 sequence
  cd00338,PF13408,IPR011109,IPR038109,PF07508, Coil,IPR036162,PTHR30461,IPR006119,G3DSA:3.40.50.1390, PTHR30461:SF3,PS51737,IPR025827,PF00239,SM00857, G3DSA:1.10.10.2600,SSF53041
LKNGFTIINEYCDRAISGKTDNRPSFQRLIKDSEKGQFEAVIMYTLDRFARNRYDSAIYKAKLKKNGVRVFYAKQPMPDTPEGIILESVLEGYAEYYSENLSRNIKRGMKENALQCIATGGAGLALGYTVGEDRKYQIDPVGAKIVQEIFQMYADGMSATQIINYCNEKGYKTSRGNAFNKNSLRTLLKNEKYIGTYKFMDVVVPNGMPAIVDKALFEKVQAMLSHNAKARARTKAHEDYLLTTKLFCGHCGSAMVGESGTSKSGKVHHYYKCIDRKRKHQCNKKVEKKDWIEELVVRFTVQHVLTDENIEKIATRAMEVFEKESADTTYLTGLQDQLKEVKKKIKNLMTAIEQGIITSTTKERLEELESEKNHIEGQIAKEEMKKPLLTKERIMFWLLSFKSGDVNDLEYQRRVVDTLVNSVYVYDDGDKGRRIVFTFNISGQNTATISCSDIACSAPPF

SEQ ID NO: 10960 - protein, 461 aa, Unknown
  Description of Unknown: Integrase B10961 sequence
  cd00338,PF13408,IPR011109,PS00397,IPR038109, Coil,PS51736,IPR036162,PTHR30461,IPR006119, G3DSA:3.40.50.1390,IPR025827,PS51737,PF00239,SM00857, G3DSA:1.10.10.2600,IPR006118,SSF53041
LFATSSSHLRKERSEIGKVKTALYIRVSTADQAVHGYSLDAQESLLKEYAASHNMEVASVYADEGKSASKSLEKRTELMRLLEDAKDGKFSVVLFKDITRWSRNAASYYKVQEVLDSCKVGWIAVEQPYLETLSPTGRFQVSIMLGTAQLEAEQTGQRIKFVQDAEIKRGHFPFPQHNAPTGYKTEKREDGNYLVIDEATAPIIRRIYATFKKTFNLQRCVEAVPEQGFSETTVNRILRNPIYKGQFRGVDGYCEAIIPPYEWDALQRPKRAYNGSKHKGEYIFSGIVKCGSCGSTMRGLCPDDKYHMYQCRNGCRVTISQKDLEGKVLDMITPALDTYKVTVRDQRRNNQLIEKERKRLSEKLRRLVDLYTDGMIDRADYDRRRKEIDEKLETLDPAPDLPNITTDFSGMYSKLSPERKNVFWKAFLDHVTVTREKQVNIAFHTAKVLAERMGMIEMQEK

SEQ ID NO: 10961 - protein, 461 aa, Unknown
  Description of Unknown: Integrase B10962 sequence
  cd00338,IPR011109,PF07508,Coil,PS51736, G3DSA:3.40.50.1390,IPR006119,IPR036162,PTHR30461,PS51737, PF00239,SM00857,SSF53041
MSNHTRAILYLRQSTYREESISLEVQEATCRAYAARLGYEVVGVESDPGISGRTWQRRGVQAVMDAVESGRADVVVLWRWSRLSRSRKDWALAADRADLAGARIESATEPNDASAAGRFARGVMTELAAFESERIGEAWKEAHARRTAAGLPANGKPRFGYLYDTANKIHKPDPFTGPVLEHLYRRYVAGDSVYALTRWMNTTGHQPAAGYGVQNGVWSERTLRRMLDTGFGAGIITVRGERRPGAHDPVINEGLWAQYLDARISRARPSGQGRREYTLTGLCWCDCGSRMACEMDGGGRPRLRCRASKSSGAHRGGYANHDLVLAEVLEHVGALGRVGAVGEMVSFAGAPARDFDQESKAASEQLIAATRQHLSGVIPESAYLVVRDELTAQISALEAERIEAAAVASRPKSSVQARTLLEDWQGLAIAQRREALRLLIERVNITPGRPRSKVQVIMRSL

SEQ ID NO: 10962 - protein, 460 aa, Unknown
  Description of Unknown: Integrase B10963 sequence
  cd00338,PF13408,PS00397,PS51736,IPR036162,IPR006119,PTHR30461, G3DSA:3.40.50.1390,PTHR30461:SF3,IPR025827,PF00239,SM00857, IPR006118,SSF53041
MQQEKVLRVALYCRVSTEEQALHGDSLMAQEAELRSYAEAHHMKVVGIYRDEGFSARKSAMSRPKMVELLEDVKAGKLDRIIFTKLDRWFRNVREYHTVQAVLDQYGVTWEATLESYSTASADGRFKVNIMLSVAENESDRTSERIKFVNEAKRRRKEAAFGGPNKPFGYTTKYIDGIRRLVKDPETEAACQEFWDHVRKYNSVRLAGLYVNEKYGLSRRYKSWTDMSRREMYTGTHRGVEDFCPAYISHEDWEYIMQSHIMVKKTQRPERVYLFTGLLRCPGCGSTLKATFKTSPNDRNKEFRSYRCNNGQHNICTYRRTVSEMKTEKYLLENVKSELEAYIVEVEVNANKKKKPSAAMDIVKLNDEMRRLNNIYRAGNMDDDEYSKETAALKAKIDKAKEAEKDERPPDLEVLKQFLASDFESIYQTLSAEDKRRMWRSIISSIEVEGVTIKKINFRA

SEQ ID NO: 10963 - protein, 460 aa, Unknown
  Description of Unknown: Integrase B10964 sequence
  IPR038109,PS00397,IPR006119,PS51737,PF00239,G3DSA:3.40.50.1390 ,PTHR30461,IPR025827,SM00857,G3DSA:1.10.10.2600, SSF53041,IPR011109,PS51736,IPR006118,cd00338, PF13408,Coil,IPR036162,PTHR30461:SF3
MIERCAIYIRVSTAEQSMKGHSLQAQREYLESYAASHGMRVVGIYADEGQTARKELKKRKAIHALLKDVEADKIDVILFWRMDRWFRNVADFYKVQDILDAHGVRWISASESNINMETRDGRLCLNLILTIGQNEVDTTSERIKFTVNNMIQNGRMVWGATNLPFGYAIVEENGCKRMAKDPETACMVEEFYRFFRQTHKKRATVLHMQDTFGINFSYTMLRTMLSSEFYIGKYRSNDNYCPAYLTLDEWKEIQAISENNIKRPRTGRVYFFSGLVHCPVCGTKMAACAGRSIINRKTKEKREYYYYRCNKAVLNKLCSYTSRISQNLIEEYLLNNLDTEYRKYQVRCNKVKETQTHKKKKRSADSVRSEIERLNILFQKGRIEFDYYEEQYRKLEDELKSFDEVIIREKDHSNVIGMLGSDFKEMYSSLSLENRQAFWQQIIKAIYVTKDRNVDYVDFL

SEQ ID NO: 10964 - protein, 460 aa, Unknown
  Description of Unknown: Integrase B10965 sequence
  cd00338,G3DSA:3.40.50.1390,PTHR30461,IPR006119,IPR036162, mobidb-lite,PF00239,SM00857,SSF53041
MNPNYNNLQNMMQQQGIQGIQGIQGIQGIQGIQAMPQQPFIINNQGQYIPVMMMPGNQQQIQQNPFMVINQPQNMMPFPVVQNQHPQFMNVAQNPFIMLQQQQQPIIQGNPNGDNNDAIIANIMGNVALNQQDNPPKPKKDNSFNPSKNNSNVIKSIEPLTDNEAHFDATNFPNEKYKTITLNGKEQELEAKDLNNYTLETGHIIHKHNININQNNMKGNASIYVRCSNPNGISIDTQMTACLNYAKEKDLVLKGVYIDDGVSGRNGKNLKDGEIGFWKEHIDNNSNLLIYSADRLTRHLFSGLLFLNTMQEKDIDVHFVNNKIIYNKSISAMNKSSIQQELQTAEKYSNDTSEKIKGTINRLKNEGKYIAGRVPYGYKRIKVDGQLKQIVNSIEMDTIKLIKSRYNKIWNKFDDYSNDIPKKSQYYIIKYLKQWCDNQHIKDRNQTYFTESRIKTIIYN

SEQ ID NO: 10965 - protein, 460 aa, Unknown
  Description of Unknown: Integrase B10966 sequence
  cd00338,PF13408,IPR011109,IPR038109, PF07508,Coil,G3DSA:3.40.50.1390,PTHR30461, IPR006119,IPR036162,PS51737,IPR025827, PF00239,SM00857,G3DSA:1.10.10.2600,SSF53041
MVSPELQDIAIGDYCDRSGYQLTHRMEGLDESGSRTKSRWWAKLDLAVEMVEAGQVDVIVVWKFSRTARHRLKWAVALDRVEMAGGRLESATEQVDVSTSTGRFTRGMLAELNAFEAERIGEQWKEAHARRVAVGLPSRGGVRFGYQLINGAYQPDETTGPVLAAMYVDYIRGVSAGTVARRLNDAGHLVARTGTPWTSSHVLAVLDSGFGAGRISCGVRRAITWSAGAHLPVIDEATWDAYRSQREDRRGKPSVSTPAYVLSGLMRCGDCGSGMHATALGVRTGYGFICTAWAKTKRGRCVTVTRAKAEHAVRDWLTRFVEEVEVRAGAEATRTAAQLIARSDADDLRRQANRIDERLAKLTLGWTDGIVLDAAYTTARDQLTRQRAELETRARVADRDAQTLAGPALPIVHDLLEQWDIRPVVARRDMLRHLVRQVVVHRPERRGDPVTLSIHGTWEQ

SEQ ID NO: 10966 - protein, 460 aa, Unknown
  Description of Unknown: Integrase B10967 sequence
  cd00338,PF13408,IPR011109,IPR038109,PF07508, Coil,PS51736,G3DSA:3.40.50.1390,IPR006119,IPR036162, PTHR30461,PTHR30461:SF3,IPR025827,PS51737,PF00239, SM00857,G3DSA:1.10.10.2600,SSF53041
MGKNITVIPAKKVQLTVTHQQATKIRVAAYCRVSTDQDEQLSSYENQVSYYRDYILKHEDYELVDIYADEGISATNTKKREAFNRLIQDCRAGKVDRILVKSISRFARNTLDCIKYIRELKELGIGVTFEKENIDSLDSKGEVLLTILSSLAQDESRSISENATWGIRKKFERGEVRVNTTKFMGYDKDENGKLVINPEQAEVVKHIYHQFLKGYSPESIAKELNTNGIKGWSGKANWYPSSILKMLQNEKYKGDALLQKTYTVDFLTKKRTENDGQVNQYYVTNNHEAIIDTEMWDTVQEELARRKDFREKHKLKTYIMQSDDNPFTTKVFCAECGSAFGRKNWTTSRGKRKVWQCNNRYKVKGQIGCQNNHIDEEMLEKAFMKAVELLQEHRADVVVKWQKLEKGTNLLHKHYAKQMYQLLDLEKFDGTIMNKVLDHISISEVGQIIVIFLEGTEVEL

SEQ ID NO: 10967 - protein, 460 aa, Unknown
  Description of Unknown: Integrase B10968 sequence
  cd00338,PF13408,IPR011109,PF07508,PS51736, G3DSA:3.40.50.1390,IPR006119,IPR036162,PTHR30461,PTHR30461:SF3, PS51737,IPR025827,PF00239,SM00857,SSF53041
VVVKAVIYTRVSADRAGGRSVAEQEAECRAACERNNWDVSEVLSDNDIGASRHSRKHRPAYEKLSEILEPGDVLVTWEASRAQRDLAAYVTLRDLCARLGVQWHYSGTTYDLATGDGRFRTGLDALLAENESEKTRERILRAHRANAAAGKAHGKIPYGYRGIRDEKTGVIVERVPDEVEAPIVRELVARVMAGEGLNTIRKDLDRRGIPGPAGGSWNTHSISRMLRSPTMSGKRIYRGATVEGDWEAIISEPDQQALIGILSDPSRRVTRGPEPVHLLTGIAICGKCDAPMMRMKNTRYPSYVCSKHLHVGRNQEKTDLVVEAEVISRLEDPSIRGTVGVLGGDATPHLEEAHKLRLRLDGFTAEAEKGNLTPARLGKIESTLLPQIEEADRKARASMAIPMLAEAVGPDAGLKWKGYSMPYKRDLIRSLVTVTIHPTIGNRRTFDPNLIDVDWHKPFR

SEQ ID NO: 10968 - protein, 437 aa, Unknown; identical to SEQ ID NO: 10051
  Description of Unknown: Integrase B10969 sequence
  cd00338,PF13408,IPR011109,IPR038109,PF07508,PS51736,IPR036162, G3DSA:3.40.50.1390,IPR006119,PTHR30461,mobidb-lite,PS51737, IPR025827,PF00239,SM00857,G3DSA:1.10.10.2600,SSF53041

SEQ ID NO: 10969 - protein, 459 aa, Unknown
  Description of Unknown: Integrase B10970 sequence
  IPR038109,PS00397,IPR006119,PS51737,PF00239, cd03768,G3DSA:3.40.50.1390,PTHR30461,IPR025827,SM00857, G3DSA:1.10.10.2600,SSF53041,IPR011109,PF07508,PS51736, IPR006118,PF13408,Coil,IPR036162,PTHR30461:SF3
MDVKTVAAYVRVSTDLQMEHGYSIGEQTDHLKAYCAAKGWTLAKIYTDGGYSGKNLDRPAMQELIKECKLYDLILVNKLDRLSRSQKDTLYLIEDVFRAQGVQFASISENFDTTTPLGMAMVGILSVFAQLEREQIKERMHMGRVGRAKKGLWRAGSNPPIGYDYTDGHLLIREDEAEQVRLIYRMFLSGESMYSIARFMHDNFKNKYRSWNQTNSVSVVLRNPLYTGKIVFDGETYEGDHDAIIDQETFDKAQERYSQIMRNNPRYRIPFKSKYLLTGILFCGECGARYSVLTSKNPQMKNKRYTYYGCRGNSASNQDKRNKHKCKYYNQEKLDQYIIDQVMQLEFHETRHKPIKVQKRSKERIAIIDKQISNLIDLYSVDGINLEEIKTKITELNAEKDKLKQEEPEVKSNIHSSNDIIRAKDVLQNGSQENKRMIITSLIDRVLLFEDHIEIVWNL

SEQ ID NO: 10970 - protein, 459 aa, Unknown
  Description of Unknown: Integrase B10971 sequence
  cd00338,PF13408,IPR011109,IPR038109,Coil, PS51736,G3DSA:3.40.50.1390,IPR036162,IPR006119,PTHR30461, PTHR30461:SF3,PS51737,IPR025827,PF00239,SM00857, G3DSA:1.10.10.2600,SSF53041
MNQNNNTTSARVLRVACYERVSTEEQTKGLSIDAQTAALESWVHDHGHVMIGHYTDAGVSGGKPIEKRPAMWRLLHDVQAGQVDLILFTKLDRWFRSLKNYYKAQEILDGVHCAWQAIQEDYETLTASGRFKVNIMLSVAENERERTSERIHAVFDYKSARGEYLSGGNAVPLGYTLVDKHLQKDPETAPAVERFFDLILSGHSLSNASSTVCSEYEGMPSYGQWRKIAYNPIYAGIKNGTAGYCPAYITSVQHEILLNQKQTRAPKNPDSVYLFTGILVCPVCGRKMTPVCTSARGERYLYYRCQRAMIDRNCENRRGLREIRLESLLTAYVFDSAQIVADSSKAAKTTAKPAENEHTIDQQMRRLAETYTDGLIDRDTYKSKLAQLTAKREALRKAPRPRSEVPPEIAREIIEDDIRAVYDQLEPREKRRFWHSVLSSVAVQDDQITEIHFIGDVCD

SEQ ID NO: 10971 - protein, 459 aa, Unknown
  Description of Unknown: Integrase B10972 sequence
  cd00338,PF13408,IPR011109,IPR038109,PS00397, Coil,PS51736,IPR036162,PTHR30461,IPR006119, G3DSA:3.40.50.1390,IPR025827,PS51737,PF00239,SM00857, G3DSA:1.10.10.2600,IPR006118,SSF53041
MILWFFITKYTLKGMIIVKKVLKVCGYCRVSTDEQKNYGFSISAQEDKIKNYCKEKNYILTNIYIDEGFSASNINRPSLQELLKNLDDIDAIILTRLDRLSRDVLQARKMVEIFIMNNISLITLEESDIDTTSADGMFTLNLKLSLAERELKKTSERIKSVFEYKIKEGQAITGAQPFGYKVDIVNGKKCVVFDENKEILNEIFNYFGKHHSVRKTMFYINEKYNLDKHYSTYSRTLRNPYYTGSYKGNENYCPAYIDKKTFERNQELIKSNIRVNKNRRHYFFTGLIICPVCGRKLVASPAPKDNHRYRCNSAVFNRCSFDILLAERKTEKVLLNTIENHLENHIINSKQINKVGVKDFSKEINSIKKELENLNYLFKKNRISLKDYDREYDELELELKKLESVVVEEIDLKKFETILNSDWKSIYINLNREKKQIFWRNLIKEIHIIDGRYVFDIKF

SEQ ID NO: 10972 - protein, 459 aa, Unknown
  Description of Unknown: Integrase B10973 sequence
  IPR011109,IPR038109,PF07508,PS51736,IPR036162, G3DSA:3.40.50.1390,IPR006119,PTHR30461,PS51737,PF00239, SM00857,cd03768,G3DSA:1.10.10.2600,SSF53041
MNEIAATRARKRCAVYCRVSSDERLDQEFNSIDAQKEAGHAYIASQRAEGWIPVTDDYDDPGFSGGNTDRPALKRLLADIERGQIDIVVVYKIDRLTRSLADFSKMVEVFERNEVSFVSVTQQFNTTTPMGRLMLNVLLSFAQFEREVTGERIRDKIAAAKRKGMWMGGVPSIGYDVVNRQLVINEAEAAVVRRIFEEMLTIGSPTQIAANLTAEGITTKAWTTQEGQTRSGTRIDKKYLHKLLRNRIYLGELSHKGNWYPGAHPPIIDQALWDKVAAVLAKDGHARSVETKIRSRTGALLRGLLYTPSGERMYPTYSNKKGHKYHYYVSKSESRFGAPGKSYERLPAPEIEAAVVAQIRTVLTSPESIASVVRHIQRNGAQIDEASTVMAMGRLNDVWDHLFPVERHRIANLMIERIDLVHIGEVQGIKVKWRELGWDKLIGEFAPREIGAELMEVEA

SEQ ID NO: 10973 - protein, 459 aa, Unknown
  Description of Unknown: Integrase B10974 sequence
  IPR011109,IPR038109,PS51736,G3DSA:3.40.50.1390, IPR006119,PTHR30461,IPR036162,PS51737, PF00239,SM00857,cd03768,G3DSA:1.10.10.2600, SSF53041
MCALVTFSKENVDIAQNRWGLSFGAMRLGYARCSTDEQEGALQAQILRLEQAGCDTVISELVSGRKNDREGILEAAALVKAGKVKELVVTRVDRLGRDAANTDLLLALCAEKQVEVSALDGGVIETASPQGFLMARLHTSLAEMESRMLSMRIKKAMVVHRQQGRHLRRRKPFGYMGGPNHQLVPDPSNWDHAKRVLRELKERGSFSKVSQTLPEWCPWTPATNSLHSWFCNPVIRGHLGHLRDGGQGWKSYYKQMLYDQHEPLISETEWQALAEILKRARNRFQPKDDSRVAHALTGVLKCANCGHNLRYNTSNGTAWWRCRHRLCKERGGIKEEIAQNVVLDACILSADNLAKMIANPAKEDPVLAAKRKDLADLEELARRWPDAVSTESLRREIADLERCDRSSIDLKQFNIYRRMMKDPQFYRARPDELHPVFRMVLLEVRVAAGGGAVAVPRTV

SEQ ID NO: 10974 - protein, 459 aa, Unknown
  Description of Unknown: Integrase B10975 sequence
  cd00338,PF13408,IPR011109,IPR038109,PF07508, Coil,PS51736,IPR036162,IPR006119,G3DSA:3.40.50.1390, PTHR30461,PTHR30461:SF3,IPR025827,PS51737,PF00239, SM00857,G3DSA:1.10.10.2600,SSF53041
MQTAYVYARFSSDNQREESIDAQLRAINEYCDTNDIRILQVFKDEAFSARTDKRPAFQELFGLIKEKPADLLIVHKLDRFARSRMDAAFYRQKLKEAGMRLVSVLERLDDSPESIIMEGILESMNEYYSANLSRETKKGLRENILNGKRNGGKVPFGYTLVDHHLIPNRDAETVRWIFNLYAEGKGVTEIVRITRSPVHNIRPMLMNEVYLGHLISGENRCEHAHEAIIDEDTFFACQKRMQDKRMNAANRAKVDYMLAGLITCGVCGKRMIGMSSKGKYYYYSCKTAGCRIYRKDDLEERVIKELAKWFTPTDDLKALFFDLVSRRVNSRTESEDAMKAEYILRQRISKMIDSLQYAETQEDTKAIMEKVNELRRQMPKPKPKREVSRDDCDRFIERFCRIEQMDREEQKSLLRKTVDQIAVTPEDIGLFMTVKRGVVVAINKQQDLPPMGYNTGEKR

SEQ ID NO: 10975 - protein, 459 aa, Unknown
  Description of Unknown: Integrase B10976 sequence
  cd00338,Coil,PS51736,G3DSA:3.40.50.1390,IPR006119, IPR036162,PTHR30461,PF00239,SM00857,SSF53041
MNTATIEGLNVIGVARQSSSRDESVSVAEQIERMRAHCEREGANLVEVYVEKDVSGGKPLSKRPGLSQAVADIEARRGEVLMTAYFDRLVRSLKTQAEVLERVEAKNARVMTLDFGQISNGSAVQWLSSTMVGMVSEYYRRSVAERTHDSKQASITKGVPPFPWITPAYQRRADGTLEPHETNADIIREAIRMRLASEPASWTTISRYLADNGIKMAPGSIQAMFESKLMVGEIHFGNFTPNLNAIDEPIMTHAEQRRLLQAKAVRGRYAKSPRLLARLDILHCASCDARLTVDMAKRGSQRTMYAYYRCGNSLCSRRAIVSCDTADELLLDEACRLSAELVGQASDEDEIEAALADRTDAEAALDNAIRTLAGLGGEKATRDVLDELEAARSMAVDRHERLLASTSSRLTVRTTEDRDRLSFDGKRALIKAVIARAVVTPGRGPGRISVEPRGTLLGE

SEQ ID NO: 10976 - protein, 459 aa, Unknown
  Description of Unknown: Integrase B10977 sequence
  cd00338,PF13408,IPR011109,IPR038109, PF07508,Coil,PS51736,G3DSA:3.40.50.1390, PTHR30461,IPR006119,IPR036162,PS51737, IPR025827,PF00239,SM00857,G3DSA:1.10.10.2600,SSF53041
MKRVAVYVRQSEDKTGEGAAVERQERDCRLLAEAKGWEVATVYRDNSISATTGKKRPGFEQLVGDIERGQVDALIVWHLDRLTRSIADLTRVIDAGKARNVNIASVHGVSIDLGDPTGIAVATILAAIAAMEVQHKGNRQRTANRKRATEGNAYWSRRPFGYDRGESGVAVVDAEARLIREGAASILGGATVASVAKRWNEAGAKTTAGGEWGVTQVRRLLINPRMAGRRIYNGEDMGAGEWEAILDEETHRRLEEKLTDPRRRTAPDDLNSKYLLSGICVCSVCGGKMYASPMRTSTKEYMVYRCFGYHITRRMDLVDGVVEDVVVGILSRPDAAGLFSRSDDLRELRARAVELRDRRDALAAMLADGLLSAAAVREQAGKLGAELAAVEGAIGAHETLNPMAAIAGADDVPEQWVALPLENKRQIIRSLMEVTVEKAGKGVRFSPEQVRIEPKGNQP

SEQ ID NO: 10977 - protein, 459 aa, Unknown
  Description of Unknown: Integrase B10978 sequence
  IPR011109,IPR038109,PF07508,PS51736,G3DSA:3.40.50.1390, PTHR30461,IPR006119,IPR036162,PS51737,PF00239, SM00857,cd03768,G3DSA:1.10.10.2600,SSF53041
MSEIAATRARKRCAVYCRVSSDERLDQEFNSIDAQKEAGHAYVASQRSEGWISVADDYDDPGFSGGNTDRPGLKRLMADIERGQIDIVVVYKIDRLTRSLADFSKMVEVFERHEVSFVSVTQQFNTTTSMGRLMLNVLLSFAQFEREVTGERIRDKIAAAKRKGMWMGGVPPLGYDVDNRLLVINEAEAAVVRRIFEEMLTIGSPTQIAVNLTADGITTKAWTTQEGQTRKGTRIDKKYLHKLLRNRIYLGELSHKGNWYPGAHPPIIDQELWDKVHAVLARDGHARSVETKIRSRTDALLRGLLYAPSGERMYPTYSRKNGRKYHYYVSKSESRFGAPGKSYERLPAPEIEAAVVAQIRTVLTSPESIASVVRHIQRNGGQVDEATTVMAMGRLNDVWDQLFPVERHRIANLMIERIDLVHVGEVQGIKVKWRELGWDALIGEFAPRGIGAELVEVEA

SEQ ID NO: 10978 - protein, 459 aa, Unknown
  Description of Unknown: Integrase B10979 sequence
  cd00338,PF13408,IPR011109,IPR038109, PF07508,Coil,PS51736,IPR036162, PTHR30461,IPR006119,G3DSA:3.40.50.1390,PTHR30461:SF3, PS51737,IPR025827,PF00239,SM00857,G3DSA:1.10.10.2600,SSF53041
MIALYTRVSTQEQKEHGHSIDEQQDRMKKYCDAMGWTIFKVYTDAGFSGSNTDRPSLQRLIKDVNAHKIDRVLVYKLDRLSRSQKDTLFLIEDVFLQNGCDFVSMSENFDTSSPFGRAMIGILAVFAQLEREQIKERMTMGREARAKMGKYTGSWRHPIGYDYIDGELVVNEFEKLQIQYIFENYASGKGLAKIAEELNESGMTHKYGNWTENVVRSLLDRKTYIGYIKFGNEWFKGTHEPIISEELFEAVQMVKQSKKDANGHNAFGSPVSYLGGLITCAKCGDRYYKYSLGSKGYRYDWYCCRNRYPKKKHTGNECKNQSYKMQELDDLIFDEIRKLKFEPPRKPRKTSNKAPVLSDRINDLEKQIDRLMELYAVGDMPLDKVEKKLHEVNEQKNKLEAELESVNEHQFTIEDAKRLVENFDDVLEHGTLEDVRSVIRALIDHIEIDGEDIHIHWNF

SEQ ID NO: 10979 - protein, 459 aa, Unknown
  Description of Unknown: Integrase B10980 sequence
  IPR011109,IPR038109,PF07508,Coil,PS51736, G3DSA:3.40.50.1390,PTHR30461,IPR006119,IPR036162,PS51737, PF00239,SM00857,cd03768,G3DSA:1.10.10.2600,SSF53041
MNAATQIASPKPRKRCAVYCRVSSDERLMQEFNSIDAQKESGQAYVASQRSEGWIPVVNDYDDPGFSGGNTERPGLKRLMADIERGLIDVVVVYKIDRLTRSLADFSKMVEVFERQGVSFVSVTQQFNTTTSMGRLMLNVLLSFAQFEREVTGERIRDKIAASKRKGLWMGGVPPLGYDVANRLLVVNETEAELVRRIFGEMLTIGSPTRIAQGLASEGITTKAWTTQDGQVRSGTQMDRKYLYKLLRNRIYLGELSHKGSWFPGAHAPIIDHGLWGQVHEVLARDSHVRSVDTQTRESTEALLRGLLFGPSGDPMYPTYASKNKRKYRYYVSKAEMRFGAAGKTHERIPAAEVEAATVNQVKTVLSSPEAITAVCKSLEQQGVQINEDEIVMALHRLGEAWEQLYPAERIRIVKLMIERVDIVAGGLKVKWYALGWKELIKEFAAKGIGAELVEMEPA

SEQ ID NO: 10980 - protein, 459 aa, Unknown
  Description of Unknown: Integrase B10981 sequence
  IPR011109,IPR038109,PF07508,PS51736, IPR036162,IPR006119,PTHR30461,G3DSA:3.40.50.1390, PTHR30461:SF3,PS51737,PF00239,SM00857, cd03768,G3DSA:1.10.10.2600,SSF53041
MAEIASSRPRKRCAVYCRVSSDERLDQEFNSIDAQKEAGHAFIASQRAEGWIPVVDDYDDPGYSGGNTERPALKRLLADIERGLVDIVVVYKIDRLTRSLADFSKMVEVFERHEVSFVSVTQQFNTTTSMGRLMLNVLLSFAQFEREVTSERIRDKIAAAKKKGLWMGGLPPLGYDVHDRQLVVNPAEAAVVRRIFEEMLTIGSPTQIAARLTVDGITTKAWTTQDGRVRTGARIDKKYLHHVLRNRIYLGEISNRGQWYPGVHEPIIKRELWDQVHVVLARDSHARGVETKIRSRNDALLRGLLYAPSGERMYPTYSRKNGRKYRYYVSKSESRFGAPGKSYERLPASEIEAAVVAQIRTVLTSPESIAAVARHVQRHGAPIDEATVVMAMGRLNDVWDQLFPVEQHRIANLMIERIDLVHTDEMQGIRVKWRELGWDALIGEFAPRSIGAELLEVEA

SEQ ID NO: 10981 - protein, 458 aa, Unknown
  Description of Unknown: Integrase B10982 sequence
  PS00397,IPR038109,IPR006119,PS51737,PF00239, cd03768,G3DSA:3.40.50.1390,PTHR30461,IPR025827,SM00857, G3DSA:1.10.10.2600,SSF53041,IPR011109,PF07508,PS51736, IPR006118,PF13408,Coil,IPR036162,PTHR30461:SF3
MNIAGYARVSSEGQLDGYSIPQQKDIIENYCKIKEWNLVKIYVDGGFTGANTDRPALQDLIEHLDCYDLVLVYKLDRLSRSQRDTLALVDLFAEHEVKFASIQENFDTSTPLGMAMLGILSVFAQLERENIKERMALGRRGRTQKGLWRAGSNVPTGYDYIDGHLMIREDEAVQIRKIFELYLEGWTINRIRHYMHENYTNRYSSWAQASAVSTTLRNPLYIGMLPSKADGVPHKGEHEPIIDKATFDKVQALLAARSEHFDDALKHPFVAKHLLTGFTYCGECGGRVSCVGTHKYSYYGCHKNTADPRTRKKGKCSTPNYNTKILDKLITDEVLKLAYDENAIKALIKPRKEVNHKKAIKALENQKSRLIDLYSVGGIELEELQVRINAISEKLLAFKNDSPQQPELSFEDAKRIFEDAKRIFTDGGNIPQQRVILQSLIKKIVLNGDAVEIYWRFE

SEQ ID NO: 10982 - protein, 458 aa, Unknown
  Description of Unknown: Integrase B10983 sequence
  IPR011109,IPR038109,PF07508,Coil,PS51736, IPR036162,IPR006119,G3DSA:3.40.50.1390,PTHR30461,PTHR30461:SF3, PS51737,PF00239,SM00857,cd03768,G3DSA:1.10.10.2600, SSF53041
MNYERSYLRSCQVSTLEQKEHGYSIEEQERKLKSFCEINDWSVSDVFIDAGFSGAKRDRPELQRMMNDIKRFDLVLVYKLDRLTRNVRDLLDLLEVFEQNNVAFRSATEVYDTSTAMGRLFVTLVGAMAEWERETIRERVMMGKRAAIKQGMILTPPPFYYDRVDNTYIPNDYKKVVLWAYDEVMKGNSSKAIARKLNDSDIPPPNGKRWEDRTITRALRNPITRGHYTWGDVFIENSHEPIITEEMYQQIKERLEERINTKIVSHVSVFRGKFICPRCGGTLTLNTVTRKRKKGYVTYKTYYCNTCKAKKESFGFSENEALRVFRDYLSKLDLEKYEVKTKQKDDVVTIDIDKVMEQRKRYHKLYAKGLMQEEELFELIKETDETIAEYEKQKELVPRKSLDIDKIKKFKNALLESWEIFSLEDKADFIKMAIKSIDIKYVKLKNRHSIKISDIEFY

SEQ ID NO: 10983 - protein, 458 aa, Unknown
  Description of Unknown: Integrase B10984 sequence
  IPR011109,IPR038109,PF07508,Coil,PS51736, G3DSA:3.40.50.1390,PTHR30461,IPR036162,IPR006119,PTHR30461:SF3, PS51737,PF00239,SM00857,cd03768,G3DSA:1.10.10.2600, SSF53041
MNYERSYLRSCQVSTLEQKEHGYSIEEQERKLKSFCEINDWSVSDVFIDAGFSGAKRERPELQRMMNDIKRFDLVLVYKLDRLTRNVRDLLDLLEIFEQNNVAFRSATEVYDTSTAMGRLFVTLVGAMAEWERETIRERVMMGKRAAIKQGMILTPPPFYYDRVDNTYIPNDYKKVVLWAYDEVMKGVSSKGIARKLNDSDIPPPNGKRWEDRTITRALRSPITRGHYTWGDVFIENSHEPIITEEMYQQIKERLEERINTKIVSHVSVFRGKFICPRCGGTLTLNTVTRKRKKGYVTYKTYYCNTCKAKKESFGFSENEALRVFRDYLSELDLDKYKVKTKQNDDVVTIDIDKIMEQRKRYHKLYAKGLMQEEELFELIKETDETIAEYEKQKELVPRKSLDIDKIKKFKNALLESWEIFSLEDKADFIKMAIKSIDIEYVKLKNRHSIEIKDIEFY

SEQ ID NO: 10984 - protein, 458 aa, Unknown
  Description of Unknown: Integrase B10985 sequence
  IPR011109,IPR038109,PF07508,Coil,PS51736, G3DSA:3.40.50.1390,IPR006119,IPR036162,PTHR30461,PTHR30461:SF3, PS51737,PF00239,SM00857,cd03768,G3DSA:1.10.10.2600, SSF53041
MNYERSYLRSCQVSTLEQKEHGYSIEEQERKLKSFCEINDWSVSDVFIDAGFSGAKRERPELKRMMNDIKRFDLVLVYKLDRLTRNVRDLLDLLEIFEQNNVAFRSATEVYDTSTAMGRLFVTLVGAMAEWERETIRERVMMGKRAAIKQGMILTPPPFYYDRVDNTYIPNDYKKVVLWAYDEVMKGNSSKAIARKLNDSDIPPPNGKRWEDRTITRALRSPITRGHYTWGDVFIENSHEPIITEEMYQQIKERLEERINTKIVSHVSVFRGKFICPRCGGTLTLNTTTRKRKKGYVTYKTYYCNTCKGKKESFGFSENEALRVFRDYLSKLDLEKYEVKTKQKDDVVTIDIDKIMEQRKRYHKLYAKGLMQEEELFELIKETDETIAEYEKQKELVPRKTLDIDKIKKFKNVLSKSWNIFSLEDKADFIKMAIKSIDIEYVKLKNRHSIEINDIEFY

SEQ ID NO: 10985 - protein, 457 aa, Unknown
  Description of Unknown: Integrase B10986 sequence
  cd00338,PF13408,IPR011109,IPR038109,PF07508, Coil,PS51736,G3DSA:3.40.50.1390,IPR036162,IPR006119, PTHR30461,PTHR30461:SF3,PS51737,IPR025827,PF00239, SM00857,G3DSA:1.10.10.2600,SSF53041
MKKVALYSRVSTLEQKNEGHSLEAQKNALENYATAMGYTVVGHYSDGGFSGSNLNRPSMNELMLDIENNKIDMVIVYKLDRLSRSQKDTLYLIEDVFLENNVDFMSLQESIDTSTPFGKAMIGILSVFAQLELANITERMKTGRHERVRKGFWNAHVNVPLGYDYKDNMLIQNEYAPLIKEIFDRFINGESAYAIYKDCYSRYPDKIYGNNMITRIIDNKIYTGKVNYNEHWYEGLHEGIVDDETFETAQTIRKSLSDKFKVDRTKRSALLARKIACGKCGESMSMFKHWYSRKGVSAEYGYYRCNSKMNRTKKHKQINCDQKNHRTDSLHEIIIDTINGLDYEEAKRNVIKKSEAPDTTVRLEQLQKQEKKLIDLYQFDSIDKAELEKRLKDINQEKKQLNVVKNSKNETKIIEMLNSVKGKNMYDMTFEEQCALVDTLIDRIIVKDDNVDIHFSF

SEQ ID NO: 10986 - protein, 457 aa, Unknown
  Description of Unknown: Integrase B10987 sequence
  PS00397,IPR038109,IPR006119,PS51737,PF00239,G3DSA:3.40.50.1390 ,PTHR30461,IPR025827,SM00857,G3DSA:1.10.10.2600, SSF53041,IPR011109,PF07508,PS51736,IPR006118, cd00338,PF13408,Coil,IPR036162,PTHR30461:SF3
MNVGIYARVSTQEQAAEGYSIQEQEERLVKYCDALGWNIYNRYIDAGFSGASLDRPAMKRLISDVKDGKIKKVIVYKLDRLSRSQLDTLYLIEKVFIANGADFVSMTENFDTSTAFGKAMVGTLAVFAQLEREQIKERMSLGKEARVKSGYFIGAAQVPLGYDYVPEDKMLVPSDEAVQVRRVFELFTSGKTIAAIEKLFADEGLRHKYGTWNRTTIRNVLMNPVYIGKVKYKDKYYEGRHEKIVPLELFNSAQEQIARNRQLHASGRTSGRHTTICGGLLYCAQCGHKYAKAKKQKWSYYTCSARLKGKRDCRNKLWRTDKLDSLVLNEVKKLLVDTEWKPVKPLARRSPEAVKKQIARIDSQVEKLVELYSIDSAPLDSIERKMQELNGQRKRLEAELVGLTEQPRETEAEVRKKFKTFAEVLEAATFEQTRDIVTALIDKIYIDGDDVSIHWKY

SEQ ID NO: 10987 - protein, 457 aa, Unknown
  Description of Unknown: Integrase B10988 sequence
  cd00338,PF13408,IPR011109,IPR038109,PS51736, IPR036162,G3DSA:3.40.50.1390,PTHR30461,IPR006119,PTHR30461:SF3, PS51737,IPR025827,PF00239,SM00857,G3DSA:1.10.10.2600, SSF53041
MECVAYMRVSTEKQAEDGNGLESQKRDIDNYCNKNGYIISDYYIDDGYTGANMDRPELQRLISDCVAKRIKCVVAFKLDRLSRSMVDGIYIIERVFQANNILFKCVHDSISYDSPMEQAYTQMMAVFAQLDKNTMMLRMRGGMLERVKQGYWMGGGNTPYCYKYDKEKGILVPILKRKEQANQALDLFIDGYSDVAIKKMLNFTHEHTVKMVLTSPVNIGMIPYKGNLYKGLHEPIFDKNRFQLAQEARKNRRKKKTVSLNKEPNLLTGLCYCGVCGCKMRYQKWGSESDAPKKIYCCSRNKDLFYLPNYNKDCDNSIEWATDIEKQVEAEIIKISLNLSSQKPIAKQSKIDIIQSQIKKEKYRRKRLFNLYADGNDDVLNIIKQSDDTISSLKEQLEIELLSKEANKKKSIAYENIKKIADVWDSIDKRNKNMILKTIIDKIIIVNGDIEIQLKNF

SEQ ID NO: 10988 - protein, 457 aa, Unknown
  Description of Unknown: Integrase B10989 sequence
  PS51736,G3DSA:3.40.50.1390,PTHR30461,IPR006119,IPR036162, PTHR30461:SF3,PF00239,SM00857,cd03768,SSF53041
MTRVFGYVRVSHQKSADSGLSVESQTKAIQGYADRLPFEWKWGPGKIYVDLAESAYKIPFCFRTQGKQLREELKSGDHVIMYSIDRGFRSVADFSNTIAYWLKEGVSVHLVTENLNLGTATGKLMANVLASFAQFKSDIQSERTRDAMSAMSGKINGKYRERHSWQPAPVSVYKEKDPKPSQGTTKGRVYTYARVSHVLSAASGLSIEAQTKMTNKYAESLVKSGLDRGEDFTDEVVSAFNVPLVQRPGGKALNDSLGRGDHVVVARLDRGWRSIRDLLDTLDSWRERGISCHFADTMLNTNSQAGDVFFKMMALFAEWESELISRKMKEVLAELRSQGRPVNQEKPYWTKVVRRNGKKWLVPCPVQVGMIKRIVHLRKEGMSAQKISDLLENESAAQDSRRPIPRGGIQILGPGLAGKVKLRHREWGPRRILKASEKWPQLRSLLEEWGEDPQSLE

SEQ ID NO: 10989 - protein, 457 aa, Unknown
  Description of Unknown: Integrase B10990 sequence
  PS00397,IPR038109,IPR006119,PS51737, PF00239,cd03768,G3DSA:3.40.50.1390,PTHR30461, IPR025827,SM00857,G3DSA:1.10.10.2600,SSF53041,IPR011109 ,PF07508,PS51736,IPR006118,PF13408,Coil,IPR036162,PTHR30461:SF3
MIALYIRVSTAVQFEKGNSVPEQKKRLKAYCDARGWNQYDFFIDPGHSGSNMERPGLQKLIRNVKNYSLVLVYKLDRLSRNQRDILYLIEDVFNKNGVEFNSITENFDTSTPVGKLMLSMMGAFAELERQQINERMMMGRIASAEKGNWRGGSGVPFGYRYIPRSKGGSGSLTIDDFEASMVRKAFDLFELGYSFGGIRTELNNCGMSTSSAYVIHQMLMNPIYIGMIRYAGETYQGHHEPIIAPAQFERVQTLLNQKEPPKRKEKHLLTGFLNCSCGSRVCFHSTKQPNGKKYDYYECYTRNCHKTMAKAKKCSNKIWRAADLEEVVWNVLEELDYDEVSVPVDHSEEEKALKKELKKIDGQIERLIELYSLEGIPQELLSKQMNELNQKKDTIRRKIDALMEEPVLLSKEEVLQKKKSLASIKRSDLATQRAFLSSMIESITLFPGHDLEFHWKF

SEQ ID NO: 10990 - protein, 457 aa, Unknown
  Description of Unknown: Integrase B10991 sequence
  cd00338,PF13408,IPR011109,IPR038109,Coil, PS51736,IPR036162,PTHR30461,IPR006119,G3DSA:3.40.50.1390, PTHR30461:SF3,PS51737,IPR025827,PF00239,SM00857, G3DSA:1.10.10.2600,SSF53041
MTILRAGLYERVSTDEQALRGYSIETQIDNLTEYCNDNGIKIVDHYTDEGHSGAKPPMKRPALHRLLEDVKAGKLDIILFTKLDRWFRSVPEYHKVQEILDKHKVAWKAIHEEYDTTTASGKLAINVYMSISQNESDKGSERVKAVLQHKRRNREASFGGPHKPMGYKKVRDAEGRLRLVKDPEDQEMTQEFWDILVKYNNLNQAIRHMNETHGVTKSQKTWMRIARNPFYCGMSQDMEVDDFCEPYVSKEDFAFIQETAQRRRQDTRAKRVYLFAGLIRCPECGHVLCGNYSKKKYLGVEYYYHGYRCRFKHTTCSHNHTLSEKKIEKYLLTNMEKLMRDEITAVELEKAKPKKKPKNNVPALKERLRRLNVAYLAGNISDEDYLRDDAEIKAMIAKAEKEAPPPEKDITPLIELLNTDFKELYGKMNQEEKRRFWRAIIKEIEIEGLKVTGVKFF

SEQ ID NO: 10991 - protein, 456 aa, Unknown
  Description of Unknown: Integrase B10992 sequence
  IPR011109,IPR038109,PF07508,PS51736,IPR036162, IPR006119,PTHR30461,G3DSA:3.40.50.1390,PS51737,PF00239, SM00857,cd03768,G3DSA:1.10.10.2600,SSF53041
MSEVLKRRMRCAVYTRKSSEEGLDQEYNSIDAQRDAGHAYIASQRAEGWIAVADDYDDPAFSGGNMERPALKRLMADIEAGKIDVIVIYKIDRLTRCLADFSKMVEVFERQGVSFVSVTQQFNTTTSMGRLMLNVLLSFAQFEREVTGERIRDKIAASKRKGMWMGGIPPIGYDVANRRLIPNEAEAKTIAHIFQRFVELGSTTKLVKELRLDGVTSKAWTTQDGRVREGKPIDKGLIYKVLNNRTYLGELRHKELWYQAEHPPIITKSIWDDAHAILSTNGRVRAGTTRAATQYLLKGIVFGSDGRAMSPFQTAKQNGRRYRYYVPQRDIKEHAGASGLPRMPAAELESAVLEQLRGHLRSPDVVRDVLPQALKYEPTLDEAVVTVAMKRLDDVWDQLFPAEQMRIVRLLVRQVNVSPNNMSMDLHPTGIQRLLLELHHKKLRTTETELEAEAMA

SEQ ID NO: 10992 - protein, 456 aa, Unknown
  Description of Unknown: Integrase B10993 sequence
  cd00338,PF13408,IPR011109,IPR038109, PS51736,IPR036162,IPR006119,PTHR30461, G3DSA:3.40.50.1390,mobidb-lite,IPR025827,PS51737, PF00239,SM00857,G3DSA:1.10.10.2600,SSF53041
MNTKTIPKRTGMQNAKRRVVIYVRISKDRIDQTSTETQEAEAIQYANSRGWEVVTVCSDQGKSAYKRNVKRPAFDRAMRMIETKQAEVFLVWKLDRFYRGLDEFNGAWARIRNGGGELASVTEPAYDTTSDDPMVKWAIMGFAAMAEIESRNRSHRSKSNHHKRFADGAIPNGPRPFGYDKKGKGELVLNKAEAAFIRNAAQRVLNGESLRSILRTTNMVGSTGKPLTPRGLSFALTCPRNAGFRRHTETGNLMPGNWTPVLDRETWEALLAKFDDPSRRTGPSNQISHILSGIMTCGKCTGPMGSRTWKGDGYRYQCRTCGQSMDEAKANEVVKAKVLELCPPDRWDSLRTQGRGFDPAVIENIEKKLAAVDKQFENDKIDIDRWMNLNAKFNDQLAAAKSTEVPDLPAIENLADEWDSLALDDVRKVIAFVTESVTLHTVKGGSTNPFMRIEVA

SEQ ID NO: 10993 - protein, 456 aa, Unknown
  Description of Unknown: Integrase B10994 sequence
  IPR038109,PS00397,IPR006119,PS51737,PF00239,G3DSA:3.40.50.1390 ,PTHR30461,IPR025827,SM00857,G3DSA:1.10.10.2600, SSF53041,IPR011109,PS51736,IPR006118,cd00338, PF13408,Coil,IPR036162,PTHR30461:SF3
MKYVACYCRVSTDEQAKFGFSIQAQKDALEKYCKENGYKYEFYIDEGISASSMKKRKALNEMLSKCNVFDMILFTKLDRLSRNVLDANNINKLLIDNKCTMKAIDEDDVDTSTADGTFIFNLKVSLAQREIGKTSERIKFVFKNKREKGEITSGTKKYGYDIVNKKYQINQSEAQNIINLYNYFIKVNGNTQETYKYFIQHFKNKGYDAMSNYLRETSYIGKYKLYRKNIYIDNYIPRIMNDDLFYTVQNLLKKREKTSIRTSNPSLFSGLIFCNICNTRMCKKQDNRSTKKLIRYCCDNASRRKVSSMEYKCSNHKLIREEYVEKYLLDNIASIAKKYINTNAVSSNQIIKKNNSKEIKQVENKILKLKDLYLDDLINKKTYKTDYETLNRKLNELKNEEIIAPQKDFSKLKEIINLDIYKIYGVLSDEEKRTFWLRIIDKIYIENGEIKEVTFL

SEQ ID NO: 10994 - protein, 456 aa, Unknown
  Description of Unknown: Integrase B10995 sequence
  IPR038109,PS00397,IPR006119,PS51737,PF00239,G3DSA:3.40.50.1390 ,PTHR30461,IPR025827,SM00857,G3DSA:1.10.10.2600, SSF53041,IPR011109,PS51736,IPR006118,cd00338, PF13408,Coil,IPR036162,PTHR30461:SF3
MKYVACYCRVSTDEQAKFGFSIQAQKDALEKYCKENGYKYEFYIDEGISASSMKKRKALNEMLSKCNVFDMILFTKLDRLSRNVLDANNINKLLIDNKCTMKAIDEDDVDTSTADGTFIFNLKVSLAQREIGKTSERIKFVFKNKREKGEITSGTKKYGYDIVNKKYQINQSEAQNIINLYNYFIKVNGNTQETYKYFIQHFKNKGYDAMSNYLRETSYIGKYKLYRKNIYIDNYIPRIMNDDLFYTVQNLLKKREKTSIRTSNPSLFSGLIFCNICNTRMCKKQDNRSTKKLIRYCCDNASRRKVGSMEYKCSNHKLIREEYVEKYLLDNIASIAKKYINTNAVSSNQIIKKNNSKEIKQVENKILKLKDLYLDDLINKKTYKTDYETLNRKLNELKNEEIIAPQKDFSKLKEIINLDIYKIYGVLSDEEKRTFWLRIIDKIYIENGEIKEVTFL

SEQ ID NO: 10995 - protein, 456 aa, Unknown; identical to SEQ ID NO: 10746
  Description of Unknown: Integrase B10996 sequence
  IPR011109,IPR038109,PF07508,PS51736,IPR036162, IPR006119,G3DSA:3.40.50.1390,PTHR30461,PTHR30461:SF3,PS51737, PF00239,SM00857,cd03768,G3DSA:1.10.10.2600,SSF53041

SEQ ID NO: 10996 - protein, 456 aa, Unknown
  Description of Unknown: Integrase B10997 sequence
  cd00338,PF13408,IPR011109,IPR038109, PF07508,PTHR30461:SF21,Coil,PS51736, IPR036162,IPR006119,PTHR30461,G3DSA:3.40.50.1390, IPR025827,PS51737,PF00239,SM00857,G3DSA:1.10.10.2600,SSF53041
VISPVRVVIYLRISLDAVGLGLAVERQREECMRLIRERGWQFVREYADNSISASKRTTLRPAYEQMVSDFEAGEFDAIVCYDLDRLTRQPRQLEDWCEAAEEKGLKLVTANGEADLSNYNGRTFARIKASIARGEMEAKSARQKAAHVQRAAMGKPWANRRPFGFLGGGSEHHPEEAPILAGIYNDILMGAGQTTICSTLNQSGVTTTQGNQWRQSSLRQLLLNPRNAGLRARHGVIVGQGLWQPIVTEDVWRAACNIVTSHPLVGHRGSLHLLSGLLTCGLCGSSMTTGYTSRKVRMYRCTECKRIGRNADNVDEWIAAVVTARLNRPDADRLLVDNNAPNVTGLQDEVRRLEAVLEENTKMRGSGDMSVAEWKTAKVRTSELIEATRAKITKNTSAAILEPLVNAPDAAIVWQTQPVDRRRAVIGTLARIVVNPTRKGAKFNPDDIDVQWRIDA

SEQ ID NO: 10997 - protein, 456 aa, Unknown; identical to SEQ ID NO: 10996
  Description of Unknown: Integrase B10998 sequence
  cd00338,PF13408,IPR011109,IPR038109,PF07508, PTHR30461:SF21,Coil,PS51736,IPR036162,IPR006119, PTHR30461,G3DSA:3.40.50.1390,IPR025827,PS51737,PF00239, SM00857,G3DSA:1.10.10.2600,SSF53041

SEQ ID NO: 10998 - protein, 456 aa, Unknown
  Description of Unknown: Integrase B10999 sequence
  PS00397,IPR038109,IPR006119,PS51737,PF00239,G3DSA:3.40.50.1390 ,PTHR30461,IPR025827,SM00857,G3DSA:1.10.10.2600, SSF53041,IPR011109,PF07508,PS51736,IPR006118, cd00338,PF13408,IPR036162,PTHR30461:SF3
MKEIKRVALYIRVSTEHQVKEGDSLEAQENALLEYCNKYNYIVVDKYIDGGESGQKIKRTNLQRMLDDVKQDKIDLILMTKLDRWFRNIGDFYKVIEIIKKHKTDWKTIWEDYDTTTASGEFWLNMSLSMGQLEAKRTSERINSVFDYKYNVQKTVCTGQPPYGYKISEDKKLVIDEKEAQNIVKLFEYYAKTNNLNETANWFKENCENKSTCVIKKYLRNPAYIGKFVRTKTKETIDDYCPAIISEELWNNVQRLIKINVKKQIPDPNRKKHNSEPYIFSGLLICKECGHTLNGKTNSNSKHYYNCRYHYFKKCDNKKCINERWLEQHLLNEIIPILKNRKLQIVNINDNQQEIVDNSQQLKTKLKKLTNLYLENMVDLDYYKEEYLLINSQLEKIKCQKDNQNKLDYSYIDNFLNSNFLDIYSNLDNLEKRRLWSSIIDNVEILDYDNIKINVY

SEQ ID NO: 10999 - protein, 455 aa, Unknown
  Description of Unknown: Integrase B11000 sequence
  cd00338,IPR011109,PS51736,IPR036162,IPR006119, PTHR30461,G3DSA:3.40.50.1390,PTHR30461:SF3,PS51737,PF00239, SM00857,SSF53041
VRVLGRIRLSRLTEESTSAARQRELIEQWSTLNGHEVIGWAEDLDVSGSVDPFDTPALGPWLRERHHEWDILCAWKLDRIGRRAIPLNKLFGWVIDHDKTLVCVSDNIDLSTWVGRLVANVIAGVAEGELESIRERTKASRKKLLESGRWPGGQIPFGFTPVQLPDGGWKLALHPEQSKVLRSIYDDVIAGKSVDACADKHGMRASGLWKILASKYLMGYATLNGQTVRDKQGMPVLYGEPLLTSSEWDSLQAALEARKVGPRTRDTAPMSGVIKCYDCGGNLYHRVYRKTYGKKLYRYYHCPDGHCAQVDADMVEEQLEKVFLDAVGGKHIPERVFIPASSHTEELEDAKRAVTEITALLGSMSSATVKTSLIEQMNALDTRIGALEKLPCREAGWELKETDVTYREAWVDADQENRRQLLLKSGIHYRIKRIPDTQVIMSDIYIPDEILELLS

SEQ ID NO: 11000 - protein, 455 aa, Unknown
  Description of Unknown: Integrase B11001 sequence
  IPR038109,PS00397,IPR006119,PS51737, PF00239,G3DSA:3.40.50.1390,PTHR30461,IPR025827, SM00857,G3DSA:1.10.10.2600,SSF53041,IPR011109, PS51736,IPR006118,cd00338,PF13408,Coil,IPR036162,PTHR30461:SF3
MKTVACYCRVSTEEQVKYGFSIQAQKDALTNYCKENDYKYDVYIDEGISASSMKKRKALQEMLEKSVAYDMILFTKLDRLSRNVLDANNINKILQDNHCTMKAIDEDDVDTSTADGMFMFNLKVSLAQREIGKTSERIRFVFKNKREKGEVTSGTPKYGYKIKDKKFVIDSEEAENIRNLYKYFISVNGDHKKTYSYFVKHFPGKGKDALFNYLRETAYIGKYKLYRKNVYLDNYIPPIMDKELFNEVQNLLPRVEKVLKKENIPSIFAGMLYCYYCKSRLVRKVDYRSKNKIINYFCDKQYKYKVGINEKQCQNSKVISDKSVEEYLINNLKYLCKPYISKSIIKTKPKPQKNNIKINSLKNKLSKLKDLYLDDLISKEDYKQDYIKINKEILKLEEEQKEKPQKDFTYLNELINKDIPDIYNTFNIDEKRKFWLKIIDKIYIKEGKIKEVTFL

SEQ ID NO: 11001 - protein, 455 aa, Unknown
  Description of Unknown: Integrase B11002 sequence
  cd00338,PF13408,IPR011109,PS00397,PF07508, IPR038109,PS51736,IPR036162,PTHR30461,IPR006119, G3DSA:3.40.50.1390,PS51737,IPR025827,PF00239,SM00857, G3DSA:1.10.10.2600,IPR006118,SSF53041
MKAATYLRVSSEEQAQQGFSLPAQLHQLKDFCEKHKMEIHDTYIDEGFSAKYEDERKRPQFERMLKDAEKKLFSVIVVHKYDRFARNVELSRRVKRQLKVGGVTVISISEPIEDSPVGFLQEGLLELLAEYYVRNLSQEVKKGMRERVSQGLSNGSVPYGYKTINGNMIINEEQSIIVKKIFEMYNEGTGTARISKWLRENRIPSAIPGCVWNHHAVLYILKNVKYIGYISHAGEIYKGKHEPLIDKEIFDIANKNLISRIIAREPMGKNESRFMLLGLMRCGICGRKMGIHEARRYSHKRGNFSYIYYVCSGSRIHENHAKCSHKDFHPVDEVETKVMNKLKNILASNEPIFQMAVNMDYIAKNQTTKLESEINRAKAAYLSGVFTLEEYTKVKSDCGNKLSEIKPDICKDIKQDIRNALQEIEAEELPAKKSAKLKRYIRVIKVYPDKIDIDF

SEQ ID NO: 11002 - protein, 455 aa, Unknown
  Description of Unknown: Integrase B11003 sequence
  IPR038109,PS00397,IPR006119,PS51737,PF00239, cd03768,G3DSA:3.40.50.1390,PTHR30461,IPR025827,SM00857, G3DSA:1.10.10.2600,SSF53041,IPR011109,PF07508,PS51736, IPR006118,PF13408,Coil,IPR036162,PTHR30461:SF3
MKVALYIRVSTAVQFEKGNSVPEQKRRLQAYCESRDWNDYDFFIDPGHSGSNMERPALQKLLRNISRYDLVLVYKLDRLSRNQRDILYLIEDVFLKNNVDFNSITENFDTTTPVGKLMLSIMGAFAELERQQINERMTMGRLAAAEKGKWRGGSGVPTGYRYSPKSKGGSGRLEIDEASAPFVKIMFSLADKGHTMNHICEEVGRMGFPLSGAYVVKTILTNPIYIGMQRYGGKVYPSNHEPLIDKELFDRVQEFVQTREKPSMKSKHLLTGFLYCSCGSRVCYHGIKKNGRRYDYYECYTRMSHGRMKKAEKCPNKIWRMKDLEDAVWNVLEELEYEEIQTFEPDRLAPAQNELKKTERQMEKLMDLYLLDDMPQDVLSKRMEALNQKKEELLEQIDVLSSLPKKTTASDFQKMKGKLAKMKQSDLMTQREFLSSMIERITLLPDHDLEIQWKF

SEQ ID NO: 11003 - protein, 455 aa, Unknown
  Description of Unknown: Integrase B11004 sequence
  PS00397,IPR038109,IPR006119,PS51737,PF00239, cd03768,G3DSA:3.40.50.1390,PTHR30461,IPR025827,SM00857, G3DSA:1.10.10.2600,SSF53041,IPR011109,PF07508,PS51736, IPR006118,PF13408,Coil,IPR036162,PTHR30461:SF3
MRVFLYIRVSTSEQAKEGYSIGEQEQRLRAYCKAKGWKIAKVFTDGGYSGGNTSRPALTELLSAVQKHQADAILVYKLDRLSRSQKDTLTLIDTFLQNNCDFISMTENFDTSSPFGRATIGMLSVFAQLEREQIKERMSMGKEGRAKEGKYHGGGISPIGYEYKDGHLVVNEFEAMQVREMHRLFQSGMPFRIIARTLESKGSRYYEARSVKRTLKNPLYIGKIKHNDTLYPGEHEPIIDEETYNKTMELLNALPTGTKPSKTYLGGLIVCAHCGAKYTVNTVHDTRYNRKYKYYACHSRRKTNKSLIKNPNCQNKIYKVEELDEIIFNEIRKLSIEKNFRSVIKKSDSDNSVILNREIAKLENQKSRLMDLYSIGTFTIEDIQKKIIPIQEQIDKLSEQINIPSIPEQTAHELIQSFDDVLKNGNHDEIKMVIDSLIDKIEIDGEDIAIYWAFV

SEQ ID NO: 11004 - protein, 454 aa, Unknown; identical to SEQ ID NO: 9791
  Description of Unknown: Integrase B11005 sequence
  cd00338,PF13408,IPR011109,IPR038109,PF07508, PS51736,G3DSA:3.40.50.1390,PTHR30461,IPR006119,IPR036162, IPR025827,PS51737,PF00239,SM00857,G3DSA:1.10.10.2600, SSF53041

SEQ ID NO: 11005 - protein, 454 aa, Unknown
  Description of Unknown: Integrase B11006 sequence
  IPR038109,PS00397,IPR006119,PS51737,PF00239,G3DSA:3.40.50.1390 ,PTHR30461,IPR025827,SM00857,G3DSA:1.10.10.2600, SSF53041,IPR011109,PS51736,IPR006118,cd00338, PF13408,Coil,IPR036162,PTHR30461:SF3
MECVAYLRVSTEKQAEEGNGLDSQKRDIENYCRKNQLIISDWYEDDGFTGSNMNRPALQRLINDCSKKKLKCVVAFKLDRLSRSMVDGIYLIERVFIPNGVDFRCVHDSVSYDSPMEQAYTQMMAVFAQLDKNTMLLRMRGGMLERVKQGYWMGGGNTPYCYKYSKEDGILVPIPERKEMALRAMNLYISGYSDVRIQKLIGFKSEFVTRQVLTSPVNIGMIPYKGKLYKGRHEPIFDIKVFELAQELRKTRKQSKSFCVNHENQLLTGLCYCGVCGCKMRYQKWTHGKHKIYCYSRDNGMSYLPNYNPNCSNSLEWAEDIEKQVEDEILKISLNLSSHKPKERESCLDILSKQLQKEKTKLKRLYTLYAEGNDTVLEMIKETESGIDELKLKIQNEMKNPDNSQKKEFVYDNIKKLADVWEHIDKQNKNRILKTIISKIIIVNGNIEIQLKKF

SEQ ID NO: 11006 - protein, 454 aa, Unknown
  Description of Unknown: Integrase B11007 sequence
  PF13408,IPR011109,IPR038109,PF07508,PS51736, IPR036162,IPR006119,G3DSA:3.40.50.1390,PTHR30461,PTHR30461:SF3, IPR025827,PS51737,PF00239,SM00857,cd03768, G3DSA:1.10.10.2600,SSF53041
VQTAIYARVSTASDDQANALDQQLTRLRLRAEQLGDPVVEFVDVMSGSRDDRPQLARLMEAIQAGQIKAVICTRLDRMSRSTVHGGKLLRQFSQPNWPNLICLDQPIDLSTPGGRFFASVLMGLAQMESENIGERVHHGQMHARSKMKPQAGKPPFGYRYTEGKENYAIDPVDGPKARQAIEWFLEHGSVRGLLRWSIEELGVPWKSYEGVRRWIQSPVLTGARCYGSQHTFIDDEGKKRRIMNQPGVYDEVIPGAHPPLMSEEELARIRGVLKCSGTVSLRPLRKRLSRVLTGLVYCGHCGRRMTHHFPGRVTYHYMRCGHPLCPAPRLNSIHEEVVEAAVLEELRRSRRVLATHAVAEELERQQLLDPEVMRLQQQLQQWRGLNDPDLDEVIAKKERELQERLNAAELHPSCGFTVEQAVAALEDERTWHDLTETREKLRLLFSQWVEQVVV

SEQ ID NO: 11007 - protein, 454 aa, Unknown
  Description of Unknown: Integrase B11008 sequence
  PS00397,IPR038109,IPR006119,PS51737,PF00239,G3DSA:3.40.50.1390 ,PTHR30461,IPR025827,SM00857,G3DSA:1.10.10.2600, SSF53041,IPR011109,PS51736,IPR006118,cd00338, PF13408,Coil,IPR036162,PTHR30461:SF3
MECVAYLRVSTEKQVEEGNGLDSQKRDIENYCRKNQLIISDWYEDDGFTGSNMNRPELQRLINDCSKKKLKCVVAFKLDRLSRSMVDGIYLIERVFIPNGVDFRCVHDSVSYDSPMEQAYTQMMAVFAQLDKNTMLLRMRGGMLERVKQGYWMGGGNTPYCYRYSKEDGILVPIPERKEMALRAMNLYISGYSDVRIQKLIGFKSEFVTRQVLTSPVNIGMIPYKGKLYKGRHEPIFDIKVFELAQELRKTRKQSKSFCVNHENQLLTGLCYCGVCGCKMRYQKWTHGKHKIYCYSRDNGMSYLPNYNPNCNNSLEWAEDIEKQVEDEILKISLNLSSHKPKERESCLDILSKQLQKEKTKLKRLYTLYAEGNDTVLEMIKETESGIDELKIKIQNEMKNPDNSQKKEFVYDNIKKLADVWEHIDKQNKNRILKTIISKIIIVNGNIEIQLKKF

SEQ ID NO: 11008 - protein, 454 aa, Unknown
  Description of Unknown: Integrase B11009 sequence
  IPR038109,PS00397,IPR006119,PS51737,PF00239,G3DSA:3.40.50.1390 ,PTHR30461,IPR025827,SM00857,G3DSA:1.10.10.2600, SSF53041,IPR011109,PS51736,IPR006118,cd00338, PF13408,Coil,IPR036162,PTHR30461:SF3
MKCAIYIRVSSQEQTMHGYSLEAQEKLLRDYAEQNSMEVYDLYADRGKSANKALHRRTELLRMVKDAEDGKFQVVVFKDITRWSRNSSHYWMIQDRLDKCGVSWIAVEQPYLETRTPTGRFQVTVMLGTAQLESENTSQRIRFVQEHRAAQGGVLSGNVPLGYKIEQINGMKRLVIDPEKRDMVNDLFRYYTRYRNQAATIDYIREKYGVRIWASRMNALLKNPIYKGEYRSNPKYCEPYLTASEWSMVQSYWQVRQPSKHNDLYIFRSLIRCPECGHVLTANYRHNTVYYRCCYSAVQHRCGYRKQHRQDAIEADLLEQISFALDNTEIFDADVHDEQDDIAPKIEKLNRKLSNLKDLYIDGDIDKASYTVRKDALKAEISRLEAQQSKSSVPSISMLETPWKALYEQKNNAGKAEWWRFVLERIDISDDGYIPTYRNYSENQQQNIGVLKLH

SEQ ID NO: 11009 - protein, 454 aa, Unknown
  Description of Unknown: Integrase B11010 sequence
  PS00397,IPR038109,IPR006119,PS51737,PF00239,G3DSA:3.40.50.1390 ,PTHR30461,IPR025827,SM00857,G3DSA:1.10.10.2600, SSF53041,IPR011109,PS51736,IPR006118,cd00338, PF13408,Coil,IPR036162,PTHR30461:SF3
MKKVACYARVSTDEQARFGFSIDAQRTALEKYCKENKFNYDFYIDEGISASSINRPALQELLKYIKNYNMIIFTKLDRLSRNVLDANKLNELFQKNNVTIKAIDEDDIDTSTADGMFIFNLKLSLAQREIEKTSERINFVFADKRAKGEITSGARKFGYNIVNKHFEVNEKEAQMIKDLFDYYISVNGSHTKTFEYFQPLFHKSISMMKRYLKDTAYIGKYKLAEKDIYIDNYIPAILDEDTFYKAQKLNKRIEYKSFDDVVSLFGGLCYCNRCKYRMTKIIDRRINPARVYYKCYRYRQYLTGTTQRGCINSNTISQIELEDYLINNLSELIVNYNVKIESKNKNNSKDNTEKINKIQNKIDKLRNLYLEDLISKDDYAMEYNKYITLLNELKTEDYINISKKTTRKNLDKLSKMNFKKFYSKLNQEQKKAFWFSIIDKIYIENHKVTKIEFA

SEQ ID NO: 11010 - protein, 453 aa, Unknown
  Description of Unknown: Integrase B11011 sequence
  cd00338,IPR011109,PS00397,IPR038109,Coil, PS51736,G3DSA:3.40.50.1390,IPR036162,IPR006119,PTHR30461, PS51737,PF00239,SM00857,G3DSA:1.10.10.2600,IPR006118, SSF53041
MECVAYIRVSTERQVEEGYGLESQKRDIEEYCKKNEMLITDWYIDAGLSGMDMTKRVELQRLISDISKINDIVVYKLDRLARDSVDALYMIEKLFTPKGVRVNSVHDFARYETPQDKFQTHIMAAVAEYDRNTMLLRMRGGMLERVKNGYWMGGGNTPYCYRYDKNLGYLVPIPERAEQANRAMDLFIGGMSDVKIQRLLGYKSEFVVRNILTGVVNIGYIPYKGGTYKGLHEPIFEHDKFYLAQELRKSRRKQHVYNFTEPHLLTGLCYCKTCGCKMRYQKITGMGIHKIYCCSHDKYLDYLPNYNADCDNPGAWASDIEIAFEHEILGISINLSQYKPKAKETKLQILTNQLEKQKSKLKRLYTLYAEGNDMVLDMIKTLETEIRETTEKISAERKNGQHEQKKEFVYENIKKLADIWDGISKSQKNSILKTIIDKVIVGKDDIEIQLKNF

SEQ ID NO: 11011 - protein, 453 aa, Unknown
  Description of Unknown: Integrase B11012 sequence
  cd00338,IPR011109,IPR038109,Coil,IPR036162, IPR006119,G3DSA:3.40.50.1390,PTHR30461,PTHR30461:SF3,PS51737, PF00239,SM00857,G3DSA:1.10.10.2600,SSF53041
MRVLGRIRLSRLTDESTSAARQRELIEQWAQSHDHEVIGWAEDLDVSGSVDPFDTPALGPWLTQEKLPEWDILCAWKLDRIGRRAIPLNKMFGWIMEHNKVLVCVSDSIDLSTWVGRLVASVIAGVAEGELEAIRERTRASRKKLLETGRWPGGPVPFGLQPVELPTGGWRLELHPDEAPVLRQIVTEVCAGNAIDAVAENHQMLPTTLWKMLTAKYLLGHATYEGQTVRDSQGQPVLNAEPVLTTDEWNKLQQAVEQRRRGPHRTRDTSPLLGVVKCYKCGENLFHKIYHRDYGKRLYRYYHCRVAGHCAQVDADMIEAELEEAFLESVGDETVKEKVFIPAEDHHNELEDAKRAVDEITSMWVTVTSTAVKQRLMEQIEALDARISRLEQMPTRIAGYNFTDTGITFKSKWETSTPEERRQLMLKAGITYSVSREPGTQMFTARFYRPDEM

SEQ ID NO: 11012 - protein, 453 aa, Unknown
  Description of Unknown: Integrase B11013 sequence
  cd00338,PF13408,IPR038109,Coil, PS51736,IPR036162,IPR006119,PTHR30461, G3DSA:3.40.50.1390,PTHR30461:SF3,IPR025827,PF00239, SM00857,G3DSA:1.10.10.2600,SSF53041
MECVAYMRVSTEKQAVEGNGLDSQKRDIENYCRKNELIISDWYIDDGYTGTNMDRPELQRLVNDCSRKRVSCVVAFKLDRLSRNMIDGIYLIEKVFQKYNVMFKCVHDSVSYNSPMEQAYTQMMAVFAQLDKNTMMLRMRGGMLERVKQGYWFGGGNLPYCYSYSKEQGILIPIPERAEQARKALELFISGYSDAKIKEICGFKSEIVTRSILTSVVNVGMIPYKGKVYRGRHEAVFDKDRFELALELRRSRRSAKVSCITEPNLLTGLCYCGICGCKMRYQKWGSKKHKIYCCSRNKSLSYLPNYNASCNNSLEWADEIEKQVEEEILKISLDLSSYKPKEKATKLEIMQSQLEKEQTKLKRLYNLYADGNDTVLEMIKELESQIKETKLNIAAESKNAINTQKKEFVYENIKKLADIWDKVDKKQKNMILKTIIDRIVIVNGNIEIQLKNF

SEQ ID NO: 11013 - protein, 453 aa, Unknown
  Description of Unknown: Integrase B11014 sequence
  cd00338,IPR011109,PS00397,IPR038109,Coil, PS51736,IPR036162,PTHR30461,IPR006119,G3DSA:3.40.50.1390, PS51737,PF00239,SM00857,G3DSA:1.10.10.2600,IPR006118, SSF53041
MECVAYIRVSTERQVEEGYGLESQKRDIEEYCKKNEMLITDWYIDAGLSGMDMSKRVELQRLISDISKINNIVVYKLDRLARDSVDALYMIEKLFTPKGVRVNSVHDFARYETPQDKFQTHIMAAVAEYDRNTMLLRMRGGMLERVKNGYWMGGGNTPYCYRYDKNLGYLVPIPERAEQANRAMDLFIDGMSDVKIQRLLGYKSEFVVRNILTGVVNIGYIPYKGGTYKGLHEPIYEHDKFYLAQELRKSRRKQHVYSFTEPHLLTGLCYCKTCGCKMRYQKITGMGIHKIYCCSHDKYLDYLPNYNADCDNPGAWASDIEKAFEHEILDISINLSQYKPKAKETKLQILTNQLEKQKSKLKRLYTLYAEGNDMVLDMIKTLEAEIKETTEKISAERKNGQHEQKKEFVYENIKKLADIWDGISKSQKNSILKTIIDKVIVGKDDIEIQLKNF

SEQ ID NO: 11014 - protein, 453 aa, Unknown
  Description of Unknown: Integrase B11015 sequence
  cd00338,PF13408,IPR038109,Coil,PS51736, G3DSA:3.40.50.1390,IPR006119,IPR036162,PTHR30461,PTHR30461:SF3, IPR025827,PF00239,SM00857,G3DSA:1.10.10.2600,SSF53041
MECVAYMRVSTEKQAEEGNGLESQRRDIENYCRKNELVITDWYIDDGYTGANMDRPELQRLVSDCDRKRVGYVVAFKLDRISRSMVDGIYLIERVFLKNNVEFKCVHDSISYDNPMEQAYTQMMAVFAQLDKNTMLLRMRGGMLERVKQGYWMGGGNLPYCYTYSKDTGTLIPISERKEQANKAMDLFLQGYSDVKIRDMLGFKSEFVVKQVLTSPVNIGMIPYKGNIYQGLHEPIFNKEVFEKAQQFRAIRKNKRASCHNIQTNLLTGLCYCGICGCAMRYQKWTHGKHKIYCCSRNKDLHYLPNHNPNCNNTLEWASDIEKAVEDEILLISANISDYKPRVKESKLEILQGQLEKEQTKRKRLYNLYAEGNDDVIGMIKEIEKVIENIREQIKEESAIETNKTRQNVFKNIKNLADIWEDIDKKQKNMLLKSIIEKIIISNGNIEIKLKDF

SEQ ID NO: 11015 - protein, 453 aa, Unknown
  Description of Unknown: Integrase B11016 sequence
  cd00338,PF13408,PS00397,Coil, PS51736,G3DSA:3.40.50.1390,PTHR30461,IPR006119, IPR036162,PTHR30461:SF3,IPR025827,PF00239, SM00857,IPR006118,SSF53041
MSIIRVACYIRVSTQEQKLHGISLDAQREKLKEYAEKHGFIIIEWYEDEGVSGRKLIKRRPALQRMLNDAKAGKFDRIIFIKLDRFFRSVAEYHECMKYIDPVIWTATEEKYDLSTANGRAFVNMKLTIAELEADQTGERIDLVNEYKVKTGQALTGAQSQGIGYTVKKDSEGIKRVVKDKKYEAFVTDFINHFLTYQNKKQAFDYATDKHNVKTYYNSMSKLLTDTKIYGHYRGNDKYCEPYISKESFEQIQQILSKNIKSTPSKNVYLFTGLIPCPLCGNNLTSTFNGSKKPIISYRCNTYSVQKHCTFKYRPNEKKIETLLLENLNKYMTSYIETSKIEDARIQDTHASDKIVDIKAEMERTTKAYRKGRITEAEYDKEYEELETKLKELESHLEPILERDLTVYEELLKSNWQDLYYALTRENKRAFWRKYLKAIKVNKDGTFQQPIFF

SEQ ID NO: 11016 - protein, 453 aa, Unknown
  Description of Unknown: Integrase B11017 sequence
  cd00338,PF13408,IPR011109,PS00397,IPR038109, Coil,PS51736,IPR036162,PTHR30461,IPR006119, G3DSA:3.40.50.1390,PS51737,IPR025827,PF00239,SM00857, G3DSA:1.10.10.2600,IPR006118,SSF53041
MECVAYIRVSTEKQVEEGYGLESQQRDIKEYCQKNNMIISHWYIDAGLTGMEMSKRVALQELISDLKKIDKVVIYKLDRLARDSVDALNMIEKIFVPRNVEVLSVHDFAKYKTPQDKFQTQIMAAVAEYDRNTMLLRMRGGMLERIKEGYWPGGGNTPYCYSYSKETGTLVPIPERKKQANEAIDLFLQGYSDNKIRDMLGFKSEMVVRSLLISPVNIGYIPYKGKIYKGKHEPIFEIDKFNLAQEVRKNRRKKKTTCINKEPNLLTGLCYCGVCGCSMRYQKWTHGKHKIYCCSRDKSMSYLPNYNANCDNTLEWAVDIEKQVEEEIIKISLNLSSEKPVAKQSKIEILQSQIKKEENRRKRFFNLYADGNDDVLLSIKEINNTIKSLKEQLETERSNTDLNRKKSVTYKNIKKIADVWDSIDKKDKNIILKSIIDKIVIVNGNIEIQLKNF

SEQ ID NO: 11017 - protein, 453 aa, Unknown
  Description of Unknown: Integrase B11018 sequence
  PF13408,Coil,PS51736,IPR036162,IPR006119, G3DSA:3.40.50.1390,PTHR30461,PTHR30461:SF3,IPR025827,PF00239, SM00857,cd03768,SSF53041
MAGANEGNVAGLIVWRLDRWTRSLRDLIDSIAALEASGAAFVSVTESIDTSGPMGRFVLHLLGALAQLERETISQRVKLGIHRRMAEGTYIGGRMPAGLQVGKDRKIVANGTTSKAIAACWGMARNGGSLLDCARHLTKAKVPGSWTKTRIASLLRCQKYRGILVSAVEQDQAIAALGFVPSPGNRVAGRIRSTQQQPSNRVWRLHGVAVCFRCGASLAGSHSTGNGGPIAYLRCTGRMRGNKCDAPNLPAEAYENLIVQELAKELSDGPKLIRRIQATAAAAEKQAAPAAADRKLAQGELDRTQAVLDRALNLALEGGPTARAVTAKIGELQQQVEAIQNRIAVADGAMAAMNVSRLDTDVMVQAIETHAKGLPSLPWEDQAKAIKELVHVIRLDVDRFEVEISPPGAQQKMVRKGVPGKLSEPNTLRTIWTHAVTIERKKGWRGKWMVQSA

SEQ ID NO: 11018 - protein, 452 aa, Unknown; identical to SEQ ID NO: 9560
  Description of Unknown: Integrase B11019 sequence
  cd00338,PF13408,IPR011109,IPR038109, PF07508,PS51736,G3DSA:3.40.50.1390,IPR036162, IPR006119,PTHR30461,PTHR30461:SF3,IPR025827, PS51737,PF00239,SM00857,G3DSA:1.10.10.2600,SSF53041

SEQ ID NO: 11019 - protein, 452 aa, Unknown; identical to SEQ ID NO: 10198
  Description of Unknown: Integrase B11020 sequence
  cd00338,PF13408,IPR011109,IPR038109,PF07508, Coil,PS51736,G3DSA:3.40.50.1390,IPR006119,IPR036162, PTHR30461,PTHR30461:SF3,PS51737,IPR025827,PF00239, SM00857,G3DSA:1.10.10.2600,SSF53041

SEQ ID NO: 11020 - protein, 452 aa, Unknown
  Description of Unknown: Integrase B11021 sequence
  PS00397,IPR038109,IPR006119,PS51737,PF00239, cd03768,G3DSA:3.40.50.1390,PTHR30461,IPR025827,SM00857, G3DSA:1.10.10.2600,SSF53041,IPR011109,PF07508,PS51736, IPR006118,PF13408,Coil,IPR036162,PTHR30461:SF3
MKAAIYIRVSTQEQIENYSIQAQTEKLTALCRSKDWDVYDIFIDGGYSGSNMNRPALNEMLSKLHEIDAVVVYRLDRLSRSQRDTITLIEEYFLKNNVEFVSLSETLDTSSPFGRAMIGILSVFAQLERETIRDRMVMGKIKRIEAGLPLTTAKGRTFGYDVIDTKLYINEEEAKQLQMIYDIFEEEKSITSLQKRLKKLGFKVKSYSSYNNWLTNDLYCGYVSYADKVHTKGVHEPIISEEQFYRVQEIFSRMGKNPNMNRDSASLLNNLVVCSKCGLGFVHRRKDTVSRGKKYHYRYYSCKTYKHTHELEKCGNKIWRADKLEELIIDRVNNYSFASRNVDKEDELDNLNEKLKTEHTKKKRLFDLYISGSYEVSELDAMMADIDAQINYYEAQIEANEELKKNKKIQENLADLATVDFDSLEFREKQLYLKSLINKIYIDGEQVTIEWL

SEQ ID NO: 11021 - protein, 451 aa, Unknown
  Description of Unknown: Integrase B11022 sequence
  IPR011109,IPR038109,PF07508,PS51736,G3DSA:3.40.50.1390, PTHR30461,IPR036162,IPR006119,PS51737,PF00239, SM00857,cd03768,G3DSA:1.10.10.2600,SSF53041
MSETLKRRMRCAVYTRKSSEEGLDQEYNSIDAQRDAGHAYIASQRAEGWIPVADDYDDPAFSGGNMDRPGLKRLMADIEAGKIDVVVIYKIDRLTRSLADFSKMVEVFERHGVSFVSVTQQFNTTTSMGRLMLNILLSFAQFEREVTGERIRDKIAASKRKGMWMGGIPPLGYDVENRRLVPNPIEAKLVRQIFKRFVELGSGTLLFKELQLEGLKSKAWTTQDGRTREGKPIDKGLIYKLLNNRTYLGELRHKEQWYQGEHLPIVDVELWDQVHAILESNGRVRGNATRAKVPYLLKGIVFGNDGRAMSPFHTTKKNGRRYRYYVPQRENKEHAGASGLPRLPAAELESAVLDQLRVLLRSPALLSEVLPRAIELDPGLDEAKVTVAMTRLDVIWDQLFPAEQARIVKLLVEKVIVSPNDLEVRLRANGIERVVLELQPASANQSEEVAA

SEQ ID NO: 11022 - protein, 451 aa, Unknown
  Description of Unknown: Integrase B11023 sequence
  IPR038109,PS00397,IPR006119,PS51737, PF00239,G3DSA:3.40.50.1390,PTHR30461,IPR025827, SM00857,G3DSA:1.10.10.2600,SSF53041,IPR011109, PS51736,IPR006118,cd00338,PF13408,Coil,IPR036162,PTHR30461:SF3
MSIKRVAMYIRVSSDKQAQEGDSIPAQRDALQKYIADHGDMVSAGEYLDDGISGTKYSQRDELQRLLDDVTAGKIDLILFVKLDRFFRSIRWYTKTQEILDKHNVGWVAIWEPIYDTTTPQGRLIVNQMMSIAQFEAEQTGQRIRQVNAYKVTQGEVLSGTPPHGYRIVDKHLVPNETAENVVTVFQTFERTSSISKTLRETAGLKDVPRTHHNMKRMLKNEVYIGMYRGNENFCQPLIDRRLWDHVQTLLSRNIKQSQKHTYLFSGLVRCAECGCSMVAYTSRIKSRKYVTIHKRYRCYKRYLCKPAACQNQKTLGENNLEKYLVDNIGELVGKVFIDYEERKKKADGKAAKIAALEEKIERLKTLYVEGLIDIEEYKHDKALYLWRIADLSADVDKPPRIDQNTLKRLNGADFRDVYESLSREERRRFWRGIIKEIRFGLDKRIEVDFL

SEQ ID NO: 11023 - protein, 437 aa, Unknown
  Description of Unknown: Integrase B11024 sequence
  cd00338,PF13408,IPR011109,IPR038109,PF07508, Coil,PS51736,G3DSA:3.40.50.1390,IPR006119,PTHR30461, IPR036162,PTHR30461:SF3,PS51737,IPR025827,PF00239, SM00857,G3DSA:1.10.10.2600,SSF53041
MITDAKNGKINMIITKSVSRFARNTVDSITTIRKLKEIGVGVIFEKENINTLDSTGELLLTIMSSLAQEESRSISENVTWGIRKRMSDGKYSLGYSRFLGFEKGKDGKPIINKEEAEIVKRIYREYLEGKSTHQIVSELEADKIPTPAKKVDKDGNLMCNWRPSTIISILANEKYKGDALLQKTYVTDFLSHKAKKNNGELSQYYIKDSHEAIIPPEEWEMVQVETARRNKPSYKHSGATVFSSKVVCGDCGAYYGLKVWHSTDKYRKTIYQCNHKFKRTEKCSTPNLSEERIKQAFIDSLSQLDRAQVLEDCNLAIETLRNDDTSEVRVRRLNAEIEVVVELVKKNPNMEQVEIDAYVTKYEDLVKKLNAEEHRLESKCAAIKRVEVFAANLKNLEPIIAEFSPRLWNLLLEKAIVGRDDTIKFVYYSGIENTVKI

SEQ ID NO: 11024 - protein, 451 aa, Unknown
  Description of Unknown: Integrase B11025 sequence
  IPR038109,PS00397,IPR006119,PS51737,PF00239,G3DSA:3.40.50.1390 ,PTHR30461,IPR025827,SM00857,G3DSA:1.10.10.2600, SSF53041,IPR011109,PF07508,PS51736,IPR006118, cd00338,PF13408,Coil,IPR036162,PTHR30461:SF3
MSIKRVAMYIRVSSDKQAQEGDSIPAQRDALQKYIADHGDMVSAGEYLDDGISGTKYSQRDELQRLLDDVTAGKIDLILFVKLDRFFRSIRWYTKTQEILDKHNVGWVAIWEPIYDTTTPQGRLIVNQMMSIAQFEAEQTGQRIRQVNAYKVTQGEVLSGTPPHGYRIVNKHLVPNETAENVVTVFKTFERTSSISKTLRETAELKDVPRTHHNMKRMLKNEVYIGMYRGNENFCPPLIDRRLWDHVQTLLSRNIKQSQKHTYLFSGLVRCAECGCSMVAYTSRIKSRQYVTIHKRYRCYGRYMCKPAACQNQKTLGENNLEKYLVDNIGELVGKVFIDYEERKKKADGKAAKIAALEEKIERLKTLYVEGLIDIEEYKHDKALYLGRIADLSAEVDKPPRIDQNTLKRLNGADFRDVYESLSREERRRFWRGIIKEIRFGLDKRIEVDFL

SEQ ID NO: 11025 - protein, 451 aa, Unknown
  Description of Unknown: Integrase B11026 sequence
  cd00338,PF13408,IPR011109,IPR038109,PF07508, Coil,PS51736,IPR036162,IPR006119,PTHR30461, G3DSA:3.40.50.1390,PTHR30461:SF3,PS51737,IPR025827,PF00239, SM00857,G3DSA:1.10.10.2600,SSF53041
MKKLNVGYMRVSTEAQTEKYGLDVQEDKINELAKKRGVKIARWYVDGGYSGSNIQRPNIQKLLEDAEAGEIQAVYIYKLDRMSRDVVDTLTLVSKLLPKYNVEVVSATEDLRNETPMDRVMLGVNAVMGQYEREVIYMRTRAGMVERVKRGLWMGGGTIPYGYRYDRNDGILHIIPEESEKVKAIFQMFRDGYSCDRIQKILGMHSEKLVSNIIRRITYVGKIQYKGRVYQGLHEPIIDEKLFYEVQEEIKKRSTNAYVSNKHMLTGLCYCGKCGTKMRMQKWGKYTKIVCYSQYKEKEHISKTGNPCKNKKVRADVVEKEVEDCFKRFIVNVEEKENESESTKKMIEREISLSESKLKRLYTLYAIGNSGTDTLFGVIQAEEKTLKNLQEELKAEDIKEKAGRGEKIEKIKEMSNVWDTLTDSEKNKVLKECVEKVVIAGDDIDIHFSIY

SEQ ID NO: 11026 - protein, 451 aa, Unknown
  Description of Unknown: Integrase B11027 sequence
  cd00338,PF13408,IPR011109,IPR038109,PF07508, Coil,PS51736,G3DSA:3.40.50.1390,IPR006119,IPR036162, PTHR30461,PTHR30461:SF3,IPR025827,PS51737,PF00239, SM00857,G3DSA:1.10.10.2600,SSF53041
MKKLNVGYMRVSTEAQTEKYGLDVQEDKINELAKKRGVKIARWYVDGGYSGSNIQRPNIQKLLEDAEAGEIQAVYIYKLDRMSRDVVDTLTLVSKLLPKYNVEVVSATEDLRNETPMDRVMLGVNAVMGQYEREVIYMRTRAGMVERVKRGLWMGGGTIPYGYRYDRNDGILHIIPEEAEKVKAIFQMFRDGYSCDRIQKILGMHSEKLVSNIIRRITYVGKIQYKGRVYQGLHEPIIDEKLFCEVQEEIKKRSTNAYVSNKHMLTGLCYCGKCGTKMRMQKWGKYTKIVCYSQYKEKEHISKTGNPCKNKKVRADVVEKEVEDCFKQFIVNVEEKENESESTRKMIEKEISLSESKLKRLYTLYANGNSGTDTLFGVIQAEEKTLKNLREELKAEDIREKAGRGEKIEKIKEMSNVWDTLTDSEKNKVLKECVEKVVITGDDIDIHFSIY

SEQ ID NO: 11027 - protein, 451 aa, Unknown
  Description of Unknown: Integrase B11028 sequence
  IPR011109,IPR038109,PF07508,Coil,PS51736, G3DSA:3.40.50.1390,IPR006119,IPR036162,PTHR30461,PTHR30461:SF3, PS51737,PF00239,SM00857,cd03768,G3DSA:1.10.10.2600, SSF53041
MSEVLKRRMRCAVYTRKSTDEGLDQEYNSIDAQRDAGHAYIASQRAEGWIPVADDYDDPAFSGGNMERPALRRLMADIEAGKIDVVVIYKIDRLTRSLADFSKMVEVFERYGVSFVSVTQQFNTTTSMGRLMLNILLSFAQFEREVTGERIRDKIAASKRKGMWMGGVPPLGYDVENRRLVPNEREAKLIRHIFQRFVELGSGTMLFKELKLDGVTSKAWTTQDGKTRDGKPIDKGLIYKLINNRTYLGELRHKEQWYPAQHPPIIDHELWDKVHAILATNGRVRGNATRATVPYLLKGIVFGNDGRALSPFHTTKKNGRRYRYYVPQRENKEHAGASGLPRLPAAELESAVLDQLRAVLRSPDLLGDVLPRAIKLDPGLDEAKVTVAMTRLDTIWDQLFPAEQTRIVKLLVEKVIVSPNDLEVRLRANGIERLVLELQPAGAAQPEEALA

SEQ ID NO: 11028 - protein, 451 aa, Unknown
  Description of Unknown: Integrase B11029 sequence
  cd00338,PF13408,IPR011109,IPR038109,PF07508, Coil,PS51736,IPR036162,IPR006119,G3DSA:3.40.50.1390, PTHR30461,PS51737,IPR025827,PF00239,SM00857, G3DSA:1.10.10.2600,SSF53041
MAKQRAVAYCRVSSKSKAQMHSLGYQTDYWQRAMAESSEYEFVGIYADSGISGRSMRKRPQLLRLLEDAKEKRFDVVFTKSVARFARNTEELLSMVRELRDEGIKVIFEKEKIDTFNPNSEVFLTIAASVAENDLKIYSQNQTWAMREKYKNGYISVGAKILGYRMRKEDNTLIVEPSEAEVVKRIFYMYIHGKGILAIAKQLTAEKVGLNYGNKGKWSRGAIHYILNNEKYIGCALMQKYYNEDGICRKNRGEVKQYYMENTHEAIISVEDFQKVQELMRERACECEIGVARKNYEFTGKIRCGCCGGNYIRKVQNCGKPYEVIVWVCSRKDTFGSENCYGTRIKDTVLKEKFVECYNEFTAIKGEGDSLLALNQQLAWLLEQERELNALKVNRMIEIADYNAEWKAVKAQIDDINKQIEKQSIQKLTKTDLVPITEYDESKVKTFLDYA

SEQ ID NO: 11029 - protein, 451 aa, Unknown
  Description of Unknown: Integrase B11030 sequence
  IPR011109,IPR038109,PF07508,PS51736,G3DSA:3.40.50.1390, PTHR30461,IPR006119,IPR036162,PS51737,PF00239, SM00857,cd03768,G3DSA:1.10.10.2600,SSF53041
MSEVLKRRMRCAVYTRKSSEEGLDQEYNSIDAQRDAGHSYIASQRAEGWIPVADDYDDPAFSGGNMVRPGLKRLMSDIEAGKVDIVVVYKIDRLTRSLADFSKMVEVFERYGVSFVSVTQQFNTTTSMGRLMLNVLLSFAQFEREVTGERIRDKIAASKRKGMWMGGVPPLGYDVDNRRLVPNEREAKLVRHIFSRFVELGSGTLLIKELRLDGATSKAWTTQDGKVREGKPIDKSLIYKLLNNRTYLGELRHKEQWYQAEHPPIIDSKVWGDVHAILATNGRVRGNATRATVPYLLKGIVFGNDGRALSPWHTTKKNGRRYRYYIPQRDAKEFAGASGLPRLPAAELESAVLDQLRAILRAPDLLGDIVAKAVKFDSTLDEAKIAVAMTRLDVIWDQLFPAEQSRIVRLLVEKVIVSPNDIELRLRANGIERLVLELRPTQVDATEEAMA

SEQ ID NO: 11030 - protein, 451 aa, Unknown
  Description of Unknown: Integrase B11031 sequence
  cd00338,PF13408,IPR011109,PF07508, Coil,PS51736,G3DSA:3.40.50.1390,IPR036162, PTHR30461,IPR006119,mobidb-lite,PS51737, IPR025827,PF00239,SM00857,SSF53041
MTKEGVGYLRISDDREGLERGIERQRADITARAKRERVRIIRWYEDNDRGASRYSRKPRKDYLQMLADVKAGVAGAFIYSYSNSRLTRRNRELEDLLDLHEQTGVQVRTIVSGDDNLSTADGRMVARLKVTMDAAEAERISERVRRQTRERADAGRPHGGRRPYGYPDGRRLDPVEHGVITEVAGRVLNGETLMAVARDLNRRGVATVTGNPWSANVVRQMLTSPRIAGFTGRGGEPVARGAWEPAIGELMWRELRAMLLDPARATPRAGRRSLLVGLALCGECGRPMTSFITHRRHYYVCRGCRLWRAQLAVDRYVEGVMVVFLEHALETEPEDEPRVNAQERKVEQLRRRIAATTAQFTNDDAMTPGQLRELMRSLNAKLAAEEAKLLPPRRRRLQAGLAGPDAAERWELLSLDQKRANIDDLLEIRLLRARSGQRRFDEGTVELRRKG

SEQ ID NO: 11031 - protein, 450 aa, Unknown
  Description of Unknown: Integrase B11032 sequence
  cd00338,PF13408,IPR011109,IPR038109,PF07508, PS51736,G3DSA:3.40.50.1390,IPR036162,IPR006119,PTHR30461, PTHR30461:SF3,IPR025827,PS51737,PF00239,SM00857, G3DSA:1.10.10.2600,SSF53041
MSPDFKTITPRRTPTSRIRVAAYCRVSTMSEAQAGSLAAQVSAYSKLICSNPAWQFAGIYTDQGISGTASNRPGFADMMDHARAGDFQILLVKSISRLAHNTVDLLSCVRELATLGVAVRFERENIDTSSAEGELMLTLLASFAQEESRSISENVTWGHRRRFAEGKVMVPYASLLGYKKGDDGGLAVDEDQARIVRRIYREYLAGHSPKTIAAHLTKDGIPTPLGKKTWSVSTINSILRNEKYKGDALLQKTFTVDFLTKTTKRNEGEIPQYYVTGNHEAIIAPTVWDQVQHELARRSGSSRSFSHPFASKIECGCCAGWYGPKTWHAGSRYERRIWRCNRKYDPAGDQPCETKHVTEEELIAAFEQATSQLAPPPSPEVLEAALDQLGDLHALEAKLAQAITARDAVVDEINALIRSAAKTDFDPDAFETDHATIHPDGTIAIAFNDG

SEQ ID NO: 11032 - protein, 450 aa, Unknown
  Description of Unknown: Integrase B11033 sequence
  IPR011109,IPR038109,PF07508,PS51736,G3DSA:3.40.50.1390, IPR036162,IPR006119,PTHR30461,PTHR30461:SF3,PS51737, PF00239,SM00857,cd03768,G3DSA:1.10.10.2600,SSF53041
MKRKPAAEAAMPATVRKIRAAVYTRKSSEEGLDMEFNSLDAQREACEAYITSQRSEGWVLVPDRYDDGGVSGGTLDRPALRRLLADIERGRLDVIVCYKLDRLSRALMDFAKLVEVFDANNVTFVSITQSFNTTTSMGRLTLNILLSFAQFERELIGERIRDKVAASRARGIWMGGFVPLGYDAKDRKLLVNDAEAALVRRIFGGFVETESGTKLVQALRVEGATTKRGRAFTKSDVYWVLSNRTYLGEAMHKGKSHPGEHAAIVPQAMWDAAHALLTISPRTRANRTRCQTPSLLRGLIFGSDGRAMSPTHARGRRGQQYRYYVSQSVLKGSAADGPAIARISAAEIEGAVIAQVRGLLRQPEVVLGAWRAARASAPDMTEDEARLALERLDPLWEELFPAEQARIIRLLVDRVDVGEGGAGVRLKLEGLASLARDLAMPTAEAPRAAA

SEQ ID NO: 11033 - protein, 450 aa, Unknown
  Description of Unknown: Integrase B11034 sequence
  PS00397,IPR038109,IPR006119,PS51737, PF00239,cd03768,G3DSA:3.40.50.1390,PTHR30461, IPR025827,SM00857,G3DSA:1.10.10.2600,SSF53041,IPR011109 ,PF07508,PS51736,IPR006118,PF13408,Coil,IPR036162,PTHR30461:SF3
MQIAAYIRVSTDKQADKGYSLAEQEERIRAYCKSKDWELVKIYSDGGFTGSNMERPALQELIKEISAYDIVLVNKLDRLSRSQKDTLHLIQDVFAPHGCSFVSMQESFDTTTPIGIAMVGILSAFAQLERSQIKERMKMGKEGRKKKGLWHGGVNIPTGYDYKDGLLLKNEESEQVKIIFQMYLDGVSIRDITRFLQSHYSTRYTSWNYVGTVRRILGNPVYIGMVGEYKGQHEPIIDLDTFEKVQVLLDERKKGGKAPTGKHLLTGMIYCGYCGNRVRSCSSVTKKAKYGYYRCGKADSGQLNKIDKRCELTPKRESEIDEIVMSEILKLDFESIEINENTVSELPDNSLEIEKIDKQINRLIDLYAICGDNVEELAKKLKGLKARKKALEKVSLKPKRATKRHIMDTLKVAQETFENGSIEDKRKIVDALVARIDLFNDTVKITWKFS

SEQ ID NO: 11034 - protein, 450 aa, Unknown
  Description of Unknown: Integrase B11035 sequence
  cd00338,PF13408,IPR011109,IPR038109,PF07508, Coil,PS51736,G3DSA:3.40.50.1390,IPR006119,IPR036162, PTHR30461,PTHR30461:SF3,IPR025827,PS51737,PF00239, SM00857,G3DSA:1.10.10.2600,SSF53041
MKRVALYMRVSSETQVKEGDSIPAQRDALTKYAKEKGYIIAGEYLDDGVSGTKYSQRDELQRMLSDVQAGKIDMIIFTKLDRFFRSVRHYTATQAILDKCGVGWLAIWETIYDTTTPQGRLIVNQMMSVAQFEAENTGQRVRQIQAYKLSKKEVISGTTTAGYMIVDKHLVPDENAPYVRRAFEMYSAVGSINEVMREYGGRYGMPTSKPAFRRMLKSPLYKGEHYSGVKDFCPAIVSADLWDDVQRKLTINIKCNQKQVYLFSGLIRCAECGRVFGSNTRRRKRGNCITVTHQYRCTGYYARFPRQCTNPKVVAESMMERYLIEHIQPMIKDKILEYEIAEKEIPSRIPDMIARTEKKLDRLKVLYIDGLIDLNAYKADRAALQDELIDLQSKAQKRHTADSTALKRLLSPDVWELYSTFTREEKRRFWRGIISRIEFDSDRSIKVIFL

SEQ ID NO: 11035 - protein, 450 aa, Unknown
  Description of Unknown: Integrase B11036 sequence
  cd00338,PF13408,IPR011109,IPR038109,Coil, PS51736,IPR036162,PTHR30461,G3DSA:3.40.50.1390,IPR006119, IPR025827,PS51737,PF00239,SM00857,G3DSA:1.10.10.2600, SSF53041
LKKVLRIGGYVRVSHEEQKKFGYSIKAQIQEIENWCNENEHKLVNMYIDEGYSASNMKRPQLQQMLNDLPKLDAIVFTRLDRLSRNVFEANKMLDLFKRNNTDMIGISEDYTDTTTSNGMLMFNLKLTLAQHELLRGSERIKAVFEYKVREGEPVTGKLPYGYKIINENGKKKIVKDEATEPIVNDLFEHFATYHSIRSTCFYINNKHGISKDYRTYSRILKRELYTGKYKTNPNYAPAYITEEQYLLNQEYIKANNKVRKNKNIYLFSNMMKCPKCGLSFVGKYHDGCKRYFSYTCSNRKRRNGCSYNKNITEIKLEKFLLDNVEELHKQHRAYVKTNVEKLPEPEKENVKKRIKEIKIELENLTYAFRKNRITAKVYDLEYTELETELNKLQASLNANSSLHIAPDFFNSNWKELYNNLEKDKKRALWQSLIKEIKFDEDRNFTIIFR

SEQ ID NO: 11036 - protein, 450 aa, Unknown
  Description of Unknown: Integrase B11037 sequence
  IPR038109,PS00397,IPR006119,PS51737,PF00239,G3DSA:3.40.50.1390 ,PTHR30461,IPR025827,SM00857,G3DSA:1.10.10.2600, SSF53041,IPR011109,PF07508,PS51736,IPR006118, cd00338,PF13408,Coil,IPR036162,PTHR30461:SF3
MIRAALYARVSTDRQAKEGDSIPAQMSALRKYAAEHDDVTIAGEYIDDGVSGRKIDRDELQRLLDDVRSGKIDVIIFTKLDRWFRSIRHYINTQELLDRHKVGWLAIWEPIYDTTTPAGRLIVNQMLSIAQFEAENTGARIRQVMDYKAQRGEAVSGKVPYGYKIADKRLVIVPERAEIVKAIFEVYAKTGSIADATREAERHGLTRTALSIKKMLQQEKYAGIYTTNAGVVVNDYCPQIVPDDIYTAAQNQLRAGSRSDAKTIYIFSGLLVCAECGRRFRGGRSHAKTPTYKCPIHDMYKRCPNANAIREKDIEKFLLDSIRETANKADIRLVETPKANKRKDTRQSEKERLKRRLERLKDLYLSELMTLDEYKQEKEKIVSSLEAIEETQPDDPGEKQPGAQFLAYFTANGWEKTYHVLTPQEKRLLWRSIVREITISKDRILTVEYL

SEQ ID NO: 11037 - protein, 450 aa, Unknown
  Description of Unknown: Integrase B11038 sequence
  IPR011109,IPR038109,PF07508,PS51736,G3DSA:3.40.50.1390, IPR036162,IPR006119,PTHR30461,PTHR30461:SF3,PS51737, PF00239,SM00857,cd03768,G3DSA:1.10.10.2600,SSF53041
MKRKPAAETAMPATVRKIRAAVYTRKSSEEGLDMEFNSLDAQREACEAYITSQRSEGWVLVRDRYDDGGVSGGTLERPALRRLLADIERGLIDVVVVYKIDRLSRALMDFAKLVEVFDANSVTFVSVTQSFNTTTSMGRLTLNILLSFAQFEREVIGERIRDKVAASRARGIWMGGFLPLGYDAKDRKLLVNEAEAALVRRIFEGFVETESGTKLVQALRAEGATTKRGRAFTKSDVYRVLSNRTYLGEAMHKGRSHPGEHAAIVPQPMWDAAHALLAISPKTRANRTRCQTPSLLRGLIFGSDGRAMSPTHARGRRGQQYRYYVSQSVLKGSAVDGPAIARISAAEIEGAVIAQVRGLLRQPEVVLGAWRAARASAPDMTEDEARLALERLDPLWEELFPAEQARIIRLLVDRVDIGSGGADVRLKLEGLASLARDLAAPPAEAARAAA

SEQ ID NO: 11038 - protein, 449 aa, Unknown
  Description of Unknown: Integrase B11039 sequence
  cd00338,IPR011109,IPR038109,PF07508, Coil,PS51736,IPR036162,PTHR30461, IPR006119,G3DSA:3.40.50.1390,mobidb-lite,PS51737, PF00239,SM00857,G3DSA:1.10.10.2600,SSF53041
VHRRCGLYARQSKGDLDGIDRQLPRLKALATARGWTVIDQYLDDDVTASKPRGDETGWKRMLDDATAGLIDTVIAVDIDRLLRSTRDLNTLIDHGLMAVTVDGEIDLSTADGEFRATMLAGVARFEVRRKGERQSRAQQQRAEKGRPAKGIRATGYTLQGEVVEAEAEVVRRIFDRFTAGDTLRGIAADLERDGIRTRRGGGWSPSTVSSILRNARYAGRSVYKGADVGAAIWPPLVSPAQFSAVAARLDDPRRKTRGEDTARRHFGSGLYYCTCGLRVRSSSGMRNGAHRYTCRQGCFYRSGRPVDEFVLALIREWLGQPDLRDLLAQPVDQPRLKELTAERKDLGNQRLRAEADYDDDLIDGRRYRTKIDKINARLAAIRAEEAKIVGRVGADSVFLHEDPVAAFDASPLAIQRRVADTLMTITLHRGAHGRRAFDPESVRVDWRAD

SEQ ID NO: 11039 - protein, 449 aa, Unknown
  Description of Unknown: Integrase B11040 sequence
  cd00338,PF13408,IPR011109,IPR038109,Coil, PS51736,G3DSA:3.40.50.1390,IPR006119,IPR036162,PTHR30461, PTHR30461:SF3,PS51737,IPR025827,PF00239,SM00857, G3DSA:1.10.10.2600,SSF53041
MKKTLRIGGYPRVSKDEQKKFGFSIQAQVDKIENWCNENKYHLVDMYTDEGYTAGNMKRPGLLRMLDDLDKLDVIVFTRLDRFSRNVLEANKMLEMLREHNVNLISIEEDDIDTTTADGMFIFQLKVSLAERELKKGSERIKSVFEYKIKQGQPITGTQPFGYKIFKKDKDKYVGKDEEVSHIIEDMFIHFQTYHSVRATMQYINDKYNLSKCYRSYYDMFKNTYYTGSYKGNDNYCPPYITMQQFIRNQVIIKNNIRERKNKHVHLFTGLIKCPICGCSFIAQGTKKGGKMYYSYRCNGAYMNTMKKCKLRKSISELIVEKFLLENIEVLANDYILKVSEVKPVKKNGKEKRIKEITNELDRLSYSFHKNRISVEKYDEEYERLEKELKHLLLNVEEKKDLQPLKDFLNSNWRNVYNELTKENKRALWRNLIKKINIDEDFNMSIDFL

SEQ ID NO: 11040 - protein, 449 aa, Unknown
  Description of Unknown: Integrase B11041 sequence
  IPR011109,IPR038109,PF07508,PS51736,G3DSA:3.40.50.1390, IPR006119,IPR036162,PTHR30461,PTHR30461:SF3,PS51737, PF00239,SM00857,cd03768,G3DSA:1.10.10.2600,SSF53041
MSNEQKRLICAIYTRKSTEEGLDQNFNSLDAQRDSCENYVASHKPEGWVMSRTRYDDGGYSGGNIERPGLKQLLDDVRSGLVDIIVVYKIDRLSRSLADFAKLVEIFDEHKVTFVAVTQAFNTTNSMGRLTLNILLSFAQFERELAGERVRDKIAASRQRGIWMGGMPPLGYDVVDRKLVPNPKEADLVRELFARFAALPSMAYLVRELRAKGVKSKSWTTVKGHERHGKLIDKGYIYKIFKNPVYIGLVAYKGNRYPGQHSAIVDQSLWDSVQAALSTGNQNVKGGSAARETKAPTILRGLLFSEEGRAFTPGWTSKGAKQYRYYINTNSIKLGKDSCEVQRIPAGEIEGVVVEKIRSFLRSPEVLSQAVKEITITRPDISEEESITALQNIEQVWDHLFPAEQARIIQVLIERITIRKDGISIKWHAKGMPKLLRESITQTQYREAA

SEQ ID NO: 11041 - protein, 448 aa, Unknown
  Description of Unknown: Integrase B11042 sequence
  IPR038109,PS00397,IPR006119,PS51737, PF00239,G3DSA:3.40.50.1390,PTHR30461,IPR025827, SM00857,G3DSA:1.10.10.2600,SSF53041,IPR011109, PS51736,IPR006118,cd00338,PF13408,Coil,IPR036162,PTHR30461:SF3
MTRTAIYLRVSSDRQAREGDSIPAQREALRTYIDERPDLAFVGEYLDDGISGTKADRDELQRLLEDVEQGRIDLILFVKLDRWFRSVRHYTATQEILDRHGVGWTAIWEPIYDTTTPAGRLIVNQMMSIAQFEAENTGQRIRQVQAYKISQGEVISGSTPPGYSIEGKRLVPNEDAQNVLEAFRTYDRTGSLNGTMTRCAGLHGLPRSKPTFKRMLSNPIYIGRHPRNDHFCEAIIPEDLFERVQRGLRMNVKISQKNVYIFSGLLRCAECGAALGGNTRRRQRGNGKLEIIHQYRCAKHYQRKPAQCGNAKVLLESVLEDYLLTNIRQAIGDRILEYEIQAAPVRDRSARIAEWQGKLKRLKELYVDDLITIEEYKADRETYLQQIAELEAEAQAPAEADLAALRELLSTDFEEIYYTLNKAEKRRFWRSVLTEIRFHSDRTIDLYF

SEQ ID NO: 11042 - protein, 448 aa, Unknown
  Description of Unknown: Integrase B11043 sequence
  cd00338,PF13408,IPR011109,IPR038109,Coil, PS51736,G3DSA:3.40.50.1390,PTHR30461,IPR036162,IPR006119, PTHR30461:SF3,IPR025827,PS51737,PF00239,SM00857, G3DSA:1.10.10.2600,SSF53041
MKRAAIYMRVSTEKQVKEGDSIPAQREALHKYIDSRPDLICVGEFLDDGISGTKYDRDELQKMLSEVEDGKIDLIVVTKMDRLHRSLKNFLDMQDILDKHHCNWLAIWEPMYDTSTPQGRMIINTMMNLAQFEAENTGQRIRQVQSYKVTQGNVISGSCPPGYSIENKRLVPNQDAPKVKELFEHYSISGSLAATMKLVSDDPHFPHSPCAFKHMLKNETYIGKKRDNPDFCEPIISQELFDDVQRKLSINIKKDQKYAYIFSGLLRCKECGKSMAAFRYYKKRPTKTYRVPGYRCATRYNRGIHDCNNTKVITESVLEKYLLENVRAQIKDMILEYEIEEKPVKDNSNRIASLEKKKDRLKDLYINGLIELDEYKSDREQIESELAALTAYKPRTGPDMDSLKDLLSTDFEALYGTFSAEERRFFWRSIIKEIRFDKDRNYDIIFLA

SEQ ID NO: 11043 - protein, 448 aa, Unknown
  Description of Unknown: Integrase B11044 sequence
  cd00338,PF13408,IPR011109,IPR038109,Coil, PS51736,G3DSA:3.40.50.1390,PTHR30461,IPR006119,IPR036162, IPR025827,PS51737,PF00239,SM00857,G3DSA:1.10.10.2600, SSF53041
MPIIRAALYMRVSTDKQVKEGDSIAAQQSALQKYAKEKGYVIVGEYIDDGISGTKADRDEYQKMLSDVQERKIDLLICTKLDRIHRGLKNFLLMQEIFDKYGVNWIAIWEPIYDTSTPQGRLIINQMMSIAQFEAENTSQRIKQVFQYKAEKGEALSGNVPLGYKIQDKHLVPDENAEYILQAFVYFAQTSSIFGTMNHFSHLGIFPKTRGSFKWLLKNEKYKGCYKGKSGYCPAIVPKELFDDVQNKLLKDVRKSQKHTYIFSSLVVCKECGCKMTGQLHYSYKGSKPQKVYICKSHYNMRPRTCSNAKKLNQNVLERYLLENIKPLLEMKVDAVRKEKETDNSARIAYLEKKIKKLKELYINDLIDLKEYKEDKESALAEINALQAHRTVDTKPYEDFIKLNIGEQYKTFTDAEKRIFWRALIDKIVFDTDRNLSVLFLEHYGGSK

SEQ ID NO: 11044 - protein, 448 aa, Unknown
  Description of Unknown: Integrase B11045 sequence
  PS00397,IPR038109,IPR006119,PS51737,PF00239,G3DSA:3.40.50.1390 ,PTHR30461,IPR025827,SM00857,G3DSA:1.10.10.2600, SSF53041,IPR011109,PS51736,IPR006118,cd00338, PF13408,Coil,IPR036162,PTHR30461:SF3
MKRTAIYCRVSTSRQEKEGDSIPAQLDALREYIRQRDDLIPAGEYVDAGISGTKEQRDELQRMLDDVRAGKIDLIIVTKLDRLHRSLRNFLNMQSVLEKNHCEWLAIWEPIYNSSTAQGRMIINTFVNLAEFEAANTSSRIRQVFEYKAQQGEILSGKVLFGYQITDKHLTIDPAAAPVVRALFDEYAKNNSLSDAVRLAGELGRVTDIRSMKRLLKNRKYIGEYRGNPNYCPPIIERAVFDAVQIGLARNIKQSQKRTYIFSGLLVCAECGRKMAGTNHATRRNGKEYPLTLYRCNGHYSPMVHCSQSRTISESTIENAVLKAVKAEVDKITIEQSKPRQTGAQRAKPAKEKAIMRKLERLKAAYLNGAIPLDEYKMDRERLTEELTALKASEPRKTASAVRLDKVFASDFETVYTALNASERRRLWRSVIKEIRMDAGKNLDIIFL

SEQ ID NO: 11045 - protein, 448 aa, Unknown
  Description of Unknown: Integrase B11046 sequence
  cd00338,PF13408,IPR011109,IPR038109,Coil, PS51736,IPR036162,PTHR30461,IPR006119,G3DSA:3.40.50.1390, PTHR30461:SF3,PS51737,IPR025827,PF00239,SM00857, G3DSA:1.10.10.2600,SSF53041
MKRAAIYMRVSTQIQAQEGDSIPAQREALHKYIDSRPDLVCVGEYLDDGISGTKYDREELQRMISDVKAGKIDLICVTKMDRLHRSLKNFLDMQDILDKHHCNWLAIWEPMYDTSTPQGRMIINTMMNLAQFEAENTGQRIRQVQAYKVTQGNVISGSCPPGYSIENKRLVPNQDAPKVKELFEQYSICGSLAATMKLVSDDPHFPHSPCAFKHMLQNATYIGRKRDNPDFCKPIISQELFEDVQRKLSINIKKDQKYAYIFSGLLRCKECGKSMAAFRYYKKRPTKTYRVPGYRCATRYNRGAHSCVNSKVITESVLEKYLLENVRAQIKDMILEYEIEEKPVKDNSNRIASLEKKKDRLKDLYINGLIELDEYKSDREQIESELAALTAYKPRTGPDIDSLKDLLATDFEALYGTFSAEERRFFWRSIIKEIRFDKDRNYDIIFLA

SEQ ID NO: 11046 - protein, 448 aa, Unknown
  Description of Unknown: Integrase B11047 sequence
  PS00397,IPR038109,IPR006119,PS51737,PF00239, cd03768,G3DSA:3.40.50.1390,PTHR30461,IPR025827,SM00857, G3DSA:1.10.10.2600,SSF53041,IPR011109,PF07508,PS51736, IPR006118,PF13408,Coil,IPR036162,PTHR30461:SF3
MRAALYLRVSTQEQTENYSIEAQRERLEAYCKSKGWTVYNVYVDGGYSGANINRPALQQMLADLPNIDVVLVYRLDRLSRSQRDTLTLIEDYFLKANVDFVSITETLDTSTPFGKAMIGILSVFAQLERETITERMRLGQIKRAEEGLAAMGGDYDPAGYARQDGKLIIKPDEAEHIRTAYNLYEQLLSITKVQRELKRLGYPVWRFRRYRDILSNRLYCGYVSYAGQHYRGQHEPIISEEQFERVQALLSRHRGHNAHKAKQSLFSGLIRCGWCGETYVSYHTSKSKYGVYRYYICRAKRFPSEYDRKCTNRTWNVKKLEEIVQHELASITLDKEMSERKSKRIDYNKLIKNVDVKIERILSLYADGGIDRTALDRQIEKLNREKNQLLHDQINQGVVEKKRITKEELEKYRVDLTRSDFETKQAIVEKLIKSITINDKSVSIEWLF

SEQ ID NO: 11047 - protein, 447 aa, Unknown
  Description of Unknown: Integrase B11048 sequence
  IPR011109,IPR038109,PF07508,PS51736,IPR036162, IPR006119,PTHR30461,G3DSA:3.40.50.1390,PS51737,PF00239, SM00857,cd03768,G3DSA:1.10.10.2600,SSF53041
MSMLTPKRCAVYCRVSSDERLDQSFNSIDAQRESGLSYVLSQRNEGWVPVQDTYEDPGYSGGNMERPGLKRLMADIKAGKVDMVVVYKIDRLSRSLADFAKMVEVFDKHQISFSSVTQQINSATSTGRLMLNMLLSFAQFEREVTGERIRDKIAASKRKGLWMGGVVPLGYRVEDRQLLVDPQESETVNWIFDTYVSTGYTTLMVHQMKEQNRLTKSGRNFCKQSLHKVLKNRVYLGMISHKGQFYAGAHQPLIDQAKWDCVQEMMARTSEAKNQATWAMKARTEFLLRGLIYSPGGDLYLPMATQKKSGKVYRYYVHNKKMHEGASQSIIPNQPAEPIEQEVTKQVLDFLRSGTMLNQYWHRIESINPGIPEPQAVVLILQRTAKIWDNYFDQVKSHIIRSLVERITLHGDDTVEVSWRTDNWIPLLETMKPKTMGAELLEMEMPA

SEQ ID NO: 11048 - protein, 447 aa, Unknown
  Description of Unknown: Integrase B11049 sequence
  IPR038109,PS00397,IPR006119,PS51737, PF00239,G3DSA:3.40.50.1390,PTHR30461,IPR025827, SM00857,G3DSA:1.10.10.2600,SSF53041,IPR011109, PS51736,IPR006118,cd00338,PF13408,Coil,IPR036162,PTHR30461:SF3
MSITNVAIYVRVSTDRQAKKGDSIDEQLSTCKAYIASKENMVLAGTYIDDGISGRKIKRGDFEQLLDDVRLGRVNLIIFTKLDRWFRSLRHYLNTQAVLEANHCDWLAVDQPYFDTTTPHGRAFVAQSMTFAELEAENDSVRIRDVFDYKYRQGEVLAGKAPLGFSIENKHLVPNQDAEKVLHIFQFYAACNSLNQTITHLESDMGIVMTQSNLKTAILKNKKYIGVFRDNDHYCPAIIPLDLFERVQELLAINVKISQKYNYIFSGLLRCAHCGHSFSGATRKIKKKTGGFYKYPLYKCHGAYPSKRCSNRKVVFESCIERYLIANIKPLLQEHIAEYEITSAKVIDYDSRRAALLKKIDKLKDLYVNDIITMDELKRDKEKYIKELENLPRNQEQKDLAPIRKLLKMDLDSIYQTLEPAERRQLWRSVIKEIQIDDHKNLKVIFL

SEQ ID NO: 11049 - protein, 447 aa, Unknown; identical to SEQ ID NO: 10108
  Description of Unknown: Integrase B11050 sequence
  cd00338,PF13408,IPR011109,IPR038109,PF07508, PS51736,G3DSA:3.40.50.1390,IPR006119,PTHR30461,IPR036162, mobidb-lite,PTHR30461:SF3,IPR025827,PS51737,PF00239, SM00857,G3DSA:1.10.10.2600,SSF53041

SEQ ID NO: 11050 - protein, 447 aa, Unknown
  Description of Unknown: Integrase B11051 sequence
  cd00338,PF13408,IPR011109,IPR038109,Coil, PS51736,IPR036162,IPR006119,PTHR30461,G3DSA:3.40.50.1390, PTHR30461:SF3,IPR025827,PS51737,PF00239,SM00857, G3DSA:1.10.10.2600,SSF53041
MQKLRVVGYARVSHDEQKKYGYSIKTQIERIEKWCIQENHTLVRMYVDEGYSASTMKRPQMQELLQNLKDIDAIVFTRLDRFSRNVLEANQVLQTFAKYNVSIIATDEDVSTTDADGLFNFQLRVSLAERELKKGSERIKAVFGYKIKQAQAITGALPLGYKIEVINNEKKVVKNEDEIEIVNAIFDYFITHQSIRKTMQYIQKEYGYIRCQNVFRNMLKNELYTGSYRGNKAYTEPYITLDQYNRIQELLKANIKQTKTARAYLFSGLIKCNECGYSLAGSCTYDKHVDKEYYYYRCSNCYSNNRCTNKKFFSERRIEKYLIENVEELIKRHLFNVKNINSNKKNIDKTKKRKKEINEELENLNYMFLKKRISKSEYDKFYTELEKELAQLKPAKKENTEALQKFLDSNWSNFYSVIDRDSKRTLWRNLIQEIQIDNSYNITIIFL

SEQ ID NO: 11051 - protein, 447 aa, Unknown
  Description of Unknown: Integrase B11052 sequence
  IPR011109,IPR038109,PF07508,PS51736,IPR036162, PTHR30461,IPR006119,G3DSA:3.40.50.1390,PTHR30461:SF3,PS51737, PF00239,SM00857,cd03768,G3DSA:1.10.10.2600,SSF53041
MSMLTPKRCAVYCRVSSDERLDQSFNSIDAQRESGLSYVLSQRNEGWVPVQDTYEDPGYSGGNMERPGLKRLMADIKAGKVDMVVVYKIDRLSRSLADFAKMVEVFDKHQVSFSSVTQQINSATSTGRLMLNMLLSFAQFEREVTGERIRDKIAASKRKGLWMGGVVPLGYRVEDRQLLIDPQESETVNWIFDAYVSTGSTTLMIQQMKEQNRLTKSGRHFCKQSLHKVLKNRVYLGMISHKGQFYAGAHQPLIDQAKWDCVQEMMARTSEAKNQATWAMKARTEFLLRGLIYSSGGDLYLPMATQKKSGKVYRYYVHNKKMHEGASQSSIPNQPAEPLEQEVTKQVLDFLRSGTMLTQYWQRIQSINPGIPEPQAVVLILQRTAKIWDNYFDQVKSHIIRSLVERVTLHEDDTVEVSWRTDNWIPLLETMKPRTTGAEMLELEMPA

SEQ ID NO: 11052 - protein, 447 aa, Unknown
  Description of Unknown: Integrase B11053 sequence
  PS00397,IPR038109,IPR006119,PS51737, PF00239,G3DSA:3.40.50.1390,PTHR30461,IPR025827, SM00857,G3DSA:1.10.10.2600,SSF53041,IPR011109, PS51736,IPR006118,cd00338,PF13408,Coil,IPR036162,PTHR30461:SF3
MKKALKIGGYVRVSTDEQKKYGYSVRAQIEKINNWCEENGHILIDMFNDEGYTAGNMKRPALLNMLDRLKEFDVIVFTRLDRFSRNVLEANKMLEMLRAHGVNLISIEEDDIDTTTADGMFIFQLKVSLAERELKKTSERIKSVFEYKIKQGQAVTGSLPFGYKIIEKDGKKYVGIDEKLEHIVIEIFAHFLTYHSARATMQHINEKYGLTRCYTTYHKMLKNPFYSGYFKGVSDYCPAYISPAQFEHNQRLLENNIRQRKTKHIYLFSGIIKCPVCGYSMVGTATTKKGKTYYSYRCNNKYMNKACNVKGSISEMIIEDFIIKNANTLAQKHIAKVTEVKPAKKDNAEKRIKEIKEEIDNLNYMFKKRRISAAEYDRDFEALEKELKKLTLKVGKKEDINAVKEFLNSDWELIYNNLEKANKRALWRNLIKEVILDSEFNISLDFI

SEQ ID NO: 11053 - protein, 446 aa, Unknown
  Description of Unknown: Integrase B11054 sequence
  cd00338,PF13408,Coil,PS51736,IPR036162,IPR006119 ,PTHR30461,G3DSA:3.40.50.1390,mobidb-lite,PTHR30461:SF3, IPR025827,PF00239,SM00857,SSF53041
MNIAIYPRKSKKDDNSESMEQQIDDCRKYINKTYPDANIIVYSGDYAITGHSTAKRKDFQRMMDDVRAGRINAVVIMRYDRIARNMRDFCNLYHDMESAGCNLISVSQQIDTSTPYGKNFMYQMANMAELEWAVISERYKDTAAYKIREGKAYTGRVPIGFKIEKIDGVKKVVHDNEEQTRAIFDYLLATKSKRGTVLWVRENLISDFTRHKLDSMINSDLYIGKVRENENFCEPYFTKEQMEEIRSVNQIKYAPSGHIYLFSGLFRCPICGRKMASFYSIDRKTKKHRQYQRCWFGGNEKLHKTKLVSEAKTEKYLLENLDAALKNLEFDVKKEAGKPKQNLNKKLNDAIGERDRLNYLFEKGRIDIPEYEKKYSVLSEKINSITEELSNNKVVRIEEFKKQIPEDWKELYEQLDQKGKQEFWHRIIKEIYLNEAFEITGFIFYI

SEQ ID NO: 11054 - protein, 446 aa, Unknown
  Description of Unknown: Integrase B11055 sequence
  IPR011109,PF07508,Coil,PS51736,IPR036162,IPR006119,G3DSA:3.40.50 .1390,PTHR30461,mobidb-lite,PTHR30461:SF3,PS51737,PF00239, SM00857,cd03768,SSF53041
MKIGYTRVSTREQAQDSSALDQQTHRIKSAGATIIFCDVESGKSFARKEFKKMMALCGQGRVSELIITRIDRLGRSVIGIHQTIEALQKLNIKINVLDSPVNPSSAYGWYSINQMAGLAELESRMLSERINNGMEYFRLMKKASPRPPFGYTRVNEKYEPDLEKWAIAQQAIKFFLNGGTLRSLGQYLLETHGIKLSVSGLRYWLLNPCLRGHTVYGSRGNIDNPEKWTIHQNTHEPLISNLEYHKILRILETNKSKHCYGNGKKDTESYPLSGQIICADCGYKCFIKKRGSKTRVRCKQHDMSGDLFCKNKFTTYLDNIIYNVDSVLHQRYLDIISFTESEITSSDDNPLIVDQERQLRSLRQLPKSPIIDGAIASTLLEIQRLKSLETVKQEISQELEKILVNSFSDLDFWRSIPWRDKSEIYKELIKSVSVSNGEVIEIELFI

SEQ ID NO: 11055 - protein, 446 aa, Unknown
  Description of Unknown: Integrase B11056 sequence
  cd00338,PF13408,Coil,PS51736,IPR036162,PTHR30461 ,IPR006119,G3DSA:3.40.50.1390,mobidb-lite,PTHR30461:SF3, IPR025827,PF00239,SM00857,SSF53041
MNIAIYPRKSKKDDNSESMEQQIDDCRKYINKTYHNANIIVYSGDYAITGHSTAKRKDFQRMMDDVRAGRINAVVIMRYDRIARNMRDFCNLYHDMESAGCNLISVSQQIDTSTPYGKNFMYQMANMAELEWAVISERYKDTAAYKIREGKAYTGRVPIGFKIEKIDGVKKVVHDNEEQTRAIFDYLLATKSKRGTVLWVRENFIPDFTRHKLDTMIKSDLYIGKVRENENFCEPYFTKEKMEEIRSVNQIKYAPSGHIYLFSGLFRCPICGRKMASFYSIDRKTKKHRQYQRCWFGGNEKLHKTKLVSEAKTEKYLLENLDAALKNLEFDVKKEAGKPKRNLNKKLNDAIGERERLNYLFEKGRIDIPEYEKKYSVLSEKINSITEELSNNKVVRIEEFKKQIPEDWKELYEQLDQKGKQEFWHRIIKEIYLNEAFEITGFIFYI

SEQ ID NO: 11056 - protein, 446 aa, Unknown
  Description of Unknown: Integrase B11057 sequence
  cd00338,PF13408,IPR011109,IPR038109, Coil,PS51736,IPR036162,IPR006119, PTHR30461,G3DSA:3.40.50.1390,IPR025827,PS51737, PF00239,SM00857,G3DSA:1.10.10.2600,SSF53041
MPDKRLPEGKRNCAIYTRVSHEDQVKHGLSLSAQLETLQGYAKANKLHVVDVYTDEGISARKPYKKRPEFMRMLADVEAGRVDLVLIIKLDRFFRNVGDFYEVQRILDAHGVAWIATEEEYDTTTANGRLYLNIRLSMAQDEADRDSERIHFVFDGKKQRGEVLTGGTPMGYKILDKRLAVDEPAAENVKALYQHYIDCRSIGGVTRWAREALGLSLNPCTVRKMLRNRVYIGERHGVKDFCPAIIPREQFARVQELLISRSQRNSSTEARRVYLFSGLCRCAECGAAMHTNFIKDHKYYRCRQHENYRNCPNTRQINERTIEQWLLTNLTTEMEKYNADLRARSAGRVLVDTTKIKRKMEKLKDLYLDDMIDHAIYERDFIALRQQLADAEKANAELPPEVDIPAAKELLTLYPQLPEPAKKAFWSRVLRRIEIDAAHNIHIFPA

SEQ ID NO: 11057 - protein, 446 aa, Unknown
  Description of Unknown: Integrase B11058 sequence
  cd00338,PF13408,IPR011109,PS00397,IPR038109, PS51736,G3DSA:3.40.50.1390,IPR006119,IPR036162,PTHR30461, PTHR30461:SF3,IPR025827,PS51737,PF00239,SM00857, G3DSA:1.10.10.2600,IPR006118,SSF53041
LRVALYCRVSTDEQARHGQSIEAQLFHLREWAAKNGHTVVGEYVDAGISGKKPPAKRPELARFFQSLRDGVKVDLLAFCKLDRFFRSVKLYYQAVDVLDKYNVAWQAIHEDYETLTAGGRMKVNIMLSVAENEADRTAERIKVVFERKIANGECVNPHGLPIGYSYDRASKRIVANADADIVRAAFEHYAKTGSVRDTLYYIGDKYGKHLIYKSLALLLHNRLYIGEYRDNLDYCEPIVDKSLFDRVQICLESRSIRHNPTARVYFFSGLIYCGVCGRRMVGVYHNNNGNSTDYNGYRCQRAYQSHLCAHRKFYSERKIEAYLLEHIKQEAGSVSAKTEISRAKKKKKAPNMAEIKGRLSRLKDLYVDGLIDKDEYLRDREKLTELLDCVDAKSDQQKKRIEKVREIFLGCLEEEYSALGRAEKRDFWRAILTRIEITDGDIRFYF

SEQ ID NO: 11058 - protein, 446 aa, Unknown
  Description of Unknown: Integrase B11059 sequence
  PS00397,IPR038109,IPR006119,PS51737,PF00239,G3DSA:3.40.50.1390 ,PTHR30461,IPR025827,SM00857,G3DSA:1.10.10.2600, SSF53041,IPR011109,PF07508,PS51736,IPR006118, cd00338,PF13408,Coil,IPR036162,PTHR30461:SF3
MKRTAIYLRVSTDKQAQEGDSIPAQRDALHKFIDSHDDMIFVEEYMDDGVSGTKSDRDELQRMLQDAKDGKIDQILVTKLDRLYRNIRHYLNMQELLDKYRVNWMAIWEPIYDTSTPQGRLIINQMMSIAQFEAENTGQRIRQVNAYKIANGEVVFGNTPPGLSIQDKHLVPNKDAEIVRQMFEHYAFGGNLWQTMTAFSHYGIFPNDKAAFKRVLKNEKYIGKYRDNPTFCTPIIDKDLFDDVQRKLDMNVKVSQKRVYIFSGMIHCAECGTRYSGLFQGKKNGIIYSAKLYRCCRHYRAIQTCGNTKILNEKRLEEYLVSNIKPLLSEYVISAEKSDAPQKDNSDRIAYLNKKLSKLKELFVNDLLTLDEYKRDKEEIETELTALEEDKKKADEHDLSVCKKFLDMDIDAIYAELSLEEKRVFWRSIIKEIWVDAQKNIRVVFL

SEQ ID NO: 11059 - protein, 446 aa, Unknown
  Description of Unknown: Integrase B11060 sequence
  cd00338,PF13408,Coil,PS51736,IPR036162,G3DSA:3.40.50.1390 ,IPR006119,PTHR30461,mobidb-lite,PTHR30461:SF3, IPR025827,PF00239,SM00857,SSF53041
MNIAIYPRKSKKDDNSESMEQQIDDCRKYINKTYPDANIIVYSGDYAITGHSTAKRKDFQRMMDDVRAGRINAVVIMRYDRIARNMRDFCNLYHDMESAGCNLISVSQQIDTSTPYGKNFMYQMANMAELEWAVISERYKDTAAYKIREGKAYTGRVPIGFKIEKIDGVKKVVHDNDEQTRAIFDYLLATKSKRGTVLWVRENFIPDFTRHKLDTMIKSDLYIGKVRENDHFCEPYFTKDQMEEIRSINQIKYAPSGHIYLFSGLFRCPICGRKMSSFYSIDRKTKKHRQYQRCWFGGNEKLHKTKLVSEAKTEKYLLENLDAALKNLEFDVKKEAGKPKRNLNKKLNDAIAERDRLNYLFEKGRIDIPEYEKKYSVLSEKINSITEELSNNKVVRIEEFKKQIPEDWKELYEQLDQKGKQEFWHRIIKEIYLNEAFEITGFIFYI

SEQ ID NO: 11060 - protein, 446 aa, Unknown
  Description of Unknown: Integrase B11061 sequence
  PS00397,IPR038109,IPR006119,PS51737, PF00239,G3DSA:3.40.50.1390,PTHR30461,IPR025827, SM00857,G3DSA:1.10.10.2600,SSF53041,IPR011109, PS51736,IPR006118,cd00338,PF13408,Coil,IPR036162,PTHR30461:SF3
VKRAALYIRVSTEEQARHGLSLEDQKNNLTQFSKSHGMKIAGIYEDAGISARKPYKKRPALLRLLEDCKAGKIDLILFIKLDRWFRNVGNYYAVQEILDQYNVSWQATQEDYETTTASGRLKVNIMLSVAQDEADRTSERIKFVFEGKRARLEPLTGNIPFGYKIEGKSFKKDESKEALVNDFFKKYLASGSISKTSEFIREKYGVLMRYHLIDKMLRSTTYYGKYYNMDGMCPAYITKEDHEQIQAMRRKVVRKAKNNRTYLFSGLVVCPECGNRMGARINTKQTYVFYNCNGHYTKQNGCQNRVNLGERKIEEYLLATVANKFHEYKANFSALKNAEINKRSRAEISAAKSKLNKLKDLYLNDIITLEELKTDRESLLAKISDLEKAALPEQKQDFESIDRVLIENWKESYDGLNREEKREFWRIIIKEIKIYPDRHIEYSLNV

SEQ ID NO: 11061 - protein, 446 aa, Unknown
  Description of Unknown: Integrase B11062 sequence
  IPR038109,PS00397,IPR006119,PS51737,PF00239, cd03768,G3DSA:3.40.50.1390,PTHR30461,IPR025827,SM00857, G3DSA:1.10.10.2600,SSF53041,IPR011109,PF07508,PS51736, IPR006118,PF13408,Coil,IPR036162,PTHR30461:SF3
MNVFGYCRVSTTMQAEEGYSLEEQKSRIESYCKGMGWNLLKVYVDAGESGAKADRPALQEMIRNIKMVDKVVVYKLDRLSRSQKDTLYLIEDVFLKNKVEFVSMTESLDTATPFGKAMLGTLAVFAQLERETIKERMALGRVARAKSGKYSGNPRTVVGYDYVDGELVVNESERPQIERLFDLILQGKSFSETARILNAEGYTHKYGEWKRGLVRNVVVNPIYTGKVSFEGVLYDGNHQAIIPESKFEQANSLTDDRKSRLNLPVKTGRANSYLGGLLVCAHCGQRYYRHKGVRGQPQYICYTRMFNSQHEDKCFNKRWSMKELDDLILGQVKLLSLDPPKPKKKKEVNKQAEMDKLDEQMNRLLDLFALGTVPMETLQKKMDAINQKKLDLQKKEKAQPDLQPMLRSFEDVLANGTLEDIRAILFAIIDYIELDNQEVSIHWKFF

SEQ ID NO: 11062 - protein, 446 aa, Unknown
  Description of Unknown: Integrase B11063 sequence
  cd00338,PF13408,IPR011109,PS00397,IPR038109, PS51736,IPR036162,IPR006119,PTHR30461,G3DSA:3.40.50.1390, PTHR30461:SF3,PS51737,IPR025827,PF00239,SM00857, G3DSA:1.10.10.2600,IPR006118,SSF53041
VRCALYIRVSSDEQKRNGFSLPEQRHALMQYAKEKGYTIVDLYADEGVSSSKNPQRRHEFQRMLSDVKKGKIDIIVFLKLDRWYRNVGDYYLTQAILDQYGVKWECVVEKYDTTTRTGKLGLNIKLTVAEDESANASERVKFVQAGKVRNREPITGNQPFGYKIETIDGVKRIVKDPETQAECEDMFETFFATGSGGATSKYINAKYGRSLAENAIPRRLKNPFYTGEYRGVPDYCPAYITKEQHARILAIFAKRTRSTKRKKVYLFAGLIKCPVCGRTMVSCTMNKKTLGYRCRHHYMNKCTFVHTITEERIESFLLENIGSMLEQYLISYKEQNKAKKKPDPRKLEDRLSRLNNIYMMGNISDSEYTKKANEITAQIAAIKCANSNDLPIPEESIKLLSDKRFATLYADLPRESRKALWMSLIDSIEVEGLYPKQVFFIGQERL

SEQ ID NO: 11063 - protein, 446 aa, Unknown; identical to SEQ ID NO: 10057
  Description of Unknown: Integrase B11064 sequence
  cd00338,PF13408,IPR011109,IPR038109,PF07508, PS51736,IPR036162,PTHR30461,IPR006119,G3DSA:3.40.50.1390, PS51737,IPR025827,PF00239,SM00857,G3DSA:1.10.10.2600, SSF53041

SEQ ID NO: 11064 - protein, 446 aa, Unknown
  Description of Unknown: Integrase B11065 sequence
  IPR038109,PS00397,IPR006119,PS51737,PF00239,G3DSA:3.40.50.1390 ,PTHR30461,IPR025827,SM00857,G3DSA:1.10.10.2600, SSF53041,IPR011109,PS51736,IPR006118,cd00338, PF13408,Coil,IPR036162,PTHR30461:SF3
MKKSLRVAGYARVSTDEQKKFGYSISAQTDEIQRWCNENGHDLLHIYIDEGYSASTSKRPNLQKLMNSLQDIDAIAFTRLDRLSRSVLDANKMLELLHQNNVAMISINEDDINTSTANGLFMFNLKVNLAEHELKKGSERIKAVFEYKIAQGQPITGKLPFGYKIITSDGVKKVVKDEATEKIVDDIFASFLLYQSVHHVVDLVNNKYGMCKPYHFFTRILKSEFYAGIYRGNPNYAEPYITIETRNAVLTALEANIRKGLNRHVYLFTGLIRCPECRSKLTGTSYPKNTDRYYYYRCNIAHSRHVCDHRKTYAEAHLEQYLIANVSSLLGNHIATVQNVTPATIDTTEAEIQNLQAEMERLNIIFMKKRMSVSVYDKMYAELENKITMLKQKMPKKDNTDALKKLLNSGWENVYHGMTRENKRTLWRNLIQEIHITDNGYEIIFL

SEQ ID NO: 11065 - protein, 446 aa, Unknown
  Description of Unknown: Integrase B11066 sequence
  cd00338,IPR011109,IPR038109,PF07508,Coil, PS51736,IPR036162,PTHR30461,IPR006119,G3DSA:3.40.50.1390, PTHR30461:SF3,PS51737,PF00239,SM00857,G3DSA:1.10.10.2600, SSF53041
MKNAVIYARYSAGPRQTDQSIEGQIADCRKYAEAHDLNVVDVYADRHISGKSTEGRDEFLRMIKDAKKGMFQAVIVWKVDRFGRDKTDIAIYKRELRRSGVTLHYAAESVPEGPEGIILESLLEGLAEYYSADLRQKVNRGMTESLKKGQYPGRLPYGYTKDKDKKPIIDEEKAAVVREVFALHIDGKSIAEIERILANKGIYQKNGSIYRILTNEHYTGKFEMMGIDVDAEPIISAETWAKSQEVFGTKKRSSAKMEYLLSGKCTCGVCGGRIQGSYGTSKTGDKHTYYICPNKCIKPLSAPKYEKMVLAETRENILTDEMIEQIVDRIMEIQNDDLPHAEIKRISAQISDYQKRLDNLYSAIENGLNFENVKDRLDDYTEKISTLSIELEKLKAKKPIIPRDILQKWLEVFRDGDIESDAFAKRIINTFISGIVIYDDHSVIAY

SEQ ID NO: 11066 - protein, 446 aa, Unknown; identical to SEQ ID NO: 10167
  Description of Unknown: Integrase B11067 sequence
  cd00338,PF13408,IPR011109,IPR038109,PF07508, PS51736,IPR036162,IPR006119,PTHR30461,G3DSA:3.40.50.1390, PTHR30461:SF3,IPR025827,PS51737,PF00239,SM00857, G3DSA:1.10.10.2600,SSF53041

SEQ ID NO: 11067 - protein, 446 aa, Unknown; identical to SEQ ID NO: 10045
  Description of Unknown: Integrase B11068 sequence
  cd00338,PF13408,IPR011109,IPR038109,PF07508, PS51736,G3DSA:3.40.50.1390,IPR036162,IPR006119,PTHR30461, mobidb-lite,PTHR30461:SF3,PS51737,IPR025827,PF00239, SM00857,G3DSA:1.10.10.2600,SSF53041

SEQ ID NO: 11068 - protein, 445 aa, Unknown
  Description of Unknown: Integrase B11069 sequence
  cd00338,PF13408,IPR011109,PS00397,IPR038109, Coil,PS51736,G3DSA:3.40.50.1390,IPR006119,PTHR30461, IPR036162,IPR025827,PS51737,PF00239,SM00857, G3DSA:1.10.10.2600,IPR006118,SSF53041
MKRAALYVRVSTQEQKNSGLSVDSQIDALEKYCEKQGYTVAGIYNDAGISARKKYTKRPALLQLLEDCRKHEIDIILFTRLDRWFRAVAGYYEVQSVLDACKVPWRAIWEDYETETSQGIFKVNIMLSVAQAEADRDSEKIRSVMEFKRQNKEYIGGKVPVGYRVEGKKIVKDENMREIIEDMFEHYFQTFSKWGTADYILSKYPDFIRTRNRIVKIMSSPAYHGEMYGVKNYCEPYITEEQAQRIKEVSSQKSWVDCKRRIYIFSGLIRCPICGYKFSGCTMVKKEKRYKVYRCPRSAAKKHKTYTRSEPKLETYMLNHIEEKIQSDVLRAEGRVKAAGSDVGKRKKKLSSELGRINKMFEKGRITEEYYDERYEAISKELKELSQTAATEELETKKKIQSRFPDGWKDMYMQLDEQGKQVFWKSIVKEIKISPNEFVEDIIFF

SEQ ID NO: 11069 - protein, 445 aa, Unknown
  Description of Unknown: Integrase B11070 sequence
  cd00338,PF13408,IPR011109,PS00397,PF07508, IPR038109,PS51736,G3DSA:3.40.50.1390,IPR006119,IPR036162, PTHR30461,PS51737,IPR025827,PF00239,SM00857, G3DSA:1.10.10.2600,IPR006118,SSF53041
LHQKVKRAAGYIRVSTVEQSLKGLSIETQIAEIKAYAEYHGMRLEEIYVDRGITARKSLEKRLDFMRMMRDVEAGKIDHIIVLRLDRFFRNVYDYHKMMNEYLNPNNCDWSAVKEQYTTTTTNGRLMINLRLAIAEQECDTDSDRIKDVLSHRASQGFAVTGSLPIGLKIVDHRVVPDEETKHIVKALFDKMQLTSSLRKSMLEVNEEYGTRLAYGVASNMIRNPIYCGIYRDNQKYCEPIITKEQFDKVQHLLKMNVRTGKRKHTYIFSGLIVCDHCNNRMPGNHTVVSSGEYDYYRCNKAKFNLCDNSLQVNELTLEKYMVDNVKGFLEEHLTKVKNMAQKKRPLIKSNRKKIENKLSRLNELYVDGIIDREKYKQDYADLQSQIIDEPEEEKIDLTAAQNFLSIDLKSVYETLSKVEKRALWRSIIKEIRIFNKEVVGVNFL

SEQ ID NO: 11070 - protein, 445 aa, Unknown
  Description of Unknown: Integrase B11071 sequence
  cd00338,IPR011109,IPR038109,PS00397,Coil, PS51736,G3DSA:3.40.50.1390,IPR006119,PTHR30461,IPR036162, PS51737,PF00239,SM00857,G3DSA:1.10.10.2600,IPR006118, SSF53041
MKRAALYVRVSTQEQKNSGLSVDSQIDALEKYCEEQGYTVAGIYNDAGISARKKYTKRPALLQLLEDCKKHEIDIILFTRLDRWFRAVAGYYEVQNVLDACKVPWRAIWEDYETETSQGIFKVNIMLSVAQAEADRDSEKIRSVMEFKRNNKEYIGGKVPVGYRIEGKKIVKDEKTRGIIEDMFEHYFQTFSKAGTADYILNKYPDFARTRTRLVKIMSSPAYRGEMYGVKNYCEPYITEEQAQKINEVSSQKTWTDCRRRIYIFSGLMKCPICGCRLSGCAIGKKGKKYKVYHCPHSVAQKHKTYTRSEKKLETYMLNHIEEKIQLDVLRAEGRVKAGGNDAEKRKKKLSSELGRINKMFEKGRITEEYYDERYEAISKELKELSQTAATEELETKKKIQSRFPDGWKDMYMQLGEQDKQVFWKSIVKEIKISPDTYVEDIIFF

SEQ ID NO: 11071 - protein, 445 aa, Unknown
  Description of Unknown: Integrase B11072 sequence
  cd00338,PF13408,IPR011109,IPR038109,PS00397, Coil,PS51736,G3DSA:3.40.50.1390,IPR036162,IPR006119, PTHR30461,PS51737,IPR025827,PF00239,SM00857, G3DSA:1.10.10.2600,IPR006118,SSF53041
MKRAALYVRVSTQEQKNSGLSVDSQIDALEKYCEEQGYTVAGIYNDAGISARKKYTKRPALLQLLEDCKKHEIDIILFTRLDRWFRAVAGYYEVQSVLDACKVPWRAIWEDYETETSQGIFKVNIMLSVAQAEADRDSEKIRSVMEFKRQNKEYIGGKVPVGYRVEGKRIVKDEKMRAIIEDMFEHYFQTFSKMETADYILSKYPDFIRTRTRIVKIMSSPAYHGEMYGVKNYCEPYITEEQAQRIKEVSSQKSWIDCKRRIYIFSGLIRCPICGYRFSGRTMAKEEKRYKVYQCPRSAAKKHKTYTRSEPKLETYMLKHIEEKIQLDVLKAEGRVKAAGNDVGKKKKKLSSELGRINKMFEKGRITEEYYDERYEAISKELKELSQTAATEELETKKKIQSRFPDGWKDMYMQLDEQGKQVFWKSIVKEIKISPNEFVEDIIFF

SEQ ID NO: 11072 - protein, 445 aa, Unknown; identical to SEQ ID NO: 10170
  Description of Unknown: Integrase B11073 sequence
  cd00338,PF13408,IPR011109,IPR038109,PF07508, PS51736,G3DSA:3.40.50.1390,IPR006119,IPR036162,PTHR30461, mobidb-lite,PTHR30461:SF3,IPR025827,PS51737,PF00239, SM00857,G3DSA:1.10.10.2600,SSF53041

SEQ ID NO: 11073 - protein, 445 aa, Unknown
  Description of Unknown: Integrase B11074 sequence
  PF13408,IPR011109,IPR038109,PF07508,PS51736, IPR036162,IPR006119,G3DSA:3.40.50.1390,PTHR30461,PTHR30461:SF3, IPR025827,PS51737,PF00239,SM00857,cd03768, G3DSA:1.10.10.2600,SSF53041
VPLQKERLIAYCKAKGWVVAGIFIDPGHSGSSLDRPGITELMAGVEAGKFDVVLVYKLDRLSRSQKDTLYLIEDVFMANNTDFVSMQESFDTGTIYGRAMVGVLSVFSQMERETITERTLMGRAGRAEEGLWHGGGTDPIGYDYIDGELVVNPGEAQQVREVYSLYSAGHSLSEITRRMVGCKTKHGDWSHTSTVGNILDNPLYAGTVHFDGVRKKGQHEAIVSADIDRRVKARRARLHHAESSGESSHLLTGMIFCACCGARYFAHKRPNGSLVYSCHSRAKKNKKMVKDPGCMAPHIPVAKLDDIVVSRMLRLAEDPAQVNEIIEKRAAQKDDSNAGRESAEKIRRLDAEISRLMDLLQHDQMASVGEIAEAIQKAHTERSRLLPRGEEKKPRLFDAAGFKTLLCDAAFSWQEAELRGRRAFLLQLIDGVHIDMEDVRIDWSF

SEQ ID NO: 11074 - protein, 444 aa, Unknown
  Description of Unknown: Integrase B11075 sequence
  IPR038109,PS00397,IPR006119,PS51737,PF00239,G3DSA:3.40.50.1390 ,PTHR30461,IPR025827,SM00857,G3DSA:1.10.10.2600, SSF53041,IPR011109,PS51736,IPR006118,cd00338, PF13408,Coil,IPR036162,PTHR30461:SF3
MKRVAIYIRVSTSLQAQEGDSIPAQRDALRKYIDSHDDMIFCGEYLDDGISGTKSDRDELQRMLTDVKDGKIDQILVTKLDRLYRNIRHYLNMQELLDRHNVNWLAIWEPIYDTSTPQGRLIINQMMSIAQFEAENTGQRIRQVQAYKVSRGEVISGSTPPGYSIKDKRLVKNQDAETVKQMFEYFSFCGNISQTMGKFDHFGIFPQSKAAFKRILTNTKYAGLFRDNPNFCDPIISRELFDDVQRKLTINIKCSQKRTYLFTSLIRCPECGRIMSSLHRSNKSNRQVSQNMYRCKRHYGSKVKLCGYSKIVNEKKLEEFLLRNIQDLMEDYVISLDTISAPQKDNSARISYLNKKISKLKELYVNDLISIDEYKHDKEEIQAELEKLQITEQVPDTAPYRQFINADIGEIYSDLTDEEKRSFWRSIIKEIHLDQNKNFKVVFL

SEQ ID NO: 11075 - protein, 444 aa, Unknown
  Description of Unknown: Integrase B11076 sequence
  cd00338,PF13408,IPR011109,IPR038109,PF07508, Coil,PS51736,IPR036162,IPR006119,G3DSA:3.40.50.1390, PTHR30461,mobidb-lite,IPR025827,PS51737,PF00239, SM00857,G3DSA:1.10.10.2600,SSF53041
MSKNDTKIKRVRHRSTLPRKKKVAAYARVSTGKEAMLHSLSAQVSYYSNLIQNKRGWLYMGVYVDEAMTGTSKERPSFLKMMNDARAGKLDMIITKSISRFARNTVTLLETIRELKALNVDVYFEEQRIHSLSADGELVLTFLASYAQEESRSASENLKWSIRNRFKKGLAWNTYVYGYQFSNGTFIKIPKEAEIVRHIFASYLDGKGTPAIAKDLNKRGILTKLNKPWRHGAIAKVMRNYLYTGNMLLQTTYKDNHLTKRKVINNGVLPKYHVENSHEPIIDIDTFNKVQHLIAEKQKNTKVRTARDEKTLYRGMLVCDKCGKDYNRRITKNKAYWICSTYNFYGKESCPSKQIPEDILNEIVKSTLNLSSLNYETVNERLTNIIVQDKQVKLSLKTGQEVTVPWAYQSRSASWTPEMREKARQKAMKGRNKNEKDNSNTTNN

SEQ ID NO: 11076 - protein, 444 aa, Unknown
  Description of Unknown: Integrase B11077 sequence
  cd00338,PF13408,IPR011109,IPR038109,PF07508, PS51736,G3DSA:3.40.50.1390,PTHR30461,IPR006119,IPR036162, mobidb-lite,IPR025827,PS51737,PF00239,SM00857, G3DSA:1.10.10.2600,SSF53041
MSKNDTKIKRVRHRSTLPRKKKVAAYARVSTGKEAMLHSLSAQVSYYSNLIQNKRGWLYMGVYVDEAMTGTSKERPSFLKMMNDARAGKLDMIITKSISRFARNTVTLLETIRELKALNVDVYFEEQRIHSLSADGELVLTFLASYAQEESRSASENLKWSIRNRFKMGLAWNTYVYGYQFSNGTFIKIPKEAEIVRHIFASYLDGKGTPAIAKDLNKRGILTKLNKPWRHGAIAKVMRNYLYTGNMLLQTTYKDNHLTKRKVINNGVLPKYHVENSHEPIIDIDTFNKVQHLIAEKQKNTKVRTARDEKTLYRGMLVCDKCGKDYNRRITKNKAYWICSTYNFYGKESCPSKQIPEDILNEIVKSTLNLSSLNYETVNERLTNIIVQDKQVKLSLKTGQEITVPWAYQSRSASWTPEMREKARQKAMKGRNKNEKDNSNTTNN

SEQ ID NO: 11077 - protein, 444 aa, Unknown
  Description of Unknown: Integrase B11078 sequence
  cd00338,PF13408,IPR011109,IPR038109,PF07508, PS51736,IPR036162,IPR006119,PTHR30461,G3DSA:3.40.50.1390, mobidb-lite,IPR025827,PS51737,PF00239,SM00857, G3DSA:1.10.10.2600,SSF53041
MSKNDTKIKRVRHRSTLPRKKKVAAYARVSTGKEAMLHSLSAQVSYYSNLIQNKRGWLYMGVYVDEAMTGTSKERPSFLKMMNDARAGKLDMIITKSISRFARNTVTLLETIRELKALNVDVYFEEQRIHSLSADGELVLTFLASYAQEESRSASENLKWSIRNRFKKGLAWNTYVYGYEYENGTFKVIKEEAEIVKEIFASYLDGKGTPAIAKELNKRGILTKLNKPWRHGAIAKVLRNYLYTGNMLLQTTYKDNHLTKRKVINNGVLPKYHVENSHEPIIDIDTFNKVQHLIAEKQKNTKVRTARDEKTLYRGMLVCDKCGKDYNRRITKNKAYWICSTYNFYGKESCPSKQIPEDILNEIVKSTLNLSSLNYETVNERLTNIIVQDKQVKLSLKTGQEVTVPWAYQSRSASWTPEMREKARQKAMKGRNKNEKDNSNTTNN

SEQ ID NO: 11078 - protein, 444 aa, Unknown
  Description of Unknown: Integrase B11079 sequence
  cd00338,PF13408,IPR011109,IPR038109,PF07508, PS51736,IPR036162,IPR006119,PTHR30461,G3DSA:3.40.50.1390, mobidb-lite,IPR025827,PS51737,PF00239,SM00857, G3DSA:1.10.10.2600,SSF53041
MSKNDTKIKRVRHRSTLPRKKKVAAYARVSTGKEAMLHSLSAQVSYYSNLIQNKRGWLYMGVYVDEAMTGTSKERPSFLKMMNDARAGKLDMIITKSISRFARNTVTLLETIRELKALNVDVYFEEQRIHSLSADGELVLTFLASYAQEESRSASENLKWSIRNRFKKGLAWNTYVYGYQFSNGTFIKIPKEAEIVRHIFASYLDGKGTPAIAKDLNKRGILTKLNKPWRHGAIAKVLRNYLYTGNMLLQTTYKDNHLTKRKVINNGVLPKYHVENSHEPIIDIDTFNKVQHLIAEKQKNTKVRTARDEKTLYRGMLVCDKCGKDYNRRITKNKAYWICSTYNFYGKESCPSKQIPEDILNEIVKSTLNLSSLNYETVNERLTNIIVQDKQVKLSLKTGQEITVPWAYQSRSASWTPEMREKARQKAMKGRNKNEKDNSNTTNN

SEQ ID NO: 11079 - protein, 444 aa, Unknown
  Description of Unknown: Integrase B11080 sequence
  cd00338,PF13408,IPR011109,IPR038109,PF07508, PS51736,IPR036162,IPR006119,PTHR30461,G3DSA:3.40.50.1390, mobidb-lite,IPR025827,PS51737,PF00239,SM00857, G3DSA:1.10.10.2600,SSF53041
MSKNDTKIKRVRHRSTLPRKKKVAAYARVSTGKEAMLHSLSAQVSYYSNLIQNKRGWLYMGVYVDEAMTGTSKERPSFLKMMNDARAGKLDMIITKSISRFARNTVTLLETIRELKALNVDVYFEEQRIHSLSADGELVLTFLASYAQEESRSASENLKWSIRNRFKKGLAWNTYVYGYEYENGTFKVIKEEAEIVKEIFASYLGGEGTLAIAKKLNERGVLTKLNNKWRHNSIQIILRNYLYTGNSLLQTTYKDNHLTKRKVINNGVLPKYHVENSHEPIIDIDTFNKVQHLIAEKQKNTKVRTARDEKTLYRGMLVCDKCGKNYNRRITKNKAYWICSTYNFYGKESCPSKQIPEDILNEIVKSTLNLSSLNYETVNERLTNIIVQDKQVKLSLKTGQEITVPWAYQSRSASWTPEMREKARQKAMKGRNKNEKDNSNTTNN

SEQ ID NO: 11080 - protein, 444 aa, Unknown
  Description of Unknown: Integrase B11081 sequence
  cd00338,PF13408,IPR011109,IPR038109,PF07508, PS51736,G3DSA:3.40.50.1390,IPR006119,PTHR30461,IPR036162, mobidb-lite,IPR025827,PS51737,PF00239,SM00857, G3DSA:1.10.10.2600,SSF53041
MSKNDTKIKRVRHRSTLPRKKKVAAYARVSTGKEAMLHSLSAQVSYYSNLIQNKRGWLYMGVYVDEAMTGTSKERPSFLKMMNDARAGKLDMIITKSISRFARNTVTLLETIRELKALNVDVYFEEQRIHSLSADGELVLTFLASYAQEESRSASENLKWSIRNRFKMGLAWNTYVYGYQFSNGTFIKIPKEAEIVRHIFASYLDGKGTPAIAKDLNKRGILTKLNKPWRHGAIAKVLRNYLYTGNMLLQTTYKDNHLTKRKVINNGVLPKYHVENSHEPIIDIDTFNKVQHLIAEKQKNTKVRTARDEKTLYRGMLVCDKCGKDYNRRITKNKAYWICSTYNFYGKESCPSKQIPEDILNEIVKSTLNLSSLNYETVNERLTNIIVQDKQVKLSLKTGQEVTVPWAYQSRSASWTPEMREKARQKAMKGRNKNEKDNSNTTNN

SEQ ID NO: 11081 - protein, 444 aa, Unknown; identical to SEQ ID NO: 10095
  Description of Unknown: Integrase B11082 sequence
  cd00338,PF13408,IPR011109,IPR038109,PF07508, PS51736,G3DSA:3.40.50.1390,IPR006119,PTHR30461,IPR036162, mobidb-lite,IPR025827,PS51737,PF00239,SM00857, G3DSA:1.10.10.2600,SSF53041

SEQ ID NO: 11082 - protein, 444 aa, Unknown
  Description of Unknown: Integrase B11083 sequence
  IPR011109,PS00397,PS51736,G3DSA:3.40.50.1390,PTHR30461, IPR006119,IPR036162,PS51737,PF00239,SM00857, cd03768,IPR006118,SSF53041
LEIIGYARVSTDEQEEALSAQVSRLHEAGCSHVIQELVSGGRNDRPGILELIDQIKRGRVGKLLITRVDRLGRDAQFTDTLLAMCAEQKVEVKALDGGLIEAASPSGFVMSRILTTMAEHERRMLSMRIKSQFKVYRSQGRALRRRMTFGYCYNDHHGLRPHPENWDKALHVLELLREKVSFTQVSTTLAKERSVWTPAPSSLQYWLVNPIIRGHLPHLYDKKSGKGWKATWAEINYDQHEALISEADWQELKIALQKRSRSFVNNPNAELPGAIGAPKHALTGSLSCMNCGHNLRRHTSASVAWWSCRHRNCFDRGKVKEQIALQWAADEAIKAARKMAEAAAAPVSLNPVMSLKIADLEATRTLAERNPALLPAVELLEKEIASLQSKPVSSPNIEAYVELIRQPEFFLGATPAEQRALLAGLLQTIRVDREGQYLSVPRMF

SEQ ID NO: 11083 - protein, 443 aa, Unknown
  Description of Unknown: Integrase B11084 sequence
  cd00338,IPR011109,PTHR30461:SF21,PF07508, Coil,PS51736,G3DSA:3.40.50.1390,PTHR30461, IPR006119,IPR036162,PS51737,PF00239, SM00857,SSF53041
MRSLLYKRISEDQTGEEVGIDRQDGACRKLSKKLGATVAESFSDNDISAYSGKPRPGFEALLVAMASGHYDVLVCWHIDRLYRSMRDLERIIDAAEKGNIRIATVNSGDLDLSTSAGRMIARILGSVARQESEHHAERRKEANLARALTGEWRREGSRPFGYTNLGVPLEPEASMIRTAAVEILGGKSLHAVAREWNATGITTVRGVAWTNLHVRRVLTNPRIAALRVHQGTVVGVGTWLPILDEAIWRGLTAFLSDPSRKNSVAFERRYLGSGVYLCGHRTPEADPEDLDSICGRRLYADHPHGKDRSMSYCCRPVAHLGRNGTELDRFVETIALHHLSANAIGTGLRQAENQVDVADLLAQREALQATKDQLATLLRKGILDMAGVERESAILTSQIADLNAQMATAAQGSPLALLLEEGEDPEALADEEKLTERWGKASP

SEQ ID NO: 11084 - protein, 443 aa, Unknown
  Description of Unknown: Integrase B11085 sequence
  PS00397,IPR038109,IPR006119,PS51737,PF00239,G3DSA:3.40.50.1390 ,PTHR30461,IPR025827,SM00857,G3DSA:1.10.10.2600, SSF53041,IPR011109,PS51736,IPR006118,cd00338, PF13408,Coil,IPR036162,PTHR30461:SF3
MKRAAIYARVSSDRQAKEGDSIPAQLEALRKYAKKNKYKIIGEYIDDGISGTKKDRDELQKLLDAVEADKVDIIIFVKLDRWFRSVRHYINTQALLDAHKVDWLAIWEPVYDTTTPAGRLIVNQMMSIAQFEAENTGQRIRQVQAYKVSKKEVISGTVTPGYKIQGKHLVIDPDKADAVRLAFDTFNKTGSYSETIRATYGMGLPVTGNGMKNLLRREIYIGRAHDLDDFAPALIDKDTFDSVQKQIKMQRRPSKTKYDYLFSGLLKCAECGAVMASYSRKRKGRNRALMYRCPKHYQRTFKTCDNSKIVSEAVLERYLTAQFPTLIIDQIETLEAMQTPNTALQRQRIEKKIDRLKELFINDLISIEEYKEDKENLLAELEAIPEQPDTTAIDSLKSLVGLNLDEVYLDLTKPEKRLFWRSVIKEIRFNKSRNFLLISCSAN

SEQ ID NO: 11085 - protein, 443 aa, Unknown
  Description of Unknown: Integrase B11086 sequence
  PS00397,IPR038109,IPR006119,PS51737,PF00239,G3DSA:3.40.50.1390 ,PTHR30461,IPR025827,SM00857,G3DSA:1.10.10.2600, SSF53041,IPR011109,PS51736,IPR006118,cd00338, PF13408,Coil,IPR036162,PTHR30461:SF3
VNVALYIRVSTEEQAQHGLSVEAQTAALEKWAKEHGCTVAGKYVDAGISARKSAAKRPGLQRLLDDVRHGKIDTVLITKLDRWFRNVAEYYKVQEVLEAHGVAWRAIHEDYETQTSSGRLKINIMLSVAQDEADRTSERIRAVFERKKERGEVVSGNVPLGYRLSGKTVALDPETKPAVEAFFHEFLASGSVVCAQRAAAELGLRISRNTAYFMLHNRSYTGFFNGVDGLIPAYLSVADFETIRKGFKTPSKRTKESDAPALFSSLIYCSECGHRYIASYSHTKSRGLERWYQCGARRQGTCSNKAMLREADVERELLRQMDGLLDCRAFGSAQDRAAASEKLAEANALETRIRKLRELYLADLIPLEDYRQEYKSATAQLAALRETLPRASRSLKLAKEMEATGGWRETYDRTDPPGRRSFWRSFVAKITADPAKKLNVELT

SEQ ID NO: 11086 - protein, 443 aa, Unknown
  Description of Unknown: Integrase B11087 sequence
  cd00338,PF13408,IPR011109,IPR038109,Coil, PS51736,G3DSA:3.40.50.1390,IPR006119,IPR036162,PTHR30461, PTHR30461:SF3,IPR025827,PS51737,PF00239,SM00857, G3DSA:1.10.10.2600,SSF53041
MDYSIRVACYERVSTEEQSKHGLSIDAQIAALGRWVSDQHHILVGHYTDAGVSGGKPIDKRPAMWRLLQDIQAGLIDLVIFTKLDRWFRSLKNYYKAQEILDSSHCAWQAIDEDYETLTASGRFKVNIMLSVAENERERTSERIKAVFDYKRAQGRFLTGGRTIPYGYKVQDGQLVIDEATAPIVRDIFHHVLSGMSYKGVFSAIRAAHPEFQHSYSAFRALVMRPCYVGIRNGIPGSCPAYITMDQRNQLLTITGTRSPRRPDQVYLFTGMMRCPECGGKLSAGRTDGYVYYYCRKHRVDKKCPCTISLREDRIERALTASLFQPGQIVVDSVKAAQNAEKHVQTASEIERKMKRLAETYTDGLIDRDTYKSKLAALTEQLETAREAPSRPSEPVSERVREFLRGDVQAVYDRLEKQEKRAFWLKVVHAVTMDADFSILSLY

SEQ ID NO: 11087 - protein, 443 aa, Unknown
  Description of Unknown: Integrase B11088 sequence
  IPR038109,PS00397,IPR006119,PS51737,PF00239,G3DSA:3.40.50.1390 ,PTHR30461,IPR025827,SM00857,G3DSA:1.10.10.2600, SSF53041,IPR011109,PS51736,IPR006118,cd00338, PF13408,Coil,IPR036162,PTHR30461:SF3
MKHAAIYARVSSDRQAREGDSIPAQLDALRKYATENNYAIVGEYVDDGISGTRSDRDELQRLLDDIDNIDIIIFCKLDRWFRSIRHYINTQEILDKHGVGWKAIWESYDTTTPQGRLIVNQMMSFAQFEAENTGQRIRQVFAYKASKGEVLTGVTPAGYRIQDKHLVPSEVAESVRTAFREYSRTGNMNATLRACSVLPGLPRTNASFKRMLQNPVYTGKRHGHDDYCEPLVDQATFDHVQHLLSRNIKISQKETYIFSGLIRCTECGTLLGARTRRCNHGKRVAFHTYCCRKHYGMKPPVCPNTKIITETVFEEELISRLRPLINGEVLRYEVEAAPIRDNKTKISAVEKKLTRLKDLYLNELITLEEYRHDREELEEQLRDLREKEIPRTRDLSALKDLLKTDIEELYWEMSLEEKRRFWRAIIKEIRWNINREFEVIFLT

SEQ ID NO: 11088 - protein, 443 aa, Unknown
  Description of Unknown: Integrase B11089 sequence
  cd00338,PF13408,IPR011109,IPR038109,PF07508, Coil,G3DSA:3.40.50.1390,IPR006119,PTHR30461,IPR036162, PS51737,IPR025827,PF00239,SM00857,G3DSA:1.10.10.2600, SSF53041
MSQLATKATPAAFLGRVSTQNQAKLDKQGLPEQRRAAQAYAEANDFEIVATFEDVISGASEARPAFYEMLSRSYEFKAVIVSHTDRLARDLELGLRHMRLIREAGLELHSAARGLVEKGIVSGVDMLLGEHEKERIKERTQNGLIAEARDGKLPNGLHLFGYHNVPGQNRGVINPDAAAVVRRVFDLGAQGLSYRAIARVMMATRALTPLGKESWYQHTVRRMICNTAYKGEFVWTHKRGGRFVLPVPAIVSAEEWAKAQRHKRGPPVQVPLPLSGRLRCGRCGAAMGVRKVDRGGKHVYLYYRCGSAGTPSGACGVGLVRRDKLEPKAEILLRDTLQHPDLLRDLTRPDTERDQHEQRRLDDLGERAERVKEMRLDGLYSREEARIKVAEIDAERRALTQQDDTEFPLEEFALAAREMPFAELLELTQPTFYVQGDVLTLEF

SEQ ID NO: 11089 - protein, 443 aa, Unknown
  Description of Unknown: Integrase B11090 sequence
  IPR011109,IPR038109,PF07508,PS51736,G3DSA:3.40.50.1390, IPR006119,IPR036162,PTHR30461,PS51737,PF00239, SM00857,cd03768,G3DSA:1.10.10.2600,SSF53041
MRCAIYTRKSSDERLNAEYNSLDNQRAYCSAYIMSQAGDGWEESPKTYDDGGFSGGNLKRPGLTALRADLAAGKIDIVVVYKIDRLSRSLRDFANLIAEFDQHGVTFVSVTQSFNTASAMGKLTLNILLSFAQFERELTGERLKDWFAGARARGMWVHGKPPYGYRAVDLRLEIDESEAACVRYAFAHYSQYGSAKILASVLHQRGWLNNYQRPWRKRTLTDMLQNPVYIGKLRHHGKLLPGTHEPIVTMSAWRKVQDAIAASARRRKPLSRPPVLGLLKGLIVDANGAPMIHVPVHHRNGKIYRYYIPSDKRYGVGACSMHRFQAGPLENCVLSLLERLTGRPQVYPDMYVACGQIRKIVRQVRVWPDRMSVTMVTGAMLEAEHAGRMQITHKPRTPPEWLPRAVELMEQGATPHKTARDMGISIGSFYRILHRWGMAQYVK

SEQ ID NO: 11090 - protein, 442 aa, Unknown
  Description of Unknown: Integrase B11091 sequence
  cd00338,PF13408,IPR011109,IPR038109, PF07508,Coil,PS51736,G3DSA:3.40.50.1390, PTHR30461,IPR006119,IPR036162,PS51737, IPR025827,PF00239,SM00857,G3DSA:1.10.10.2600,SSF53041
MIEDAKNGKIDMILVKSISRYARNQIDSITIMRELREKGVKIYFEKEKIDSSDPKADFTLSVLSAVAEEESRNISTNIRWSNQKKMQRGEFKVNISQMLGLERDKEGKITIEPIGAQIIQGIYRDFLNGMTFKDIALELNARGIKTKTDKPYQGITIKRILENEKYCGDAIYMKTYSQDFLANKRVKNTGQAPQYYVQNNHPAIISKEKFEMVQTEINRRNNLRSDSKSGKGKYVSKYAFSGLVICGTCGSKFRRFSYEQNGKRFDKWICINHQTNKESNCKMKAIYERDLENAFMNGLNKIINTNYTTKLERDIDKTIKGNQETQKIETLNKTLKELQDIAYNIAKEFKDNEIDITTYTIKINETMKDIDSITTELNKIKNKTAIESLHKHTMEQIRKFINKSLTEFDKDIFRALVDEVIIINQVQARFILKTGMEFIENL

SEQ ID NO: 11091 - protein, 442 aa, Unknown
  Description of Unknown: Integrase B11092 sequence
  PS00397,IPR038109,IPR006119,PS51737,PF00239,G3DSA:3.40.50.1390 ,PTHR30461,IPR025827,SM00857,G3DSA:1.10.10.2600, SSF53041,IPR011109,PS51736,IPR006118,cd00338, PF13408,Coil,IPR036162,PTHR30461:SF3
MKSAALYLRVSSDKQAKEGDSIPAQREALREYAKSHHMRIYREYVDDGVSGTKADRDELTKLLDDVRAGHVDIILVTKLDRLYRSIKHYLNMMDVLDRYNVGWLAVWEPIYDTTTPQGRLIVNQMMSIAQFEAENTGQRVRAVLDYKINHGEVASGSVPFGYVIRDKRLVPGPHADDAREIFRHYALHGNLHKTARLSASVGGPVSTSGIKSMLRNEKYVGVARDNPQFCEAIIDKPLFDDVQRKLSMNVKISQKHTYIFSGLVKCAECGASMGVNRRKRKRGNCITIEIGYRCPVYYQRGDRRCNNAKVLNENVLERHLLAVLRPELEKHISNYEIREKPHRDAERAKKAIEGKLSRLKDLYVDGLIDMAEYRADRERLESELSAITDAPQKDLTELKHLLTLPIREIYETFSREEKRFFWRSVIKEIRFGVDKHIDIIFV

SEQ ID NO: 11092 - protein, 442 aa, Unknown
  Description of Unknown: Integrase B11093 sequence
  IPR038109,PS00397,IPR006119,PS51737,PF00239, cd03768,G3DSA:3.40.50.1390,PTHR30461,IPR025827,SM00857, G3DSA:1.10.10.2600,SSF53041,IPR011109,PF07508,PS51736, IPR006118,PF13408,Coil,IPR036162,PTHR30461:SF3
MIALYVRVSTHEQAENGYSIDEQIDRLVAYCNALGYDSYKVYKDPGFSGATTDRPALQNLINDVKLHHVHKVLVYKLDRLSRSQVDTLNLIENVFLKNDCDFNSISENFDTATPFGRAMIGILAVFAQLEREQIKERLSMGKIARAKKGLYKGGGLAPIGYDFIDSRLIVNESEREQVQLIYDMFESGGTYRGIVKFMNDNGYRHKYGQWHRNTLTNVLQNPIYTGTMIYNGETYEGIHEPIINQRQFDNVQAIIKRRKGQRQDNRASLLGNILVCGRCGAKLHAHRYSVGYDYYWCDNKRQCHNRSYRIDKLDTIILDEIRKLKIDPDFKPSLKSNHTDTKRINEQIARIDSKIARMIDLYGLENVPIDILENKLNELNEQKRNLIDQLNRVPDKLDFEQVNNLLIDFQTLVDTAEMKPIVNLLIDRIVLEDDTIKIEWNF

SEQ ID NO: 11093 - protein, 442 aa, Unknown
  Description of Unknown: Integrase B11094 sequence
  cd00338,PF13408,IPR011109,IPR038109,PF07508, PS51736,G3DSA:3.40.50.1390,IPR006119,PTHR30461,IPR036162, PTHR30461:SF3,PS51737,IPR025827,PF00239,SM00857, G3DSA:1.10.10.2600,SSF53041
MAAYCRVSTDQLEQLSSYEAQVAYYTAYITNHPDYEFGGIYADEGISGTNTKKREQFNKMIEDCRAGKIDMIITKSISRFARNTLDTLNYVRQLKELGIGVIFEKENINTLDSKGEVLLTILSSLAQDESRSISENSTWGIRRRFEQGKLHINHTKFLGYDKDEEGNLVINEKQAKIVRRIYKDYLDGKGPNRIARELEEEGVPNWNGKPKWYESSIRKILSNEKYKGDALLQKTYTIDFLTKKRAVNNGEVPMYYVEESHPAIIDKEMWEAVQLEMERRRAFAEKYNISKLDYATVENPFAGRVICGHCGSAFGRKVWNSTDERLRRVVWRCNNKYKVKGKKSCENKHIDDKVLYQAFVNTFNVMVDNKDYFIEMWKDKLNSENVLVRYRTKQFMGILADAEIVEDFDVDMYFRLVEKMTVFEGEKIIVSLLDGTEIEVVI

SEQ ID NO: 11094 - protein, 442 aa, Unknown
  Description of Unknown: Integrase B11095 sequence
  IPR038109,PS00397,IPR006119,PS51737,PF00239,G3DSA:3.40.50.1390 ,PTHR30461,IPR025827,SM00857,G3DSA:1.10.10.2600, SSF53041,IPR011109,PS51736,IPR006118,cd00338, PF13408,Coil,IPR036162,PTHR30461:SF3
MIAALYIRVSTTDQAQHGYSLEAQESLLRSYAAQNGMVVYDLYADKGKSANKALSKRTELNRMLHDAELKKFDCILFKDITRWSRNSAQYYAVQDKLDRYGVYWLAVEQPYLETKTPTGRFQVTVMLGTAQLESENTSQRIKFVMANRVANGGAISGTHDLPLGYMTVNTEQGKRVVKDPSVQDAVSDMFDYYRRTQNQLATIRYMKDQYGITIWQASFSKIMSNTMYYGEYRGNPDYCEPYLTKAEWLDLKRRKPIYRTQKHNSEYLFRGLLRCPVCGRNMVGRTNSYIYYVCPYHLSYHACEYSVWHRQDRIEAFLLERIKPELDAYREKPQMKPPKKDKCEKQQKSLQAKLERLKNLYIDGDISKDAYEKRRDAIRAELGKLESDHAELDYDKLNAILNSGWRSLYDRIDPEDRAHFWRTILHHIEIKPDGTYKPLFNG

SEQ ID NO: 11095 - protein, 442 aa, Unknown
  Description of Unknown: Integrase B11096 sequence
  IPR011109,IPR038109,PF07508,PS51736,IPR036162, IPR006119,PTHR30461,G3DSA:3.40.50.1390,PTHR30461:SF3,PS51737, PF00239,SM00857,cd03768,G3DSA:1.10.10.2600,SSF53041
MMDINTRQNRRLRCAIYTRKSSEEGLDMEFNSLDAQREACEAYIASQKSEGWVATRERYDDGGFSGGTLERPGLKQLLADIDDGLIDVVVVYKIDRLSRSLMDFSKLVEVFDRNGVTFVSVTQSFNTTTSMGRLTLNILLSFAQFEREVIGERIRDKVAASRKRGIWMGGYVPLGYDVQDRKLLVNDVEAASVRRIFERFVELGSATVLARELRREGFRNKQGTLIDKGYLYRLLNNRVYRGEAVHKGKAYPGEHDAIIDEDLWDRAHSILQESPRKRANNSRSRTPALLKGLIFSDTGAAMTPTSTKKGAKLYRYYVSMDVIRNRETGEETAPMRLAAGMVEDAVVTEVRRILQTPEVVTQVIAALKTEKGAVSEADAIAALHDFTALWAQLFPAEQARIIQLLIRRVTVTAAGLEVDIRREGIAGVIREMVAPHNLEAAE

SEQ ID NO: 11096 - protein, 442 aa, Unknown
  Description of Unknown: Integrase B11097 sequence
  cd00338,PF13408,IPR011109,IPR038109, PF07508,PS51736,IPR036162,IPR006119, PTHR30461,G3DSA:3.40.50.1390,PTHR30461:SF3,PS51737, IPR025827,PF00239,SM00857,G3DSA:1.10.10.2600,SSF53041
VKKVTKIKAKQAPAAEKAKLRVAAYCRVSTDTDAQLESLEAQKQHYESYIACRDDWTFAGLYYDEGITGTKKDKRPELMRMIRDCEAGKIDFVITKSISRFSRNTTDCLEMVRKLLALNIPIYFEKENLNTGSMESELFLAILSSMAEGESVSISENSKWSIQKRFKNGTFKISYPPYGYDWDGEQMVVNPEQAENVRWIFDQVLAGRGTQDIAKDLNAKGICTKKGNRWTAHTVRTLIVNEKYTGDVIFQKTYTDSQFNRHVNYGERDQYALTDHHEAIVSREVFAAAGEVIRQHSKEKGIVKGCGKYLNRYCFSGKIICSECGDVFKRRTHYCSEYKYIVWTCSTHLDDKSKCSMKFIHDDALKAAFVTMINKLIFARKLILKPYVQALRKGNNDDSLHRIQELQTLLMENSQQKERLTGFMAQGYIDQILYNEEMNTLL

SEQ ID NO: 11097 - protein, 442 aa, Unknown
  Description of Unknown: Integrase B11098 sequence
  cd00338,PF13408,IPR011109,IPR038109,PF07508, Coil,PS51736,G3DSA:3.40.50.1390,IPR006119,IPR036162, PTHR30461,PS51737,IPR025827,PF00239,SM00857, G3DSA:1.10.10.2600,SSF53041
MIEDAKNGKIDMILVKSISRYARNQIDSITIMRELREKGVKIYFEKEKIDSSDPKADFTLSVLSAVAEEESRNISTNIRWSNQKKMQRGEFKVNISQMLGLERDKEGKITIEPIGAQIIQGIYRDFLNGMTFKDIALELNARGIKTKTDKPYQGITIKRILENEKYCGDAIYMKTYSQDFLANKRVKNTGQAPQYYVQNNHPAIISKEKFEMVQTEINRRNNLRSDSKSGKGKYVSKYAFSGLVICGTCGSKFRRFSYEQNGKRFDKWICINHQTNKESNCKMKAIYERDLENAFMNGLNKIINTNYTTKLERDIDKTLKGNQEAQKIETLNKTLKELQDIAYNIAKEFKDNEIDITTYTIKINETMKDIDSITTELNKIKNKTAIESLHKHTMEQIRKFINKSLTEFDKDIFRALVDEVIIINQVQARFILKTGMEFIENL

SEQ ID NO: 11098 - protein, 441 aa, Unknown
  Description of Unknown: Integrase B11099 sequence
  IPR011109,IPR038109,PF07508,PS51736,G3DSA:3.40.50.1390, IPR006119,IPR036162,PTHR30461,PTHR30461:SF3,PS51737, PF00239,SM00857,cd03768,G3DSA:1.10.10.2600,SSF53041
MEGMVNPKRRLRCAIYARKSSEEGLDMEFNSLDAQRESCEAYVASQRSEGWATIRERYDDGGFSGGTLDRPGLKRLLADIEDGLIDVVVVYKIDRLSRSLMDFSKLVEVFDRNEVTFVSVTQSFNTTTSMGRLTLNILLSFAQFEREVIGERIRDKVAASRKRGIWMGGYVPFGYDVQDRKLVANAAEAAAVRRIFERFIELGSATTLARELRAQGFRNKQGTLVDKGYLYRLLNNRVYRGEAVHKGKAYPGEHAAIIDAELWNHVHAILQESPRKRANNSRMQTPALLKGLIFSETGAAMTPTATRKGTKLYRYYVSMDVIRNREGGESEVPSRLPAGMVEDAVVTEVRRIVQTPEVVTKVLAALQQDGPQVREAEVIAALNDFGALWNQLFPAEQARIIQLLVRRVTVTADGLAVDVRADGIGGVIREMIAPARMEAAE

SEQ ID NO: 11099 - protein, 441 aa, Unknown
  Description of Unknown: Integrase B11100 sequence
  cd00338,PF13408,IPR011109,IPR038109, PF07508,PS51736,IPR036162,IPR006119, PTHR30461,G3DSA:3.40.50.1390,PTHR30461:SF3,IPR025827, PS51737,PF00239,SM00857,G3DSA:1.10.10.2600,SSF53041
MPVFVSTDEQAIHGLSIDSQLADLREYCKANGHIIVGEYVDGGISGKKPPNKRPALSRFFADLESGLSVDALLFTKLDRFFRSVKLYYQAVDVLEKYKVAWQAIQEDYETLTASGRMKVNIMLSVAENEADRTGERVRTVFNRKIQQGEWLAPQGLCIGYDLIGKHLVPNHDAPAIKAAYEYYLQNHSVLATADYLREEYGVDCMTTPLRRILKNRLYLGEYRGNTDFCEPIVPVELFDAVQQEMKRRSVRSNQSGRVYLFAGLLRCASCGCTLGGMTSKRGNHEYHNYRCNNAVLNHRCSNHTFISEKKVEEFVLDNIAPTLDALIAKTKAEFKPKQPKRKPPDTAKVQAKLDRLKDLYVDGLIDKQQYLADRQKILDTLSQPDSEPITPDYEALRQLIRQDFRSRYALLNASEQRAILRTLIDHIDIDESRNMRLFFKA

SEQ ID NO: 11100 - protein, 441 aa, Unknown
  Description of Unknown: Integrase B11101 sequence
  cd00338,PF13408,IPR011109,Coil,PS51736, G3DSA:3.40.50.1390,IPR006119,PTHR30461,IPR036162,IPR025827, PS51737,PF00239,SM00857,SSF53041
LNVLRAALYPRVSTEEQAKFGLSIHDQQNDLEEYAKANGMIVVGIYPDAGFSARKKIEKRPAMMELLAAVQRDEIDIILVTKLDRWFRNIGEYYKVQEILEAHNVCWKTIYEDYDTSSAAGRLKINIMLAVAQDEADRTGERIKKVLDAKKSRNEVCTGHLPKGYKIDGKFAVIDREAEPDVKTFFSVFLETGSIHNAISAVPNLKLQYRTASKMLDNRGYVGEWHGLSIPPYLTAEEFDRVQTLRRRLQRKVAQNRTYIFSGLLVCGDCGRRIGGRPRKLVNGESYVYSCDGAYQYKGCPNHANIMEATIEQYLLETIDAKIEIFANTKDEPKQNSKEIEEKAKSLRKKLAKLSDLYLDDLIAKDEYAKRYADLTAQLESAESLLRKPPAKSAKDLSEAFFSGWQDIYKELSRENKKVFWKLKLKEIRLYQDRRIDFDFL

SEQ ID NO: 11101 - protein, 441 aa, Unknown
  Description of Unknown: Integrase B11102 sequence
  cd00338,PF13408,IPR011109,Coil, PS51736,G3DSA:3.40.50.1390,IPR036162,IPR006119, PTHR30461,PS51737,IPR025827,PF00239, SM00857,SSF53041
LNVLRAALYPRVSTEEQAKFGLSIHDQQNDLEEYAKANGMKVVGIYPDAGFSARKKIEKRPAMMELLAAVQRNEIDIILVTKLDRWFRNIGEYYKMQDILEAHNVCWKTIYEDYDTSTAAGRLKINIMLAVAQDEADRTGERIKKVLDAKKSRNEVCTGHLPKGYKIDGKFAVIHREAEPDIKTFFSVFLETGSIHNAISAVPNLKLQYRTASKMLDNRGYVGEWHGLTIPPYLTAEEFARIQTLRRRLQRKVAQNRTYIFSGLLVCGDCGRRIGGRPRKLVNGESYVYSCDGAYQYKGCPNHANIMEATIEQYLLETIDAKIEIFANTKDEPKQDSKEIEEKAKSLQKKLAKLSDLYLDDLISKSEYAKRYADLTAQLESAEALLRKPPAKSAKDLSEAFFSGWQDIYKELSRENKKVFWKLKLKEIRLYQDRRIDFDFL

SEQ ID NO: 11102 - protein, 441 aa, Unknown
  Description of Unknown: Integrase B11103 sequence
  IPR011109,Coil,PS51736,G3DSA:3.40.50.1390,IPR006119, IPR036162,PTHR30461,PS51737,PF00239,SM00857, cd03768,SSF53041
MAPLVVGYARVSKEEQADALPAQVSRLEAAGCDRVISDLESGRSNDRDGLLEVMALVRAGEVREVVVDRLDRLGRDATFADALLAECSAHGVTVRALVGGTVETATPQGFLMARLQTSLAEMESRMLSLRIRRQFTVYRAEGRHLRRRKPFGYRSGPDHRLAPDPEQWPQALRIIDELRKVGSFSGVSTKMPEWCSWTPAATNLQGWFCNPVIRGHIGHHYDKRSGKGWGQRWGEIRYDQHPALISEADWRDLADMLRRPRNRFAHGASTETRHGLTGLLRCASCGYLLRRNSSAGVIWWRCRHRLCNERGAIKEAEVLPVVVRACIAEAYRLAQAATAPEGPDPAIAGMVDELELMERMAARNPDNRAMAAAVQEQRQKIETLKRKDRQSVDVAAFEVMQHPMFFTDATPEEQRALFGAVLRSVSIARRGLVAGIQVRTT

SEQ ID NO: 11103 - protein, 441 aa, Unknown
  Description of Unknown: Integrase B11104 sequence
  IPR038109,PS00397,IPR006119,PS51737, PF00239,G3DSA:3.40.50.1390,PTHR30461,IPR025827, SM00857,G3DSA:1.10.10.2600,SSF53041,IPR011109,PF07508 ,PS51736,IPR006118,cd00338,PF13408,Coil,IPR036162,PTHR30461:SF3
MRVGIYARVSTDIQAKEGDSIQAQLSALREYAKKNGYEVVGEYIDDGISGTLLNERDELQRMLDDVRDGKIDLLIFTKLDRYFRNLKHYLNTQEVLDKYNVPWIAIWENYETRTPQGRLMVNQMLSFAQFEAEQTGQRINQVFSFKKLHKEVLSGKIPYGFKIQDKHLVIDPEKADIVRRVFQTYISTGGVSETLRRTEGLGLPRTQRAIKLLLQNRKYIGECYGIENYHEAIIDKDTFNLVQDMLKRNVRQTKFRTYIFSGLCTCSDCGRRLIGTTDKIKPKNERYKVYRCMGHYRAIKDCINSKSLNEKKLEKYLVENLKELAFGDISVKDKRKATNFEKKIASTEKKISRLKELYLNELITLDDYKHDLAAYKADIDGFKAEARKYKGTDKKALNDLVGRNLADWYWTLTEDERRVIWRSVIDQIYFDNDKNIKIVFR

SEQ ID NO: 11104 - protein, 441 aa, Unknown
  Description of Unknown: Integrase B11105 sequence
  cd00338,PF13408,IPR011109,IPR038109,PF07508, PS51736,G3DSA:3.40.50.1390,IPR036162,PTHR30461,IPR006119, PTHR30461:SF3,PS51737,IPR025827,PF00239,SM00857, G3DSA:1.10.10.2600,SSF53041
MSAFVSTDEQAVHGLSVDAQLADLREYCQAHGHIIVGECVDGGISGKKPPNKRPALSRFFADLESGLSVDALLFTKLDRFFRSVKLYYQAVDVLEKHKVAWQAIQEDYETLTASGRMKVNIMLSVAENEADRTGERVRAVFNRKIQQGEWLAPQGLCIGYDLIDKHLVPNHDAPAIKAAYEYYLQNHSVLATADYLREEYGVDCLTTPLRRILKNQLYLGEYRGNTDFCEPIVPVELFDAVQQEMKRRSVRNNQSGRVYLFAGLLRCASCGCTLGGMTSKRVKHEYKNYRCNNAVLNHRCRNHTFVSENKVEQFVLDNIVPTLDALIAQTEADYKPKQTKRKPLDTAKVQAKLDRLKDLYVDGLIDKQQYLVDRQRILESLQQPDSEPPQPDYTQLRQLIGQDFQSRYDALNAAEKRAFLRTLIDHIDIDESRNMRLFFKA

SEQ ID NO: 11105 - protein, 441 aa, Unknown
  Description of Unknown: Integrase B11106 sequence
  cd00338,PF13408,IPR011109,Coil,PS51736, IPR036162,IPR006119,G3DSA:3.40.50.1390,PTHR30461,PS51737, IPR025827,PF00239,SM00857,SSF53041
LNVLRAALYPRVSTEEQAKFGLSIHDQQNDLEEYAKANGMKVVGIYPDAGFSARKKIEKRPAMMELLAAVQRDEIDIILVTKLDRWFRNIGEYYKVQEILEAHNVCWKTIYEDYDTSTAAGRLKINIMLAVAQDEADRTGERIKKVLDAKKSRNEVCTGHLPKGYKIDGKFAVIDREAEPDVKTFFSVFLETGSIHNAISAVPNLKLQYRTASKMLDNRGYVGEWHGLSIPPYLTAEEFDRIQTLRRRLQRKVAQNRTYIFSGLLVCGDCGRRIGGRPRKLVNGESYVYSCDGAYQYKGCPNHANIMEATIEQYLLETIDAKIEIFANTKDEPKQNSKEIEEKAKSLQKKLAKLSDLYLDDLIAKDEYAKRYADLTAQLESAESLLRKPPAKSAKDLSEAFFFGWQDIYKELSRENKKVFWKLKLKEIRLYQDRRIDFDFL

SEQ ID NO: 11106 - protein, 441 aa, Unknown
  Description of Unknown: Integrase B11107 sequence
  cd05922,IPR011109,IPR038109,PF07508, PS51736,G3DSA:3.40.50.1390,IPR006119,IPR036162, PTHR30461,PTHR30461:SF3,PS51737,PF00239, SM00857,cd03768,G3DSA:1.10.10.2600,SSF53041
MRDGTAPVRRLRCAIYTRKSSEEGLDMEFNSLDAQRESCEAYIASQRAEGWVCMRERYDDGGYSGGTLDRPGLKMLLEDIEAGLVDVIVVYKIDRLSRSLMDFAKLVEAFDRNNVTFVSVTQAFNTTTSMGRLTLNILLSFAQFEREVTGERIRDKFAASRAKGMWMGGFVPMGYDVIDRKLVINDAEATTVQRLFKRFVTLGSATLLTRELVANGAMTKRGKPIDKGFLYKLFRNRLYLGEAVHKGTSYPGEHQGIIDQQLWDQVHAILQESPRQRAANTRAQVPALLKGLIFTDRGIAMTPTFTKKGSRHYRYYTSMDAIRNRACEGREAFVRLNAGVVEGAVVQQIRKLVRTPEIAAKVAVVLQDCDSVSNDNDVVSALSDFDSLWASLFPAEQARIARLLIDRVIVSQQGLTVDLRTDGLSSVVRDMLAPRPKEKVA

SEQ ID NO: 11107 - protein, 441 aa, Unknown
  Description of Unknown: Integrase B11108 sequence
  IPR011109,IPR038109,PF07508,PS51736,G3DSA:3.40.50.1390, IPR006119,IPR036162,PTHR30461,PTHR30461:SF3,PS51737, PF00239,SM00857,cd03768,G3DSA:1.10.10.2600,SSF53041
MTKPPEKSKVVRKLRCAVYTRKSSEEGLEQEFNSLHAQREACEAYIVSQRSEGWVLVRDQYDDGGISGGTLERPGLKRLVEDIEDGLVDVVVVYKIDRLSRSLADFAKLVEVFDRNGVTFVSVTQSFNTTTSMGRLTLNILLSFAQFEREVTAERIRDKVAASRKKGMWMGGVPPYGYRVENRKLLVNEDAAADVRWIFCRFLEIGSCTELARDVGTRGIRTPRGNRIDKKYIYRMLRNRAYIGEAVHKGDSYPGEQDAIIDREMWDKVHTILQESPRKRAARTRADMPALLKGLLFGPDGAAFSPTHTRKGSKLYRYYVSQTVLKHGAGSCPVGRVPAGEIEAAVVDQLRAVFHQPEIVAGTLKAARAYVDDIAEAEARAALRQLDPLWDELFPAEQARIVALLVERVDIATDGLNVRLRVDGLMGLAREVLAGGIGEAA

SEQ ID NO: 11108 - protein, 441 aa, Unknown; identical to SEQ ID NO: 10042
  Description of Unknown: Integrase B11109 sequence
  cd00338,PF13408,IPR011109,IPR038109, PF07508,PS51736,IPR036162,IPR006119, G3DSA:3.40.50.1390,PTHR30461,PTHR30461:SF3,IPR025827, PS51737,PF00239,SM00857,G3DSA:1.10.10.2600,SSF53041

SEQ ID NO: 11109 - protein, 441 aa, Unknown
  Description of Unknown: Integrase B11110 sequence
  cd00338,PF13408,IPR011109,IPR038109,PF07508, PS51736,G3DSA:3.40.50.1390,IPR006119,IPR036162,PTHR30461, mobidb-lite,PTHR30461:SF3,IPR025827,PS51737,PF00239, SM00857,G3DSA:1.10.10.2600,SSF53041
MRKEEKMERIIHKVETSPGKLPARLRVVAYCRVSTEKETMQKSLSAQISHYSGIIQKNPTWQYAGVYADEGITGTKDNRAEFQRLLADARAGKVDIILTKSISRFGRNTLNLLKTVRELKDLGVDIWFERENIKTKSAEGELLLTVLASFAQAESEAVSENCKWRIRQRLSKGELVSLRHIYGYVIEKDNIKINTKQAKIVNRIFNEYVNGMGCKEIASFLNSKKVKSLNGGKWTADRIAKMLRNEKYIGDAMLQKKYVKDHLTKKDAINHGELPRYYVTHNHPPIISKELFTLANQKMDGNAAKSKGKSKRTHPPLSGMLFCEACGAAYTRKTTHHKAAWVCSTYKNKGKDACLSKRIPEDILLHLCTKVIKENAFDDIRFRDKVERITAAEDILTFHFRGNRKVNITWSNTSRKEVWTESMKDSAKERSLKQWQHRKSK

SEQ ID NO: 11110 - protein, 440 aa, Unknown
  Description of Unknown: Integrase B11111 sequence
  cd00338,IPR011109,PS00397,IPR038109,PF07508, Coil,PS51736,IPR036162,IPR006119,PTHR30461, G3DSA:3.40.50.1390,PS51737,PF00239,SM00857,G3DSA:1.10.10.2600, IPR006118,SSF53041
MRIAGYLRVSTLKQAEDGVSIEMQKRIIINHCEMLEIISDESEIKWYIDDGWSAKSLERPAMRSLIGDIKTRQMDLIIAYDMSRISRDIMDMMSLLKMLDKYGVSLKCLYDNPSFETASERFMTTIKMATHQYERERTSERTRDAIINIAESGRYPFSGMKHYGYMKDDDGRMVLNPEEASLVLEIFQMACEGCRMREIVRMANIRQDKEIFTMGRIRRIIKNRKYTGTISVYGKDYDGLIPAIITEEIQKKAESNLVTHSHKSDRYIFTSVLICRRCGSTLLCKSAYGKMKKMYLYYFCPTCKKRIRQSDVEDELSEFKVDNATKDFKNRYNALRDIETLLLSRRSKLNDKFLEGAVSVENMQIMLTAIENELRDARRKRSAIQSLDAVRVFSDFEDAEQKKAFVEMHIRRIVIDIQEKKVLTIEFKESETSAEKNKKI

SEQ ID NO: 11111 - protein, 440 aa, Unknown; identical to SEQ ID NO: 9754
  Description of Unknown: Integrase B11112 sequence
  cd00338,PF13408,IPR011109,IPR038109,PF07508, PS51736,IPR036162,IPR006119,G3DSA:3.40.50.1390,PTHR30461, mobidb-lite,PTHR30461:SF3,PS51737,IPR025827,PF00239, SM00857,G3DSA:1.10.10.2600,SSF53041

SEQ ID NO: 11112 - protein, 440 aa, Unknown
  Description of Unknown: Integrase B11113 sequence
  cd00338,PF13408,IPR011109,IPR038109,Coil, PS51736,IPR036162,IPR006119,G3DSA:3.40.50.1390,PTHR30461, IPR025827,PS51737,PF00239,SM00857,G3DSA:1.10.10.2600, SSF53041
MSVVLRAALYPRVSTEEQKKFGLSIHDQQNDLEEYAKAHNMKVVGVFQDAGFSARKKIEKRPAMLQLLEAVKHDEVDIILVTKLDRWFRNIGEYYKVQEILEAHNVSWKTIYEDYDTSTAAGRLKINIMLAVAQDEADRASERIKRVLDAKKERNEVCTGHLPKGYKIEGKFAVIDKETEPVIRRYFSTFLETGSITKAMDAAPELNLKYQTASQMLDNPGYMGDWHGIKLPPYLTPQEFQRVQDLRTRITRKSPYNRTYIFSGLIVCGECGRRMTGHPSPRPSGACSYSYYCQGSAQRKGCNNGNFTVEWKIEDYLLSTIDEQIQVKLQAKPRQEPKANQDVQLKALQKKLSKLSELYIDDMISKADYSKKYAELTSQMDEITQVKSQSRAPEEIATLFSAGWQEIYKQLNKENKQAFWKLKIKEIRLYKDRRIEFDFL

SEQ ID NO: 11113 - protein, 440 aa, Unknown
  Description of Unknown: Integrase B11114 sequence
  cd00338,Coil,PS51736,G3DSA:3.40.50.1390,PTHR30461, IPR006119,IPR036162,PTHR30461:SF3,PF00239,SM00857, SSF53041
MINCAIYPRKSKANDNSQSMEQQIADCTEYIRRNYTEYSITVYDGDYALTGHSTAKRKDFQRMMDDVRAKKIQLVVIMRYDRIARNMRDFCNLYHDMEVNGCNLVSVSQQIDTGTPYGKNFMYQMASMAELEWAIISERYKDTAKYKREHGYAYTGRVPYGYMIEKQADGHKRVVKDPDHDAMKVFDFYQKYKNKAKTVEYVRENFKSNFTYDMLRNMLETDMYTGKVSGNDHFCEPYLTDEEWDKIKNIKIQKITPSNKTYLFSRLVQCPICGNTMQSTFTGSRQLQYYRCGYVAHRKVHDGLLVPETALETALLSQISSFLKEKTVSAKIIDSPPKKQFESQIEALKKQCERLNYMFEKGRIDVDEYERKFDNIQKQIANLKPQKAVDYRKIKSNLCAGWQETYAALDSAHKKIFWNNLIEKIIINQDKQIIDIIFNT

SEQ ID NO: 11114 - protein, 440 aa, Unknown
  Description of Unknown: Integrase B11115 sequence
  IPR038109,PS00397,IPR006119,PS51737, PF00239,G3DSA:3.40.50.1390,PTHR30461,IPR025827, SM00857,G3DSA:1.10.10.2600,SSF53041,IPR011109, PS51736,IPR006118,cd00338,PF13408,Coil,IPR036162,PTHR30461:SF3
MNVILYVRVSTEEQSRSGLSLETQEKALKEYCERNNHTIIDIYRDAGFSARKPYNKRPEMMRLISDLKERKPQKILFTKLDRWFRNIKEYYKVQEILDAHDVAWSAIWENYNTDTASGRLHVNIMLSVAQDESDRTSERIKSIHHAAIMRGQPISGIQPIGFKVDVIDGKKRVVHDPEQSAMLIELIEQFELHQSLHVVTRYINTKYNRASAPANYKKILTNPMLYGKYKGNDNYTEPYITKERFDDLQQIIQRNIRVSDKRRTYLFSGLIRCPVCDCALGGCYDGARMYYRCRKRYNATCQSKHNVSELRVERYLLDNIRDLFDGYLLRWTVKHNRRKKEDPERYKKQLERLNDVYIDGNITKEQYRQRTKALKDKIAELNRSDHGSLQLSKLKNLLTSDFERDYNLLNREHKRSFWRQIIKQIVVDLDGHPVDVIFLD

SEQ ID NO: 11115 - protein, 440 aa, Unknown
  Description of Unknown: Integrase B11116 sequence
  IPR011109,IPR038109,PF07508,PS51736,G3DSA:3.40.50.1390, IPR036162,PTHR30461,IPR006119,PTHR30461:SF3,PS51737, PF00239,SM00857,cd03768,G3DSA:1.10.10.2600,SSF53041
MKDVSTKPARRLRCAIYTRKSSEEGLEQEFNSLHAQREACDAYIASQKSEGWALVRDQYDDGGISGGTLERPALKQLLADIEDGLVDVVVVYKIDRLSRALMDFSKLVEVFDRNGVTFVSVTQSFNTTTSMGRLTLNILLSFAQFEREVTAERIRDKVKASRMKGMWMGGNVPLGYDVRDRKLVVNTEEAAKVGEIFTRFVEVGSATILARELRSEGTLNKRGKLIDKGYLYRLLNNRVYRGLAVHKGKAYPGEHTAIIDERLWDQVHDIFGESPRKRANNSRSQTPALLKGLIFTATGAAMTPSSTKKGARRYRYYVSMDLLKNRETPDDGIPRRLPADIAEGAVITEIRRVLRTPETTAQVIAKLDRDDIPEADAIAALQQFPQLWDQLFPAEQARIIQLLVRRVTVTAEGLVIDMRTDGIAGVMRDLMVPRRLEAAE

SEQ ID NO: 11116 - protein, 440 aa, Unknown
  Description of Unknown: Integrase B11117 sequence
  PS00397,IPR038109,IPR006119,PS51737, PF00239,G3DSA:3.40.50.1390,PTHR30461,IPR025827, SM00857,G3DSA:1.10.10.2600,SSF53041,IPR011109, PF07508,PS51736,IPR006118,cd00338,PF13408,IPR036162,PTHR30461:SF3
MRVALYARVSTEEQARHGISIDAQVDAMHRWAGEQGHTIIGDYIDNGISARKSPSKRPALQELLQDIPEKKIELIAFCKLDRWTRNVKGYYQVQEVLDKYKVAWAAIQEDYETITASGRFKVNIMLSVAENEADRTSERIKAVYNHKVALGQPINGNVPLGLKIDDKRMIPDKFASAVVAAYQCYADTGSRNTVQRVLDGYGKHLSLQSISRLLRNKLYIGEYRDNKSYCEPIISRELFDRVQRDLQMHSVKHTPSGRVYLFSSLIFCGVCGRKMAAIFANHSTVYYRCVCGNKNYKDCPNSNYIREDILEGSIVSQLAELVKGKSQVVRQARTTPSNKAAIERKLKRLQDLYIDGDITKEQYAARRDELSALIVPKKDDKPKIILGDRFEEDYMRLTRQQKAVFFRRVIDRIVVSENSEIDVYFADVYTSGNATDVDLS

SEQ ID NO: 11117 - protein, 439 aa, Unknown
  Description of Unknown: Integrase B11118 sequence
  cd00338,PF13408,IPR011109,IPR038109,PS00397, PS51736,IPR036162,PTHR30461,IPR006119,G3DSA:3.40.50.1390, PTHR30461:SF3,IPR025827,PS51737,PF00239,SM00857, G3DSA:1.10.10.2600,IPR006118,SSF53041
MRAVGYIRVSTTEQKLHGYSLDAQRELLQKYADEHDMKLVGIYADEGKSASKRLQRRTEILRLLDDAEKGLFDTILFKDLTRWSRNPSQFYAVQDRLDACGVSWIAVEQQNLETVTASGRLIVGIQISVAAHESAQTSERIKFVNQSRVQKKYPLCGDRWLPLGYKVGMIDGQKRVVKDEQTQDAVDAIFDTYESTQCINQTLKAASEMGVHTWDKSLRKMFRNPIYKGEYHDVQEYCEPYLTPERWERIRSISEQHHYTAPKRKDGYTFSSLVRCASCGGTMTGMSYTANGKQYAYYQCKRYTVGTCTHKQMIREDVIEQYLIESVDDVLSKFTAEVKSKAKKKKNPAPIRARLNRLKELYIDGDISKDEYTKRKEEYENELRETPPAAEALKNAFPDGWRKFYDAAPKTAKNAAWRSVVSKILVDEQNNISVEFLTF

SEQ ID NO: 11118 - protein, 439 aa, Unknown; identical to SEQ ID NO: 10134
  Description of Unknown: Integrase B11119 sequence
  cd00338,PF13408,IPR011109,IPR038109,PF07508, PS51736,IPR036162,IPR006119,PTHR30461,G3DSA:3.40.50.1390, mobidb-lite,PTHR30461:SF3,PS51737,IPR025827,PF00239, SM00857,G3DSA:1.10.10.2600,SSF53041

SEQ ID NO: 11119 - protein, 439 aa, Unknown; identical to SEQ ID NO: 10086
  Description of Unknown: Integrase B11120 sequence
  cd00338,PF13408,IPR011109,IPR038109,PF07508, PS51736,IPR036162,PTHR30461,G3DSA:3.40.50.1390,IPR006119, mobidb-lite,PTHR30461:SF3,IPR025827,PS51737,PF00239, SM00857,G3DSA:1.10.10.2600,SSF53041

SEQ ID NO: 11120 - protein, 439 aa, Unknown; identical to SEQ ID NO: 9977
  Description of Unknown: Integrase B11121 sequence
  cd00338,PF13408,IPR011109,IPR038109,PF07508, PS51736,G3DSA:3.40.50.1390,IPR006119,PTHR30461,IPR036162, mobidb-lite,PTHR30461:SF3,IPR025827,PS51737,PF00239, SM00857,G3DSA:1.10.10.2600,SSF53041

SEQ ID NO: 11121 - protein, 439 aa, Unknown
  Description of Unknown: Integrase B11122 sequence
  IPR011109,PS51736,G3DSA:3.40.50.1390,PTHR30461,IPR006119, IPR036162,PS51737,PF00239,SM00857,cd03768, SSF53041
MAVIGYARVSKDDQAGSLPAQVSRLQAAGCARVITDIETGRSTDRDGLLEVMAMVQAGQVSELLVTRVDRLGRDAAYTDALLAQCEQQGVAVRALDGGAIETATPQGFLMARLQTGLAEMESRMLSLRLRRQFAVYRAEGRHLRRRKPFGYQAGPGHRLQPHPEQWPQALRVLRDLKRLGSFATVTRSMPEWCDWTPAATNLQAWFVNPVIRGHIGHQLDRKSGKGWGQRWGEILYDQHPALISEQDWRELADLLRRPTNRFKNTTTTEVAHALTGLLRCRSCGHLLRRNTSNGVAWWRCRHRLCAGRGGAREDRILPVVIDACVAEAGRLAQLLAEPQAQEPAVAAMADELELMERMAARNPENRAMAAAVAEQRQRIEALRRVERSAVDPAAYRAMQDPRFFTSGSPQDQRTVMQAVLRSVTVGERGDPIEPLPRSC

SEQ ID NO: 11122 - protein, 439 aa, Unknown
  Description of Unknown: Integrase B11123 sequence
  IPR038109,PS00397,IPR006119,PS51737, PF00239,G3DSA:3.40.50.1390,PTHR30461,IPR025827, SM00857,G3DSA:1.10.10.2600,SSF53041,IPR011109,PF07508 ,PS51736,IPR006118,cd00338,PF13408,Coil,IPR036162,PTHR30461:SF3
MIRAAIYARVSTDQQANEGDSIPAQIDALTRYVNDHDDMILAGEYIDGGVSGTKADREELTRLTADIVAGKIDRVLVTKLDRLYRSIRHYVNTMEVWEAHGVGWTAIWEPMYDTTTPQGRLVVNQMMSIAQFEAENTSQRIKAVMEYKVSQGEAVTGKVPIGYRIQGKHLVIDQEEADKARQIFDSFAVSGSIGEAARMAAALGHPFHRKTIKNMLTNRKYIGEHRGNPNYCPPIIDRDLFEDVQRKLTMAVRYDAKHVSIFTGLIKCGACGRRLGVLHDKQHLSPRYRCQGHFQPPKNCPNPHSISETTIEKHLINEVQKVAREVKAEQIEEQKKVVDHTAQIAAIDRRISRLKDLYLAEMITLEEYKKDKEEMEQQKAALSVPDVPKNDSKVLDDILAINDLKGLILGLTPAERRYLWRGMVKEIVFFPDRHLELHF

SEQ ID NO: 11123 - protein, 439 aa, Unknown
  Description of Unknown: Integrase B11124 sequence
  cd00338,PF13408,IPR011109,IPR038109,PS51736, IPR036162,PTHR30461,IPR006119,G3DSA:3.40.50.1390,PTHR30461:SF3, PS51737,IPR025827,PF00239,SM00857,G3DSA:1.10.10.2600, SSF53041
VVIFGYEGSTLCPGLVSSEEQSKHGLSIETQLDNLREWSSNNKHTIVAEYVDAGISGKKPYTKRPALSQFIDDLEAGMKVDALAFTKLDRFFRSVKLYYQAVDILDKFKVPWFAIQEDYETVTASGRFKTNIMLAVAENEADRTGERIKVVLDHKFAKGEWSGKPPRGYSVVNKKLEPNKESPIIEGAFNACLLSGSVVEARKHLVSNGINVTYNTAYRIVTNPIYIGSHNGNPNFCKPTVSKDVFDEIQSFLGKRSVRTNATGRIYIFSGLVQCADCGWVMTGHCNTTYSPGKQYRYRCNNHFNNRICQNGHYVIEYDLEELLLTKVEAEMQSSVANSETKPKKKASKTVDNSKKIERLTELYIEGHISKEEYQKRREALIVPKQTTTSSKNRIIALSGLNFRESYQSFTRQQKRAFWKSVVDKIVTDGENFNVIFRS

SEQ ID NO: 11124 - protein, 438 aa, Unknown; identical to SEQ ID NO: 9988
  Description of Unknown: Integrase B11125 sequence
  cd00338,PF13408,IPR011109,IPR038109,PF07508, PS51736,IPR036162,IPR006119,PTHR30461,G3DSA:3.40.50.1390, IPR025827,PS51737,PF00239,SM00857,G3DSA:1.10.10.2600, SSF53041

SEQ ID NO: 11125 - protein, 438 aa, Unknown
  Description of Unknown: Integrase B11126 sequence
  PS00397,IPR038109,IPR006119,PS51737,PF00239,G3DSA:3.40.50.1390 ,PTHR30461,IPR025827,SM00857,G3DSA:1.10.10.2600, SSF53041,IPR011109,PF07508,PS51736,IPR006118, cd00338,PF13408,Coil,IPR036162,PTHR30461:SF3
MNVALYARVSTEEQARHGISIEAQTAALHKWADENDHVIVGEYIDNGVSARKSPSKRPALQALLHDIPGKQIELIAFTKLDRWTRNVKGYYQVQEAIDAHRVAWAAIQEDYETITASGRFKVNIMLSVAENEADRTSERIKAVFEHKVELGESLGGRTPFGFMVENKRLIPDPATAEIARAMFDRYIATASYYDTARYLHDQTGAMWEYHYLRRCLKNTLYIGKYRDNDNYCEPIISLDTFNTAQELMKQRSIRHNPTTRVYLFSGLVRCECCDHAMVGFSLPKPSGQDYYYRCHQAAIYHRCEHTHAIREERLERWMLENVALELDEWSAQYKLTPKRKAPDNAKIKRKIERLKTLYLDELITLEQYKADRAELEAQLGSTSEPPDLSGLKKQFEGDFQSIYKSLTREQRRSFWHSVIERIDLDAENNPHIVFRSGI

SEQ ID NO: 11126 - protein, 438 aa, Unknown; identical to SEQ ID NO: 10055
  Description of Unknown: Integrase B11127 sequence
  cd00338,PF13408,IPR011109,IPR038109,PF07508, PS51736,IPR036162,IPR006119,G3DSA:3.40.50.1390,PTHR30461, PTHR30461:SF3,PS51737,IPR025827,PF00239,SM00857, G3DSA:1.10.10.2600,SSF53041

SEQ ID NO: 11127 - protein, 438 aa, Unknown
  Description of Unknown: Integrase B11128 sequence
  PS00397,IPR038109,IPR006119,PS51737,PF00239,G3DSA:3.40.50.1390 ,PTHR30461,IPR025827,SM00857,G3DSA:1.10.10.2600, SSF53041,IPR011109,PF07508,PS51736,IPR006118, cd00338,PF13408,Coil,IPR036162,PTHR30461:SF3
MERAALYIRVSSEEQAIHGLSIEAQREKLDQWARGRVKIVDHYVDAGISARKPATKRPELQRLLNDVRAGRVDVILFTKLDRWFRNIAEYYKVQEVLEKHHVNWRTIQEDYDTSTASGRLKINIMLSVAQDEADRTGERIKAVFESKLMRNEPISGKVPLGYKIENKRLVIEPEKADIVRDIFRYYISTRSIRETRKYILNRWGISYCHTSIRSMLQNERYIGRAHDSDTFCPSIVPKDDFLLANKILSTRAERYVQSRSNRVYLFTGLVFCAECGNRLSAHVVGQKYIYYRCTRYEKTHICSHKKRTSELVLEDWLVKNLLAQFAAYNVSISADEKPDTKIDTSKIRRKMEKLKDLYLNDLIERDVYERDYSALKESLLEAERVKPKKKPVDLSAVADALKMYDGLSRTGKKEFWSRTVSKIVITNEDDFFVYPTSP

SEQ ID NO: 11128 - protein, 438 aa, Unknown
  Description of Unknown: Integrase B11129 sequence
  cd00338,PF13408,IPR011109,IPR038109,PF07508, PS51736,IPR036162,IPR006119,PTHR30461,G3DSA:3.40.50.1390, PTHR30461:SF3,IPR025827,PS51737,PF00239,SM00857, G3DSA:1.10.10.2600,SSF53041
VSTDQEEQLLSYENQVNYYTNYISENPLYEYAGTYADEGISGTNTKKRDEFNRMIADCRAGKIDMIITKSISRFARNTLDCLNYVRELKDLGIGIIFEKENINTLDAKGEVLLTILSSLAQDESRSISENCTWGIRRRFETGKHKMSTKRFLGYDTDETGKLVINRTQEPIVIRLYQEFLDGKTTDYIKRIFEREGVKNWDGGTKWQSTTLMSMLENEKYKGDALLQKSYTVDFLTKKRTQNKGEIQMFYVEDDHDAIISKRIWECVQLEIKRRKKYLEEHGTNSYSHRPESNPFASKIICGDCNKVFARKGWRSSTGVDRKVWQCSERYKVKGVMGCANRHVEEETLIKAYLMAWNALVENREDFMEQWTEQLQSENLLEGYRAEKFIEYTDGAEPLTEMDTDFMLKTLDHIKVFEDGTLLVVFLDGTEIECKNEEE

SEQ ID NO: 11129 - protein, 438 aa, Unknown
  Description of Unknown: Integrase B11130 sequence
  cd00338,PF13408,IPR011109,IPR038109,PF07508, PS51736,G3DSA:3.40.50.1390,IPR036162,IPR006119,PTHR30461, PTHR30461:SF3,IPR025827,PS51737,PF00239,SM00857, G3DSA:1.10.10.2600,SSF53041
MERTVQLVRPTLPKAAQIKRVCAYARVSSGKDEMLHSLSAQVSYYQRLIQSRAAWKFCGVYADEAETGTKDSREQFQEMLAECRKGNIDLIITKSITRFARNTVTLLQAVRELKDMGIEIYFEEQNIFTLSTEGEVMLTILASYAQEESRSASENQLWRVKRNFEEGKVWGMQIYGYKAVDCQLQIIPEEAEVVKRIFAEFLAGKGRESILRGLNRDGIKPRRAEKWQRTSVYNILRNYAYTGNLILQKTYRENFMTKKSIVNDGRKPKYHCQETHEPIISMETYQQAQAEIERRNANLPKKAPYMMYLFTSLIRCPYCGVNYRRCKGYSSWLWRCNTFVVHGKQSCPQSKQIREDTMVSVTEEVLGITGLNYKNIHDAIDFIDAFEGNRLVFHLKNGEVVERVWKDRSRAESWTPEMKLKAKIKEAERQEELKRRVQ

SEQ ID NO: 11130 - protein, 438 aa, Unknown
  Description of Unknown: Integrase B11131 sequence
  cd00338,PF13408,IPR011109,IPR038109,PF07508, PS51736,G3DSA:3.40.50.1390,IPR036162,IPR006119,PTHR30461, mobidb-lite,IPR025827,PS51737,PF00239,SM00857, G3DSA:1.10.10.2600,SSF53041
MASVKQVLPAKAPELKTVRVAAYARVSTGKDAMLQSLSAQVSYFSAYIQHHPGWAFAGVYADEAVTGTQDDRPEFQRLLRDCREGKIDLIVTKAISRFARNTVTLLKTTRELKELGVGVFFQKEGLYSNRGQGEMILTLLAAVAQEESRAVSENCKWRIRSRFKKGELVNFHFMYGYRMHRGKVTIAPEEAAVVAWIFDAYLDGLGCEAIAAALRQQDTPTLKGGAWTANRVMRMLKNEKYAGNALLQKRYVTDHITKKQVRNQGQLPRYYAECTHPGIVTPETFEKAQQLIERNRLKNNIAFKPPISQPLSGKVLCRNCGKPFSRVMRGGQPKWQCATYLRKGRDACPARQVPEQVLLAFICDSLGWQRFDAQAFQARVAAIQVTSPSTLQLVLADGQVFETAWQNRSRSESWTAEMKQEARERNLRKGNTPCKQPA

SEQ ID NO: 11131 - protein, 438 aa, Unknown; identical to SEQ ID NO: 9701
  Description of Unknown: Integrase B11132 sequence
  IPR038109,IPR006119,PS51737,PF00239,G3DSA:3.40.50.1390, PTHR30461,IPR025827,SM00857,G3DSA:1.10.10.2600,SSF53041, IPR011109,PF07508,PS51736,mobidb-lite,cd00338, PF13408,Coil,IPR036162,PTHR30461:SF3

SEQ ID NO: 11132 - protein, 438 aa, Unknown
  Description of Unknown: Integrase B11133 sequence
  IPR011109,PS51736,IPR036162,IPR006119,PTHR30461, G3DSA:3.40.50.1390,PS51737,PF00239,SM00857,cd03768, SSF53041
MSNTLLPQIVGYARVSTKNGEQLSALEIQKSRLKTAGVQKIFTDVESGRSNGRQAFNELLQLIDKRAVKEIVVTRFDRLGRDAAFVDAALVLASKKSVQIRTIDTGVVDTESPTGFLMSRISTSLAEMESKMLSMRVKKAIDQRWKDGKIPRGKIPWGYHRVKYADKDRLELHPTEGERARKFLEVLKENGYRLHRTLKEFEDTPLTRVSSVKKWLYNPVLRGGIGFVKIGGYQYKKVIWGLHEPLIRHEDWFTIKRIMEFNTKAWGASTKVQPKLLTGLAVCSCCGNRLAYLPRKKETHAYALRCNFLKCDLYQKRVKATMIVEAINKALAKRSKELATLTESEPVEVTKLRNEIDNLTKLDDPDLKEVIDRKKEKLTGLLLTDSPLLKERASLMGEPGFWKHAVNLPDNRLREIYLEFVLKAVANPTEVTQVELRI

SEQ ID NO: 11133 - protein, 438 aa, Unknown
  Description of Unknown: Integrase B11134 sequence
  IPR011109,IPR038109,Coil,PS51736, IPR036162,IPR006119,G3DSA:3.40.50.1390,PTHR30461, PS51737,PF00239,SM00857,cd03768, G3DSA:1.10.10.2600,SSF53041
MSNKTFPDVVGYARVSTEQNEQLSALETQKSRLKAAGVEKIYTDVESGRSNEREAFNELLQLIDKKRVREIVVTRYDRLGRNAAFVDAALVLASKKSVVIRTIDTGVVDTDTPQGFLMSRISTSLAEMESKMLSLRVKKAFEQKWKDGKIPRGKIPWGYHRVKYVDNDRLELHPTEGDKARQFLALLRQNGYRFSKAIIESKDVPLRKTSSVKKWLCNPILRGGIGFERVKDYQYKKVIWELHEPLIRHEDWFAIQRIMEFNRNTWGASSKVQPKLLTGLAICSGCTNRLAYLPRKKETHAFALRCNTLKCDFYNKRVKASMMVEAINKALAKRAKELANRTEEEPVEVMKLRSEVDLLIKMNDPDLEEAIKKKQEKITGLLLTDSPILKERAQILGAPGFWKHAESLPDNRLREIYLEFVLKVTANPTEVVGVDLRI

SEQ ID NO: 11134 - protein, 438 aa, Unknown
  Description of Unknown: Integrase B11135 sequence
  IPR011109,Coil,PS51736,IPR036162,PTHR30461, IPR006119,G3DSA:3.40.50.1390,PS51737,PF00239,SM00857, cd03768,SSF53041
MSNTLIPQIVGYARVSTASGEQISSLETQKSRLKTAGVQKIFTDVESGRSNDRQAFNELLQLIDKKAVKEIVVTRFDRLGRDAAFVDAALVLASKKNVQIRTIDTGVVDTESPTGFLMSRISTSLAEMESKMLSMRVKKAIDQRWKDGKIPRGKIPWGYHRVKYADKDRLELHPTEGERARKFLEVLKENGYRLHRTLKEFEDTPLSRVSSVKKWLYNPVLRGGIGFVKIGGYQYKKVLWGLHEPLIRHEDWFAVKRIMEFNTKAWGSSSKVQPKLLTGLAVCSCCENRLAYLPRKKETHAYALRCNFLKCDLYQKRVKAAMIVEAINKALAKRSKELASLTESEPVEVTKLRNEIDNLSKLDDSDLKEVIERKKEKLTGLLLTESPILKERAELMAEPGFWQHAVSLPDTRLREIYLEFVLKAVANPTEVTQVDLRI

SEQ ID NO: 11135 - protein, 437 aa, Unknown; identical to SEQ ID NO: 10051
  Description of Unknown: Integrase B11136 sequence
  cd00338,PF13408,IPR011109,IPR038109,PF07508,PS51736,IPR036162, G3DSA:3.40.50.1390,IPR006119,PTHR30461,mobidb-lite,PS51737, IPR025827,PF00239,SM00857,G3DSA:1.10.10.2600,SSF53041

SEQ ID NO: 11136 - protein, 437 aa, Unknown; identical to SEQ ID NO: 10067
  Description of Unknown: Integrase B11137 sequence
  cd00338,PF13408,IPR011109,IPR038109,PF07508, PS51736,IPR036162,IPR006119,PTHR30461,G3DSA:3.40.50.1390, PTHR30461:SF3,PS51737,IPR025827,PF00239,SM00857, G3DSA:1.10.10.2600,SSF53041

SEQ ID NO: 11137 - protein, 437 aa, Unknown; identical to SEQ ID NO: 10072
  Description of Unknown: Integrase B11138 sequence
  cd00338,PF13408,IPR011109,IPR038109,PF07508, PS51736,G3DSA:3.40.50.1390,IPR006119,IPR036162,PTHR30461, PTHR30461:SF3,PS51737,IPR025827,PF00239,SM00857, G3DSA:1.10.10.2600,SSF53041

SEQ ID NO: 11138 - protein, 437 aa, Unknown; identical to SEQ ID NO: 10141
  Description of Unknown: Integrase B11139 sequence
  cd00338,IPR011109,IPR038109,PF07508,PS51736, IPR036162,IPR006119,G3DSA:3.40.50.1390,PTHR30461,mobidb-lite, PS51737,PF00239,SM00857,G3DSA:1.10.10.2600,SSF53041

SEQ ID NO: 11139 - protein, 437 aa, Unknown; identical to SEQ ID NO: 11023
  Description of Unknown: Integrase B11140 sequence
  cd00338,PF13408,IPR011109,IPR038109, PF07508,Coil,PS51736,G3DSA:3.40.50.1390, IPR006119,PTHR30461,IPR036162,PTHR30461:SF3, PS51737,IPR025827,PF00239,SM00857,G3DSA:1.10.10.2600,SSF53041

SEQ ID NO: 11140 - protein, 437 aa, Unknown
  Description of Unknown: Integrase B11141 sequence
  cd00338,PF13408,IPR011109,IPR038109,PF07508, PS51736,IPR036162,PTHR30461,IPR006119,G3DSA:3.40.50.1390, mobidb-lite,IPR025827,PS51737,PF00239,SM00857, G3DSA:1.10.10.2600,SSF53041
MKKTIRVIEPTIPLLKKKKRVAAYARVSSGKDTMLMSLSAQVSYYSELIQRNSEWEYAGVYADEATTGTKEDRTNFQKLLKACRNGEIDIILTKSISRFARNTVTLLEAVRELKKYGVDVYFERENIHSLSGDGELMLTILASFAQEESLSASENQKWRIKKNFEEGKPWTYGMLGYRYNGEYYEVIPEEAEVVRKIFAYYLEGLGYNAICKRLDAEGVVTRNNNKWSQNSVSKILKNYTYTGNLLLQKTFRENHITKKTRVNRGELPKYHAEDTHEAIIDIDTFMAVQNEIARRLKEFEHKSQVQKTYPFTHKMVCDCCGAYYRRKITKSRIVWICATFNQKGKALCQQSKQLPEETLIALCNDVLGLVEFNEQIFINKVSQIRILDNNRVQFLLSDSKTEERTWKDRTRSESWTDEMKETARQRTLQRYAPKEVE

SEQ ID NO: 11141 - protein, 437 aa, Unknown
  Description of Unknown: Integrase B11142 sequence
  cd00338,PF13408,IPR011109,PS00397,IPR038109, PS51736,G3DSA:3.40.50.1390,IPR036162,IPR006119,PTHR30461, PTHR30461:SF3,IPR025827,PS51737,PF00239,SM00857, G3DSA:1.10.10.2600,IPR006118,SSF53041
MRAAAYIRVSTAEQKLHGFSLDAQRELLQKYADEHDMKLVGVYADEGKSASKQLHRRTEILRLLEDAESGKFDVILFKDLTRWSRNPSQFYAVQDRLDKCGVSWIAVEQPNLETVTASGRLIVGIHISVAAHESAQTSDRIKFVNASRVMKKLPLYGYKALPLGYTTGVIDGEKRVIIDESQREAVNAIFDAYERTQSIKAAKAAGLEHGVNAWDKSLRSMFRNPIYKGEYHDVQDYCEPYLTPERWERIKALVDQHHYTPPVNKYGYAFSSLVKCKECGSSMVGKTIKRKYRYYRCNRSQEGMCTHNRLINEKEIEEKLLASVDDVLSQFTVEKRPKRQKQKNFAPIRAKLNRLKELYIEGDISKEDYTKRKEALEAELNAPIARSETFKNAFPDGWRKYYDEAPNTAKNAAWRSVVRQITVDAENHIEVEFIPFG

SEQ ID NO: 11142 - protein, 437 aa, Unknown; identical to SEQ ID NO: 10091
  Description of Unknown: Integrase B11143 sequence
  cd00338,PF13408,IPR011109,IPR038109,PF07508, PS51736,G3DSA:3.40.50.1390,IPR036162,IPR006119,PTHR30461, PTHR30461:SF3,IPR025827,PS51737,PF00239,SM00857, G3DSA:1.10.10.2600,SSF53041

SEQ ID NO: 11143 - protein, 437 aa, Unknown
  Description of Unknown: Integrase B11144 sequence
  cd00338,PF13408,IPR011109,IPR038109,PF07508, PS51736,G3DSA:3.40.50.1390,IPR006119,IPR036162,PTHR30461, PTHR30461:SF3,PS51737,IPR025827,PF00239,SM00857, G3DSA:1.10.10.2600,SSF53041
MKEKKITKIEALSKLPKKTRVAAYARVSNGKDAMLHSLSAQINYYKKMIQDNNDWQFAGVYADEALTGTKDSREEFQQLLEDSKAGKIDMIITKSISRFARNTMILLETVRELDKLNVDVFFEEQNIHSISSEGEMVLTLLASVAQEESRSVSENMKWRIKKEFQQGEIWGGRSPLGYNLKNKTFRVIPKEAELVQLIYKLYIDGNGAETICQILDEKGIKPKESKKWGPSSIIKILSNRNYTGDLLLQKTYLNNHLSKKQVINKGELDRYLVKGNHEAIISNELFDKVQKIKHQRAIKNKSNLPKKKTILHGLIQCGNCSSTYTPKKMRQKDIWICSKSASKGQDVCDSKLVPHNIIVEASKRVLDMDQYSEMIFNSKVTKIIVQANKQLDFHMRDGAVVSYRWQHKSRSKSWTPEMKEQARLRALKQHHGGRENG

SEQ ID NO: 11144 - protein, 437 aa, Unknown
  Description of Unknown: Integrase B11145 sequence
  Coil,PS51736,IPR036162,IPR006119,G3DSA:3.40.50.1390, PTHR30461,PF00239,SM00857,cd03768,SSF53041
MALRLGYARCSTDEQADALAAQVARLEGAGCDRVIQELESGRNNDRPGLLEAMALVARGQVGELLITRADRLGRDAAFADQMIAACALAGTTITALDGGQIEAATPQGFLAARLQTTMAEVESRMLSQRIRRQFEVYRNQGRHLRRRKPFGYRAGSDHRLEPHPEQWPQALRVIAELRRLRSFSAVAQQLPTWCEWTPASSNVQAWFCSPVIRGHIAHNWDRSSGKGWNQRWGQILHDQHPALIGETEWQELADSIRRTRNSFAGGPTVDARHGLTGLLLCDGCGHRLRRNSAAGVAWWRCRHRLCQARGGIKEAVVLPVVVAACLEAADALAAAASAPADDDPVLIMKRRDLEQLQALAARNPALDGAVAALRQEVEGMARRVRFDPDPRIRQMLSMPGFFKGATAEEQRAIFGAALSAVRVGPGGQPLRALQRTM

SEQ ID NO: 11145 - protein, 437 aa, Unknown
  Description of Unknown: Integrase B11146 sequence
  IPR038109,PS00397,IPR006119,PS51737,PF00239, G3DSA:3.40.50.1390,PTHR30461,IPR025827,SM00857, G3DSA:1.10.10.2600,SSF53041,IPR011109,PS51736, IPR006118,cd00338,PF13408,Coil,IPR036162,PTHR30461:SF3
MKRAAIYVRVSTAEQRDKGLSVDSQIEALKAFCEDKGYSVAGIYNDAGISARKRYTKRPALLQLCDDCRCGKVDIILFTKLDRWFRSVADYYEVQTVLDQAKVPWRAIWEDYETETSAGQFKVNIMLSIAQAEADRTSERVKAVNNYRRAQGLCTYGAAPTGYVSRKGRLLIDEEKQEAVQAFFDCYLKTLCLADAIRTIHSYGVNISRDTAYKILKNPTYYGDAHGHKCAAYITKEQHDYIQNAIARRTRTPKTKDTVYLFSGLCKCKSCGYNIGGGMRSAYSGKELRKYKYYRCPHGAKLTCANTRTVSERNLEKYLLDNLDSILANFRSKAVLDAKGRNTHAKEIKALESKIKRIGDRYENDEITKDEYTKKVNDIRKQIQALDIPQKPIKEIEMPDDWKTLYSQLDDNHKKQFWNRIIDHMEFTSLDDIEVFI

SEQ ID NO: 11146 - protein, 436 aa, Unknown
  Description of Unknown: Integrase B11147 sequence
  cd00338,IPR011109,Coil,PS51736,IPR036162, PTHR30461,IPR006119,G3DSA:3.40.50.1390,PS51737,PF00239, SM00857,SSF53041
VIYTRISKDHDGSSTSPQAQFEECQGLAASMGWDCEHVSDIDTSAWSRNVKRPGFRRVVAGIKEGVVEGLIVHHLDRLLRQSRELEELIDAIESQTRGRFPIYSVHGELDLSTADGRFTARILTSVAQKESDDKSRRLKLVLAKNAREGKPHGGRRPFGWNDDRTTLHPSESQALQGVIQDLLEGQSLVSCARRLNMRTTTLRQILVNPRIAGLRAHHGQVVSEGRWEPLVSAETFRLLTELLERSAHQNHTTALQHPLIGLMYCERCGGRMGSRRHSTGRKYRCRKDLGGCGVGIDANGAEAAIFVAAEGLLEHVVVVLDEPVADLEGELTVAEARLEQLSRDYYVEHAITELEFRAARQPLDDRVQELRRQVDRVPAQLTHTASDVFSELNDHERADVLRSFIHRIWVSPGVAGRRFDATRLSIELLRGVEVRE

SEQ ID NO: 11147 - protein, 436 aa, Unknown
  Description of Unknown: Integrase B11148 sequence
  cd00338,PF13408,PS00397,Coil, PS51736,G3DSA:3.40.50.1390,IPR036162,IPR006119, PTHR30461,IPR025827,PF00239,SM00857, IPR006118,SSF53041
MIALYARVSTEEQAVHGLSIDAQLAALKEAYPNGVEYVDLGISARKPISKRPELQRLLRDVEQGRIELIVFTKLDRWTRNIREYYKAQDILDAHNVAWKALHEDYETQTAAGRLKVNIMLAVAQDEADRTSERIKTVFERKRQQGIVPTGKVPLGVKLVDGHYAPSDEADKVVDLFNTYINTRSAQETARRFGLTMQGVSYMLQNRTYLEAGVIDEQTFQLAANIKQTRGQRRGRTDRVYLFSGIIVCPHCGNKLSSAYNNGYNAYRCCRKHDHLCEGFYINEKKLERYCLDQLMPTVKDYNLKIREAQKKAPDIKAMKAKRDRMTDLYLDGLMDKAKYAEEYKALTRAIEEAENTPHPLNTTEIKAVLEAYRGLSQTAKKAFWSRVLVRIVPRPEEGIFDLVYTNGNITSDILPFVYNEHKLETVIQTTNKGQKT

SEQ ID NO: 11148 - protein, 436 aa, Unknown; identical to SEQ ID NO: 10169
  Description of Unknown: Integrase B11149 sequence
  cd00338,IPR011109,IPR038109,PF07508,Coil, PS51736,IPR036162,IPR006119,G3DSA:3.40.50.1390,PTHR30461, mobidb-lite,PS51737,PF00239,SM00857,G3DSA:1.10.10.2600, SSF53041

SEQ ID NO: 11149 - protein, 436 aa, Unknown
  Description of Unknown: Integrase B11150 sequence
  cd00338,PF13408,IPR011109,IPR038109,PF07508, PS51736,IPR036162,PTHR30461,IPR006119,G3DSA:3.40.50.1390, PTHR30461:SF3,IPR025827,PS51737,PF00239,SM00857, G3DSA:1.10.10.2600,SSF53041
VERIVRKIKPRASIPSKQKRVAAYARVSSGKEAMLHSLSAQVSYYSNYIQQHSDWEYAGVYADEALTGTKNSRPDFQRLLNDCRAGLIDMIITKSISRFARNTVTMLETLRELRQLEVDVYFEEENMHSIGGDGEFMLTILASYAQAESLSVSENCKWRIRKRFQAGEIVNLRFMYGYNIKKGEITVDHKEAEIVRMIFADYLSGMGCDRIAGKLNRLGLRTVRNNPWSGKRVADIIKNEKYAGNALLQRKYVTDHLSKKLVINKGKLPKYYAEGTHEPIIDLPTFQKAQEIMALRRENRNVKQNPANRYPFSSLIHCPRCGKNYRRVTYKGHAAWNCPTFIHSGKEACPAKQIPEPILVSLTAEVLGLEQFDEVVFRSQVKQMQVPETNKVIYIFQDGREVETIWQNRSRKFSWTEEAKLEARDRALAYQKGVKI

SEQ ID NO: 11150 - protein, 436 aa, Unknown
  Description of Unknown: Integrase B11151 sequence
  cd00338,PF13408,IPR011109,IPR038109,PF07508, PS51736,IPR036162,PTHR30461,IPR006119,G3DSA:3.40.50.1390, PTHR30461:SF3,IPR025827,PS51737,PF00239,SM00857, G3DSA:1.10.10.2600,SSF53041
VERIIRKIKPQASMASKRKRVAAYARVSSDKEAMLHSLSAQVSYYSDYIQQHSEWEYAGVYADEALTGTRDSRPDFQRMLNDCRDGLIDMVITKSISRFARNTVTMLETLRELRQLDVDVYFEKENIHSISGEGEFMLTILASYAQAESLSVSENCKWRIRKRFQAGEIVNLRFMYGYNIKKGEITIDHKEAEIVRMIFADYISGIGCDRIASKLNQLGLRTVLNNSWNGKRVADIIKNEKYTGNALLQRKYVTDHLSKKLVMNKGKLPKYYAEGTHEPIIDLPTFQKAQNIMAERREKRNVKQNPANSYPFSGLILCSRCGKNYRRVTYKGHTAWNCPTFIHSGKDACPAKQIPEPILISLTAEVLGLEEFDEVIFRSQIKQMQVPEANKVVYIFQDDREVETVWQNRSRKFSWTEKAKLKARERALAHQKGVKL

SEQ ID NO: 11151 - protein, 435 aa, Unknown
  Description of Unknown: Integrase B11152 sequence
  IPR011109,Coil,PS51736,G3DSA:3.40.50.1390,PTHR30461, IPR036162,IPR006119,PS51737,PF00239,SM00857, cd03768,SSF53041
MATLGYARVSKDEQSDSLPAQVSRLHAAGCSRVITDIESGRNSDRDGLLEVMAAVRAGQVTELLVTRVDRLGRDAAYTDALLAQCEAKGVAVRALDGGTIETATPQGFLMARLQTGLAEMESRMLSLRLKRQFTVYRAEGRHLRRRKPFGYQAGANHKLEPHPDQWPQALRVIEELRKAGSFTAVANALPSWCEWTPAPTSLQSWFCNPVIRGHIAHLLDKDSGKGWSRRWGEIHYDQHPALISEADWQELADVLRRPRNRFQNTEAKHGMTGLLRCAGCGHLLRRNSSNGVVWWRCRHRLCKDRGSCREDRILPVVIDACVAQAQKLAAELAAPRDQDPAVAAMVQELEQMERMAARNPGNRAMAAAVAEQQQQIERLKRSEQPVLDPAVHQALQDPHFFAGATPEEQRVMFQAVLRSVTVNRGGSQIQAQPRS

SEQ ID NO: 11152 - protein, 435 aa, Unknown
  Description of Unknown: Integrase B11153 sequence
  cd00338,PF13408,IPR011109,IPR038109, PF07508,PS51736,IPR036162,IPR006119, G3DSA:3.40.50.1390,PTHR30461,PS51737,IPR025827, PF00239,SM00857,G3DSA:1.10.10.2600,SSF53041
MRVALYERVSTEEQAKHGISVEAQSAALHKWAALNGNEIVGEYVDNGVSARKMPSKRPALQRLLNDIAANKTALIAFTKLDRWTRNVKGYYQVQDILDKHKVAWIAIQEDYETITASGRFKVNIMLSVAENEADRTSERIKAVFEHKIEKGEIAGGKPSFGYMVENKRLVPNPDTANIAREMFRHYLDTASYYDTARYLHSVTGMKWQYHYIRRCLSNPIYIGKYRSNANYCEPIVDAATFNAAQELMKSRSVRHNPTNRVYIFSGLVRCSCCGLAMVGFTLPKPNGDDYYYRCHEAMIYRRCEHTHSIREERLERWMLDNVAEKLDNYITEYNFTAKQRPHDNAKIKRKIEKLKELFLNDLITIEQYKADRAELESQIVEETAPKDFTELQSRFSKDFRSVYNTFSREQRQMFWRGTVDTIELDADNTPLIIFR

SEQ ID NO: 11153 - protein, 435 aa, Unknown
  Description of Unknown: Integrase B11154 sequence
  cd00338,PF13408,IPR011109,IPR038109,Coil, PS51736,IPR036162,IPR006119,PTHR30461,G3DSA:3.40.50.1390, PTHR30461:SF3,IPR025827,PS51737,PF00239,SM00857, G3DSA:1.10.10.2600,SSF53041
VFSASTAEQKKHGLSVDSQISALKDFCAAGGYFIAGVYSDAGISARKRYTRRPALLQLLTDCREKKIDVILFTKLDRWFRSVGDYYEVQRQLDAAGVPWRAIWEDYETETSAGVLKVNIMLSVAQSEADRTSERIRDVMQYKRARGDYVGKAPLGYVKQGGALIKNPETAPAVEALFSTFLRTLNTAEAIRAAAALGLHTNRETINKLFLNPAYAGSAAGGYTCPAYITPEQFDFIKDIRRRRTRTAKHTSAVYIFSGLCRCGICGRPMAGKTRHRQHVDGSPHVAAYYQCSAYSGSVRYHRAFSINGDKIEAQLLDTVDDALKSVRIAVKARNASANKDTAEKQKAALRLKLKRVQAVYMDGGLSDAEYTARRDAISAELAAIRTEPEKVPEALPDNWRETYDGLDPEHRRRFWQTVLRAITVNADRSISLTFC

SEQ ID NO: 11154 - protein, 435 aa, Unknown
  Description of Unknown: Integrase B11155 sequence
  IPR038109,IPR006119,PS51737,PF00239,G3DSA:3.40.50.1390, PTHR30461,IPR025827,PF09851,SM00857,G3DSA:1.10.10.2600, SSF53041,IPR011109,PS51736,IPR018649,cd00338, PF13408,Coil,IPR036162,PTHR30461:SF3
MPNASVFIRSCLASSDEQAKHGLSLGDQLTDLRAWAETNGHSVIAEYVDAGVSGKRPYPKRPALSRFMEDLESGLKVDALCFTRLDRFFRSVKLYYQAVDVMDRHKVSWTAILEDYETISSTGKFKMHLMLAIAEHESSRTGERLRTTLSHKFARGEWSGKPPRGYSVVDKHLTPNKDAPIIAEAFRVCHRSCSVVAAQSYLHEHGIKVVYNTAYRLLTNPIYTGRHDGVEGFCERLVDDDTFSDIQAMLGKRSDRTNDTGRVYLFSGLLVCSECGRKLVGQYNPTYSPEKQWRYRCAGCYRDHLCSNNKYLIESEIEDYLLAKVCKEIEKMSAQVEYSAPAPKPIDNTAKLERLKELYIEGEISREEYQKRKDALTTLPVIKQSTPRIKEIALSGDDLRESYQSFTRQERRAVWKSVIDKIDVDRDRLTVVFRT

SEQ ID NO: 11155 - protein, 435 aa, Unknown; identical to SEQ ID NO: 10058
  Description of Unknown: Integrase B11156 sequence
  cd00338,PF13408,IPR011109,IPR038109,PF07508, PS51736,G3DSA:3.40.50.1390,IPR006119,PTHR30461,IPR036162, mobidb-lite,PTHR30461:SF3,IPR025827,PS51737,PF00239, SM00857,G3DSA:1.10.10.2600,SSF53041

SEQ ID NO: 11156 - protein, 435 aa, Unknown
  Description of Unknown: Integrase B11157 sequence
  cd00338,PF13408,IPR011109,IPR038109,PF07508, PS51736,G3DSA:3.40.50.1390,PTHR30461,IPR006119,IPR036162, PS51737,IPR025827,PF00239,SM00857,G3DSA:1.10.10.2600, SSF53041
MTRRGLRPVPDVPLRAVAYVRVSKERDDMVSPELQVQAITDHCARRGYVLVETLTDLDLTGRFWRRRQVERAVQMIEGGEADALVVWKISRVARNRLDWNVAVDRVESVGGVLESATEPLDSATSTGRFTRGMLAEMAAFESERIGEQWKEAQARRLRLGLPHTPTARFGYRYDRATGYAPDPDTAPVLVEMYRSYVAGTGTMPLVRSLNARLVPTLGGGPWTISTLLRVLDAGFGAGLLRVRGQHVRGAHEPVIDDRTWQAYRDRRVAQRLLPARVRNPRHVLTGMLRCGECGGAMSAYSKPARDGAPQILFRCTVWQASRSCRGTWIAAHRAEAAVLEWLRRLTSDLDEAAAAAVARRGVVTRARTDVARLHREVGRLDEALARLTIDLASGLVPAGAYRDARDELTARRGEVESAALRAKAETAGSTRPPAT

SEQ ID NO: 11157 - protein, 432 aa, Unknown
  Description of Unknown: Integrase B11158 sequence
  cd00338,PF13408,IPR011109,IPR038109,PF07508, PS51736,IPR036162,IPR006119,PTHR30461,G3DSA:3.40.50.1390, IPR025827,PS51737,PF00239,SM00857,G3DSA:1.10.10.2600, SSF53041
MEKEVKSMQIKVMEPKKKAGGGKLRVGAYGRVSTDSRKQEDSLENQIAYYERTIQARPDYQFVKVYMDQGISGTSENRPGFQEMLEDARNKKLDLILIKSISRFARNTVTVLKFARELKEYGVGIFFEEQNINTISGEGELMLTVLASFAQEESRSISENNKWSIQKKFQRGEVMITTERFMGYDKDENGNLTVNKKEAAIVHRIFDLYLDGKGAFSIAKLLNEDGIPTITGVKWHDSTIKGMLVNEKYKGDLLLQKYYTPEDKKNRTVRNDGYVDSYYIKKNHEAIVSEAEWDRVQEIMQQHRDAKGMKAGDTKKYQNRYPLSGLLICPYCKRTLRRSHVYGGKVQWICSTYIQKGKTACTGIRVDDTEVASRNILEPTIVEEDYYNGEKHYLYTSAKDYKEREWKASIKETESSSILPRVNRPRRAAIKL

SEQ ID NO: 11158 - protein, 435 aa, Unknown
  Description of Unknown: Integrase B11159 sequence
  cd00338,PF13408,IPR011109,Coil,PS51736, IPR036162,IPR006119,G3DSA:3.40.50.1390,PTHR30461,PTHR30461:SF3, IPR025827,PS51737,PF00239,SM00857,SSF53041
TQEQKLHGISLDAQREKLTEYAKTHDLKIVEWYADEGISGKKPIAKRPALQQMIADAEHGKFQHIIFIKLDRFFRSVAEYHECMKRLGDVTWDATEEKYDISTANGRAFVNMKLTIAELEADQTGERIKLVNDYKVKTGQPLHGSMPWSHKIINTEDGKRIIADPDTKEDCIRVLDYFLHTGSMRATLRYADQYHSFYDLVGLKRWLMNPMLYGSYRGNDAYCEPIISKEKFDKIQAQIKTYTPNRKNIYLFSGLIPCPVCGKSMTGYTAVQKHKGKEYRYKKYKCDQYHRKVGCTYKKHYSENLVEKCLLEQFDNFIEEETTPKLRLKKRKGRDEKVIKAEMDRLNYMFQKNRISVGDYDDRYSALQKELSNLPNEEEDLKKLKEVQALIDQGWKTAYVELDDEHKRQVWHSVVRALHIRKDGRTYTLTGVELL

SEQ ID NO: 11159 - protein, 435 aa, Unknown
  Description of Unknown: Integrase B11160 sequence
  cd00338,PF13408,IPR011109,IPR038109, PF07508,Coil,PS51736,G3DSA:3.40.50.1390, IPR006119,IPR036162,PTHR30461,PTHR30461:SF3, PS51737,IPR025827,PF00239,SM00857,G3DSA:1.10.10.2600,SSF53041
MAAYCRVSTDQDEQLSSYENQVRYYQDYIRQNPLYQLVDIYADEGISGTNTKKRTGFNRLIADCRKGKVDRIIVKSISRFSRNTLDCLKYVRELKELGIGVTFEKENIDSLDAKGEVLLTILSSLAQDESRSISENATWGIRKKFERGEVRVNTTKFVGYDKGENGNLIINEEQAKIVRRIFRYFLQGETPESIARTLKEEGVPGWNGKVNWYPTTIQRMLQNEKYMGDALLQKTYTVDFLTKKRSENQGQVNQYYIKGNHEAIIDKEEWELVQLEIERRNQFRQDNHINFYIIQCEQNPFTCKVFCEECGGLFGRKNWTTSRGKRPVWQCNNRYKVKGIQGCTNRHIDEETLQQAFFRAVEVLRENKENLQEKWTNFSEEQKLEKYHAAQLKELLDSEQEAFDGRKMCQVLEKIMLGEDGSITVKFLEGTEVNL

SEQ ID NO: 11160 - protein, 434 aa, Unknown
  Description of Unknown: Integrase B11161 sequence
  cd00338,PF13408,IPR011109,IPR038109,PF07508, PS51736,G3DSA:3.40.50.1390,IPR036162,IPR006119,PTHR30461, PTHR30461:SF3,PS51737,IPR025827,PF00239,SM00857, G3DSA:1.10.10.2600,SSF53041
MERVIERVAFDTLSIARLKKVAAYTRVSSGKDAMLHSLAAQISYYNSFIQSNPEWSFAGIYTDEAISGTKVNREGFQRMIDDCRKGKIDMIVTKSISRFARNTLTLLQTVRELKELGVDVFFEEQNIHTMSGAGELLLTILASFAQEESLSVSQNQKWRVKQNFEKGLPWNCTMLGYRCKNGEFEIEPKEAETVRFIFTSFLDGMGLEAIAQTLNLQGAKTRHEKPWGKSSVRCILQNLSYTGNLMLQTTYIENHITKKKVYNNGEKQQYYVENSHPAIVSQEEFDLVQAELIRRADKHSPKGRKKNLYTFSGLLVCGNCGDTYRRKVTSKRVVYICNTYNTKGKSICASKAIPEETLKTLTLDILGIDFFDEEYIKAQIKQIKIENNYKVVFFLKNGDAVTKTWVPISRKDSWTPEMKERARQAELMRKGAHR

SEQ ID NO: 11161 - protein, 434 aa, Unknown; identical to SEQ ID NO: 10714
  Description of Unknown: Integrase B11162 sequence
  cd00338,PF13408,IPR011109,IPR038109,PF07508, PS51736,IPR036162,IPR006119,PTHR30461,G3DSA:3.40.50.1390, mobidb-lite,PS51737,IPR025827,PF00239,SM00857, G3DSA:1.10.10.2600,SSF53041

SEQ ID NO: 11162 - protein, 434 aa, Unknown
  Description of Unknown: Integrase B11163 sequence
  PF13408,PS51736,IPR036162,PTHR30461,IPR006119, G3DSA:3.40.50.1390,IPR025827,PF00239,SM00857,cd03768, SSF53041
MKLGYARVSKEEQADSLPAQVGRLRGAGCDAVVEELESGRNDDRPGLAEVVAEVRAGRVSELVITRADRLGRNAAFADELLALCALRGVTVTALDGGTIESATPQGFLQARLLTTMAEVESRMLSLRLRRQFEQYRSQGRHLRRRKPFGYQGGADHKLEPHSEHWPQALKVLRRLREIGSFTGTANDLPGWCAWTPAPSSLQAWFVNPVIRGHIGHMLEKGSGKGWGQRWGEIRYDQHPALIGEADWQDLAQFLRRPANRFQGHANEVRHGLAGLLRCASCGHTLRRNNSGGTAWWRCRHRLCEEKAGIREETALAQVVAACIAAADRLAAVAAAPTDEDPAVAAKRRDLEQLEGLARRNPALASACAALRTEIESLSHRPRVSPDLLAVAERIGDPAFFTGASAPEQRALFGAVLDSLQVGRSGEVHAQPRSW

SEQ ID NO: 11163 - protein, 434 aa, Unknown; identical to SEQ ID NO: 10020
  Description of Unknown: Integrase B11164 sequence
  cd00338,PF13408,IPR011109,IPR038109, PF07508,PS51736,G3DSA:3.40.50.1390,PTHR30461, IPR036162,IPR006119,PTHR30461:SF3,IPR025827, PS51737,PF00239,SM00857,G3DSA:1.10.10.2600,SSF53041

SEQ ID NO: 11164 - protein, 434 aa, Unknown
  Description of Unknown: Integrase B11165 sequence
  IPR011109,PS51736,IPR036162,IPR006119,G3DSA:3.40.50.1390, PTHR30461,PS51737,PF00239,SM00857,cd03768, SSF53041
MRLGYARCSTDEQADALAAQVSRLQAAGCDQIIQELQSGRDDDRPGLAEVVALVRSNRVTELLITRADRLGRHAAFADELLALCSLQHVTVTALDGGTIDAASPTGFLQARLLTTMAEVESRMLSQRIRKQFEVYRAQGRHLRRRKPFGYQAGADHRLEPDPANWHQALNVIKALRRLRSFSAVARELPQWCSWTPTGGNLQNWFCNPVIRGHLPHLRDLSTGKGWKQRWGQILYDQHSALISEADWHELAQLLQRTENRFGGPGMPAQHGLSGLLRCATCGHCLRRNGSGGFTWWRCRHHLCASRGGIREDRVLPVVVQACIDAADRLAIVAAAPPDVDPAVAAKRQDLEQLEALAARNPALSSACDALRHEIEMMCRRPAITPDIAAVLERFNSADIFLSATAEEQRAVFGAVLQTVEVGRTGEVRALPRAF

SEQ ID NO: 11165 - protein, 433 aa, Unknown; identical to SEQ ID NO: 10207
  Description of Unknown: Integrase B11166 sequence
  cd00338,PF13408,IPR011109,IPR038109,PF07508,Coil,PS51736, G3DSA:3.40.50.1390,IPR006119,IPR036162,PTHR30461,PTHR30461:SF3 ,PS51737,IPR025827,PF00239,SM00857,G3DSA:1.10.10.2600,SSF53041

SEQ ID NO: 11166 - protein, 433 aa, Unknown; identical to SEQ ID NO: 9952
  Description of Unknown: Integrase B11167 sequence
  cd00338,PF13408,IPR011109,IPR038109,PF07508, PS51736,G3DSA:3.40.50.1390,PTHR30461,IPR036162,IPR006119, PTHR30461:SF3,PS51737,IPR025827,PF00239,SM00857, G3DSA:1.10.10.2600,SSF53041

SEQ ID NO: 11167 - protein, 433 aa, Unknown
  Description of Unknown: Integrase B11168 sequence
  cd00338,IPR011109,IPR038109,PF07508,Coil, PS51736,IPR036162,PTHR30461,IPR006119,PTHR30461:SF3, PS51737,PF00239,G3DSA:1.10.10.2600,SSF53041
EMQKLLKAVSKRQYKAVLVVEIERLARGNTSDQGQVADAFVYSGTLIITPAKVFDPASEADQEYFEFGLFMSRREYKTIRRRLQAGKLAAIQEGQWIANWTPYGYKAVRNGKKDKHLEIVPEEAEVVKTIYSLHQGGMTPHTIARQLTEQGIKPPRNAEQWHKSTINRILQNPVYIGKIRWANATTVRQLADDGRTIKRRIKSANPIIVDGKHQPIITEAEFNLNQGAFFASSPVPEGRDMVNPLSGLLRCSRCHRAIVYVSPSKKQPRARYSHKNALQCQQHSADAEQVLKSVIQGLQNTLKNVEVKAAQQEQDNTADKLKALTAQLNREQAKLRRIYESYESGVYTPDEFLSRRQQAQSAISKCQSAIDQLQSITPKVNRDEQIKKLHDVIAMLGDNSIPARERNRFAKSIIKAIWYNNDGDNLTLEIETL

SEQ ID NO: 11168 - protein, 433 aa, Unknown; identical to SEQ ID NO: 10074
  Description of Unknown: Integrase B11169 sequence
  cd00338,PF13408,IPR011109,IPR038109, PF07508,PS51736,G3DSA:3.40.50.1390,IPR006119, PTHR30461,IPR036162,IPR025827,PS51737, PF00239,SM00857,G3DSA:1.10.10.2600,SSF53041

SEQ ID NO: 11169 - protein, 433 aa, Unknown
  Description of Unknown: Integrase B11170 sequence
  PF13408,IPR011109,IPR038109,PF07508,PS51736, G3DSA:3.40.50.1390,IPR006119,IPR036162,PTHR30461,PTHR30461:SF3, PS51737,IPR025827,PF00239,SM00857,cd03768, G3DSA:1.10.10.2600,SSF53041
MRNSKHIPAPVPLRRCAVYVRKSTNMGMEQNYTSIDAQIDSCIQYVENHAADGWVLAQTATCGIYQDVAISGATMERPGVQALLADIRAKRVDVVVCYKLDRISRSIRDFANLMFELEEMGVSLVLVTQNFDSGTPMGRLCLHFLSSFAEFERCMIRDRIKDKAAARAAQGLWIGGRPPFGYRLGEQRMLVTEPAEAEVVRRIYEGVLAHTDLCELALRLNQENAPRPRLRKGVEDNAWSSTRIRQLVERPLYSGVIVLRENEYPGQHEALVSRKDWEAAQRALAELLAARKPRESHPELVYPLRGILVCPLCGLPMKPTYAKTRGQIHRYYECPNHINRDKGCPTRNLPAEVIEMAVASNLASLASNPAMMRVLQERLPQLAHRDISEALANVEQLVEYIPDDALATLFQALYKEVSYNAAAQELNIVKYSA

SEQ ID NO: 11170 - protein, 433 aa, Unknown; identical to SEQ ID NO: 10145
  Description of Unknown: Integrase B11171 sequence
  cd00338,PF13408,IPR011109,IPR038109,PF07508, PS51736,G3DSA:3.40.50.1390,IPR036162,IPR006119,PTHR30461, mobidb-lite,PTHR30461:SF3,IPR025827,PS51737,PF00239, SM00857,G3DSA:1.10.10.2600,SSF53041

SEQ ID NO: 11171 - protein, 433 aa, Unknown
  Description of Unknown: Integrase B11172 sequence
  PS51736,G3DSA:3.40.50.1390,IPR006119,IPR036162,PTHR30461, PF00239,SM00857,cd03768,SSF53041
MAKPIRIGYIRVSTDTDEQLSALQHQRARISGVVDLIIEDVESGLSNCRSGFNELLHLIDIKKCSEVVCTRIDRLGRDASAIDAFLAVAAKRGVVITCLDGGTVDSQTPQGFLMSRIATSMAEVESRMLSMRIKAGYEQGRKLNKPLRGRIAWGYKLKEDKSALIPHPVEFQKAQLFIKLLKECNWRTIKAIREWEKMDHGRLPLSCMSAVRDWLSNPVLRGGIGYHRQRDRTYKTIVWNTHEALLSPSDFLLFEHQRKINKLCWGSAATHPPRLLTGLCICAECGKHMSIVGRQGAGKDRVICKQILCNSRYKSTHDTVVIAAIAEALCSRASQLADYVVEENPQAEVLRAEIAKLKAMNDEDLIPAIEAKEQRLQAVLQKGSEPDPELLNAFADPLVWTQLDQQELRELYLHLVERVVIERREVVNVVLRL

SEQ ID NO: 11172 - protein, 432 aa, Unknown; identical to SEQ ID NO: 10069
  Description of Unknown: Integrase B11173 sequence
  cd00338,PF13408,IPR011109,IPR038109,PF07508,PS51736, IPR036162,IPR006119,G3DSA:3.40.50.1390,PTHR30461, mobidb-lite,IPR025827,PS51737,PF00239, SM00857,G3DSA:1.10.10.2600,SSF53041

SEQ ID NO: 11173 - protein, 432 aa, Unknown
  Description of Unknown: Integrase B11174 sequence
  PS00397,IPR038109,IPR006119,PS51737,PF00239,G3DSA:3.40.50.1390 ,PTHR30461,IPR025827,SM00857,G3DSA:1.10.10.2600, SSF53041,IPR011109,PF07508,PS51736,IPR006118, cd00338,PF13408,IPR036162,PTHR30461:SF3
MRVALYARVSTEEQTHGLSIDTQLDNLRQWAKDNGHTVVDEYVDLGVSARKAPSKRPELQRLLTDLARVELIVFTKLDRWTRNVKGYYDVQEQLDKHKVAWTAIQEDYETLTSSGRFKVNIMLSVAENEADRTSERIKVVLDRKIQRGEYIGNRVPYGYSVIDKHLVPNDDADIVRAAYEFYRRTGSIYQVKNYLHEHGHPCVYVTVCRILRNPMYAGRYRDNEHYCEPIIQPEVFDEVQAMLEKRSYRQNKSKRVYLFSGMIRCAYCGKIQVGAWSGQTRETYRYRCNYHYLNGRCPNAIQLKESVVETFLLDNVAAELKKLTAELETPKKKKRSPDKAAIMAKVERLQELYVDGMIDREKFRADREKLLAQIQEPPPAKDLTTARQIVLAADFRERYNELSREDKRTLWRSVVDHITADDLGHIEVYFYP

SEQ ID NO: 11174 - protein, 432 aa, Unknown
  Description of Unknown: Integrase B11175 sequence
  cd00338,PF13408,IPR011109,Coil,PS51736, G3DSA:3.40.50.1390,IPR006119,IPR036162,PTHR30461,IPR025827, PS51737,PF00239,SM00857,SSF53041
MRVALYSRVSTQEQAEHGLSIDAQIAVLDEWSKENNHIVVDHYTDLGISARSPASKRPELQRMLRDVEDGKIDLIIFAKLDRFFRNVKEYYKVEDVLERCGVAWKAISEDYETQTASGRFKVNLMLAVAQDEADRTGERIKAVFKRKREKGLAISGSAPYGVTINNGIYCPGEDADKARQLFNEYLNLRSVSQLVKTTTFSYHGLRRILSNHHYVDAGVVDQDTFDRVQSILEERSQRHVRSDRVYLFSGLVVCPYCGRKLSSCTVNGYKYYRCQKHLEGHCEGKYVSEGKVEKYLLHRIMPSVEGYNLRIQKERVKDVDVGKLQKKLDKLADLYLSDLITKEKYEKEYKATQTAIVEAEREKAPIDPESIKPVLDAYKSLSDEGKRIFWSRVVRTIKPTEKGFDIELNYTYRNKTSDILQYVQTNIFQNQS

SEQ ID NO: 11175 - protein, 432 aa, Unknown
  Description of Unknown: Integrase B11176 sequence
  PS00397,IPR038109,IPR006119,PS51737, PF00239,G3DSA:3.40.50.1390,PTHR30461,IPR025827, SM00857,G3DSA:1.10.10.2600,SSF53041,IPR011109, PS51736,IPR006118,cd00338,PF13408,Coil,IPR036162,PTHR30461:SF3
MRAALYIRVSSEEQARHGLSLQEQRDALMRYAKANKMLVVGIYEDAGISARKPYKQRPALLRLLDDCKAGKVDTILFIKLDRWFRNVAGYYDVQTLLDKYGVTWQATEEEYETRTASGRLKVNIMLSVAQDEADRTSERIKFINDGKRAKGQPAGSKAPLGYIVKDRQYQIDNGTVDAARDMFAAYIKLQSVLGVKKYMLETWGIDRAYTKYVNYFRNRLYIGEVYGIENSCPALISKQDFDIVNDILRQRSQRCAGVETDRVYLFSGLLHCKECGKTMQSETAKQIYTYYRCRTRMLDNSACQHKKRIREDALEDYLLHELEGIAERNNRYYKKAEKKPTQSADAIRKKMSKLKTLYLNDLIELDEYKREYASLKKTLETVEEKPKTNLDALRNGLAEYDTYSREEKKEFWTRFIRRIDADDDGAFFVTPR

SEQ ID NO: 11176 - protein, 432 aa, Unknown
  Description of Unknown: Integrase B11177 sequence
  cd00338,IPR011109,PS00397,IPR038109,Coil, PF07508,PS51736,IPR036162,IPR006119,G3DSA:3.40.50.1390, PTHR30461,PTHR30461:SF3,PS51737,PF00239,SM00857, G3DSA:1.10.10.2600,IPR006118,SSF53041
MRIAGYLRVSTQKQADFGVSIEMQREIIIKHAQTFDIIEDRGDIVFYEDEGYSAKSLERPAMKRLIEDIKNNDIEVLFVYDQARISRDIWDIKKVLELLNKYNVVLKCLYDDASIETANDRFRTYMGSLHNQYERERVCERTNDALASIPERGGNPIGGKPAFGYVRDDSKNFIIDEEQAKIVRNVFALACQHKSMDEIAIYLRVAVPDRKWKSATIKHMVENKKYAGILEYKGKEYRDIIPAIVSEEVFKRASIYYRHKSAKASVKYYYDELVYCTKCKMKMTGRSSYGKTKQIYYYYYCRNCKGTFSQLLLNRVVAGEIYADGYIEHVDGVYEELFSAKRKYQKRISRLDERYIAETISEEEYLALKLPLMKKLEEVKMWIEEENIDDVAFSSLNTDKERHDYAQSRIKCIEVDNEARKVSKIVYLSRYK

SEQ ID NO: 11177 - protein, 432 aa, Unknown; identical to SEQ ID NO: 11157
  Description of Unknown: Integrase B11178 sequence
  cd00338,PF13408,IPR011109,IPR038109,PF07508, PS51736,IPR036162,IPR006119,PTHR30461,G3DSA:3.40.50.1390, IPR025827,PS51737,PF00239,SM00857,G3DSA:1.10.10.2600, SSF53041

SEQ ID NO: 11178 - protein, 431 aa, Unknown
  Description of Unknown: Integrase B11179 sequence
  cd00338,IPR038109,PS00397,Coil,PS51736, G3DSA:3.40.50.1390,IPR006119,IPR036162,PTHR30461,PTHR30461:SF3, PF00239,SM00857,G3DSA:1.10.10.2600,IPR006118,SSF53041
MKYVACYCRVSTEEQKKFGFSIQAQKDALEKYCKENGYKYEFYIDEGISASSMKKRKALNEMLNKVSVFDMILFTKLDRLSRNVLDANNINKLLIDNKCTMKAIDEDDIDTSTADGTFIFNLKVSLAQREIGKTSERIRFVFNNKREKGEITSGTKKYGYDIVDKRFSINSLEAENIINLYKYFVNVNGNMKKTYEYFIQHFDGKGYDALVNYLSDTAYIGKYKLYRKDVYLENYIPAIVTTELWNAVQKLRTRKTIMKKNNVDDLFSGLIFCNSCKCRLCKKVDNRSKNNLIRYICDNNYRYIPGTTKKRCPASNIIKEEFIETYLLKNLENEFNKYKSVINFQTAKNVKKTNTALIKKLENKLLKLKDLYLDDLIDKDTYSKDYKKYSDDLKKLKSGPIEKPQRDFSHVEEILNSDYINIYNNLTRENK

SEQ ID NO: 11179 - protein, 431 aa, Unknown
  Description of Unknown: Integrase B11180 sequence
  PS51736,IPR036162,IPR006119,PTHR30461, G3DSA:3.40.50.1390,PF00239,SM00857,cd03768, SSF53041
MGPSVRLGYLRVSTDNEEQLAALENQRSRILGAGVDRIIEDVESGLSQDRPGYLELLHLIDTRQISEVVCTRIDRLGRDAAATDALIAVAAKRGVTITALDGGTVDSSTPQGFLLSRIATSIAEMESRMLSLRVRAGYREGRKRSRPLRGKVAWGYRLKADRSALEPHPVEHARAAAFLELCKTCNWRMNTALDRWHAAGGGPIPLASCRSVKAWLLNPVLRGGLGYLKHTDNTYEEVVWETHPPLLSHSDFLIMERQLEDNRRRWGHSAKVIPRLLTGLCVCAGCRRKMTYAGTRTIPSLLCKSRECPQRYKSTHEHVIRDAINTELSSRNQALATRITAPDPKILALQVEIAELEAKGDPDLAPAVELKRQRLKARAQRLGPERALLQAFADPLIWSQLDASELRKLYLALVEQVVVDSQAVASVVLRL

SEQ ID NO: 11180 - protein, 431 aa, Unknown
  Description of Unknown: Integrase B11181 sequence
  cd00338,PF13408,IPR038109,Coil,PS51736, IPR036162,IPR006119,G3DSA:3.40.50.1390,PTHR30461,IPR025827, PF00239,SM00857,G3DSA:1.10.10.2600,SSF53041
QKRDIENYCRKNELVITDWYIDDGYTGTNMDRPELQRLVNDCGRKRIGCVVAFKLDRLSRNMIDGIYLIEKVFQKYNVVFKCVHDSVSYDSPMEQAYTQMMAVFAQLDKNTMMLRMRGGMLERVKQGYWMGGGNLPYCYSYSKEQGILMPIPERKEQANKALDLFISGYSDEKIYKTLGYTSEMVVRSILTGIVNVGMIPYKGNVYQGKHEPIFDKARFELAQELRKSRRKTKATCLTKEPNLLTGLCYCGVCGCAMRYQKWGSDKHKIYCMSRNKSMSYLPNHNPDCNNSLEWADDIEKQVEEEMLKISLDLSSYKPKEKATKLEIMQSQLEKEQIKLKRLYSLYADGNDTVLEMIKELEKQIKDMKDNITAESKNAVNVQKKEFVYENIKKLADIWDNIDKKQKNMILKTIIDKIVIVNGNIEIQLKNF

SEQ ID NO: 11181 - protein, 431 aa, Unknown
  Description of Unknown: Integrase B11182 sequence
  cd00338,PF13408,IPR011109,IPR038109, PF07508,PS51736,G3DSA:3.40.50.1390,IPR006119, IPR036162,PTHR30461,PTHR30461:SF3,PS51737, IPR025827,PF00239,SM00857,G3DSA:1.10.10.2600,SSF53041
MQERTIMKIDALPQLERKTRVCAYARVSSGKDAMLHSLSAQVSYYNNLIQNTEGWHFVGIYADEAISGTKETREEFNRMIEDCRAGKIDLIITKAISRLARNTVTLLATIRELNSLGVDVYFEEQGIHSISGEGEMILTLLASVAQEEARSVSENMKWRIKKNFEEGIPWGALLYGYDVIDSKYYVNEKEAEVVRMIFNLYLEGLGKEGIAKKLNSLGLKTRNGYAWSDSSVRQILSNYDYTGNLILQKTYRLDYISKKTVVNHGEVPRYHVEESHEPIITMEIWNKVQEEVKRRNDHIKRKEHPYQSPYKGLIKCGCCGKNYLRKETPYRTMWTCATYQKKGKDGCPSKRIDEEILLATIEELQKTTNFDKTKIKAIIINNDMSLYILNKDGTEVRGTWSIHSRSDSWTPEMKAKAKERELERMRQLWQK

SEQ ID NO: 11182 - protein, 431 aa, Unknown; identical to SEQ ID NO: 10121
  Description of Unknown: Integrase B11183 sequence
  cd00338,PF13408,IPR011109,IPR038109,PF07508, PS51736,G3DSA:3.40.50.1390,PTHR30461,IPR006119,IPR036162, IPR025827,PS51737,PF00239,SM00857,G3DSA:1.10.10.2600, SSF53041

SEQ ID NO: 11183 - protein, 413 aa, Unknown
  Description of Unknown: Integrase B11184 sequence
  cd00338,PF13408,IPR011109,IPR038109,PF07508, PS51736,IPR036162,IPR006119,G3DSA:3.40.50.1390,PTHR30461, PS51737,IPR025827,PF00239,SM00857,G3DSA:1.10.10.2600, SSF53041
MNIRKIEAKNNKRKKRICAYVRVSTTNGSQLDSLENQKVYFEKLYAEHDDVEFLGVFCDKGISGSKYDRPDFQTMLDACRKGQIDVIHTKSISRFARDLINVLEISRELKTLGIDIFFEEQNIHTLSNEGEVILTVLASLAEEELQSMSGNQRWSFCRKFQKGELLINAKRFLGYDLNEKGELVINKAEAQIVRTIFYSYLEGMGTHRIAKKLNEGKVPTVAGKKWYDSTIRNILKNEKYKGSLLLQKYFHDGVNGPKKLNQGQVEQYYIEDNHEGIVSKEIWERVQVKMKSRSRIQGTNKTYKFSRMLKCQYCGSTLKRQVSYKKRIVWCCSKYIKEGKNSCKGMRVPERDIEDWKLSSPVIVLERIEDGEKHYGYTGQKATANGHISNSEKDQSSRLLSSVYRPRRTAIKL

SEQ ID NO: 11184 - protein, 413 aa, Unknown
  Description of Unknown: Integrase B11185 sequence
  cd00338,PF13408,IPR011109,IPR038109,PF07508, PS51736,IPR036162,IPR006119,PTHR30461,G3DSA:3.40.50.1390, PS51737,IPR025827,PF00239,SM00857,G3DSA:1.10.10.2600, SSF53041
MNIRKIEAKNNKRKKRICAYVRVSTTNGSQLDSLENQKLYFEKLYAERDDVEFLGVFCDKGISGSKYDRPDFQTMLDACRKGQIDVIHTKSISRFARDLINVLEISRELKTLGIDIFFEEQNIHTLSNEGEVVLTVLASLAEEELQSMSGNQRWSFRRKFQKGELLINAKRFLGYDLNEKGELVINKAEAQIVRTIFYSYLEGMGTHRIAKKLNEGKVPTVAGKKWYDSTIRNILKNEKYKGSLLLQKYFHDGVNGPKKLNQGQVEQYYIEDNHEGIVSKEIWERVQVKMKSRSRIQGTNKTYKFSRMLKCQYCGSTLKRQVSYKKRIVWCCSKYIKEGKNSCKGMRVPERDIEDWKLSSPVIVLERIEDGEKHYGYTGQKATANGHISNSEKDQSSRLLSSVYRPRRTAIKL

SEQ ID NO: 11185 - protein, 430 aa, Unknown
  Description of Unknown: Integrase B11186 sequence
  cd00338,IPR011109,PS00397,Coil,PS51736, G3DSA:3.40.50.1390,IPR036162,IPR006119,PTHR30461,PTHR30461:SF3, PS51737,PF00239,SM00857,IPR006118,SSF53041
MTTKVERCAIYIRVSTTEQMMHGKSLEAQKEYLTNYAREHNMAVVGIYADEGKTARKELKKRKAIHSLLQDVESGKIDVIIFWRIDRWFRNLSDFYKVQDILDNHNVRWISTSEPGINMETRDGRLQLNVVLSIGQNEVDTTSERIKFVNEASIRSGKLIFGDVNMGYGYKSGIVDGQKRMIKDPDREHVVDAFYKYFFKHQNKCATLRYIQETFDPDFSFGIMRTLLSSEFYKGTYRGFPYCPAYLTEDEWNKLQKIQKRNVKATPSGRIYLFAGMIRCPVCGQLLCGTGCSSIINRKTGAKRTYCYYRCNRAMIDHICSYRHRLSQNLVENYLLDNLENEYKNYKVKCEKIEKEKEKQKKKQSPEKLRKELDRLNFLFQKGRIDWDYYNEEYGRVESELNDLQSVLPEPAPNYSYLEELLDTDFRTMY

SEQ ID NO: 11186 - protein, 430 aa, Unknown
  Description of Unknown: Integrase B11187 sequence
  cd00338,PF13408,IPR011109,IPR038109, PF07508,PS51736,G3DSA:3.40.50.1390,IPR006119, IPR036162,PTHR30461,PS51737,IPR025827, PF00239,SM00857,G3DSA:1.10.10.2600,SSF53041
LERKVHRVQQRPSKPKLLKVVAYARVSSGKDAMLHSLAAQIDYFQNLIRQHPGWEFCGVFADEAKTGTKDERPEYQKMLEKCRNREVDLVITKSISRFARNTVTLLETVRELKSLGIDVWFEKENLHSTSGDGELMLSILASFAQEESKSVSDNMKWRIRNDFQQGKIGSITIFGYRRNADGVLEIEESEAKIVQMIFADYCSGMGQCAIAKKINAMGISTRQGNFWTGQRVKEILVNEKYVGNMLLQKYYRQDPIGKRKMKNQGELPKYFVEQSHEAIISAELFEKVQNLVKKQTKQFSHPGATNRYPLSGMVQCAACGKSYQRKIYKQGAVWMCATYLRQGKSHCPTAKQISERILYEKICSALQIKEFDVEIVKSKIENILVSPNWLTFLFKDNTEKAISWKNYSRSESWTPEMRQAAAERSRKCQK

SEQ ID NO: 11187 - protein, 429 aa, Unknown
  Description of Unknown: Integrase B11188 sequence
  cd00338,PS51736,IPR036162,IPR006119,PTHR30461, G3DSA:3.40.50.1390,PF00239,SM00857,SSF53041
MLLRVGYCRVSTASAEQQQALPVQRARIELESPDLILSDVESGLNPDRPGYLELRRLVEAGQVAEVLATEFSRLGRDATESDAFVRLCDAQGVICRTIAEGQLTMATPEGLLLTRLRGSLNEGESMRLSRRIHRGLEQGRRLGKPMRKPAWPYRLSPDRLSLEPDPEQWPIALAFVEHLRAHGWRTMRALDSFPHQIPLGSCRAVRAWLLNPTTRGGLGYRQGANHTYAEVIWGRHPAVVSHADFDAYQAASAQNRRHWGSNAKREQRALTGLCRCSECAWRMKYISGRTVASLRCAGPSCPHHYAGIREAVLVEWLINQLAAHAGTWLAQKVSQRHDPMVAELQRQVEALGRLSDPDLADAIAQKQTRIVQLQQQGPSVDPELVERISRPQWWQAAPPEALATVLHATVKEVLIDMSQRAPIAVEFRF

SEQ ID NO: 11188 - protein, 429 aa, Unknown; identical to SEQ ID NO: 9549
  Description of Unknown: Integrase B11189 sequence
  cd00338,PF13408,IPR011109,IPR038109, PF07508,PS51736,G3DSA:3.40.50.1390,PTHR30461, IPR036162,IPR006119,IPR025827,PS51737, PF00239,SM00857,G3DSA:1.10.10.2600,SSF53041

SEQ ID NO: 11189 - protein, 428 aa, Unknown
  Description of Unknown: Integrase B11190 sequence
  cd00338,IPR011109,IPR038109,PF07508,PS51736, G3DSA:3.40.50.1390,IPR006119,PTHR30461,IPR036162,PTHR30461:SF3, PS51737,PF00239,SM00857,G3DSA:1.10.10.2600,SSF53041
VNTTTVRRCVLYARISLSKEESVSVERQLTSARKYAEGRGWQVIGEFIDDGVSATANRPEDRKGWTALLAADGFDAVVIWKVDRLARRVLDFLHVDDVLQRRGAGLVAVEDPIDMTTPMGRAFATILAVFGEMEAAAIGARVRAARAHLLAEGRFVGGGIPYGYLSALNPDGPGRVLVKDPERVGWLAEAIAMALRGVTVNAIASWLTAQAAPLPRGRTRKTGSVAWSNQTVNHLLRNPILAGMTPRNPGRGRNTRDVDPFAVVRDDNGDPVVNETLALISTEEFTALQNLLDSRTSPQSVKRRDREKTSPLLSRVAHCDDCNVYMCRGTNQKRPVLYCPRCRQTLARTPFDPYLIRRLLRERGREPYGAATVRECWKALGTNDEARREILLSQLDSLRIRRGVVGRYFDKDRVLLRWRTAEPSQEAA

SEQ ID NO: 11190 - protein, 428 aa, Unknown
  Description of Unknown: Integrase B11191 sequence
  cd00338,PF13408,IPR011109,IPR038109, PF07508,Coil,PS51736,IPR036162, IPR006119,PTHR30461,G3DSA:3.40.50.1390,PTHR30461:SF3, PS51737,IPR025827,PF00239,SM00857,G3DSA:1.10.10.2600,SSF53041
MQKKRGVLYVRVSTTKFEQESSLEIQEQALTQICESKNIEIVNTYSDKASGTRIRKRKGMIALLHDAGIDFKARNDKNTDDFIVNELRKPKFDYIICKDVFRFGRNSGEAMEVINTLRNRGIYVYFVNSATDTFDENYEFTLSLLFNIAQNESHNTSQRIKFSKRHLAEQGKYSPARLPYGYKRVINADGETQIVIDEEQAEIVRYIYERYKVDGGHVISQELNLKGIPTQQGHKWTNDKIHRIISNEAYFGSPIVQKWKKNNIKDIYFHKADEEQHIQLHNVIPAIVTEDQFKELQILKKQRTNPATSKGQRITKDDIFYGKIFCAKCGARFVRHIGDGKKITYMCQTRRKYGSNECDCKGIAYNTLVNAITQCTVDDSIGKVRDIICSKLLDQINIAKTEIEAIENEFDNKLIALESKISMIVDKF

SEQ ID NO: 11191 - protein, 413 aa, Unknown
  Description of Unknown: Integrase B11192 sequence
  cd00338,PF13408,IPR011109,IPR038109,PF07508, PS51736,G3DSA:3.40.50.1390,IPR006119,IPR036162,PTHR30461, mobidb-lite,PS51737,IPR025827,PF00239,SM00857, G3DSA:1.10.10.2600,SSF53041
MNIRKIEAKNNKRKKRICAYVRVSTTNGSQLDSLENQKVYFEKLYAERDDVEFLGVFCDKGISGSKYDRPDFQTMLGACRKGQIDVIHTKSISRFARDLINVLEISRELKTLGIDIFFEEQNIHTLSNEGEVVLTVLASLAEEELQSMSGNQRWSFRRKFQKGELLINAKRFLGYDLNEKGELVINKAEAQIVRTIFYSYLEGMGTHRIAKKLNEGKVSTVTGKKWYDSTIRNILKNEKYKGSLLLQKYFHDGVNGPKKLNQGQVEQYYIEDNHEGIVSKEIWEKVQVKMKSRSRIQGTNKTYKFSRMLKCQYCGSTLKRQVSYKKKIVWCCSKYIKEGKNSCKGMRVPERDIEDWKLSSPVIVLERIEDGEKHYSYTGQKGTSNSHISNSEKNQSSRLLSSVYRSRRAAIKL

SEQ ID NO: 11192 - protein, 428 aa, Unknown; identical to SEQ ID NO: 9583
  Description of Unknown: Integrase B11193 sequence
  cd00338,PF13408,IPR011109,IPR038109,PF07508, PS51736,G3DSA:3.40.50.1390,IPR006119,PTHR30461,IPR036162, PTHR30461:SF3,IPR025827,PS51737,PF00239,SM00857, G3DSA:1.10.10.2600,SSF53041

SEQ ID NO: 11193 - protein, 428 aa, Unknown
  Description of Unknown: Integrase B11194 sequence
  cd00338,PF13408,PS00397,PS51736,IPR036162, IPR006119,PTHR30461,G3DSA:3.40.50.1390,IPR025827,PF00239, SM00857,IPR006118,SSF53041
MRVALYCRVSTEEQAMHGLSIDAQKAALDEWAANHTYKIIDHYIDLGISARKPISKRPELQRLLRDVEMGRIDLIAFTKLDRWTRNIREYYKCQDVLEANNVTWTAITERYGTSTANERLLTNLVLSISQDEADRTSERIKAVFEDKRRRGLVPAGKVPLGIKLVDGHYAPSDDAPKVVELFDTYINTRSIKETARRFGLTTQGISYMLRNKTYLDTGLIDEQTFNLANNIKQTRGQRATRTNRVYIFSGLVVCPYCGRKLSSANNNGYNAYRCCRKDEALCEGYYINEKKLERYCLSQLMPSVKEYNLAIKKKKQKAPDISALKAKRDKLTDLYMENLISKEKYAEDYKALCNAIIEAESSPRPVSTEEIKTVLSAYDGLSDAGKKAFWSRVLTKIVPRPETGDFTLLYTNGNISCDILRYVHNGIN

SEQ ID NO: 11194 - protein, 428 aa, Unknown; identical to SEQ ID NO: 10083
  Description of Unknown: Integrase B11195 sequence
  cd00338,PF13408,IPR011109,IPR038109, PF07508,PS51736,IPR036162,PTHR30461, G3DSA:3.40.50.1390,IPR006119,mobidb-lite,PTHR30461:SF3, IPR025827,PS51737,PF00239,SM00857,G3DSA:1.10.10.2600,SSF53041

SEQ ID NO: 11195 - protein, 428 aa, Unknown
  Description of Unknown: Integrase B11196 sequence
  IPR011109,PS51736,G3DSA:3.40.50.1390,IPR036162,IPR006119, PTHR30461,PS51737,PF00239,SM00857,cd03768, SSF53041
MKIGYLRVSTDTEAQRSALENQRQRIVSAGVDRIIEDQESGLSQSRPGYMEILELVSRKAISEIVVTRIDRLGRDAAATDALIAACALRGVAIRCLDGGTVESETPGGFLLSRITTSLAEVESRMLSLRIVSGYNAARKAGKPVRGRAPWGYRVSEDRARFEPDPTQFPQALEFIQLLKDCDMRMTRALEKWQKTHETLPFACNTSVKGWLENPVIRGGVGWLKGKTRTFSQVIWDQHQPLISHADFAIMERQFEQNRKSWGSTARLPPMLLTGLCVCGTCKMRLTYQRRRTYPSLLCKHIKCVNRYKGIRETKVVEAINSALSKRNTELANIVKKEDSPAVLKLRKEIAQLEALNDPDFAGALEIKRARLAETQVINNAPDPKALEAFADPTIWAQLNRDELRELYLELLEQCVLEPSGEITVVLRL

SEQ ID NO: 11196 - protein, 428 aa, Unknown
  Description of Unknown: Integrase B11197 sequence
  cd00338,PF13408,PS00397,PS51736,G3DSA:3.40.50.1390,PTHR30461 ,IPR036162,IPR006119,IPR025827,PF00239,SM00857,IPR006118 ,SSF53041
MRVALYCRVSTEEQALHGLSIDAQKAALDEWAANQSYSVVDHYIDLGISARKPITKRPELQRLLRDVELGKVDLIAFTKLDRWTRNIREYYKAQDILDKHGVAWKAIHEDYETQTAGGRLKVNIMLAVAQDEADRTSERIKTVFERKRQQGIVPTGKVPLGVQIVDGHYAPSDEADKVVDIFNTYINTRSAQETARRFGLTMQGISYMLRNRTYLDAGVISEEVFNLAQNIKQTRAQRRGRTDRVYLFSGIIVCPHCGNKLSSAYNNGYNAYRCCRRHDGLCDGFYVNEKKLEKYCLAQLMPSVKEYNLIVKKQKKKAPDIASLKQRRDKLTDLYMDNLISKEKYAEDFKAITDEIMVAENTPRPVNTEEIKTVLAAYNGLSPAGKKAFWSRVLTKIIPRPETGDFTLLYTNGNITSDILPYVYKRLI

SEQ ID NO: 11197 - protein, 413 aa, Unknown
  Description of Unknown: Integrase B11198 sequence
  cd00338,PF13408,IPR011109,IPR038109,PF07508, PS51736,G3DSA:3.40.50.1390,IPR006119,IPR036162,PTHR30461, mobidb-lite,PS51737,IPR025827,PF00239,SM00857, G3DSA:1.10.10.2600,SSF53041
MAVRLIKTKSNRKKQRVCAYTRVSTTNSSQLDSLENQKAYFETFYVNREDVDFLGVYYDKGISGSKEKRPSFQAMLEACRQGQIDLIHTKSISRFARNTMTVLEVSRELKALGVGIYFEEQNINTLSNEGEGMLSVLASLAEEELQSMSDNQRWAFQRKFQRGEMVINTKRFMGYDVDDKGELVINEAEAQIVRRIFQLYLDGMGMHRIAKLLNQENVPTVTDAKWHDTTVRNILKNEKYKGTVLLQKYFHVGINGPKRLNQGQVEQYLIEDNHEPIVSKEVWQAVQDKLASKTWKQGVNKHYRFTSMLKCEYCGSTLKRQVTYKKQIVWCCSKYIKEGKASCRGMRVPEKAIEEWKLRTPVTVIERNEYGQKHYSYSSQESAADGHPSASNQNKSGSLLSGVHRPRRTAIKL

SEQ ID NO: 11198 - protein, 427 aa, Unknown
  Description of Unknown: Integrase B11199 sequence
  PF13408,IPR011109,IPR038109,PF07508,Coil, PS51736,IPR036162,PTHR30461,IPR006119,G3DSA:3.40.50.1390, PTHR30461:SF3,PS51737,IPR025827,PF00239,SM00857, cd03768,G3DSA:1.10.10.2600,SSF53041
MTRKKPAAVTPPPEVRRCAIYTRKSTSVGLDSDFNSLDAQREACAAYIERQQGWRLVEEHYDDGGFTGANTDRPAFQRLMADVEAKRVDVIVVYKVDRLSRSLLDFVKVMERLNASGASFVSVTQNFSTADAMGRLTMNMLMSFAEFEREMISERTRDKIAASRRRGKWTGGPTPFGYKLVEKKLVIDDVEAHVVRELFRLFLEHRQMAKVAQLLNDQALLPRGMKGRPGKHGLLWRKESVARILRSPVYVGQVPYHDEVHTGEHQALVDDETFQKAQRILEGKQGFSRQTGLNPDYLLRGLIRCKKCDGAMCPGSTVRGTRQHRYYRCSTRDRHGIKACSARPLPAEAIERFVVERIARHTTEGGFVPHVEQLLHARTESRRATAERLRAELPAKIAAAADQAKRLSEQATRLKGRARELVEAQLV

SEQ ID NO: 11199 - protein, 427 aa, Unknown
  Description of Unknown: Integrase B11200 sequence
  cd00338,PS51736,G3DSA:3.40.50.1390,IPR006119,IPR036162, PTHR30461,PF00239,SM00857,SSF53041
MERLRLGYCRVSTASDEQQQALPYQQSRVEREGCDLILSDVESGLNPLRPGYLELRRLVAAGRVAEVIATEFSRLGRDAMEADDLVRLCDQHATICRTLAEGPQTMATPEGLLLTRLRSSLSQGESMRLSARVRRGIDEGRRHGRPMRKPCWGYRLTADRQALEPDPAAWPVATRFIDALRRNGWRLQPTLQAFPEPVPLRHCRSVRAWLLNPTLRGGIGYQQGANHTFSTVLWGLHPALLSDADFQAYEAAAHGNRRNWGANASRRPRALTGLCRCEECGWRLKYISGRTIPSLRCSGLDCSQHYRGVREALVIGWALEQITAEAGVALARLATTTEPPEVISLRQQIASLERLADPDLEPALAAKRQRLDMLTRLPGLNPDLLRNIQDPRWAAAASYGEVQALLQQTVIEILIARQAPTAIRLKL

SEQ ID NO: 11200 - protein, 427 aa, Unknown
  Description of Unknown: Integrase B11201 sequence
  cd00338,PF13408,IPR011109,PS00397,IPR038109,PS51736, IPR036162,PTHR30461,IPR006119,G3DSA:3.40.50.1390, IPR025827,PS51737,PF00239,SM00857, G3DSA:1.10.10.2600,IPR006118,SSF53041
MKRAALYARVSTDEQARHGYSIGAQVTALRDYAKNHHYVIAGEYIDEGISARKSYKKRPALLQLLEAVQDDKIDVILFIKLDRWFRNVAAYYQVQPILDAHNVAWQATMEDYETVTASGRLKVNIMLSVSQDEADRTGERIKFIFADKKSRGEVLSGNLPYGYKAVNKHMVIDEHTGPIAQAIFQRFIDCRNITEICKWLMNEHDLIRNHSTIRKMLSNKLYLGGEFHPQLIDRETFQKTQEILATRSLRHPKFSNKIYLFGGMVFCKECGMRMKAYNPGKYEYYICRTHQDYGNRKCTNNVTIRQSYLEEYLLNHLVDALKDYNVTIMEKAKPIKDPEKIKRKMEKLKDLYLNDLISREIYERDYRALENDLSCLPYAPKIISVDTVQDAVNKYRSLSKVSQKAFWSRILKRIEIDSNRDIFLVFG

SEQ ID NO: 11201 - protein, 426 aa, Unknown
  Description of Unknown: Integrase B11202 sequence
  cd00338,PF13408,IPR011109,IPR038109,PF07508, Coil,PS51736,IPR036162,PTHR30461,IPR006119, G3DSA:3.40.50.1390,IPR025827,PS51737,PF00239,SM00857, G3DSA:1.10.10.2600,SSF53041
VRVKVINKRPASVLQKKRVCAYARVSTDSRRQEDSLENQMETYERLITGNPEYEFIGVFADQGISGYCENRPQFQRMMEKARAGEIDLIITKSISRFARNTVTVLKFARELKELGVGIFFEEQNINTLSGDGEMMLAVLASFAQEESRSMSENNKWSIRKKFERGEVMITTSRFLGYDKNEYGDLIVNRKEAEIVSLTFDLYLLNVGSSRIGELLDYLGVKTVTGTTWESGTINGMLCNEKYKGDFHLQKYYTPENKRNHTRKNNGEVQSYYISENHEPIVSPEVWEKVQEVREQRKRDRNIGQDSTMKFQNRYPLSGMLICPYCGKTLRRRQVYKKKIQWLCSTYIEKGVKACKGIRIDDAELQGLNIAEQTVIEEVVKNGKKHYCYTSKADFECGIRNSTVSAEIKDGSVLPSVNRPRRTVIKL

SEQ ID NO: 11202 - protein, 426 aa, Unknown
  Description of Unknown: Integrase B11203 sequence
  cd00338,PS51736,IPR036162,PTHR30461,IPR006119, G3DSA:3.40.50.1390,PF00239,SM00857,SSF53041
MTLTVAYARVSTASGEQLSALDAQIAWLQDQGPDVLLSDVESGRVITRPNYQQLRAMVERGQVGTVLATALSRLGRDATESDAFVALCDARGVVVTTRDEGRLSMATPEDLLLTRLRGSLNQGESMRISQRVRRGLEQGRAMRKPMRKPCWGYRLRADRLAMEPDPEAWLPAQRFIDALQAGGWRMLPVLQAHRATVPFRSARGVRAWLLNPTLRGGIGYQQGPNHTFAEVHWDQHPALLTHAQFAEFERQVQRNRRLWGANVTRKPRILTSLVVCAECGNVMKYISGRTIPSLRCYGDLCSQLYRGTREAVIVQFAIDAIREQAAERLAAMATNDEPPEARELRRQIESLEKLADPDLAPVIDAKRQRLEQVLTRPNVDGELVRKLADPRAWDGLDEHEIAGLLRAVVRRIVVAKQEPVAIDLIL

SEQ ID NO: 11203 - protein, 426 aa, Unknown
  Description of Unknown: Integrase B11204 sequence
  cd00338,PS51736,G3DSA:3.40.50.1390,IPR006119,IPR036162, PTHR30461,PF00239,SM00857,SSF53041
MRLRVAYGRVSTTSGEQLSALETQLSWLRNQACDLVLSDVESGRNVERPDYQRLRSLVEEGRVAEVIATRLDRLGRLASECDAFIELCDRKRAAVTTRDDGRLTMATPEDLLLTRLKASLAQGESMKISQRIHKAREQGKRDGRPMKKPCFGYRISRDRTRLELDPEQAPIAMELIDALRDSNWRMQPVLEEFIGQIPLNSVRALRSWLLNPTIRGALAYDQIKNHEFKQVLWDQHDALLSHEDFAAMQVVMECNRRLWGRHGHKSVRALTGLCVCSECGNKLVYIPGRRWPSLRCRGDVCSQRYKGIRESEVLGFATEAMAAQAAQRLAAMAESADKPEVALLRAQIETLQAQNDPDLIEVLERKKNRLESLVNAPALDQELARKIADPRWFDTLEYDELTLVLHQVVECIEITKQEPSGLRLKR

SEQ ID NO: 11204 - protein, 426 aa, Unknown
  Description of Unknown: Integrase B11205 sequence
  cd00338,PS51736,G3DSA:3.40.50.1390,IPR006119,IPR036162, PTHR30461,PF00239,SM00857,SSF53041
MRLRVAYGRVSTTSGEQLSALETQLSWLRNQACDLVLSDVESGRNIERPDYQRLRALVEEGRVAEVIATRLDRLGRLASECDAFIELCDRKRTAVTTRDDGRLTMATPEDLLLTRLKASLAQGESMKISQRIHKAREQGKRDGRPMKKPCFGYRISRDRTRLELDPEQAPIAMELIDALRASNWRMQPVLEGFIGRIPLNSVRALRSWLLNPTIRGALAYDQIKNHEFKQVLWDQHDALLSHEDFAAMQVVMECNRRLWGRHGHKSVRALTGLCVCGECGNKLVYIPGRRWLSLRCRGDVCSQRYKGIRDSEVLGFATEAMAAQAAQRLAAMAESADKPEVALLRAQIETLQAQNDPDLIEVLERKKSRLESLINAPALDQELARKIADPRWFDTLEYDELTLVLHQVVECIEITKQEPSGLRLRR

SEQ ID NO: 11205 - protein, 426 aa, Unknown
  Description of Unknown: Integrase B11206 sequence
  cd00338,PS51736,G3DSA:3.40.50.1390,IPR006119,IPR036162,PTHR30461 ,PF00239,SM00857,SSF53041
MRLRVAYGRVSTTSGEQLSALETQLSWLRNQACDLVLSDVESGRNIERPDYQRLRALVEEGRVAEVIATRLDRLGRLASECDAFIELCDRKRTAVTTRDDGRLTMATPEDLLLTRLKASLAQGESMKISQRIHKAREQGKRDGRPMKKPCFGYRISRDRTRLELDPEQAPIAMELIDALRASNWRMQPVLEGFIGRIPLNSVRALRSWLLNPTIRGALAYDQIKNHEFKQVLWDQHDALLSHEDFAAMQVVMECNRRLWGRHGHKSVRALTGLCVCGECGNKLVYIPGRRWLSLRCRGDVCSQRYKGIRESEVLGFATEAMAAQAAQRLAAMAESADKPEVALLRAQIETLQAQNDPDLIEVLERKKSRLESLINAPALDQELARKIADPRWFDTLEYDELTLVLHQVVECIEITKQEPSGLRLRR

SEQ ID NO: 11206 - protein, 426 aa, Unknown
  Description of Unknown: Integrase B11207 sequence
  PS00397,IPR038109,IPR006119,PS51737,PF00239,G3DSA:3.40.50.1390 ,PTHR30461,IPR025827,SM00857,G3DSA:1.10.10.2600, SSF53041,IPR011109,PF07508,PS51736,IPR006118, cd00338,PF13408,IPR036162,PTHR30461:SF3
MRVALYCRVSSEEQVRNGLSLGVQIDRLRQWAADKRATVVGEYIDAGVSGKLPYKKRPALSRFIQDIQSGLKVDSLVFIKLDRFYRNVKLYYQVVGIMEQYDVSWIATEENYDTATTDGRFKTNIMLAVAEQEADRVSDRIKFVFEDKKSRGEPTSGKIPYGYKVVDKHLVPDEETAPISQEIFQKYLDLRSIADTIRWLWDSHGISRCPSGIRQLLSNKLYLGSDNHPALVDRETFQRAQELLASRANRHSPSGKTYLFGGLVYCRDCGKRMKAYQPAKYEYYICRYHADYGSYKCINKVSTRQDKLEEYLLDNLVNEMVKYNATIEINDNPPKDKDRIRRKMEKLKDLYLDDLIDKQIYERDYTALQNELYEPEIASRTVDIGSLQDTIKLYRSLSKESQKAVWGRILKRIEIDHDGNIFLIPN

SEQ ID NO: 11207 - protein, 426 aa, Unknown
  Description of Unknown: Integrase B11208 sequence
  cd00338,PF13408,IPR011109,IPR038109,PF07508, PS51736,IPR036162,IPR006119,PTHR30461,G3DSA:3.40.50.1390, PTHR30461:SF3,IPR025827,PS51737,PF00239,SM00857, G3DSA:1.10.10.2600,SSF53041
MDQKRITKIDALPKLQKKTRVAAYARVSTGKDAMLHSLAAQVSYYNKMISEHEGWEFAGVYADEALTGTKDSREEFQRLISDCKAGKIDMVVVKSISRFARNTYMMLKTVRELKALGVDVFFEEQNLHTLTAEGEMVLTFLASFAQEEARSVSENMKWKIKRDYEKGILWGGKDMYGYKIVNRRLVLIPEQAELVKRVFKMYLDGCGVQMIANMLNKEGIRTLKDCTWNKSTVLNMIVNYNYTGGLVLQKTYREDYLSKKTKRNKGEKDMYVIDDDHEPIISLEDFLMAQELRKQRCELSNNKGHKNVRNRYTSLIKCSICGAKYKRKNRNKSKIWECSTYNTQGKNECASKAIPEEILNEVMSQVLGIDEVTDELVQNSIDYIEAFNGNKLVYHFKDGKIQEGYWKDRSRSESWTSEMREKARLN

SEQ ID NO: 11208 - protein, 413 aa, Unknown
  Description of Unknown: Integrase B11209 sequence
  cd00338,PF13408,IPR011109,IPR038109,PF07508, PS51736,G3DSA:3.40.50.1390,IPR036162,IPR006119,PTHR30461, mobidb-lite,IPR025827,PS51737,PF00239,SM00857, G3DSA:1.10.10.2600,SSF53041
MNIRKIEAKNNKRKKRICAYVRVSTTNGSQLDSLENQKVYFEKLYAERDDVEFLGVFCDKGISGSKYDRPDFQTMLDACRKGQIDVIHTKSISRFARDLINVLEISRELKTLGIDIFFEEQNIHTLSNEGEVVLTVLASLAEEELQSMSGNQRWSFRRKFQKGELLINAKRFLGYDLNEKGELVINKAEAQIVRTIFYSYLEGMGTHRIAKKLNEGKVPTVAGKKWYDSTIRNILKNEKYKGSLLLQKYFHDGVNGPKKLNQGQVEQYYIEDNHEGIVSKEIWEKVQVKMKSRSRIQGTNKTYKFSRMLKCQYCGSTLKRQVSYKKKIVWCCSKYIKEGKNSCKGMRVPERDIADWKLSLPVIVLERIEDGEKHYGYTGQKTSANGHISNSEKDQSSRLLSSVYRPRRTAIKL

SEQ ID NO: 11209 - protein, 424 aa, Unknown; identical to SEQ ID NO: 10037
  Description of Unknown: Integrase B11210 sequence
  cd00338,IPR011109,IPR038109,PF07508,PS51736, G3DSA:3.40.50.1390,IPR006119,IPR036162,PTHR30461,mobidb-lite, PTHR30461:SF3,PS51737,PF00239,SM00857,G3DSA:1.10.10.2600, SSF53041

SEQ ID NO: 11210 - protein, 423 aa, Unknown
  Description of Unknown: Integrase B11211 sequence
  IPR011109,PS51736,IPR036162,PTHR30461,IPR006119, G3DSA:3.40.50.1390,PS51737,PF00239,SM00857,cd03768, SSF53041
VRVSTASGEQLAALENQRARIEAAGVDLVLQDIQSGRATDRDGYQQLLELIATGRAREVVITRVDRLGRDAADTDAAIAFAARKGVIITALDGGTIESVTPTGFVMSRIMTTMAEMESRMLSQRIRSGLAERRKRRMPCRGKAPWGYRINDDRTALEPHPVEWERAQRFLRILAARDWRMNTALDVWASEGRGDIPLHSCRAVKAWLLNPVLRGGLGYGQQKNHVFVDIAWNTHAALISHTEFAAIERQLDANRRMWGRHSKSKQRLLTSLCRCGSCGKAMSYAGSRTIPSVMCRTRGCEQQYKSTHESLIAGAIAHTLAAHADSLATNAPIQDSPEVAELRASIATLQALGDPDLEDAIAAKQQRLQSLSQVPSVPAELLVALRDPRLYEHASYEELTELYHRFVERVVVTKQEVEQVVLRF

SEQ ID NO: 11211 - protein, 423 aa, Unknown
  Description of Unknown: Integrase B11212 sequence
  cd00338,PF13408,IPR011109,IPR038109, Coil,PS51736,G3DSA:3.40.50.1390,IPR006119, PTHR30461,IPR036162,IPR025827,PS51737, PF00239,SM00857,G3DSA:1.10.10.2600,SSF53041
MKVFIYERVSSEEQAKHGYSLDAQHDALIDFCQKHNHVILGEYRDEGISARKPYTKRPAMLQLLQDVETIKPDMILFTKLDRWFRNIKEYYKVQDILDRNKVDWKAINEEYDTSTASGRLYVNIKLSIAQDEADRTSERIKDIQAQQVAQGKVLGGSVPLGYAIKDKRVVFGDNIHITKDAIDHYLLHQSAHATTRYINDKYGLNMTHTHLIRLFRSPILKGEYRTNTAYCEPLISSEKWDKLQDTIQNNIKHSSRKRTYLFTGLIKCPVCGKRLGGSYDGERKYYRCPQHLYGTCNMKHIVNERKVEEWLVENVEEDFRVNVTMKPKQKTEDPKKYKDRLRRLNDMYLMGNITQKEYKDKSAELQRKIAELSKKPSLKTQNFASNWKALYYELDEEHRRLFWRSLISEVRVNLEGQAFQIMY

SEQ ID NO: 11212 - protein, 422 aa, Unknown
  Description of Unknown: Integrase B11213 sequence
  cd00338,PF13408,IPR011109,IPR038109,PS51736, G3DSA:3.40.50.1390,IPR006119,IPR036162,PTHR30461,PTHR30461:SF3, IPR025827,PS51737,PF00239,SM00857,G3DSA:1.10.10.2600, SSF53041
MRVFLYERVSSEEQVKHGYSLDAQDEALREFCERNNHVILGVYRDEGISGRKPYTKRPAMVQLLRDVETIKPQMILFTKLDRWFRNIKEYYKVQDILDKYKVDWKAINEEYDTSTASGRLYVNIKLSIAQDEADRTSERIRDVQAHQVAQGKILGGKPPLGYSFKDKKLVQNEDVRIVRDAIDHYKMHQSINATTRYINDLYGLKFDHRSILTLFRNPILKGEYRGNPNFCEPILSEAEWDALQEIIPRNIKQATSRVYLFSGLIICPYCGRKLGGCADHRRKYYRCVQHYYSTCPMKHTVNEKKLEGWLLDNIEDDFKVNVTMKPREKKESPAKYKQRLKRLNDIYLLGNISESEYKSKSAELQRIIADLSRIEPIKEDHFTAGWKDVYEMLDEEHRRSFWRNIIKAVRVDEDAQPIEVIY

SEQ ID NO: 11213 - protein, 422 aa, Unknown
  Description of Unknown: Integrase B11214 sequence
  cd00338,IPR011109,IPR038109,PF07508,Coil, PS51736,G3DSA:3.40.50.1390,IPR006119,IPR036162,PTHR30461, PS51737,PF00239,SM00857,G3DSA:1.10.10.2600,SSF53041
MSTEYAIYLRKSRADLEAEAHGEGDTLARHEHILMELAKSRALPIGAIYREIVSGERIANRPVMQQLLAEVEDGRWKGVLVTETSRLARGDTIDQGIVAQAFKFSGTLIVTPSKTYDPTQEADEEWMEFGLFMSRQEYRMIRRRQLAGTRASKKEGHYVPGRPPYGYERYKLDGRGWSLRPVEPQAGVIRTIYDMYLSGKGFSEIANELNAMKIRTPLDKKWVPATTRAILQNPHYAGFIPSAMKVNTKIVQKGKLITKRPVNKNCELYEGIHEAIIPRDVWYSVQQRMKDTVTPRVPRKYQQMNPLAGLVYCDQCGKLMSRHPYRREDKVRFGCENPSCSTVSSLFEDVESLVLQSLREFLHKIELSSPTLLDTKSEEIALQNIEKQLTDINHRLQRTYELLEDGVYSKETFLQRQSAISQ

SEQ ID NO: 11214 - protein, 421 aa, Unknown
  Description of Unknown: Integrase B11215 sequence
  cd00338,PF13408,IPR011109,IPR038109, PF07508,PS51736,IPR036162,IPR006119, G3DSA:3.40.50.1390,PTHR30461,PTHR30461:SF3,IPR025827, PS51737,PF00239,SM00857,G3DSA:1.10.10.2600,SSF53041
MPTKRCAIYTRKSIAKGLDQEYNSLDAQFDMCMDCIRRHEKDGWVFVASFVDAAVSGTTVHRDQLNMLRHQVRAGEIDCVVVYKLDRLSRDLGDFTTLMKEFSDHNVAFVSATQSIETHTPEGKLSMNMMAVVADYEAAIIRSRLRDKINACKAQGRWVCGSAPYGYKWHEKKLVVDRLESATVRYIHELYIGGKGPVVIARQLNKEKRLYRKNKDSGERIPWNSQTIKRILTHYVYAGYVKTDSGLIQGIHQPIIDQETYEKTCQRNNEARELRSGLDQKEHKVIYPLKGILKCGKCGRLYLGTYTIKRGVMRRYYTCAANRHDYLQGCASPHFGADQIEELLKGYILRFRDSPQVLAALIRQLPDEDAGRIADALYSIDSALGDSTPRELQKVFQAAFESIVINDNGEQLDVTLKKGLE

SEQ ID NO: 11215 - protein, 421 aa, Unknown
  Description of Unknown: Integrase B11216 sequence
  cd00338,Coil,PS51736,G3DSA:3.40.50.1390,IPR006119, IPR036162,PTHR30461,PF00239,SM00857,SSF53041
MRVGYCRVSTKTAEQAASIATQEQRLRDAGCVRVLVDHGISGFREAGRRGSEFPALIDLILDGTTTEVVVPNFDRTQRRMRWGIELLDALERTGARLLELDTGAWLDPANNPADVMMAQLRTVFQENESRTRRLKVRKALEARRAQGAYASGKVPFGYAHVDGQVVPHSVNWRLAQDRWAQLAEMDFNLAGWIKNYDASITPRGIRAWIENPTLRGEVNNRPGMRCEPLVTPEQWHHARRCLQARSLARGVSLDRQVRLFTGLVRCDACGKNLHTVTDRNVQRLKCKTRVCDRYGQGLRVSVVRDRVIQALVQANEAMAELASEGSPALTPEQLELMRRIEALEPFADDPDYAALIAKQRAQLAALREQPAGPDLELRRELLADPATLAMATEDELRAIVIEFVASIVWLGGLESLEITLR

SEQ ID NO: 11216 - protein, 421 aa, Unknown
  Description of Unknown: Integrase B11217 sequence
  cd00338,PF13408,IPR011109,PS00397, PS51736,G3DSA:3.40.50.1390,IPR006119,IPR036162, PTHR30461,PS51737,IPR025827,PF00239, SM00857,IPR006118,SSF53041
MRVALYARVSTEEQAIHGLSIEAQLADLRAWAKDKTVVGEYVDAGISARKSITKRPELQRLLRDIEAGKVDLVAFAKLDRWTRNIREYYKAQDVLDAHNVAWKALREDYETQTAAGRLKVNIMLAVAQDEADRTSERVKAVFEEKRRKGLTVNGHMPIGLQYREGVISPSEDAGKVKDLFSAYIATRSITATTARSRDILGKAYSSMGIRSLLMNERYLDAGVISPEAWETAQRILDTHGTRSVRTDRIYLFSGLLVCPECGGKLTVRTIVLHGREYVYYRCRRRTHDHTCPSKVSVREDVLEQYLLGHLLSLVSDKNLRIKKHAKKPVNVAAIQKKLDKLTDLYMEDAIDKADFDRRAAPLRDALKTARLTPQPADTEKIVSALDVYPGLSKAAQKAFWSALVGKITPEGEGYHVDLVLP

SEQ ID NO: 11217 - protein, 420 aa, Unknown
  Description of Unknown: Integrase B11218 sequence
  cd00338,PF13408,IPR011109,IPR038109,PF07508, PS51736,G3DSA:3.40.50.1390,IPR006119,PTHR30461,IPR036162, PTHR30461:SF3,PS51737,IPR025827,PF00239,SM00857, G3DSA:1.10.10.2600,SSF53041
MERKIITVTPSKDPTLQVKRVCAYARVSSGKDAMLHSLSAQISYYQELIQKQPGWKFYGIYADEAMTGTKENRKKFQEMLEECRKGNIDLIITKSISRFARNTVTLLSTVRELKTLGVDVYFEEQNIHSMSGDGELMLTILASYAQEESLSASENQKWRVRANFKEGKPWNCKMLGYRYDGEKFVIHPAEAEIVRFVFRAYLDGMGRQLIANTLFEQGYKGRDGKPFNRGSVEKILRNYAYTGNLLLQKTYRENHITKRGRKNDGVLPMYHATDTHEAIIPLEMFTQVQEEMARRREQFKSEGSLNRYPFTQLLVCGVCGKHYVRKTCRTGFRWMCATYNNKGKKYCDSKMIPEEKLIEMTSDIDMVQVDHIKVERGNTIIIVLKDGTEITRQWQDRSRAESWTDEMRQKAAEQTRKRYQ

SEQ ID NO: 11218 - protein, 419 aa, Unknown
  Description of Unknown: Integrase B11219 sequence
  cd00338,PF13408,IPR011109,IPR038109,PF07508, Coil,PS51736,IPR036162,IPR006119,G3DSA:3.40.50.1390, PTHR30461,PTHR30461:SF3,IPR025827,PS51737,PF00239, SM00857,G3DSA:1.10.10.2600,SSF53041
MRVSVNLNAQKPDTTTNAVIYARYSSHGQTEQSIEGQLAKGHEYAAAQGYTVVHEYIDRAMTGRNDNREAFQKMLSDTGKHQFQVVIVWKVDRFGRNREEIAFNKHTCKKNGVRVEYVAESLPNSPEAVILESVLEGMAEYYSIQLSQNIRRGQLESAKKCQCVGGSVPLGYTLDSDKHFVIDPQTAPVVKKIFDLYAEGATISEITGQLNEQGIRTARKQLFTKNSLTKLLKNEKYIGVYTYKDIVRVEGGVPAIVDKSTFDRVQELLKINRRAPSHTWTKVEYLLTDKLFCGHCGSPMVGESGFSHTGAKYSYYGCIKRRREKACDKKPVRQDWIEALVLDETVKLLHDDELMEYIIDRTWEYYQVTDKVQEEKAVLEAQLAEVDKAINNLVRAIEAGIFNAATKSRMDELDAQKAA

SEQ ID NO: 11219 - protein, 419 aa, Unknown
  Description of Unknown: Integrase B11220 sequence
  cd00338,IPR011109,PS51736,IPR036162,IPR006119, G3DSA:3.40.50.1390,PTHR30461,PS51737,PF00239,SM00857, SSF53041
MAAPEIVGYARVSTKTDEQAISVDAQVEQLKAAGCTRIIRERASAFKEGARRPGWEELQALVASGAVGKVIAVSQSRLSRREDVITFLRICSRKGVEVQFLDGTPGDISDPSARLMTGVMAAINEVDSQIKGINVRNGLARRRASGHYACGRVPFGYRYDGKEVIPHPEEFGQAQLLWQRLEANEFNLSKTVRLHDYDWSTRGLRRWVHNPILRGTVRGVTGKTEPLITPQQYADAAALMQSRASRGTRAPRRRRLLSGLVRCNQCQRWLHYVMAAGKPRLKCSNLHCGFYGRGLAEWKVRNQVLDVLRGRHEDLAQRAASQPQAAMTHQQLARRQQLDQLLEMRDQGVQGLDQAIEALEAAEQLPSPSAPNWTSLAELFGRPGVLELATDEELRAVLLEFVNEVVYVGDPDTVEVRLR

SEQ ID NO: 11220 - protein, 417 aa, Unknown
  Description of Unknown: Integrase B11221 sequence
  cd00338,PS51736,G3DSA:3.40.50.1390,IPR006119,IPR036162, PTHR30461,PF00239,SM00857,SSF53041
VPVTSYGYIRQSRRADLDVALSADAQLAAIRRLAARYGDDPEQLVILSDMGRSGAQSKTHLRTSYLQLIDAIKGNGHGTTIYAISMSRLARSLNELFSIFTLASEHGVRIVFEKEGEVRFDTPIGKLHATITGAVYEFERELAVERTRDNVAVRRARGDRMGRIPYGSKEGESPTAVVDAYKEAGSLNGAAVILNRKKIKSWSGRPWTPNGVQSVISRIDPHLVKRNPAKQGAKRGSGSFLLYRLLRCPCGTLMTGYHNREYVYYRCHRSDGNADHPRYGVVSERKMLPLFKEEVGDITNLVFALDKPLDIERHTALTEKRSRVVEAFLDGVISKDERTTHLESIDAELASLMTTETVIAVPDWDDDPKVVNEFLKGLFGEVSLDEHLAPIFDWKIDVRALRDRVPTQSLVRIAKTN

SEQ ID NO: 11221 - protein, 417 aa, Unknown
  Description of Unknown: Integrase B11222 sequence
  cd00338,PF13408,IPR011109,IPR038109,PF07508, PS51736,IPR036162,IPR006119,PTHR30461,G3DSA:3.40.50.1390, PTHR30461:SF3,IPR025827,PS51737,PF00239,SM00857, G3DSA:1.10.10.2600,SSF53041
VSTDQDEQLSSYENQVNYYREYILKHEDYVLVDIYADEGISATNTKKRDAFNRLIQDCRGGKVDRILVKSISRFARNTLDCIKYVRELKELGIGVTFEKENIDSLDSKGEVLLTILSSLAQDESRSISENSTWGIRKKFERGVVQVNTTNFMGYDKDEKGNLIINHEQANIVRYIFDRFLEGYSPEFISKELREQEIPGCTGKAKWCPSAIWKMLQNEKYKGDALLQKTYTVDFLTKKRIDNDGQVNQYYIENNHEPILDREKWEIVQLEIARRKKFREQHKLQFYIMQKENNPFTTKVFCAECGSAFGRKNWTTSRGKRKVWQCNNRYRIKGQIGCLNNHIDEEMLEKAFMKAVGQLQKHRSDVVAKWQKLEQGTNLLYKHYSKQMYQILDLDKFDGVIMNQVLDRISISEAGQIV

SEQ ID NO: 11222 - protein, 417 aa, Unknown
  Description of Unknown: Integrase B11223 sequence
  cd00338,PF13408,IPR011109,IPR038109,Coil, PS51736,G3DSA:3.40.50.1390,IPR006119,IPR036162,PTHR30461, PTHR30461:SF3,PS51737,IPR025827,PF00239,SM00857, G3DSA:1.10.10.2600,SSF53041
DALTRYVLDKPDYVLAGVYIDDGVSGTKMKRDELQRMLADVKKGLIDIICFTKLDRWFRSIRHYTATQEILDKYNVGWLAIWEPIYDTTTPQGRLIVNQMMSIAQFEAENTSQRIKQVLAYKASVKQAISGNQPPGYKIQDKKVVPDDTMKNVAIQMFEHYSRYGNLNGTLKYCSEVLGVDFNKKSLRHHLMNRKYIGEFRGIKNYCEPLISDDLFDDVQRKLSLNVKRSQKHTYVFSGLVVCTACGMKCSGKTSRGKYKFYYCDQHVKRTKKACSNNKIIMENRLEQYVIEHIKPEAEKYILEYTILQKEKPIDNSKRIATLKKRIDRLKELYLNELMTLEEYKEERIQLENDIEALTIQSKEVVQKDFSKLKETLNSGVIDTILSLSEEERRFIWRSIIKEIKFYPDRHIEIIFL

SEQ ID NO: 11223 - protein, 416 aa, Unknown
  Description of Unknown: Integrase B11224 sequence
  IPR011109,Coil,PS51736,G3DSA:3.40.50.1390,IPR006119, IPR036162,PTHR30461,PS51737,PF00239,SM00857, cd03768,SSF53041
MVLRIGYARTSTAQEEQDKSIEGQVVELKRAGCERVISERRSAFKGNARPGWDELWALVGRGGVDEVVVADQSRLSRSGDDMAFLELCAARGTKVVALVGGTIETESIGGFVQAGMMSVFSQMQSRLTAAKVRDGLRRRKAQGYYACGKVPFGYSYDGQYVVPCPDHWDAARQMWDELMELDFNVSGWIAKTQSKWTPKGVKSWIANPMLRGIVRGEHGGTKPLISWQEWAEAENKLKARSNMRGRAAHTVHLFTGLVRCESCGKSLHNIRDRAVPRLKCHNRICARYGQGIRVEVVRRKVIDALTTKAAELASAAISEKKEPAEAGPIRNQISALQAAQAAGVDGLEDKLAALHRQLQALQQVDSSARYELLVELFADRRTLELATDEELRAVILQFVSELVWPGGLESLEITLR

SEQ ID NO: 11224 - protein, 416 aa, Unknown; identical to SEQ ID NO: 10098
  Description of Unknown: Integrase B11225 sequence
  cd00338,PF13408,IPR011109,IPR038109, PF07508,PS51736,G3DSA:3.40.50.1390,IPR006119, IPR036162,PTHR30461,PTHR30461:SF3,PS51737, IPR025827,PF00239,SM00857,G3DSA:1.10.10.2600,SSF53041

SEQ ID NO: 11225 - protein, 416 aa, Unknown
  Description of Unknown: Integrase B11226 sequence
  cd00338,PF13408,IPR011109,IPR038109,Coil, PS51736,G3DSA:3.40.50.1390,IPR006119,PTHR30461,IPR036162, IPR025827,PS51737,PF00239,SM00857,G3DSA:1.10.10.2600, SSF53041
RVSSEEQAKHGYSLDAQHDALIDFCQKHNHVILGEYRDEGISARKPYTKRPAMLQLLRDVETIKPDMILFTKLDRWFRNIKEYYKVQDILDRNKVDWKAINEEYDTSTASGRLYVNIKLSIAQDEADRTSERIKDIQAQQVAQGKVLGGSVPLGYAIKDKRVVFGDNIHITKDAIDHYLLHQSAHATTRYINDKYGLNMTHTHLIRLFRSPILKGEYRTNTAYCEPLISSEKWDKLQETMQNNIKHSSRKRTYLFTGLIRCPVCGKRLGGSYDGERKYYRCPQHLYGTCNMKHIVNERKVEEWLVENVEEDFRVNVTMKPKQKTEDPKKYKDRLRRLNDMYLMGNITQKEYKDKSAELQRKIAELSKKPSLKTQNFASNWKALYYELDEEHRRLFWRSLISEVRVTLEGQAFQIMY

SEQ ID NO: 11226 - protein, 414 aa, Unknown
  Description of Unknown: Integrase B11227 sequence
  cd00338,IPR011109,IPR038109,Coil,PS51736, G3DSA:3.40.50.1390,IPR006119,PTHR30461,IPR036162,PS51737, PF00239,SM00857,G3DSA:1.10.10.2600,SSF53041
MSVDTQITALEAYCKANNLIVYKIYNDAGISARKAYKRRPALLEMLKDCQEKKIDIVLFTRLDRFFRSVPDYYACVSQMNEVPWKAILEDYETETPDGVFKVNIMLSVAQSEADKTSARLKDTFAYKRARGDYIGKAPMGYLVRGRDLIKDPEKQVPLSVMFKTYLSTFSSRKALEAGDEYGLSLDRSTFMKMLSNEAYCGHAKGGYQCEPYMTEEEWKRIQEVKRSRTPKPIYGPRTYLFSGLCKCGYCGNRMPAKLIYRTHADGEKVFYKKYVCENRLHPHLQLIETHLEEYLMQNLSKLIHNARLEAKLTQKGMDVSIKKKKRLEGKLERLREVYIDGDIEKEAYQARKKTLEEEINSIYIPQSIMPDVPEDWKEIYKDLTEERKAVFWKRLIKTIEFTNESKHKPKVIFL

SEQ ID NO: 11227 - protein, 413 aa, Unknown; identical to SEQ ID NO: 11183
  Description of Unknown: Integrase B11228 sequence
  cd00338,PF13408,IPR011109,IPR038109, PF07508,PS51736,IPR036162,IPR006119, G3DSA:3.40.50.1390,PTHR30461,PS51737,IPR025827, PF00239,SM00857,G3DSA:1.10.10.2600,SSF53041

SEQ ID NO: 11228 - protein, 413 aa, Unknown; identical to SEQ ID NO: 11191
  Description of Unknown: Integrase B11229 sequence
  cd00338,PF13408,IPR011109,IPR038109,PF07508, PS51736,G3DSA:3.40.50.1390,IPR006119,IPR036162,PTHR30461, mobidb-lite,PS51737,IPR025827,PF00239,SM00857, G3DSA:1.10.10.2600,SSF53041

SEQ ID NO: 11229 - protein, 413 aa, Unknown
  Description of Unknown: Integrase B11230 sequence
  cd00338,PF13408,IPR011109,IPR038109,PF07508, PS51736,G3DSA:3.40.50.1390,IPR006119,PTHR30461,IPR036162, mobidb-lite,PS51737,IPR025827,PF00239,SM00857, G3DSA:1.10.10.2600,SSF53041
MNIRKIEAKNNNRKKRICAYVRVSTTNGSQLDSLENQKVYFEKLYAERDDVEFLGVFCDKGISGSKYDRPDFQTMLDACRKGQIDVIHTKSISRFARDLINVLEISRELKTLGIDIFFEEQNIHTLSNEGEVVLTVLASLAEEELQSMSGNQRWSFCRKFQKGELLINAKRFLGYDLNEKGELVINKAEAQIVRTIFYSYLEGMGTHRIAKKLNEGKVPTVAGKKWYDSTIRNILKNEKYKGSLLLQKYFHDGVNGPKKLNQGQVEQYYIEDNHEGIVSKEIWEKVQVKMKSRSRIQGTNKTYKFSRMLKCQYCGSTLKRQVSYKKKIVWCCSKYIKEGKNSCKGMRVPERDIEDWKLSSPVIVLERIEDGEKHYSYTGQKTSANGHISNSEKNQSSRLLSSVYRPRRTAIKL

SEQ ID NO: 11230 - protein, 413 aa, Unknown; identical to SEQ ID NO: 11208
  Description of Unknown: Integrase B11231 sequence
  cd00338,PF13408,IPR011109,IPR038109,PF07508, PS51736,G3DSA:3.40.50.1390,IPR036162,IPR006119,PTHR30461, mobidb-lite,IPR025827,PS51737,PF00239,SM00857, G3DSA:1.10.10.2600,SSF53041

SEQ ID NO: 11231 - protein, 413 aa, Unknown; identical to SEQ ID NO: 11184
  Description of Unknown: Integrase B11232 sequence
  cd00338,PF13408,IPR011109,IPR038109,PF07508, PS51736,IPR036162,IPR006119,PTHR30461,G3DSA:3.40.50.1390, PS51737,IPR025827,PF00239,SM00857,G3DSA:1.10.10.2600, SSF53041

SEQ ID NO: 11232 - protein, 411 aa, Unknown
  Description of Unknown: Integrase B11233 sequence
  cd00338,PF13408,IPR011109,IPR038109,PF07508, PS51736,G3DSA:3.40.50.1390,IPR006119,IPR036162,PTHR30461, PTHR30461:SF3,PS51737,IPR025827,PF00239,SM00857, G3DSA:1.10.10.2600,SSF53041
VSTDQDEQLSSYENQVNYYREFILKHEDYELVDIYADEGISATNTKKRDAFNRLIQDCRDGKVDRILVKSISRFARNTLDCIKYVRELKELGIGVTFEKENIDSLDSKGEVLLTILSSLAQDESRSISENSTWGIRKKFERGVVQVNTTNFMGYDKDEKGNLIINHEQANVVRYIFDRFLEGYSPEFISKELRKQEIPGCTGKARWCPSAIWKMLQNEKYKGDALLQKTYTVDFLTKKRIDNDGQVNQYYIENNHEPILDKEKWEIVQLEIARRKRFREQHELQFYIMQKENNPFTTKVFCTECGSAFGRKNWTTSRGKRKVWQCNNRYRLKGQIGCLNNHIDEEMLEKAFMKAVGLLKEHRSDVVAKWQKLVQGANLLHKHYAKQMYQILDLDKFDGVIMNQVLDHISIS

SEQ ID NO: 11233 - protein, 413 aa, Unknown
  Description of Unknown: Integrase B11234 sequence
  cd00338,PF13408,IPR011109,PS00397,Coil, PS51736,G3DSA:3.40.50.1390,IPR006119,IPR036162,PTHR30461, PTHR30461:SF3,IPR025827,PS51737,PF00239,SM00857, IPR006118,SSF53041
MRVALYCRVSSEEQVRHGISIDAQEAALTEWANDKTVVGIYKDLGVSGRKPYTKRPEMMRLLDDVEAGRVDLIAFCKLDRWFRSIKEYYRVQDILDRHKVAWRAIQEDYETETSSGRFKVNIMLSVAQSEAEKTGERNKAVNAYKRAKGEFLCGNTPLGTKLENKILVPNDDAWKVREMFSVFLSTGSVYGSIPILAERGVKVGNRSLRYVLENENYLRVGIITPEEWHRAEELRGEKRPKAVNTRTYLFTGLVYCPECGNRLSGMYSKDTYYYRCPRFYQDRSCHMSSCIPEQKIESYFLDTLRQSMEDANIRLLSAKPVDPSPLKRKLDKLADMYLADMISKEKYEREYKATKAALAEAEAVKKPIDTEQVMSTMTAYSTLSREAKRAFWYRIIKKATVSKDGIDYTLSYT

SEQ ID NO: 11234 - protein, 413 aa, Unknown; identical to SEQ ID NO: 11197
  Description of Unknown: Integrase B11235 sequence
  cd00338,PF13408,IPR011109,IPR038109,PF07508, PS51736,G3DSA:3.40.50.1390,IPR006119,IPR036162,PTHR30461, mobidb-lite,PS51737,IPR025827,PF00239,SM00857, G3DSA:1.10.10.2600,SSF53041

SEQ ID NO: 11235 - protein, 413 aa, Unknown
  Description of Unknown: Integrase B11236 sequence
  cd00338,PF13408,IPR011109,IPR038109,PF07508, PS51736,IPR036162,IPR006119,PTHR30461,G3DSA:3.40.50.1390, mobidb-lite,IPR025827,PS51737,PF00239,SM00857, G3DSA:1.10.10.2600,SSF53041
MAVRLIKTKSNRKKQRVCAYTRVSTTNSSQLDSLENQKAYFENLYTNRVDVDFLGVYYDKGISGSKAERPSFQAMLEACRQGQIDLIHTKSISRFARNTMTVLEVSRELKVLGVGIYFEEQNINTLSNEGEVMLSVLASLAEEELQSMSDNQRWAFQRKFQRGEMVINTKRFMGYDVDDKGELVINEAEAQIVRRIFQLYLDGMGMHRIAKLLNQENVPTVTDAKWHDTTVRNILKNEKYKGTVLLQKYFHVGINGPKRLNQGQVEQYLIEDNHEPIVSKEVWQAVQDKLASKTWKQGVNKHYRFTSMLKCEYCGSTLKRQVTYKKQIVWCCSKYIKEGKASCRGMRVPEKAIEEWKLKTPVTVIERNEYGQKHYSYSSQESAADGHPSASNQNKSGSLLSGVHRPRRTAIKL

SEQ ID NO: 11236 - protein, 412 aa, Unknown
  Description of Unknown: Integrase B11237 sequence
  cd00338,PF13408,IPR011109,IPR038109,PF07508, PS51736,IPR036162,PTHR30461,G3DSA:3.40.50.1390,IPR006119, mobidb-lite,PS51737,IPR025827,PF00239,SM00857, G3DSA:1.10.10.2600,SSF53041
MRIKVIKPTVAAENKRLKVCAYVRVSTDSLEQEDSLDNQTAYFKDYIQSNPAWEFVGIYADQGISGFKENRPQFQKMIADARAGKIDLIVVKSVSRFARNTETVLKFSRELKSIGVGIFFELQNINTLSGPGELMLTIIAAFAQAESQGASDNANLTYKRKFEAGMPVHDLKYTFGFDTDEGGNTYIVEEQAKTVRLIFDLAHKGVWPSKIKQYLNKNGITSCAGGKWDDTGVHRVLRNPAYKGALVLQKTYLDSNRIRHKNEGQKDQWYIADNHPAIVPPEQWDEVQEILLARSESLAPRPPQKPSQPRSSRTQYPLTNKLFCPLCGQKLHHKWSNQGKSEYWACSTNVKVGASACKGIWLPAEIANSWGDITEPTTVIGYKDEYGMQHFTASPKAEYELSDDCPYTRKED

SEQ ID NO: 11237 - protein, 412 aa, Unknown; identical to SEQ ID NO: 10264
  Description of Unknown: Integrase B11238 sequence
  cd00338,PF13408,IPR011109,IPR038109,PF07508, PS51736,G3DSA:3.40.50.1390,IPR036162,PTHR30461,IPR006119, PTHR30461:SF3,IPR025827,PS51737,PF00239,SM00857, G3DSA:1.10.10.2600,SSF53041

SEQ ID NO: 11238 - protein, 411 aa, Unknown; identical to SEQ ID NO: 11232
  Description of Unknown: Integrase B11239 sequence
  cd00338,PF13408,IPR011109,IPR038109,PF07508, PS51736,G3DSA:3.40.50.1390,IPR006119,IPR036162,PTHR30461, PTHR30461:SF3,PS51737,IPR025827,PF00239,SM00857, G3DSA:1.10.10.2600,SSF53041

SEQ ID NO: 11239 - protein, 411 aa, Unknown
  Description of Unknown: Integrase B11240 sequence
  cd00338,PF13408,IPR011109,IPR038109,PF07508, Coil,PS51736,IPR036162,IPR006119,PTHR30461, G3DSA:3.40.50.1390,PTHR30461:SF3,IPR025827,PS51737,PF00239, SM00857,G3DSA:1.10.10.2600,SSF53041
MVKAVAYARYSSHNQREESIEGQLRKCHTFAEQNGFVIIEEYCDRAISGKTDNRAEFQRMIKDSEKGHFQAIIMYTLDRFARNRYDSAMYKAKLRKNGVRLYYTEQSITDEPEGIILESVLEGMAEYYSENLSRGVKRGMKENALKCMITGGYMPLGYRKTADKKFEIDPATAPIVQEIFDLYVNGKSQRQIVDILNEKGYRTAKGKPFRLGSISGILVNTKYIGLYTFDDVVIEGGIPAIINKDVFEKAQEMLKRNRRESGRMKAPMQYLLTGKVFCGLCGSPMAGESGTGSKGTIYNYYKCQDRKKKHTCVKANEKKDWLERVVVQATVERILQPEVIDEIACKVAELAESEFNDKSRLLSLQSELKSVQTAIRNLLRLVEQGIDTEDIGERLLDLNSQKADLQKQISR

SEQ ID NO: 11240 - protein, 411 aa, Unknown
  Description of Unknown: Integrase B11241 sequence
  cd00338,PF13408,IPR011109,IPR038109,PF07508, PS51736,G3DSA:3.40.50.1390,PTHR30461,IPR006119,IPR036162, PTHR30461:SF3,IPR025827,PS51737,PF00239,SM00857, G3DSA:1.10.10.2600,SSF53041
MEKKMWKIEQKVTEISKRKRVAAYARVSVESERMQHSLSAQISYYSSLIQKNPAWEYAGVYADYGITGTKIIKRKEFQRMLADAEARKIDIILTKSIQRFARNTVDLLKTVRHLKEIGVEVWFEKENICSLSGDGELMLTILASFAQEESRSISDNIKWRFQKKYEKGIPHAKFFIYGYRWKDGELVIQNEEAAIVRRVFKGYLAGKTRRDIQRELANIGAHTMYGNLFQDSTIKQMLQNPVYKGNLVIQKTFVIDPITKHQVINHGEKDKYVVENHHEAIIDAATFNQVQEEMAWRKEAGKQRGGYARNFLNTSCFTGIIKCGICGKSYIHNIRKYKGKPSEYWSCLSNKGKAEERCGAYGAIPQPALERACMSALEMAIFDKTEFLQHFTTFTLPRKLMKLVYTRPELS

SEQ ID NO: 11241 - protein, 405 aa, Unknown; identical to SEQ ID NO: 10902
  Description of Unknown: Integrase B11242 sequence
  cd00338,PF13408,IPR011109,IPR038109,PF07508, PS51736,G3DSA:3.40.50.1390,IPR006119,IPR036162,PTHR30461, mobidb-lite,IPR025827,PS51737,PF00239,SM00857, G3DSA:1.10.10.2600,SSF53041

SEQ ID NO: 11242 - protein, 408 aa, Unknown
  Description of Unknown: Integrase B11243 sequence
  cd00338,IPR011109,IPR038109,PF07508,Coil, IPR036162,PTHR30461,G3DSA:3.40.50.1390,IPR006119,PTHR30461:SF3, PS51737,PF00239,SM00857,G3DSA:1.10.10.2600,SSF53041
MYETNLTIFDVDDILIYLRKSRKDLEYGKEETIERTLQRHEEILQKFAIKVWGKKIPEKNIYREVVSGDTIADRPMIQQVLNKVESPKIKGVLVLELERLARGNTIDQGVIVQTFEFTNTIIITPQKAFDLKNDFDISFFEDGLYQARKYLTYIKKVLLRGRVTSVNEGKFVGSTCPYGYSKEKIKGDKGFKLIINEAEAKIVRIIFEMSTKGIGASNIANHLNKIGSKPRKAEVWVSASIRSIIENPVYIGKIRWNWRKTEKTMKNGKVIKSRPKHEEYILVNGLHEAIINKETFNIANKNKQDKNGKSVRKDLTIQNPLAGLVECGYCHRTMQRRPHRSYKIDGLICPLPHCQNIGSHLYLVENAILSSLEEHLSRYEQIVEDYKKNGLEQEIDTNTMDIINKELE

SEQ ID NO: 11243 - protein, 407 aa, Unknown
  Description of Unknown: Integrase B11244 sequence
  cd00338,PF13408,IPR011109,IPR038109, PF07508,PS51736,IPR036162,IPR006119, PTHR30461,G3DSA:3.40.50.1390,mobidb-lite,IPR025827, PS51737,PF00239,SM00857,G3DSA:1.10.10.2600,SSF53041
MKPEKKRVCAYARVSTMTEKQQDSLTNQQAYYSHLYQNKKDVDFIGVYYDQGISGKLAKRPGFQQMLEDCMAGKIDVIHTKSISRFARNTELLLEVSRELKAIQVDIFFEEQNLHTLSNEGEVMLTVLASYAEEELRNMSENQRWAFQKKFQRGELVINTKRFLGYDKDENGELIINPEEAKIVKRIYNLYLSGMGVHVIAKLFNEEKVSTVDGGKWYSSTITNILKNEKYKGDAILQKYYFAEIKAKQRLNQGQVQQYLITDNHEAIVSREDWEAVQKLLRQNSKRDARIDYNRRYPLSGLLKCEHCGSTLKRQKYYKGKVVWVCSKYIREGKVACIGMRVPDSVVQDWSIHEPTVVKEENIGGKKYYSYSSKENDTSRAEATHSENPNGGLLPSIHRPRRTAIKL

SEQ ID NO: 11244 - protein, 407 aa, Unknown
  Description of Unknown: Integrase B11245 sequence
  cd00338,PF13408,IPR011109,IPR038109,PF07508, PS51736,IPR036162,IPR006119,G3DSA:3.40.50.1390,PTHR30461, mobidb-lite,PS51737,IPR025827,PF00239,SM00857, G3DSA:1.10.10.2600,SSF53041
MKSGKIRVCAYARVSTMTEKQQDSLTNQQAYYSHLYQNKKDVDFIGVYYDQGISGKLAKRPGFQQMLEDCMAGKIDVIHTKSISRFARNTELLLEVSRELKAIQVDIFFEEQNLHTLSNEGEVMLTVLASYAEEELRNMSENQRWAFQKKFQRGELVINTKRFLGYDKDENGELIINPEEAKIVKRIYNLYLSGMGVHVIAKLFNEEKVSTVDGGKWYSSTITNILKNEKYKGDAILQKYYFAEIKAKQRLNQGQVQQYLITDNHEAIVSREDWEAVQKLLRQNSKRDARIDYNRRYPLSGLLKCEHCGSTLKRQKYYKGKVVWVCSKYIREGKVACIGMRVPDSAVQDWSIHEPTVVKEENIGGKKYYSYSSKENDTSRAEATHSENPNGGLLPSIHRPRRTAIKL

SEQ ID NO: 11245 - protein, 407 aa, Unknown
  Description of Unknown: Integrase B11246 sequence
  cd00338,PF13408,IPR011109,IPR038109,PF07508, PS51736,IPR036162,IPR006119,G3DSA:3.40.50.1390,PTHR30461, mobidb-lite,IPR025827,PS51737,PF00239,SM00857, G3DSA:1.10.10.2600,SSF53041
MKPEKKRVCAYARVSTMTEKQQDSLTNQQAYYNYFFKNKKDVEFVGVYYDQGISGKLAKRPGFQQMLEDCRAGKIDVIHTKSISRFARNTELLLAVSRELKTIQVDIFFEEQNLHTLSNEGEVMLTVLASYAEEELRNMSENQRWAFQKKFQRGELVINTKRFLGYDKDENGELIINPEEAKIVKRIYNLYLSGMGVHVIAKLFNEEKVSTVDGGKWYSSTITNILKNEKYKGDAILQKYYFAEIKAKQRLNQGQVQQYLITDNHEAIVSREDWESVQKILRQNSKRDARTDYNRRYPLSGLLKCEHCGSTLKRQKYYKGKVVWVCSKYIREGKAACIGMRVPDGVVQDWSIHEPTVVKEENIGGKKYYSYSSKENDTSRAEATHSENPNGGLLPSIHRPRRTAIKL

SEQ ID NO: 11246 - protein, 407 aa, Unknown
  Description of Unknown: Integrase B11247 sequence
  cd00338,PF13408,PS00397,Coil,PS51736, IPR036162,IPR006119,G3DSA:3.40.50.1390,PTHR30461,IPR025827, PF00239,SM00857,IPR006118,SSF53041
LRVALYARVSTQEQAQHGLSIGAQLAALEEWAKPHVIVGEYVDAGISARSPISKRPELQRLLRELDNVDCVVFTKLDRWTRNIREYYKAQDALDAHGVAWRAIHEDYETETAAGRLKVNIMLSVAQDEADRTSERIKAVFADKRRKGLIPSGKAPLGLEIVNGRYQITEKADITRAMFQDYIAKRSTTYVAEDFHMTPVGVRALLRNKNLVENGVVDEDTFKTANEILGTRSQRRVHSGEIYIFGGLIRCGKCGGATYCAKSKGYYYYRCVRHRDHGPCEGTSVNEAVVENYLLDNIVSKAEDMNLTITKKSGRAPDIGKLTARLDKLTDLYLNDLITREKYEADYKKTQEAILEAQRRPKTIDTEELTNILGAYQSLSRAAKKAFWSKLVKRIVIDDKKISFELYA

SEQ ID NO: 11247 - protein, 407 aa, Unknown
  Description of Unknown: Integrase B11248 sequence
  PS00397,IPR038109,IPR006119,PS51737, PF00239,G3DSA:3.40.50.1390,PTHR30461,IPR025827, SM00857,G3DSA:1.10.10.2600,SSF53041,IPR011109, PF07508,PS51736,IPR006118,cd00338,PF13408,Coil,IPR036162
MDTVLIYARVSTEDQLEKYGLSSQLRACREFAAARGWQILEEITDDGISGVILDRPGLDRVRRLVREGAATFVLMFDADRLSRELAHLLILKPEIEKHARLEFVAAKFEDSPSGRMFFGMRGVIAQYEREVIRERTMRGKKERARAGLISGGRIAYGYCYKEGKLLPDVERAPIVQRIFTAYDSGLSLRAVVQELRAAGLPTWGGKPWERSSVRRILANETYAGVAYYGTLRREGKSVRVRTSGERIPLSVPPLVDRAIWERVGARLAANPLVGRPSSAYLLRGLLFCAQCGRRMCGERGRSNAYRCVGRDPLRAPSGVLCKHSISVARLDAVVWRKLVEVCTNGEALRAILGRREEELKTSSGEVERLRSRLAKAKGREEAALSALLDPDLASTRGSIKEKYRAAT

SEQ ID NO: 11248 - protein, 407 aa, Unknown
  Description of Unknown: Integrase B11249 sequence
  cd00338,PF13408,IPR011109,IPR038109,PF07508, PS51736,G3DSA:3.40.50.1390,IPR006119,PTHR30461,IPR036162, mobidb-lite,PS51737,IPR025827,PF00239,SM00857, G3DSA:1.10.10.2600,SSF53041
MKPGKIRVCAYARVSTMTEKQQESLTNQQAYYNHFYQNKKDVDFIGVYYDQGISGKLAKRPGFQQMLEDCRAGKIDVIHTKSISRFARNTELLLAVSRELKAIQVDIFFEEQNLHTLSNEGEVMLTVLASYAEEELRNMSENQRWAFQKKFQRGELVINTKRFLGYDKDENGELIINPEEAKIVQRIYNLYLSGMGVHAIAKLFNQEKVPTVDGGRWYSSTITNILKNEKYKGDAILQKYYFAEIKAKQRLNQGQVQQYLITDNHEAIVSREDWEAVQKRLKQNRKANLSINCNRRYPLSGLLKCEHCGSTLKRQKYYKGKVVWVCSKYIREGKAACIGMRVPDSAVQDWSIYEPTVVKEENISGKKHYSYSCQENDTSRAGATHSENPNGGLLPSVHRPRRTAIKL

SEQ ID NO: 11249 - protein, 406 aa, Unknown
  Description of Unknown: Integrase B11250 sequence
  cd00338,PF13408,IPR011109,PS00397,Coil, PS51736,G3DSA:3.40.50.1390,IPR036162,PTHR30461,IPR006119, IPR025827,PS51737,PF00239,SM00857,IPR006118, SSF53041
MRVALYARVSTEEQALHGLSIDAQLSALREAYPNGVEYVDLGISARKPILKRPELQRLLHDVEQGKIDLICFCKLDRWTRNIREYYKAQDVLDAHNVPWRALHEDYETQTAAGRLKVNIMLAVAQDEADRTSERIKAVFEDKRRKGLVPTGSVPLGVMLENGKYAPSEDADRARELFQTFLLTRSVTETAKRYGWSGNGVRYALRNRLYADLGIVDAQTWETAQNVLQSRSQRHVRTDRVYLFSGLIICPECGSRMTCVRVSGHTYYRCPRHYDGGCPGCHVSELKLERYLLDHLLTGVDDINLKLKKKRKKTVDVAQLRKRMDKLTDLYMNDLISREKYADEYKSIQTAIEEAEREQKPVDRAEIKDALSGYKLLTANGKRVFWQTLIKSITPTEEGFDFALNYT

SEQ ID NO: 11250 - protein, 405 aa, Unknown
  Description of Unknown: Integrase B11251 sequence
  Coil,PS51736,IPR036162,IPR006119,G3DSA:3.40.50.1390, PTHR30461,mobidb-lite,PF00239,SM00857,cd03768, SSF53041
VVSVEVGESGRAETETPMREYHIAYLRVSRPDENVENQRLAIRSFLERSGVDPDEVAFFEDVGISGAVIPKARKGFRQLLDYIGEIKRRDPNAKINLYVYEISRLGRSFYETLSLIQKFERQNIRVVSASEKESFLNVQDESVRKLIIAIFAWLAERERELLIQRTKWGMQRALLEGKQIGRPKKVGLSDKQLRKAKQYLEKGLSLADVARLIGVPYDGLRRELIEHGVWKVGATPIGSVHARWDDEFLEQAFMEHVLSVLKKNEATVARLDADADVAVPLSMTLMREIAAKARLRRRRHDGDGGEDENGNGGPGTGADGGRNKNEDKDGDDGGVAGGDGSGGDDDAGSDDLPSDETIRKRFRQVAAKLKFETRFREDGGLSVLLTAKQARKLLRQAARQQEQKG

SEQ ID NO: 11251 - protein, 405 aa, Unknown; identical to SEQ ID NO: 10902
  Description of Unknown: Integrase B11252 sequence
  cd00338,PF13408,IPR011109,IPR038109, PF07508,PS51736,G3DSA:3.40.50.1390,IPR006119, IPR036162,PTHR30461,mobidb-lite,IPR025827, PS51737,PF00239,SM00857,G3DSA:1.10.10.2600,SSF53041

SEQ ID NO: 11252 - protein, 405 aa, Unknown
  Description of Unknown: Integrase B11253 sequence
  cd00338,IPR011109,IPR038109,PF07508,PS51736, G3DSA:3.40.50.1390,IPR006119,IPR036162,PTHR30461,mobidb-lite, PS51737,PF00239,SM00857,G3DSA:1.10.10.2600,SSF53041
MYCIYLRKSRADYEAEQRGEGETLSRHRSILTALAAHNRHPIGHIYEEIVSGETLSERPQARQLLADLAAGRWLGVYVMEVERLSRGDAMDQGYIAHAFKASGAKIITPTKTYNPADDQTDETFFEFSLFMSRQEFKTHHRRMQGGRAQSRQEGKWIVSKAPYGYRRVKLPREKGFTLEIFPEEAAVVRQVYDWYLHGINGQPAGITAIGNRLSDLHIPLGLYGSNWDGCRVHRMLTNPAYIGKIQWGKNKTERVITPTGLQKRTVHHTDYELTDGLHPAIIDEDTFYRVQSKLRGVSLDRHIPVRKDAQLANPLAGLVVCSECGHVMSHLPACGRQPAHIKCLTRGCPTVQTYRAPVEETVLNTLRSWLDDVGESSAPASDPATMTGPSSSLPSPVWNPSVTSS

SEQ ID NO: 11253 - protein, 403 aa, Unknown; identical to SEQ ID NO: 10210
  Description of Unknown: Integrase B11254 sequence
  cd00338,PF13408,IPR011109,IPR038109, PF07508,PS51736,IPR036162,IPR006119, PTHR30461,G3DSA:3.40.50.1390,PTHR30461:SF3,IPR025827, PS51737,PF00239,SM00857,G3DSA:1.10.10.2600,SSF53041

SEQ ID NO: 11254 - protein, 403 aa, Unknown
  Description of Unknown: Integrase B11255 sequence
  cd00338,PF13408,IPR011109,IPR038109,PF07508, Coil,PS51736,G3DSA:3.40.50.1390,IPR036162,IPR006119, PTHR30461,PTHR30461:SF3,IPR025827,PS51737,PF00239, SM00857,G3DSA:1.10.10.2600,SSF53041
MARRKKVSPGNRLVAYYRYSGGSQQTEQSIEGQRRDCEAYARQHGLTIVHEYIDRHISGRGVESRLAFQQMIADSSKHLFDLVICWKTDRFARNRYDSAVYKKKLRDNGVRILYAAESSVEGPEGIILEGLMESLAEYYSAELAQKMRRGMRESALKGKAINPNRPLGLTTDEHKRFIIDEKNAPTIRFIFEHYAAGESSASIVDQLNAAGLRTSKGNSFNKCSIPRIIQNEAYHGVYICKAYDVRIDGAIPAIIDDDLWKRAQKMLTLNKQHRAPHSSHADYLLSGKLFCGCCHSLMRGISGHNCRNDVYYYYACGNKADGGTCKKKNIPKDVAENLVVNAICENILRPDTLEDLADAIAAAQQADVNQPDPERAMLEQNLADVRRKINNIIESIENGTASS

SEQ ID NO: 11255 - protein, 402 aa, Unknown
  Description of Unknown: Integrase B11256 sequence
  cd00338,PF13408,IPR011109,IPR038109,PF07508, PS51736,IPR036162,IPR006119,PTHR30461,G3DSA:3.40.50.1390, PTHR30461:SF3,PS51737,IPR025827,PF00239,SM00857, G3DSA:1.10.10.2600,SSF53041
MKQIKTIQAQKVTTIKRLKVAAYTRVSHTSLLQSLSNQVSHYSQMIQANPKWDYVGVYSDSAISGRSQAHRRDFQQLLEDCRKGKIDIILTKSISRFGRNTVELLETVRELKRLGISVRFEKEKIDTLTAEGELLLTLLASMAQEESQSISQNIRWRVKKRFEEGKSYIPQDIFGYRWNGEEYVIEPHEASIVRQVFEWYMEGLSAPKIAKKLDDRGERTRLGNRFTKRIIYNMFDQEAYCGRLILQKTFRDHFGSRSIPNDGQMAKYIVENAHEAIVTPEYFQQVNQEKKRRARRRVSKHDALAKLQGKVYCEHCGLDMILTLETKSNQEKRVRYYCRTRDAKGVEACLGRTVTEEQLFQAFGERINTEDIHHISFNSVTNEAKATYRNGEEKHVIIQKGR

SEQ ID NO: 11256 - protein, 401 aa, Unknown; identical to SEQ ID NO: 10434
  Description of Unknown: Integrase B11257 sequence
  cd00338,PF13408,IPR011109,IPR038109,PF07508, PS51736,G3DSA:3.40.50.1390,IPR036162,IPR006119,PTHR30461, PTHR30461:SF3,PS51737,IPR025827,PF00239,SM00857, G3DSA:1.10.10.2600,SSF53041

SEQ ID NO: 11257 - protein, 400 aa, Unknown; identical to SEQ ID NO: 9981
  Description of Unknown: Integrase B11258 sequence
  cd00338,PF13408,IPR011109,IPR038109,PF07508, PS51736,IPR036162,IPR006119,G3DSA:3.40.50.1390,PTHR30461, IPR025827,PS51737,PF00239,SM00857,G3DSA:1.10.10.2600, SSF53041

SEQ ID NO: 11258 - protein, 822 aa, Unknown
  Description of Unknown: Integrase C1 sequence
  Coil,PS51736,IPR006119,PTHR30461,PS51737, IPR011109,PF07508,PF13408,SSF53041,PF00239, SM00857,G3DSA:3.40.50.1390,cd00338,IPR036162,IPR025827
MTVDALPLDTMQFTAQYELIRSQVINAARDAPHRDLGAQPRGVGLGLLLREGMPGWLGTIDSVIRASLSRRTMDAPLPKPADPLAECSIGSPWFSGVQRQDITTLLTSLVLSTRLVDPLLTDGRISVMPMNSEAHQKITAAHLSRMAYLYVRQSTLRQVFENTESTKRQYGLRDRAVALGWPLDRIVVIDSDLGQSGASAADREGFQRLVTEVSLGRVGIVLGLEVSRLARNNTDWHRLLELCALGDTLILDEDGLYDPAHFNDRLLLGLKGTMSEAELHVLRARLRGGILSRARRGELKQMVPVGFVHDVRDCVIMDPDAQVQAAVRLFFDTFRRTGSCLAVVKEFYAKDLLFPRRLRSGAHKGELVWTELLHCRARQIIHNPRYAGAFVFGRTKNRRLPNGKYSSRQVPSEDWILLRDTHPGYISWEDYLSNLERVKGNALAWSSERHHGPAREGPALLQGLVICGACGERMSVRYHSHRKAEIPSYWCGRRPMHRGEIGLCQTIHGGALDAAIGEILIEAMTPLSIEVALGVQQELATRQEEADRLRRQHVERAKYEAELAQRRFLKVDPDNRLVADVLEADWNAKLRAIAAAQEAYDKSAAADVSVVNDTERAELMALASDFPRLWRDPRTKMKDKKRMLRLLIDDVTLTKGDTVHVDIRFVGGATRSLDLPLPKSCVVLRTTDAAVVQEIDRLIDTYTDKEIADLLNERGVRTVVTTPWTAARIGRLRHIYQLTDRRTRLLAQGLLTPEDVATRYGVVISTVHLWRRRGLLRAHPVNDRGDFLYEIPQQDLPAKFAHKLVYQVDPVTSSSHSGRGAV

SEQ ID NO: 11259 - protein, 750 aa, Unknown
  Description of Unknown: Integrase C2 sequence
  PS51736,PTHR30461,IPR006119,mobidb-lite, PS51737,IPR011109,PF07508,PF13408, SSF53041,PF00239,SM00857,G3DSA:3.40.50.1390, cd00338,IPR036162,IPR025827
MTPSPKIEPRHQRLQAIVYIRQSTPKQVQNNQESTRRQYQLAERARQMGWAASQIRVIDEDLGLSGASSRRRTGFQSLVAAIGLGEVGIILVTEVSRLSRCNSDWHRVIELCGVFRTLIADEDGVYDARDPNDLLLLGVKGTLFAAELHILRGRMRGNLLNKARRGELALRLPVGFRRRPDGVVVQDPDDAVRLAIATVFERFAVLRSARAVHRHFLENRLALPRCAQTGATAGSITWVRPTYQMIQQILTNPAYAGVFVYGRRRREAVPGDPPEMVDRRVALAEWDIVVPDVYPGYLTYDAYLANRRALKDNLYNFAQKGRGAPREGIALLTGLVVCGRCGRRMAVSYGSEYHSYHCRRAQVDYGEPLCQSCPVGTLDTIVSAAFLDAMEPVAMEATLAALETLEREQEAVDRHWQLRLERARYEVALAQRQYDAVDPDNRLVARELERRWNTALGALEALDSEYALVRRTDLMPLSAAEREEVRRIAADLPGLWRAETTMPVDRKRLLRLAVAAVTVTVDRTTRRVDVVILWTGGATSTHAAFLPPIGIHATTDAAVIARIRELSRKLPDHAIAQALNVLGLRTRTGKDWTYERVRSMRKQHGIPTDCPIKTGPLEPRADGRISAKAAARRLGVTPSLVQVWVQHGVLACDQRCPCSKQWIRLTDADVARLDGSADVSGLPTLTEVAEDTGLERDAVWTRVRQGDYIPIRTPRGRGQWEWRLKERPAGNEPVPPCAIGAGRHRGEQYG

SEQ ID NO: 11260 - protein, 741 aa, Unknown
  Description of Unknown: Integrase C3 sequence
  Coil,PS51736,IPR006119,PTHR30461,PS51737, IPR011109,PF07508,PF13408,SSF53041,PF00239, SM00857,G3DSA:3.40.50.1390,cd00338,IPR036162,IPR025827
MTEHSKIAAGHQARLAVVYLRQSSASQVENNRESTERQYALSGRARELGWPDERVLVIDEDLGLSGSGSVMRAGFARLTSEVALARVGIVLGLEVSRLARNNADWHRLIELAGLTDTLIGDADGIYHPALFNDRLLLGLKGAMSEAELHVLRARLNGGIRNKAARGELRRGLPIGFVWGEADGEILIHPDEAVAHAIRTVFARFAELGSARRVWLWFREQAMKFPLWLNARTELRWGEASYHAVHSVLANPVYAGAYVYGKYRRETVLDETGARCKRIRKLPMEDWQVLIKDHHQGYIDWPTFEANRERMAANTQPRTHAKAQEQAGGAAREGGALLQGIARCGHCGRRLHTHYRGRTVTPGYHCPGKVVVEGRGVHCLNVGGGQIDEAVVAAFLEALEPVHLTATLEAAERLENDRDAALKQWRLDVERAAFAVNRAERRYCAVDPDNRLVARRLEQEWEEALRALEAAKAELARREEQRPRVLSATEREKLLALGADLASVWYAPTTTPRDRKELLRTLLDEVTLHVDRDEAAALLVLRWKGDATSRLTVALPRSRPATVRTDEDTLALLRRLAPHYPDAVIAGVLNRQGRRTAYGHRFDANRVGYLRKHWKIPACKAKPPAADGDIVTVRQAAAALGVAPSTLHRHVNDGLIPGEQVTPGAPWRIRLTAELKARFLATPGEGFEPIRDAMENLGLSRQVVLQRVKRGELEAVHVVRGQRKGLWIKTIDQNPSLFEQIP

SEQ ID NO: 11261 - protein, 741 aa, Unknown
  Description of Unknown: Integrase C4 sequence
  Coil,PS51736,IPR006119,PTHR30461, PS51737,IPR011109,PF07508,PF13408, SSF53041,PF00239,SM00857,G3DSA:3.40.50.1390, cd00338,IPR036162,IPR025827
MTEHSKIAAGHQARLAVVYLRQSSASQVENNRESTERQYALSGRARELGWPDERVLVIDEDLGLSGSGSVMRAGFARLTSEVALARVGIVLGLEVSRLARNNADWHRLIELAGLTDTLIGDADGIYHPALFNDRLLLGLKGAMSEAELHVLRARLNGGIRNKAARGELRRGLPIGFVWGEADGEILIHPDEAVAHAIRTVFARFAELGSARRVWLWFREQAMKFPLWLNARTELRWGEASYHAVHSVLANPVYAGAYVYGKYRRETVLDETGARCKRIRKLPMEDWQVLIKDHHQGYIDWPTFEANRERMAANTQPRTHAKAQEQAGGAAREGGALLQGIARCGHCGRRLHTHYRGRTVTPGYHCPGKVVVEGRGVHCLNVGGGQIDEAVVAAFLEALEPVRLTATLEAAERLENDRDAALKQWRLDVERAAFAVNRAERRYCAVDPDNRLVARRLEQEWEEALRALEAAKAELARREEQRPRVLSATEREKLLALGADLASVWYAPTTTPRDRKELLRTLLDEVTLHVDRDEAAALLVLRWKGDATSRLTVALPRSRPATVRTDEDTLALLRRLAPHYPDAVIAGVLNRQGRRTAYGHRFDANRVGYLRKHWKIPACKAKPPAADGDIVTVRQAAAALGVAPSTLHRHVNDGLIPGEQVTPGAPWRIRLTAELKARFLATPGEGFEPIRDAMENLGLSRQVVLQRVKRGELEAVHVVRGQRKGLWIKTIDQNPSLFEQIP

SEQ ID NO: 11262 - protein, 741 aa, Unknown
  Description of Unknown: Integrase C5 sequence
  Coil,PS51736,IPR006119,PTHR30461,PS51737, G3DSA:1.10.10.2600,IPR011109,PF07508,PF13408,SSF53041, PF00239,SM00857,G3DSA:3.40.50.1390,cd00338,IPR038109, IPR036162,IPR025827
MTEHSKIAAGHQARLAVVYLRQSSASQVENNRESTERQYGLAERARELGWPDERVLVIDEDLGLSGAGSVMRAGFARLTSEVALARVGIVLGLEVSRLARNNADWHRLIELAGLTDTLIGDADGIYHPALFNDRLLLGLKGAMSEAELHVLRARLDGGIRNKAARGELRRGLPIGFIWGDEDGEILIHPDEAVAHAIRTVFARFAELGSARRVWLWFREQGMKFPLWLNARTELRWGEASYHAIHSVLANPVYAGAYVYGKNRRETVLDETGARRKRMRKLPMEDWQVLIKDHHQGYLDWPTFEANRERMAANTQPRTHAKAQEQAGGAAREGGALLQGIARCGHCGRRLHTHYRGRTVTPGYHCPGKVVVEGRGVHCLNVGGGQIDEAVVAAFLEALEPVCLTATLEAAERLENDREAALKQWRLDVERAVFVVNRAERRYCAVDPDNRLVARRLEQEWEEALRALEAAKAELARREEQRPRVLSATEREKLLALGADLASVWHAPTTTPRDRKELLRTLLEEVTLHIDRGEAAARLVLRWKGDATSRLTVALPRSRPATVRTDEDTLALLRRLAPHYPDAVIAGVLNRQGRRTAYGHRFDANRVGYLRNHWKIPVCKAKPPAANGDIVTVRQAAASLGVAPSTLHRHINDGLIQGEQITPGAPWRIRLTPELKARFLTTPGHGFEPIRDAMDTLGLSRQSLLQRIKRGELDAVHIVRGQRKGLWIKTIDHDPTLFEHTS

SEQ ID NO: 11263 - protein, 741 aa, Unknown
  Description of Unknown: Integrase C6 sequence
  Coil,PS51736,IPR006119,PTHR30461,PS51737, IPR011109,PF07508,PF13408,SSF53041,PF00239, SM00857,G3DSA:3.40.50.1390,cd00338,IPR036162,IPR025827
MTEHSKIAAGHQARLAVVYLRQSSASQVENNRESTERQYALSGRARELGWPDERVLVIDEDLGLSGSGSVMRAGFARLTSEVALARVGIVLGLEVSRLARNNADWHRLIELAGLTDTLIGDADGIYHPALFNDRLLLGLKGAMSEAELHVLRARLNGGIRNKAARGELRRGLPIGFVWGEADGEILIHPDEAVAHAIRTVFARFAELGSARRVWLWFREQAMKFPLWLNARTELRWGEASYHAIHSVLANPVYAGAYVYGKYRRETVLDETGARCKRIRKLPMEDWQVLIKDHHQGYIDWPTFEANRERMAANTQPRTHAKAQEQAGGAAREGGALLQGIARCGHCGRRLHTHYRGRTVTPGYHCPGKVVVEGRGVHCLNVGGGQIDEAVVAAFLEALEPVRLTATLEAAERLENDREAALKHWRLDVERAAFAVNRAERRYCAVDPDNRLVARRLEQEWEEALRALEAAKAELARREEQRPRVLSATERETLLALGADLASVWYAPTTTPRDRKELLRTLLDEVTLHVDRDEAAALLVLRWKGNATSRLTVALPRSRPATVRTDEDTLALLRRLAPHYPDAVIAGVLNRQNRRTAYGHRFDANRVGYLRKHWKIPACKAKPPAADGDIVTVRQAAAALGVAPSTLHRHVNDGLIPGEQVTPGAPWRIRLTAELKARFLATPGEGFEPIRDAMENLGLSRQVVLQRVKRGELESVHVVRGQRKGLWIKTIDKNPSLFEQIP

SEQ ID NO: 11264 - protein, 737 aa, Unknown
  Description of Unknown: Integrase C7 sequence
  Coil,PS51736,IPR006119,PTHR30461, IPR011109,PF07508,PF13408,SSF53041, PF00239,SM00857,G3DSA:3.40.50.1390,cd00338, IPR036162,IPR025827
MILSPKIEARHQRLQAVVYIRQSTPKQVQSNQESTRRQYQLAERARQMGWPASQIRVIDEDLGLSGASSRQRTGFQKLVAAIGLGEVGIILVTEVSRLSRCNSDWHRVIELCGVFRTLIADEDGVYDARDPNDLLLLGVKGTLFAAELHILRGRMRGNLLNKARRGELAQRLPVGFRRRHDGVAVQDPDDAVRLAIATVFERFAVLRNARAVQRHFLENQLLLPRCAQTGATAGSISWARPTYQMILQILTNPAYAGVFVYGRRKWEVVPGEPPTTVNRRVALAEWDIVVPDVYPACLTYDVYQANRRALRGNLYNFARKGDGAPREGLALLAGLVVCGRCGRRMAVSYGSAYHSYHCRRAQAEYGEPQCQSCPTGALDALVTSAFLEAVAPVSLEATLAALETLEGERAATDRQWQFRLERARYEVVLAQRQYDAVDPDNRLVARELERRWNAALSTLETLESDYALMRRTDLLPLNAAEREEIRRVAADLPGLWQAETTTAVDRKRLLRLAIAAVTVTADRTTRRVDVVVLWTGGATSTHTASLAPGCLHATTDATVIARIRELSRDRPDHAVAQALNAAGMRTQTGKEWTYERVQSMRKRYRIATGCPIQTGSPDPRADGRVSAKAAAQRLGVSRSLVHLWIQHGIIPCDQRCSCSKLWVRLTEADVTRLDGSADVSGLPTLTEVAQATKLQREAVWARVRQGDYVAFRTPRGQGQWEWRLKIAPQSSQSGLSR

SEQ ID NO: 11265 - protein, 713 aa, Unknown
  Description of Unknown: Integrase C8 sequence
  PS51736,IPR006119,PTHR30461,PS51737,IPR011109, PF07508,PF13408,SSF53041,PF00239,SM00857, G3DSA:3.40.50.1390,cd00338,IPR036162,IPR025827
MTPPTNPGFGLSDKIQWPHLDRLAVVYVRQSTLQQVSDHQESTRLQYGLVTRAEALGWPPERILTIDEDLGKSGSSAAGRSGFQRLVSEVGLNHVGLILGVEMSRLARSCKDWHQLLEICALFGTLIADLDGIYDPSQYNDRLLLGLKGTMSEAELHLLKQRMMQGKRTKAQRGELGFNVPIGYICRPSGEVQFDPDEQVRQVVRLIFRKFEELGTLNATLRYLVSHDIQVGVRVLYGLDKGELQWRRPNRPTLQNLLKNPAYAGAYAYGRKQVDARRKQAGRPHTGCVVKPPEEWLVLIQDHHPAYISWEQYQRNGAQLKANRNRADELGHAREGVGLLSGLLVCGRCGCRLQVQYHRAGGYHRYVCNRAMSDYGGQFCQHVSGTCLDEYVTGQVLRALEPAALDLSLAAAAHLEQDRAELDILWQQRLERAQFEADRAQRHYQFVEPENRLVARQLAQAWEAALQAQHTLRDDYQRFCHDQPKGLSPDEKQQIQQLADSLPLLWAAPTTTMAQRKDVIRQMIDGILMTVVGDTEQVQVTIKWAGGDSSQAQITRPVAKWTQLSDYPQLCQRLEQLTQANLTTRDIIDCLHQDGFRPPKRRQTFNPEMVQTLIRKLGLRSHAATPAKAPLPPPEWWLPDLAAKLDMPTMTLYNWVQRGWVKARQPAEPPKHWIIWADEAELERLRTHRQCPTREILRQRWQGETPSIACPPD

SEQ ID NO: 11266 - protein, 705 aa, Unknown
  Description of Unknown: Integrase C9 sequence
  Coil,PS51736,SSF46955,IPR006119,PTHR30461,IPR009061,PS51737, IPR011109,PF07508,PF13408,SSF53041,PF00239,SM00857,G3DSA:3. 40.50.1390,cd00338,IPR036162,IPR025827
MNVHLKVQPHHLERGAYLYIRQSSMRQVVENVESARRQYALRGRAVALGWRDEQIIVIDNDQGESGASAAWREGFQRLVSDVGMGHAGIVMGLEVSRLARNNADWQRLLEICALADTLILDEDGVYDPASFNDRLLLGLKGTMSEAELHVIKARLRGGILNKVRRGEFRCLLPTGLVYDHFGNVTLDPDMQVRETIIHFFEMFSRLGSASQTVKVFRNEGLLFPSRLHNGGTLFRPLTASTAMRVLNNPRYAGAYTYGRRQFRRTIDGKKTLRARDIDDWPACIPDAHPGYISWERHQENLKILKANGRGFEAARASIPREGPALLQGRAVCGQCGSHLRVRYAARRGRQEAWYICNRARIYRGEPMCQSIAGPPVDEAIGMLIAEQMTPAAVELALEVRKEIQARHEEADRLRCRAIERAQTEAELAQRRFMLVDPSNRLVADTLEGEWNEKLRTLASAREERERGREHDQFILDKAVHERLVAMTADFNQLWKDPDTPSRERKRLLAHIIEDVTLLKLPAEGTTKLHVRFKGGKIQTLTTMNPKSSPQQIKTKPSILELVDRLLDDYIYPEIAEILNEQGHRPGGTARRGCQEARFTPLKVAYLIHEYKLRSRYDRLRQRGMLTRQEAAAHLNISEQTVARWAKFGLITRHAYNGHYSLYEIADGDLPQKQCSRWNPLEDRAAAYRQMQTEPRTSTGEERGVV

SEQ ID NO: 11267 - protein, 701 aa, Unknown
  Description of Unknown: Integrase C10 sequence
  Coil,PS51736,IPR006119,PTHR30461,PS51737, IPR011109,PF07508,PF13408,SSF53041,PF00239, SM00857,G3DSA:3.40.50.1390,cd00338,IPR036162,IPR025827
MLAVPGNSDERLTAVRRSKFAYVYVRQSSINQVRHHQESTELQYSLVDRAVRLGWPPDRVVVIDEDLGKSGNGQVERGGFQRLIAEIGLGNAGLVVSLDASRLARNNRDWHQLLELCSLFGVIIADGERLYDPCAYHDRLLLGLSGIMSEAELHQIRIRLHQGERQKAARGELRIPLPGGLAYNRSGQIVLNPDEEVQARLRLVFDKFRELGTARRVMRYLRTHDLRIPVRPLRGPGPHELVWRDATIAHVHYILHNPAYAGAYVYGRRRINAVRQGPGSHRATSKVAIDDWEVCIKDAHPGYIDWEEFMVNQRRLADNTNRYEAGHRGAPRKGIALLQGLAVCGQCGRRMTVRYSGPDSACPVYCCLADRNQTGSSLCQEVRAPAVDELVAQTLLKALEPDQIAIAIAALDEIAEETRSLEKQWTLRRERARYDAERARRQYDTVEPENRLVARTLEKAWEDKLRLVDEIEQEYRRWRDREPLVLQTQDHAALQQLAENLPAIWHSETTQPEDRKRILRFIVQEVVLDQKKIRGQVAIRILWQTGATSQHQIQRRVQSYDRDYGELELVRERITQLNAAGDMDRQIAKKLNDEGIRSARGRPFTYENVWLLRHRWGIPTAKINGVAANPTRWPDGTYSVQGAAAAIGVTAQTIFDYLAQGLINGRQSTKGQPWQISLSSDQIDQLQRRLQRTRRSRKGAS

SEQ ID NO: 11268 - protein, 701 aa, Unknown
  Description of Unknown: Integrase C11 sequence
  Coil,PS51736,PTHR30461,IPR006119, PS51737,IPR011109,PF07508,PF13408, SSF53041,PF00239,SM00857,G3DSA:3.40.50.1390, cd00338,IPR036162,IPR025827
MLAIPSSPDERLTAVRRSKFAYVYVRQSSINQVRHHQESTELQYSLVDRAVRLGWPPDRVVVIDEDLGKSGNGQVERGGFQRLIAEIGLGNAGLVVSLDASRLARNNRDWHQLLELCSLFGVVIADGERLYDPCAYHDRLLLGLSGIMSEAELHQIRIRLHQGERQKAARGELRIPLPGGLAYNRSGQIVFNPDEEVQARLRLIFDKFRELQTARRVMRYLRTHDLRVPVRPLRGPAPHELLWRDATIAHVHHILHNPAYAGAYVYGRRRINAVRQGPGSHRATSKVAIDDWDICIKDAHPGYINWEEFMANQRRLADNTNLYEAGHRGAPRRGIALLQGLAVCGQCGRRMTVRYSGPDSACPVYCCLADRNQTGSSLCQEVRAPAVDELVAQTLLKALEPDQIAIAIAALDEIAEETRSLEKQWALRRERARYDAERARRQYDTVEPENRLVARTLEKAWEDKLRLIDEIEQEYRRWRDREPLVLQAQDHAALQELAENLPAIWHSETTQPEDRKRILRFIVQEVVLDQKKIRGQVAIRILWQTGATSDHQIQRRVQSYDRDYGELELVRERITQLNAAGDMDRKIAKILNDEGVRSARGKLFSYENIWLLRHRWGIPTAKINGVAANPPRWPDGTYSVQGAAAAIGVTAQTIFDYLAQGLVHGRQSTKGQPWQISLSSDQIDQLQRRLQRTRRSRKGAS

SEQ ID NO: 11269 - protein, 696 aa, Unknown
  Description of Unknown: Integrase C12 sequence
  Coil,PS51736,IPR006119,PTHR30461,PS51737, IPR011109,PF07508,PF13408,SSF53041,PF00239, SM00857,G3DSA:3.40.50.1390,cd00338,IPR036162,IPR025827
MNTKITSDHLGRAAVVYVRQSTMAQVMGNLESQRRQYDLAGAAATTGFASVTVIDDDLGRSGSGSVERPGFERLVALVCSGNVGAVYCIEASRLARNGRDWHHLIDLCALTGTLVIDPDGAFDPRLVNDRLLLGLKGTMAEYELSLIRQRGIAARDSKAGRGEFRFMLPPGFCWSEAGKIEIDPDEHVAETIRLVFDKFRELGSGRQVFLWLRSADIKMPVVLHNVEVRKLVWKAPAYHSVMQILHNPLYAGAYAFGRRAQRTLIIDGRARKANGLRKPRDEWSVLLRDNHQGYITWREYEENQKLLTENAHMKRNCDRKSARGGRALLTGLMRCGRCGRMMRVFYGSAKGNAHRYQCRGDDARVGLGLCIGIGGVRVDRAVATQILEAVSDRAVEAAIFASDQVERSARDVIAAIERDLEGARYEASLAGRRYELVDPAKRHVARELEARWNDALERVSVLERKIEELSALSAARPAIDRGRLLQLAHDLPTAWNAPSTDTRTKQRLIHILVQEIICDLDDTTNEAVLLIHWTGGRHTEVRVARVKTGRYPSDMAPPAVEALRKLGGHWPDRELAVSLNRMLCKTGDGEGWTAVRVRDMRERLGIPEYDPTKAGSPVISLMKAAERLGICIGSAKSLVKKGILPATQILPGSQWMVPIEALTSEAVLIGVQGVVGRRPQIYEYYQYDKVVRLPGL

SEQ ID NO: 11270 - protein, 694 aa, Unknown
  Description of Unknown: Integrase C13 sequence
  Coil,PS51736,IPR006119,PTHR30461, PS51737,IPR011109,PF07508,PF13408, SSF53041,PF00239,SM00857,G3DSA:3.40.50.1390, cd00338,IPR036162,IPR025827
MSTDIAMKVDADHLRRDAFLYVRQSSLRQVFENTESTKRQYALRDRAVALGWPIERVHVIDSDLGLSGAQSQDRDGFQHLVSEVAMGHAGIVLGLEVSRLARNNADWHRLLELAALSRTLIMDEDGVYDPAYFNDRMLLGLKGTMSEAELHILKSRLQGGILNKARRGELEMPLPIGLVYTPDARVVLDPDRQIHETVRLLFDTFRETGSACAVVRRLRGEKILFPRRIRRGIGKGDVLWNEIDHSRVLQILHNPRYAGAFAYGRTRTAYNAKLKPVQLRVARSDWQVLIPDAHEGYISWAEYERNQAALEQNATGFSPGLRGRMPRQGNGLLQGRLLCGRCGARMRVHYEPFEGRLRPYYVCNEAVVRHAGKHCQWVRGAPVDEAVSALLLEVMAPAAIDVALAVQQEITQRVEQATALRGAQLQRARYEAELARRRYLKVDPDNRLVADALEADWNARLRDLDALQREHERQNEADHSLLDEPAQQRIRALTADFPRIWNDERTDPIERKRMLGLLIEDVTLLVDDEVNIHIRWRGGRTQSLSVARPRPMSVIRKTPAQVVALINELLETANDRQIAARLNDLGHRNWRGEPFTLKKVMLVRRTYGLKSRYERLRESGMLTGEEVAQQLGVCASTVHQLGRKGILKRHRYATNHRYLYEPPGNVRLEKGAGSRYGGRQPRLIVAQRLQQGAS

SEQ ID NO: 11271 - protein, 693 aa, Unknown
  Description of Unknown: Integrase C14 sequence
  PS51736,IPR006119,PTHR30461,PS51737,IPR011109, PF07508,PF13408,SSF53041,PF00239,SM00857, G3DSA:3.40.50.1390,cd00338,IPR036162,IPR025827
MSTDRYQKVTADHLRRDAFLYVRQSSLRQVFENTESTKRQYALRERAVSLGWPIERVHVIDSDLGLSGASAEHRDGFQQLVSEVAIGHAGIVLGLEVSRLARNNADWHRLIELAALTHTLILDEDGVYDPAYFNDRLLLGLKGTMSEAELHVLNARLQGGMRNKARRGELELPLPIGLAYHPNGSVVLDPDQQIHASLRLLFDTYRQTHSASMVVRRFRREGWVFPRRIRRGIGKGDVQWGGLNTSRVLQILHNPRYAGAFVYGRTRTGRKADLTSTQFKVAQSDWQVLIRSAHVGYIDWDEFERDQVTLRQSANGFGSLARGTVPREGDGLLQGRVICGLCGNRMRVRYQKVSGRLEPYYVCHDVAAHDAGKPCQSVRGRAIDDAISALLLQTVGPAAIEVALAVEDEIAERIEQANSMRLKQLERARYEAELARRRYMNVDSANRMVADTLEADWNDRLRRLDVLQQEHERQRRSDQDLLGDEARARIRALADDFAVVWNDRRIESVERKRMLRLLIEDVTLVKSEKVSIHVRFRGGRTISLAVDKPRSMALVRKTQPAVVTVIDGLLETCTDQQVATQLNELGYTNWQHQTFTARKVALVRTTYGLPSRYERLRARGLLTGAELATQLEVSQTTIHQWGRQGLLRRHVYGHDHRCLYEPPGNVLFVRGTGGRKATQPTFIAAPTTEQGAM

SEQ ID NO: 11272 - protein, 692 aa, Unknown
  Description of Unknown: Integrase C15 sequence
  PS51736,IPR006119,PTHR30461,PS51737, IPR011109,PF07508,PF13408,SSF53041, PF00239,SM00857,G3DSA:3.40.50.1390,cd00338, IPR036162,IPR025827
MPDLKVTADHLRRDAYLYIRQSTLRQVAENGESTQRQYGLRDRAIAAGWPTERIHVIDRDLGKSGSSAVARDGFQELVSEVALAKAGVVMGLEVSRLARNSADWHRLLELCALTSTLILDEDGIYDPESFNDRLLLGLKGTMSEAELHFLKARMRGGQLNKASRGDLKIGPPVGLVYLPDGTLALDPDAEVQAALRMVFTTFERLGSATRTVKFFLDEGILFPRRLRKGLHKGELMWAPPRHARILQVLHNPRYAGAFVYGRTRGRPRPGGGVSQIKVDMADWRFVMPDLHPGYIDWERFKANQERLATNAQAYGMQRRAGPVREGSALLQGRVLCGLCGGRMGVHYSQEHGQPVPTYICQETATRRGGKVCQSVPGKVVDPAVGALLVELMTPMTLEVTLAVQRELEARAAEMDTLRRQHIERTRHDAELARRRYMKVDPDNRLVADTLEAEWNEKLRLHTDVVEDYERRAPEEAAALDAETQQRVRDLAEQFPRIWSDARIDVRERKRILRLLVADVTLIKAETITANVRLSGGATRTLTLDRPLPIFQIRKSKPDLIAEVDRLLDRYCDREVADIFNERGLRTWDGKPFNLKKIAFIRRTYNLPGRRQRLRDCGMLTTQEVAEHFAIAETTVHQWGRQGLITKVCSDNLNRGLWDIPHDLEIIKGRPGRNAVPARRASITVPSTEQDSL

SEQ ID NO: 11273 - protein, 692 aa, Unknown
  Description of Unknown: Integrase C16 sequence
  Coil,PS51736,PTHR30461,IPR006119,PS51737, IPR011109,PF07508,SSF53041,PF00239,SM00857, G3DSA:3.40.50.1390,cd00338,IPR036162
MTNVDRLPADLLKRKAVVYVRQSTQAQVQLNVESQRRQYELVQEAKRRGFRDVEVIDDDLGRSASGTVARPGFDRLVALLCAGDVGAVLCLDASRRARNGRDWHHLLELCGLVEARVIDLDGVYDPCRANDRLLLGMKGSISEFELNVLRTRMLDAKREKAQRGELRISVPVGYVWHRDVGLGFDPDVRLQEVIRLIFTRFRQLGSARQVLLSMRAEQVHFPRPSDGRTLTHFDWTPIRYRNVISVLKNPFYAGVYAYGKSGKQMTIVEGRARKSYKHRKPFEAWDVMLREHHDGYIDWAEFERNQEKLAANAYGKAGDVKSGRGGRALLAGLLACARCGRRLSVAYTGRIPQAVYRCNRFDMPPRCMTFGGSRIDAAIGEELLRVVEPLAIEAAQQAEQMHMDTLNEQRRIMELELQQARYEATLAERRYAACDPENRLIAAQLEKNWEVALRRVQACQVRLETAGAPEGQAPMPDFTKLAEDLRAAWSAPGVTMRTRQQLVRALIVDIVADVDEPARAVTLTIHWQGGQHSELRIRKPKTGEHGCSTSDEALAVIRGMVGRWSDQDIAASLNRMGIRTGQGMTWTAKRVSAMRQVRDIHAYKSAQKDGEWLTMFEAAKRLGVTSHVIRRLIKERVLPAEQVMPDAPWQIRASDLQSEAVTAALARKHRPCRNDAEGQIPMFIEVSEGGAQ

SEQ ID NO: 11274 - protein, 690 aa, Unknown
  Description of Unknown: Integrase C17 sequence
  Coil,PS51736,IPR006119,PTHR30461, PS51737,IPR011109,PF07508,PF13408, SSF53041,PF00239,SM00857,G3DSA:3.40.50.1390, cd00338,IPR036162,IPR025827
MNTKITPQHQSKPAYIYIRQSTLAQVRHHQESTERQYALRDKALALGWPQTSIRILDRDLGQSGAQMTGREDFKTLVADVSMGHVGAVFALEVSRLARSNLDWHRLLELCALTHTLVIDADGCYDPGDFNDGLLLGLKGTMAQAELHFLRGRLQGGKLNKAQKGELRFPLPVGLCYDDEGHIVLDPDDEVRGAVQLVFRLFRETGSAYAVVKRFAEDGLRFPKRAYGGAWAGRLIWGRLSHERVIGLIKNPSYAGIYVFGRYQYRQRITPQGEVHKRVQPVPKADWRVHLPDHHEGYISPEEFERNQARLAGNRTNGEGTVLSGPAREGLALLQGMLICGCCGRALTVRYQGNGGIYPMYLCNAQRRQGLATRDCMSVRSDLLDNAIGEAMLAALRPAELELAVTALNELEQRDQAIMRQWHMRIERAEYEVALAERRYQECDPANRLVTGTLERRWNDAMLRLAAIKTEAAQFQSQKARVATPEQKAQILALARNLPRLWRAPATPAKDRKRMLRLLIRDITVEKLPATRQVVLHVRWQGGTCTDTTVTLPKPVADAMRYPTATVEHVRKLSQHLSDPQIAAHLNQEGLRSSTGKSFTLSMVKWIRFRYGIAATNFMRPDELTVQQLAHRLGISPHVVYYWIERQVVHARKLDGRGPWWITLDPVKEQQLRDWVRTSGHLRGQHSHTQL

SEQ ID NO: 11275 - protein, 690 aa, Unknown
  Description of Unknown: Integrase C18 sequence
  PS51737,PF12728,G3DSA:3.40.50.1390,G3DSA:1.10.1660.10,Coil, PS51736,IPR006119,SM00857,IPR025827,IPR011109, PF07508,PF13408,SSF53041,PTHR30461,mobidb-lite, IPR041657,PF00239,cd00338,IPR036162
MSKITHEHLGRQAIVYIRQSTADQVANNLESQRRQYGLADRARQLGWSDVAVIDDDLGRSGGGVARPGFEKLLAAICEGRVGAVVSIEASRLARNGRDWHTLLEFCGLVGTLILDEDGIYDARHPNDRLLLGMKGTMSEMELSVLRQRSLEALKQKARRGELFMTVAIGYVRIGNNRIEKDPDRRIVEAIALIFAKFAEMQSVRQVHLWFRHERIPLPAVIYGAEGRLIEWKLPVYNTILHILTNPIYAGAYAFGRTGSRVSIDAGRKKVVRGFKKERKDWEVLIPNHHEGYLSWAAYERNLGLIADNANGKNPMSRGALRRGEALLAGLLRCGHCGRKLHVAYSGTDGNTGRYHCRGGFLNHGGDRCISFGGMRVDRDIGAEVIVRLQPLGIEAALAAQTVRSRASEDKRRQVELALEQARYEVGRARRQYDAVDPDNRLVAAELETRWNERLTVVRDLETDLEELTTSSATEPMPVDHERLMLLGADLQRAWTSAGVTSEAKKRIVRTLIDEIVVRIEDSKLDLVIRWHGGAHSALKVKKNRSGQHRWSAEGETIDLVRVLARQMPDRAIASVLNRAGKTTGRGNGWTQSRVCSLRNHNEIPAYREGERQERGEVTLDEAATALSVSPSTVRRLIKDGQLSANQLCKGAPWIIRALDLDRSDVKGAATARRLRRPPSSNPRQKTLELQ

SEQ ID NO: 11276 - protein, 690 aa, Unknown
  Description of Unknown: Integrase C19 sequence
  Coil,PS51736,IPR006119,PTHR30461,PS51737, IPR011109,PF07508,PF13408,SSF53041,PF00239, SM00857,G3DSA:3.40.50.1390,cd00338,IPR036162,IPR025827
MSSTDLIPAALLARKAVVYVRQSTQSQVMTNLESQRRQYDLVDIARQRGFGDIEVIDDDLGRSASGTVARPGFDRLVALLCAGKVGAVLCFDASRLARNGRDWHHLLELCGLVEARVIDHDGVYNPCRPNDRLLLGMKGSISEFELGVLRARMLDAVRSKARRGELRLSVPFGYIWHREAGLGLDPDLRLQEVIRSIFTRFHELGSARQVLLSMTKDQVHFPRPSDEGRMTSFVWTPVRYRNVIGILKNPFYAGVYVYGKSEKRTAIVDGRARRTYGHGKPAGMWEVMIRDHHEGYITWDEYERNQQQLALNNYGRSGGTKSGRGGKALLSGLLTCGRCGRRLSVAYTGNPQSRPVYRCDKPNLMMGLPRCITFGGPRVDAAVARELLRAVEPLAIEATFEAERMHRERQEDQRHIHDLELRQARYEASLAERRYAACDPDNRLIAAQLEKNWETALRRVRDLDVRKPADSPSTIEVDPDTFTNLADNLQAAWDSPDVTMRARQQLLRTLIADIVVDVEDAVREVVLTIHWKGGQHSELKVRKPQSGEHGCATTEDALAVMRSMAGRWSDEHIAASLNRMGMPTGQGKTWTAHRVASVRRVRAIHAYKSADKDGEWMTMTEAAAALGVTNHRIRHLIKTKVLSAEQVVPGAPYQIRASDLASATVQAAIARKARPCRIADAETLPMFTDT

SEQ ID NO: 11277 - protein, 690 aa, Unknown
  Description of Unknown: Integrase C20 sequence
  Coil,PS51736,IPR006119,PTHR30461, PS51737,IPR011109,PF07508,PF13408, SSF53041,PF00239,SM00857,G3DSA:3.40.50.1390, cd00338,IPR036162,IPR025827
MSSTDLIPAELLARKAVVYVRQSTQSQVMTNLESQRRQYDLVDIARQRGFGDIEVIDDDLGRSASGTVARPGFDRLVALLCAGKVGAVLCFDASRFARNGRDWHHLLELCGLVEARVIDHDGVYNPCRPNDRLLLGMKGSISEFELGVLRARMLDAVRSKARRGELRLSVPFGYIWHREAGLGLDPDLRLQEVIRSIFTRFHELGSARQVLLSMTKDQVHFPRPSDEGRMTSFVWTPVRYRNVIGILKNPFYAGVYVYGKSEKRTAIVDGRARRTYGHGKPAGTWEVMIRDHHEGYITWDEYERNQQQLALNNYGRSGGTKSGRGGKALLSGLLTCGRCGRRLSVAYTGNPQSRPVYRCDKPNLMMGLPRCMTFGGPRVDAAVARELLRAVEPLAIEATFEAERMHRERQEDQRHIHDLELRQARYEASLAERRYAACDPDNRLIAAQLEKNWETALCRVRDLEVRKPADSPSTIEVDPDTFTNLADNLQAARGSPDVTMRARQQLLRTLIADIVVDVDDAVREVVLTIHWKGGQHSELKVRKPQSGEHGCATTEDALAVMRSMAGRWSDEHIAASLNRMGMPTGQGKTWTAHRVASVRRVRAIHAYKSADKDGEWMTMTEAAAALGVTNHRIRHLIKTKVLSAEQVVPGAPYQIRASDLASATVQAAIARKARPCRIADAETLPMFTDT

SEQ ID NO: 11278 - protein, 689 aa, Unknown
  Description of Unknown: Integrase C21 sequence
  PS51736,IPR006119,PTHR30461,PS51737,mobidb-lite, IPR011109,IPR041657,PF12728,PF07508,PF13408, SSF53041,PF00239,SM00857,G3DSA:3.40.50.1390,cd00338, IPR036162,IPR025827
MKITSDHLARGAYIYIRQSTVDQLANNHESRRRQYGLADRARALGWTDVTVIDDDLGRSGSGVSRPGFEKLLAAICEGRVGAVFAIEVSRLARNGRDWHTLIEFCGLVGTVIVDEDGTYEPRHPNDRLLLGMKGTMSELELSLLRARSMEALKQKARRGELFFTVAVGYVKVGRDKIEMDPDLRVREAIGLVFTRFAEMQSIRQVFLSLRSDQIALPYINPRISGQQHVLWKPPVYTTVSNLLTNPVYAGAYAFGRTGSRTIIENGRKRIVRGRRKARSDWAVLLVDHHEGYLSWADFERNQRLITDNANGKGMMVRGPVRKGEALLAGLLRCGHCGRRLLVGYNGAKGDVGRYKCDATRSNPDGDSCISFGALRVDEAVGAEIVRLLQPLGVEAAIQAIAQREHQSGEKQRQIELALEQARYEAIRARRQYDTVDPENRLVAHELERRWNGALAAVSALEEELEALVRQRPAALSAEERQRLLQMGADLEAAWHHPAATAVTRKRIIRVVLREVVAHVEGDQIHLLLHWQGGDHTRLTVRKNRRGQTRWSVEPETVELIRACARLMPDKAIAGLLNRAGKRTGRSNGWSQSRVRGFRNTHGIAVYRDGEWAERGEVTLTEAARMLNLSPATVLRQIRAGIIPAQQYCKGAPWVIKRRNIEDSHLIEHAGPRLNGPSSSNPEQKTFVFQ

SEQ ID NO: 11279 - protein, 689 aa, Unknown
  Description of Unknown: Integrase C22 sequence
  Coil,PS51736,IPR006119,PTHR30461,PS51737, IPR011109,PF07508,PF13408,SSF53041,PF00239, SM00857,G3DSA:3.40.50.1390,cd00338,IPR036162,IPR025827
MTSTDLFPTALLARKAVVYVRQSTQSQVMTNLESQRRQYDLVDVARQRGFSDIEVIDDDLGRSASGTVARPGFDRLVALLCAGKVGAVLCLDASRLARNGRDWHHLLELCGLVEARVIDHDGVYNPCRPNDRLLLGMKGSISEFELGVLRARMLDAARSKARRGELRLSVPFGYIWHREAGLGLDPDLRLQEVIRSIFARFHELGSARQVLLSMTKDQIHFPRPSDEGRMTNFVWTPVRYRNVIGILKNPFYAGVYVYGKSEKRTAIVDGRARRSYGHGKPAGTWEVMIKDHHEGYISWDEYERNQQQLALNNYGRWGGTKSGRGGKALLSGLLTCGRCGRRLSVAYTGNPQSPVYRCYKQNLMMGLPRCMTFGGPKVDAAVARELLRAVEPLAIEATFEAERMNRERQEDQRHIHDLELQQARYEASLAERRYAACDPDNRLIAAQLEKNWETALRRVRDLEVRRPTESPSTIEVDPGTFANIADNLLAAWESPDVTMRVRQQLLRTLIADIVVDVDDAVRDVVLTIHWKGGQHSELKVRKPRTGEHGCATTDDALAVMRSMAGRWSDEHIAASLNRMGMPTGQGKTWTAHRVASVRRVRAIHAYKSADKDGDWLTMTEAAAALGVTNHRIRHLIKTKVLSAEQVVRGAPYQIRAADLDSATVKAAIARKGSPCRIADAETLPMFTDT

SEQ ID NO: 11280 - protein, 689 aa, Unknown
  Description of Unknown: Integrase C23 sequence
  PS51736,IPR006119,PTHR30461,PS51737, IPR011109,PF07508,PF13408,SSF53041, PF00239,SM00857,G3DSA:3.40.50.1390,cd00338, IPR036162,IPR025827
MKITAEHLARGAYVYVRQSTADQLVNNPESRRRQYGLAERARSLGWKEAIVIDEDLGRSGSGISRPGFEKLLAAICEGRVGAVLAIEASRLARNGRDWHTLIEFCGLVGTLIIDEDGIYEPRHPNDRLLLGMKGTMSELELSILRARSIEALKQKARRGELFLTVAIGYVKSGRNRIEKDPDLRIREAIDLVFRRFDELQSIRQVHLWLRSEGIMLPAVNYTRAADRAIVWKLPVYNTVHHILTNPIYAGAYAFGRTCSKVTIEAGRKRILRGIRRDRADWEVLLIDHHEGYLSWHDFERNQRLITDNATSKGLVPRGALRRGELLLGGLLRCGHCGRKLHVSYSGSNGNTGRYHCRGAQLNHGTDPCIGFGSLRVDQAVSAEVLQRLQPLGIEAAIKAIETTTVQAGEKRRHVELALEQARYEAAHARRQYDAVDPDNRLVAGELERRWNAALVAVRERQDELDALDRHKPEALGEEERRSLLRMGGDLELAWHHANATATTRKRIIRAVIREIVVAIEDDHIKMLVHWQGGDHTALSVRKNKAGHHRWGAPPDIEELIRALARQLPDRAIASLLNRLGKTTGRQNGWTQSRVCTFRNQHDIAVYKKDERSERGEYTLQETAAKLGLRPMTVLRMIRAGDLKAEQYCKGTPWIIRHEDIEQLDIQHHSGRSGHSPLSQSQDQQIQLFQ

SEQ ID NO: 11281 - protein, 687 aa, Unknown
  Description of Unknown: Integrase C24 sequence
  Coil,PS51736,IPR006119,PTHR30461,mobidb-lite, IPR011109,PF07508,PF13408,SSF53041,PF00239, SM00857,G3DSA:3.40.50.1390,cd00338,IPR036162,IPR025827
MMHEKIAPHHLERKAILYVRQSSAHQVLHNRESGALQYAMRDRLAALGWSHIETVDDDLGRSAAGGVTRAGFDRMVAEVCLGKVGAVAAREVSRFARNSRDWQQLIEMCRVVDTVLVDQEAVYAPRQGNDRLLLGLKGSLNEYELDLLRQRSLSARYEKARRGELVVTVPAGFVKAGDRIEKDPNRRIQEAIALVFDKVTELGSARQALLWFLEQGLDLPVRCANGDVIWRRPNYATIHRMIANPIYGGAYAYGKSRSVPGYDGRSGIRRKARDEWLALIPDAHEGYISWERAEEIRKMVSDNVPASRHHGAPKHGGALLAGLFRCKRCGRKLTVRYTGANHNIPRYSCWRGLLDNGEPRCIAFGGLRVDDAIEEALLGVVEPGAIAAAVEAERNMANQRDQVQDALMRDLEAARYVADRAFRQYDAADPENRLVTSELEARWNKALTGVGEIEAKIAKHRTVTPHPFPMSASQVTALAGNLRAVWTAPTTDARLKKRIVRTLINEVVADLDDGTSEIVLVIHWVGGVHTELRLPKRHRGQRNATPDDIVDAVKQLVLIANDDVIAGVLNRNGLTTGNGNRWTRERVTALRSYRKIPVFRPQIDGVEPWLNLGGAAKLLGISPKTLRLAAEAGDIKGAHPLPDGPWIFSRSKLATPQARQILDRVRKNPRHPAGSPPDQENLFLSMT

SEQ ID NO: 11282 - protein, 687 aa, Unknown
  Description of Unknown: Integrase C25 sequence
  PS51736,IPR006119,PTHR30461,PS51737, mobidb-lite,IPR011109,PF07508,PF13408, SSF53041,PF00239,SM00857,G3DSA:3.40.50.1390, cd00338,IPR036162,IPR025827
MMHEKIGAHHLERKAILYVRQSSAHQVLHNRESSALQYAMRDRLAALGWSHIETVDDDLGRSAAGGVARAGFDRMVAEVCLGKVGAVAAREVSRFARNSRDWQQLIEMCRVVDTVLIDQEAVYAPRQGNDRLLLGLKGSLNEYELDLLRQRSLSARYEKARRGELVVTVPIGFLKAGDRIEKDPDRRIQEAIALVFDKVAELGSARQALLWFLEQGLDLPVRYANGDVTWRRPNYATIHRMIANPIYGGAYAYGKSRSVRGYDGRSGICRKARDEWLALIPDAHEGYVSWERAEEIRKMVSDNVPTSRHHGAPKHGDALLAGLFRCKRCGRKLTVRYTGSNHNIPRYSCWRGLLDNGEPRCIAFGGLRVDDAIEEALLGVVGPGAIAAAVEADRNMASQRDQVQDALLRDLEAARYAADRAFRQYDAADPENRLVTSELEARWNKALARVGEIEAKIAKHRTVAPQPIPMSASQLVALAGNLRAVWKAPSTDARLKKRIVRTLIHEVVADLDDVASQIVLVIHWVGGVHTELRLPKRRRGQRNATPDDIVEAVRQLVLIANDDVIAGVLNRNGLTTGNGNRWTRERVTALRSYRRIPVFRPQIDGFEPWLNLGGAAKLLGVTPKTLRLAAEAGEIEGTHPLPEGPWIFSRSKLASPEARQILDRARQNPRHPIGSPPNQESLFSSIT

SEQ ID NO: 11283 - protein, 687 aa, Unknown
  Description of Unknown: Integrase C26 sequence
  PS51736,IPR006119,PTHR30461,PS51737,mobidb-lite, IPR011109,PF07508,PF13408,SSF53041,PF00239, SM00857,G3DSA:3.40.50.1390,cd00338,IPR036162,IPR025827
MMHEKIGAHHLERKAILYVRQSSAHQVLHNRESSALQYAMRDRLAALGWSHIETVDDDLGRSAAGGVARAGFDRMVAEVCLGKVGAVAAREVSRFARNSRDWQQLIEMCRVVDTVLIDQEAVYAPRQGNDRLLLGLKGSLNEYELDLLRQRSLSARYEKARRGELVVTVPIGFLKAGDRIEKDPDRRIQEAIALVFDKVAELGSARQALLWFLEQGLDLPVRYANGDVTWRRPNYATIHRMIANPIYGGAYAYGKSRSVRGYDGRSGICRKARDEWLALIPDAHEGYVSWERAEEIRKMVSDNVPTSRHHGAPKHGDALLAGLFRCKRCGRKLTVRYTGSNHNIPRYSCWRGLLDNGEPRCIAFGGPRVDDAIEEALLGVVGPGAIAAAVEADRNMASQRDQVQDALLRDLEAARYAADRAFRQYDAADPENRLVTSELEARWNKALARVGEIEAKIAKHRTVAPQPIPMSASQLVALAGNLRAVWKAPSTDARLKKRIVRTLIHEVVADLDDVASQIVLVIHWVGGVHTELRLPKRRRGQRNATPDDIVEAVRQLVLIANDDVIAGVLNRNGLTTGNGNRWTRERVTALRSYRRIPVFRPQIDGFEPWLNLGGAAKLLGVTPKTLRLAAEAGEIEGTHPLPEGPWIFSRSKLASPEARQILDRARQNPRHPIGSPPNQESLFSSIT

SEQ ID NO: 11284 - protein, 687 aa, Unknown
  Description of Unknown: Integrase C27 sequence
  Coil,PS51736,PTHR30461,IPR006119, mobidb-lite,IPR011109,PF07508,PF13408, SSF53041,PF00239,SM00857,G3DSA:3.40.50.1390, cd00338,IPR036162,IPR025827
MMHEKIGPHHLERKAILYVRQSSAHQVLHNRESSTLQYAMRDRLTALGWSRIETVDDDLGRSAAGGVTRAGFDRMVAEVCLGKVGAVAAREVSRFARNSRDWQQLIEMCRVVDTVLIDQEAVYAPRQGNDRLLLGLKGSLNEYELDLLRQRSLSARYEKARRGELVVTVPVGFLKVGDRIEKDPDRRIQDAIALVFNKVAELGSARQALLWFLEHGLDLPVRRADGDVIWRRPNYATIHRMIANPIYGGAYAYGKSRSVPGYGGRSGIRRKARDEWLALIPDAHEGYISWERAEEIRKMVSDNVPASRHHGAPKHGDALLAGLFRCKRCGRKLTVRYTGANHNIPRYSCWRGLLDNGEPRCIAFGGLRVDDAIEEAVLGVVEPGAIAAAIEAERRMASQRDQVQDALLRDLEAARYAADRAFRQYDAADPENRLVTSELEARWNTALARAGEIEAKIAKHRTVAPQPIPMSASQVAALAGNLRAVWTAPTTDARLKKRIVRTLINEVVADLDDGTSEIVLVIHWVGGVHTDLRLPKRRRGQRNATPDDIVDAVRQLVLIANDDVIAGVLNRNGLTTGNGNRWTRERVTALRSYRKIPVFRPRADGVEPWLNLGGAAKLLGITPKTLRLAAEAGQIEGAHPLPDGPWIFSRSKLATPQAHQILDRARQNPRHPTGSHPDQENLFPSTT

SEQ ID NO: 11285 - protein, 686 aa, Unknown
  Description of Unknown: Integrase C28 sequence
  Coil,PS51736,PTHR30461,IPR006119,PS51737, IPR011109,PF07508,PF13408,SSF53041,PF00239, SM00857,G3DSA:3.40.50.1390,cd00338,IPR036162,IPR025827
MSKITPDHLARQAYVYVRQSSPDQLLHNHESRRRQYGLADRARQLGWSEVMVIDDDLGRSGGGTARPGFERLLGAICEGRVGIVLALEASRLARNGRDWHTLLEFCGLVGCLLADEDGVYDVRFPNDRLVLGMKGTMSEMELAVLRQRSLEALRQKARRGELFFSVAVGYVKTRHDRIEMDPDARVREAIALVFRKFAEFQSIRQVHLWLRQEQIRLPATDPVADSPRTVWKLPVYNTVHHMLTNPVYGGAYAFGRTGSRVTVRDGRKRVVRGHRRTRDDWEVLIPEHHEGYISWTEFERNQQLIADNANSKGLMARGAVRRGDALLAGLLRCGHCGRRLHVSYSGTEGFCVRYNCRGAHINHGTERCISFGGLRVDAAVAAEALRFLAPLGLQAALQAIEAREANAGETRRQAELALSQARYEAELARRQYDAVDPDYRLVAAELERRWNDRLVEVHRLEEQLAALDSGQAAALTAEERARLMTLGADVEALWHHPGATAETRKRILRTIIVEIVTKVVGETIELVIHWQGGDHTRLSVAKSRTGQHRWGADAETGDLIRALARQQPDAGIAAILNRAGRRTGKGNTWTEARVRTFRNAHGIAVYRAGEQAERGELTLEQTAERLKVSKMTVLRLIGSGILQARQVCKGAPWAIPEAQLAGLEVRGVPSRRPVTQDPDQRTLDFQ

SEQ ID NO: 11286 - protein, 668 aa, Unknown
  Description of Unknown: Integrase C29 sequence
  PS00397,SSF53041,PTHR30461:SF3,IPR006118,SM00857,Coil,PF00239, PS51736,IPR036162,G3DSA:3.40.50.1390,PS51737,IPR011109,IPR006119 ,PTHR30461,cd00338
MRTKTLPRKTKTLRVAIYLRVSTSKQLDGYGLDVQDERCRAWVDYQLKGTPHTIVDVYCDGGVSGKLAHREDLDRLTADIEAGLIDVVVFAKLDRIGRTMRNIHRWVYDVTDHGVRIATADGRIDSDDQMFGIQLSLLAYMAEVEHALILERTMGGRIQKIAGGGWASGTPPYGYMLDEEGEPVINPAELEVILKAAEFLVDQRMSRGQAAAELNELQYRTRTGKLWEGNNLVLRLRLAVRGYVDFSFSGMNEDGEEITTSYRVELPPLFEDESRRKALEEALEDMKGNPRTSYSNHLLSGHLYSLCGSSRYGVSRADQGDFIYRCSNHATAAEGHTCKQIDGKETETVVWDEVEKLLTDPEAIKGVIDDWLGTIPDRADSYRARLKEIDDKLHRLRNTRRKKIAMLVASLDEDDEEDQKLIAELKEEIAGKEKELREEQERITEWLEEAEHKEERADNLRSIIDRVGVNMQGLTKADKKGVLELLRIRVDIVGDSVSGQKGGTKDPMLEWHREHGISIPLAVSDEQWARIESILAGGRKPKLEDRPCFEMLLEKLREKKGWHDYDHDERMGGKGWGFVYRLGRRWFTEGMYAAALEAMGPYEGVPAPDGYTLPPMKIYGVIDDSTEDVVHTSGDAVKAEAGGRTPSTKGIRATTSGFEFEIASTKAS

SEQ ID NO: 11287 - protein, 668 aa, Unknown
  Description of Unknown: Integrase C30 sequence
  SSF53041,PS00397,IPR036162,PTHR30461:SF3,IPR006118, Coil,SM00857,PS51736,PF00239,G3DSA:3.40.50.1390, PS51737,IPR011109,IPR038109,IPR006119,PTHR30461, cd00338,G3DSA:1.10.10.2600
MRTKTLPRQRKALRVAIYLRVSTSKQLDGYGLDVQDERCRAWIEYQLKGTPYTIVDVYTDGGVSGKLAHRDDLDRMTADIEAGLIDVVVFAKLDRIGRTMRNIHRWVYDATDVVADQATGRKVRIATADGRIDSDDQMFGIQLSLLAYMAEVEHALILERTMGGRIKKISGGGWASGTPPYGYMLDDEGEPVVNPTEKELVEKAAELLIDKRMSRGEAAKELNELKYRTRTGKLWEGNNLVLRLRLAVRGYVDFSFSGVNEDGEEITTSYQVELPELLPEGRRKALETALEDMKGTPRTTYSNHLLSGHLISLCGSSRYGAARAQQGDSVYRCSNQATTAEGHTCKQIPAEPTEKFVWDEVAKLLTDPDAIKGLIDDWLGGVPERAESYRARLVEIDDKLNRLRNTRRKKIAALVASLDEDDENDQELINEIKEQIAEKEKELREEQERITEWLEESEQKEAKADTMRAVIDRVGSSLHDLGTAEKKGILELLRVRVQIVGDSVSGQAGGTKDPMLEWHRKNKITIPLAVSDEQWARVEGILAGGRKPKPEDRACFEMLLEKLRNAAGWHDYDRDERMGGKGWGFFYRLARRWFSDGMYAEALEGMGPYVGAAAPSGYTLPPMKIYGAIDDSPEDVVKTEAEERTASTKGIRGTTSGFEFEIASSKTA

SEQ ID NO: 11288 - protein, 661 aa, Unknown
  Description of Unknown: Integrase C31 sequence
  PS00397,SSF53041,PTHR30461:SF3,IPR036162,SM00857, Coil,PF00239,IPR006118,PS51736,IPR011109, PS51737,G3DSA:3.40.50.1390,cd06460,IPR006119,PTHR30461, cd00338
MSKKALPRQRKVLRVAIYLRVSTSKQLDGYGLDVQDERCRAWVDYQLKNIPHTIVDVYCDGGVSGKLAHREDLDRLTADIEADLIDVVVFAKLDRIGRTMRNIHRWVYDVTDHGVRVATADGRIDSQDDMFGIQLSLLAYMAEVEHALILERTMGGRVKKISGGGWASGTPPYGYMLDEDGEPVVNPAELKQIELFANLAIDRKLSRGEAAKAMNEAGNRTRTGKLWEGNNLILRMRLAIRGYVDFNFSGMNEDGEEVTTSYRLELPPLFENEARRKALEAVLEDMKGAPRTTYSNHLLSGHLMSQCGHSRYGVARSEHNDVIYRCSNTATLDEGHTCKQIPGKETEGYVWGEVAKLLANPDEIMGLVDEWLGSVPDRAESYRARLQEIDSKLNKLQTTKRKKIALLVAALDGDDDEDQALVEELKEEIASKIKELREEQERITEWLEEAEHKEEKAQGMRSVIDRIGANVLDLSTPDKKRVLELLQVRVDIVGESKSGRAGGSKDPMQEWHREKGTDIPLGVSDEQWGRVEGILAGGRKPKPEDRACFEMLLEKLRENKGWHDYDRDDRMGGKGWQFFYRLARRWFMDGMYAAALEALAPYVGVATPVGYTLPPMKIYGAIDDSPEDVVKTEVGGRTASTKGIRATASGFEFEIGSAKTA

SEQ ID NO: 11289 - protein, 621 aa, Unknown
  Description of Unknown: Integrase C32 sequence
  PF07508,SSF53041,IPR036162,SM00857,PF00239, IPR011109,PS51737,G3DSA:3.40.50.1390,IPR038109,IPR006119, PTHR30461,cd00338,G3DSA:1.10.10.2600
MTPHIEEIPHILAAGYDRQSDARASGSVASPITQRTANYDCAHRLKAEAEAKGGHFKWIGHYSERPGTSAFGKDERPEFDRLLADCRAGKVNTVIVMYVSRFSRLDPMEAFAIVSELFALGVTIISTTEGTFRRGNIMDIFHILMRLDASHKESANKSVAVRTAHTLARTLGGFVGKTPFGFKLVARTVTYMENGKPRPVVIQVLQHNDDEFEETGWSEMAIVMHIWRTVRENKDKLYDPKTDKFHPGSINHICDWLDVENVPTRGRMVGKLKADSKWDVSTVRRILMDPLIAGMDRIPIYGKKKDGTPGKKVIGYEIKRDPETMEPVELECGPMVPRNEWYEVQAWLGERGRGKGLYNGESLLTQMDILWCSCDWYMVSSGNSDGADYRKPPYRCKRKKSQRTAPNHLGDNTIGKERLDEYVARRLFALMATAEGDEEIADVMDEATKRFAATQQAPEIGEERKALIRTKDATTRALNALYDQFDKIVEEGGFPNEIAEQRYKQTEKTLSDRLSATNAALSALDVAAAPALPIEQWTAAYDEEGAPLAEPLPGADPIGKHSWWGRASMAERRHLVKLFVHRVTVGPNFGKGSAITPPEERVTIQWVHTQKYRKAMAEAVA

SEQ ID NO: 11290 - protein, 614 aa, Unknown
  Description of Unknown: Integrase C33 sequence
  Coil,IPR006119,PTHR30461,IPR025378, G3DSA:1.10.10.2600,PS51737,IPR011109,cd03770, PF07508,PF13408,SSF53041,PF00239, SM00857,G3DSA:3.40.50.1390,PF14287,IPR038109,IPR036162,IPR025827
MKIKDKRFKITALYERLSKDDEVQGESNSIVNQKRMLTQYAEQHGYENIEHYTDDGWTGTNFDRPDWKRMLADIEAGKVGTVIVKDMSRIGRDYLQVGFYTEVMFREKGVHFIAISNGVDSERRESAEFAPFLNIMNEWYVRDTSRKITTVLKARGMSGKAHTTNRCCYGYKKSADNPDKWVIDEEAAEVVRRIFNMCLNGKGPYQIARELAEDKVERPEYYLGIRGRGVNIKSFDMEHPYMWRGGTVKTILTRMEYTGCTVNFRTKKESYKDKRPTKVDSSEWIIFEDTQEPIIDKHTWETVQKLVDTPRRKGVFDENNPLTGKVFCADCGAKMYHHRNAQGIWKKNYFKAGEMIYHAPEDRYDCSNNIRGRQRYEKLCCSHSVTTKALETLVLETIKRTCDYAVENEAEFREKVCSISEEQQGELSVRLEKRLAKKQKRVSEVNRLIKKLYEDNISGKLNDKRFNAMLSDYESELETLEADIDRDNAELEGMSAKKTDVDVFMELVKKHTTFEELTPAMLNEFVDKIMVYKAVGSGANRTQDVDIYLNYIGRFVVPEVVVELTEEEKLAEAKRQEKLEKKRASNRKYMARKREEARKAWAEIEAEKAKAVGQ

SEQ ID NO: 11291 - protein, 601 aa, Unknown
  Description of Unknown: Integrase C34 sequence
  PF07508,SSF53041,IPR025827,PTHR30461:SF3,SM00857, PF00239,Coil,PS51736,IPR036162,IPR011109, PS51737,G3DSA:3.40.50.1390,IPR038109,IPR006119,PTHR30461, cd00338,G3DSA:1.10.10.2600,PF13408
MKTNNVEIIKADSLVRRRGVKVERHLKRVAAYCRVSSDSEDQKNSYESQVRHYKDYISQRSDWELAGIYADEGISGTQVGKRQDFQRLINDCVNGEIDYIVTKAIARFARNTLDTLKYVRMLKDMQIGVYFEEENIDTLTMDGELLLTILSSVAQQEVENTSAHVKKGLKMKMQRGELIGFQGCLGYDYDVETKQLSINKKEAKIVRYIFERYLEGIGGKVIARELDELGYKSPRGLDHWNDTTVLGIIKNEKYKGDILMGKTFTVDPISKRRLSNFGEEDKYYIKDNHEPIISKEDFEKAQEIRLRRAGNKKTVANVNGKRERYSKMYAFSSMLECGFCGSILSRRSWHCRSDYRKVVWHCVTSIKKGKKFCKHSKGLEELAIEGAFMEAYRQLYHSNENLMTDLLETIESELNDNSLNKELKRITNKLRTLLKKEENLVNLRLEGKISDTIYNEKYNEISSEKEFLAEEKVNIETTLKSEIDVKKRLTEFKHLLSSQKMLTEFDRAVFESIVEKIIVGGVNSDGEIDPAMLTIIFKTGETQNKDGKQFKSKRKNAKLETDKLCPQNSDEDKKLYSQGTDYTRGVCCSACKSLETFERKG

SEQ ID NO: 11292 - protein, 590 aa, Unknown
  Description of Unknown: Integrase C35 sequence
  PF07508,SSF53041,PTHR30461:SF3,IPR036162,SM00857, Coil,PF00239,IPR025827,PS51737,IPR011109, G3DSA:3.40.50.1390,IPR038109,IPR006119,PTHR30461,cd00338, G3DSA:1.10.10.2600,PF13408
MRKPNTKKPTRFASYLRCSTDDQSFGDFTTIDTQRAINAEHIEQLGGELVAEYNDEGRTGTNLSRKEWKRMLADAGTKRFDAVVVTYMSRLARGQAYYVAEYLLGESKVSVEMVKEKFSPDMIGQMHKQMTIMMDGNYPLQVSRWTKTKQAEMVRMGYHTGGNCPYGYQAETVPGMQATVLASGKVKPAPKRLIPHPDEAHHVRRAFEIFAHGRSISDAQKHLRAVDPTRRWPSTLVRYLLTNEKYRGVQRFGEQVNFAAHEAIISEQLWDATQLLLSAPERQIDPVAEGRVRGREKDPVAYWLRGLVFCSCGSRMTPAEATGRGGRVPYYECIQAAKNGKACETKRVNANSLHAAVIGEIVQCSMHPSRLIRMWEDAAKKIPQPTEAREELGRVRRNLRETQKKSARVVEAIKQAGALPALVSEVRQLEELAASQTAKILELENSQVCRTMSRPDAAKIAAVWTDLLDLWEDMTNEERTRLLRLVVHRIEVQKGSGVTWLCLAAHQMTPLDPANSQELDGMFTYRDRRSAADASLLNNITTGFALLASFHSIPPFRRRSGNDNQNALVKHLRFGLAKNAPAKTTSETLV

SEQ ID NO: 11293 - protein, 590 aa, Unknown
  Description of Unknown: Integrase C36 sequence
  IPR025378,PF07508,SSF53041,IPR036162,cd03770, SM00857,Coil,PF00239,PTHR30461:SF3,PS51736, G3DSA:3.40.50.1390,PS51737,IPR011109,IPR038109,IPR006119, PTHR30461,G3DSA:1.10.10.2600,PF14287
MAGIRTENKIYEVGIYCRLSKDDGTDNESASIATQKSILTDYVKRQGWHLAKTYVDDGYSGTNFQRPSFQNMIKDIENGLINCVITKDLSRLGRNYLDCGLYLEVFFPEHNVRYIAVNDGVDTLNKSAMDITPFRNILNEMYSADVSVKIKSAYRARFQQGKFMGTTAPYGYVKDPADHNHLLIDDKVAHVVREIFDLALAGNGIAKIRKHINKQHILRPAAYAVEQGATGYERYFEDNEENRYIWSENSVRGILRSPIYAGNLAGYKRIAANMKSKKRPSKLPEEWEVIPDTHEGIVTQEEFDTVQQLMTSRRREQNAGGFENIFSGVIKCADCGYAMRAASANRRKRPDINRFADMAVNDEKAVRAIERRLTETDQSRAKSLEKEKKKLNKRLAELDRLFSSLYEDKVMERITERNFEMMSGKYQKEQLEIEARLKEVTETLNDSYEKSQGVRDFLSLIRNYQGLKELDATIINALIDKILVSEREKLADGTVRQEIKIYYKFIGFVGELHITPTKRWTALKPKNCTVCGVEYVPSSGISKYCPACAKRIQREKSNESKRRSRERNRRACIELSAKNDRLTLSSEMDD

SEQ ID NO: 11294 - protein, 584 aa, Unknown
  Description of Unknown: Integrase C37 sequence
  PTHR30461:SF3,PF00239,PS51736,G3DSA:3.40.50.1390,IPR038109, IPR006119,G3DSA:1.10.10.2600,PF13408,PF07508,SSF53041, mobidb-lite,PS51737,cd00338,IPR036162,SM00857, IPR011109,IPR025827,Coil,PTHR30461
MKKNNVEIIKADSLVRRRGDNFERESKRVAAYCRVSSDSEDQKNSYESQVRHYKDYISQRSDWELAGIYADEGISGTQVGKRQDFQRLINDCVNGEIDYIVTKAIARFARNTLDTLKYVRMLKDMQIGVYFEEENIDTLTMDGELLLTILSSVAQQEVENTSAHVKKGLKMKMQRGELIGFQGCLGYDYDVETKQLSINKKEAKIVRYIFERYLEGIGGKVIARELDELGYKSPRGLDHWNDTTVLGIIKNEKYKGDILMGKTFTVDPISKRRLSNFGEEDKYYIKDNHEPIISKEDFEKAQEIRLRRAGNKKTAANVNGKRERYSKMYAFSSMLECGFCGSILSRRSWHCRSDYRKVVWHCVTSIKKGKKFCKHSKGLEELAIEGAFMEAYRQLYHSNENLMTDLLETIESELNDNSLNKELKRITNKLRTLLKKEENLVNLRLEGKISDTIYNEKYNEISSEKVFLAEEKVNIETTLKSEIDVKKRLTEFKHLLSSQKMLTEFDRAVFESIVEKIIVGGVNSDGEIDPAMLTIIFKTGETQNKDGKQFKSKRKNAKLETDKLCPQNSDEDKKMYSQGPDNTR

SEQ ID NO: 11295 - protein, 559 aa, Unknown
  Description of Unknown: Integrase C38 sequence
  PS51737,PTHR30461:SF3,G3DSA:3.40.50.1390,Coil,PS51736, IPR006119,SM00857,IPR025827,IPR011109,PF07508, PF13408,SSF53041,PTHR30461,G3DSA:1.10.10.2600,PS00397, PF00239,IPR006118,cd00338,IPR038109,IPR036162
MRAAIYARVSTERQERQQTIDSQLDVLRAWANTANHELTDAHVFRDEGYSGSRLDRPGLDALRDAVRDGEVDVVAVLAPDRLARRYAYQVLLLEEFRRVECAVEFLNRAISDDPGDQLLLQIQGAVAEYERALLGERFRRGKLQKARAGQFIGPRAPYGYRYLPRHDGAAGQLVVDEAEAELVGLLYGWLADEGLTLRQILRRLNFGPWFPRCGRRPWSPSTVHHILSDPVYTGTAYSNRYEYLPSRKPRSRKPSYSGKGTRRLRPREQWIAIPVPPLIDQDTWDRAQAQLARNAVLSFRNNRKHNYLLRCLLTCGECGLAMYGITRKAADGREFGYYRCAGKDCVSTARSSPCPRAQVKADDLEKTVWDHVVGLLSDPDRLFAQFQEFAGEAGQAAARGSDAERKLRTRLDGLARADRRLLDAYQLEVISLEELQERRRQLADQRKALDLQIEQQRRLCEQRAKAQAVMTDLTAFCQRVRPGGTIGNSVLGGAGSLSGGHRLCEPVAEDDSHLGFGGRPFPGRHLPVFLRAVQDEKQELQRGFVIGEMPPGPDRPAQL

SEQ ID NO: 11296 - protein, 557 aa, Unknown
  Description of Unknown: Integrase C39 sequence
  PF07508,SSF53041,IPR025827,IPR036162,SM00857, Coil,PF00239,PTHR30461:SF3,PS51736,G3DSA:3.40.50.1390, PS51737,IPR011109,IPR038109,IPR006119,PTHR30461, cd00338,G3DSA:1.10.10.2600,PF13408
MIKKRAYIYTRVSTGMQVEGYSLAAQEERIKQYANAFNIEIVQTYQDAGRSGKSILGREQFLEMLNNIESERDNIDCVLVFKLSRFGRNSADTLKSLEIMENHNVHLICVDDGLDSSKDAGKLVITILSAVAEMERENILAQTMAGRKQKAREGKWNGGFAPMGYSISQGVLQINEEEAELIKMIFDLYANTDMGSNKVAQHLVKLGVTKPIRQNGKTPYFSANVIRNILKNPVYNGKIAFGRRTSKFDSKTNKIRIVPSDSYMVVEGQHEALVDDALWEKTQAKLKAQSKKYEKVNRPKGEHIYLLSGIVKCPYCEASLYGNISKKKNKNKDGEYYKHYFYYSCKHRKMMDGHKCTFTKQIKMEALDREVLTIISKIVSEPSFAKKLQEKINIQIDTEEIDKILEQYETQLRKYLSTKLSLMRQIDNLDYEDRHYNQKFQDLNERLDSIYDMIEEVESLIEENKERKEVIQREKMTAENVYSILLKFETLLAVMEDIDKKRFCQLLIEKVVIRDEKNDSGRWVKSIIFKLPIIEKDLEISLDNNEHVECVALLVKN

SEQ ID NO: 11297 - protein, 552 aa, Unknown
  Description of Unknown: Integrase C40 sequence
  PTHR30461:SF3,PF00239,PS51736,G3DSA:3.40.50.1390,IPR038109, IPR006119,G3DSA:1.10.10.2600,PF13408,PF07508,SSF53041, mobidb-lite,PS51737,cd00338,IPR036162,SM00857, IPR011109,IPR025827,Coil,PTHR30461
MINKDRNTMKWTAGIYARVSTDKDNQKLSNEHQISSMEEWATGQKNVEIYDTYIDEGISGTKIDKRYSFQRMIKDAKNGVINFIIVKSVTRFARNQIDSIKLASELKEKGVRIFFYQEGIDTFEDSKMLGLWAWLAENESRVTSERRSLGGREAQKKGRFTNNRPPFGYRTVNGKLVINEEESPIVTRIFNLYAEGNGFAKIASILNEEGMKTRRGFNFRSDKIKYMLLNESYKGTFTGNRYTKADMLSKQVIEKPKEDWIIIEDNHDSIINKELFDTVHALMNEKSFTLGKRSKSYFAGVVKCAKCGCGYNRSITKKKTKGGYKEHIYYRCSGRTQKGESTCNSKPIKEELLLEVVQNEMNLLKRNPDIIENIKKQTLAQITDKINNIDSDIINIENRVTEIESDRKMLAKKNIKGVIDDDIFMEMDAELKAELKSLNQRKNKTRIVDSAKIFEKRYDDFVNTLLHFDDIRNLNNIEVRRLLEVVEINDDEISIEIKINAVDFGIEESLNIAPIISTIGMKLQLIKNANKPIHNKASTEYFKNVNVSVKYA

SEQ ID NO: 11298 - protein, 546 aa, Unknown
  Description of Unknown: Integrase C41 sequence
  PF07508,SSF53041,IPR036162,IPR025827,SM00857, PF00239,Coil,G3DSA:3.40.50.1390,IPR011109,PS51737, IPR038109,IPR006119,PTHR30461,cd00338,G3DSA:1.10.10.2600, PF13408
MSEIVWSGTDDRSGEIKYVDLLCRKSKVLSEHDRLREVSTDEQERQGRLWAARNGYIVRHVWTELGSAYKERQRKEFEGALEAITSGKSQALWVYMLDRFSRKGAEDVLKVIGKARVIFDWDRLDSMDDRDRERIISEAERARTYSARLSARVSDVKRSQRDRGEWVSGWPPFGLVVGKDRRLYPDTSPAAPGMTETRADVMRELFRLSAEGASAKDLAKALEAKGIPHCSYKGGEWVPDGATWVPTTLRRWILNPVYAGWQVIHLRPENGKNGRNKTVAYRNDRGERVRVIPEGLEIVTDEQQAAAIAGKGAEGRAFDSPKPFGGSPGPRQRGVAVHILTGLLECAECGRNMFFTGESYVCGSTQGGAVCPRPARVTGKAIEPYVYNRWRAYVTNSAEDDDLLAIISERWSRIIRPVESAEAEAARTALKVAERRLREVIQDKRDGVYDGPAAKFFRPDHRDALSAVAEAEKVLARFGGTRVDISFLMDAEQVDEYWAGLRDDKPKQRELLGVAIDRIYVKPSPYVGARFNGEQRVRIRWADEDD

SEQ ID NO: 11299 - protein, 545 aa, Unknown
  Description of Unknown: Integrase C42 sequence
  PF07508,SSF53041,IPR036162,IPR025827,PTHR30461:SF3, Coil,PF00239,SM00857,IPR011109,PS51737, G3DSA:3.40.50.1390,IPR038109,IPR006119,PTHR30461,cd00338, G3DSA:1.10.10.2600,PF13408
MSEIVWTGTSDDASEIKYVDLLCRKSKVLSEGDRLREVSTDEQERQGRAWAARNGYTVRHVWTELGSAYKERKREEFEGALKAITSGLSQALWVYMLDRFSRKGAEDVLKVIGKARVIFDWDRLDSMDDRDRERIISEAERARTYSARLSARVTDVKRSQRDRGEWVSGWPPFGLVVGKDRHLYLDHSPAAKGMKESRADVMRELFRLSTLGASAKDLAKALEAKGIPHCSYKDGAWVPDGANWVPTTLRRWITNPAYAGWQVVHLRPEDGKGRHKTVVYRNAKGERVRLGDALVTDEEQAAAIAGKGAEARSFDGKTHLGPFGGSKGPRERGKAVHILTGLLECANCGRNMFFTGESYVCGSQQGGRPCPKPARVTGKAIEPYVFQQWRAYVTNSAEDDDLLAIISERWAKITRPEETAEAEKARETFRIAEKELGALLQDKRDGLYDGPAAQFFRPAHREAMSAVREAEAALTKFGGTRIDISFLMDAEQVTEYWEGLSGDKDKRRELLGCAIDRIYVSESPYVGARFNGEKRVRFAWADQDA

SEQ ID NO: 11300 - protein, 544 aa, Unknown
  Description of Unknown: Integrase C43 sequence
  PF07508,SSF53041,IPR036162,PTHR30461:SF3,SM00857, Coil,PF00239,PS51736,G3DSA:3.40.50.1390,IPR011109, PS51737,IPR038109,IPR006119,PTHR30461,cd00338, G3DSA:1.10.10.2600
MELKNIVNSYNITNILGYLRRSRQDMEREKRTGEDTLTEQKELMNKILTAIEIPYELKMEIGSGESIEGRPVFKECLKDLEEGKYQAIAVKEITRLSRGSYSDAGQIVNLLQSKRLIIITPYKVYDPRNPVDMRQIRFELFMAREEFEMTRERMTGAKYTYAAQGKWISGLAPYGYQLNKKTSKLDPVEDEAKVVELIFDLFLNGLNGKDYSYNAIATHLTNLQIPSPAGKKKWNRFTVKAILENEAYIGTVKYKVREKEKDGKRTIRPENEQIIVPDAHTPIIDKDQFQEANKKIENKIPLLPNRSDYKLNELAGVCICADCGGPLSKYEAKRKRQNKNGTESLYHVKVLRCLNNKCMNVRYNDVEEAILDYLKYLQALNDNDLTKHLGSVIQSHENKNNIRSKKQMNEQFEQREKELKNKLNFIFDKYESGIYSDEIFLQRKSVLDKELQELKKAKDEINGLVDFKGGLDINQLKENIKNAIELYESSENREEKNKLLRIMLQKVIVKMTAKRKGPIPAQFEITPILRYNFLIGETVSSYES

SEQ ID NO: 11301 - protein, 540 aa, Unknown
  Description of Unknown: Integrase C44 sequence
  PF07508,SSF53041,IPR036162,IPR025827,SM00857, Coil,PF00239,PS51736,PTHR30461:SF3,IPR011109, G3DSA:3.40.50.1390,PS51737,IPR038109,IPR006119,PTHR30461, cd00338,G3DSA:1.10.10.2600,PF13408
MEPTAVIYARVSDRKQAENEVSVPAQIEAGQRKAHDLGATVLRVFADEGRSAFKDGNRPQFEAAIDFATTVGVTHFITWSSSRFARNQLEAVLFKRQLDRAGVALVYVSASIDRATDEGWMLDSMLGLFDEMSSRQNAKDTKRSMIRVAQEGYFCGGRAPFGFRSAPCPVNPKRKRLQVEPLEAETVREIFEERGRGIGAFLIASRFNAEGRRARGRTWTKRAVLEILRSDAVIGLTVFNRRDSRTGQLRSQADWVSVKSHDALVPQPLWDRVQALMNEAAEVSQSGSPKSTHPFTGLLRCSCGSGMVTETGKGKGGTVYHYYRCRRARLGEPCPAPQRIPAHKMDAWLSDVILQRVLTPANLQEIADQIAAEASRWTVERSRRRQALASRAAELRQRNSRLYDLLELHGRDAPNLADLTERLRSNSAELKTLEAEMQELAAATAAPATATAPPIDVEQIAAFMRGALKGGQNAARAREFYRQFIDSIEIASHSVLITYDPARLAVAAPGGVRSRVNWRPEGAMLRTIGASWSPFSQSAS

SEQ ID NO: 11302 - protein, 539 aa, Unknown
  Description of Unknown: Integrase C45 sequence
  PF07508,SSF53041,IPR036162,SM00857,Coil, PF00239,IPR011109,G3DSA:3.40.50.1390,IPR006119,PTHR30461, cd00338
MLPRPRPPADDAPAYIGYIRVSTWKEEKISPELQETAIRAWADRRGVRLLEPLVADLDATGRNFRRKIMGAIRRVEGGEAQGIAVWKYSRFGRSRDGVSINLKRLEDAGGQLQSATEEVDAATATGRLQRGILFEFAAYESDVRGEQWREAHDHRRYKLHLPASGRPRFGYIWTPRRVADPAAPSGWRLQDEAYTAHPETGPVMADRYRQYVDGQPFYALMADLNAAGWRTVRGGPWSQQTLMRYMDSGFCAGLLRVHNPACKCPQEERGNCGNTLFIPGAQEELIDAELWQMYRERRTAVKATPPRARAPLYPCTNLMRCGGCRGTTPAQSAQRASQGVVTNIRGYSYACGRRSITGTHGCPGVWATRAHVEAEVRRWVEREVAPAVDAAGPIPAPRTAEVDQRAAAARERARLEVESSRLADGLANLRADHAMNPADYGPGEYEAARDKIRQQQQVTTAALERVSAVETAPHRADYDQLLIGLLDAWHEMHDSEKNALLKQVIRRVVLVRTDGTAKVEVHPVWEPDPWAATEVATTA

SEQ ID NO: 11303 - protein, 539 aa, Unknown
  Description of Unknown: Integrase C46 sequence
  PF07508,SSF53041,IPR036162,SM00857,Coil,PF00239,IPR011109 ,G3DSA:3.40.50.1390,IPR006119,PTHR30461,cd00338
MLPRPRPPADDAPAYIGYIRVSTWKEEKISPELQETAIRAWADRRGVRLLEPLVADLDATGRNFRRKIMGAIRRVEGGEAQGIAVWKYSRFGRSRDGVSINLKRLEDAGGQLQSATEEVDAATATGRLQRGILFEFAAYESDVRGEQWREAHDHRRYKLHLPASGRPRFGYIWTPRRVADPAAPSGWRLQDEAYTAHPETGPVMADRYRQYVDGQPFYALMADLNAAGWRTVRGGPWSQQTLMRYMDSGFCAGLLRVHNPACKCPQEERGNCGNTLFIPGAQEELIDAELWQMYRERRTAVKATPPRARAPLYPCTNLMRCGGCRGTTPAQSAQRASQGVVTNIRGYSYACGRRSITGTHGCPGVWATRAHVEAEVRRWVEREVAPAVDAAGPIPAPRTAEVDQRAAAARERARLEVESSRLADGLANLRADHAMNPADYGPGEYEAARDKIRQQQQVTTAALERVSAVETAPHRADYDQLLIGLLDAWHEMHDSEKNALLKQVIRRVVLVRTDGTAKVEVHPVWESDPWAATEVATTA

SEQ ID NO: 11304 - protein, 538 aa, Unknown
  Description of Unknown: Integrase C47 sequence
  PTHR30461:SF3,PF00239,PS51736,G3DSA:3.40.50.1390,IPR038109, IPR006119,G3DSA:1.10.10.2600,PF13408,PF07508,SSF53041, PS51737,cd00338,cd18039,IPR036162,IPR006118, SM00857,IPR011109,PS00397,IPR025827,PTHR30461
MKIGAIYARASTDKQGDTVEHQVQMIKEYVKRINDSIKETEDKITIDDKFIYIDEGESGFKTTLLQRDEMRKLMSDIDNKLVDVVFFKGISRFARDAEESFRAARKFKEKNIRVISLEENYDSLHSDPMMFQFYSIMAEQESRKTSIRVSLGNKQKARNGLFVGSVTPYGYSRVKDIKDDKLRKEVLSQGRHEQSLWPDKFESEIVKFIFEKVISENLGRKKIAMLLNQKGIRTRDGNRPDEMFIKRILENEVYTGDIIYGKTRYEYIEDEKTNRKVQKTIDISKDEWIISRNSHPAIIERGEFMEAHRILHKRSGKHKGRRFNNARHPLTGILKCGKCGAPMICQKRSNKRSDGTKIEYRYYVCSTYHRQGRDVCAQANINADSLEEHIHQAVSREVLKLKEDGYFDNELQVYNQNEEINKEITQIDDTLDKYIIKLDNLLDHVGLYDKDTFRELNNKIKTEIVELRTRKEYLLEQLSFGDIRNNEEELRELFDSFLNLNLNDLEESRNMFHSLLNEVTVDGNKIKIDAKFNLIKNN

SEQ ID NO: 11305 - protein, 537 aa, Unknown
  Description of Unknown: Integrase C48 sequence
  PS51737,PTHR30461:SF3,G3DSA:3.40.50.1390,Coil,IPR006119, SM00857,IPR025827,IPR025378,IPR011109,PF07508, PF13408,SSF53041,PTHR30461,G3DSA:1.10.10.2600,cd03770, PF00239,PF14287,IPR038109,IPR036162
MKQQIYNTALYLRLSRDDELQGESSSITTQRSMLRLYAKEHHLNVIDEYIDDGWSGTNFDRPSFQRMIEDIEAGKINCVVTKDLSRLGRNYIMTGQYTELYFPSHNVRYIAIDDGVDSEKGESEIAPFKNIINEWVARDTSRKVKSAFKTKFAEGAHYGAYAPLGYKKHPDIKGKLLVDDETKWIIEKIFSLAYQGYGSAKITKQLRAEKVPTASWLNFTRYGTFAHIFEGKPESKRYEWTIAHVKAILKSEVYIGNSVHNMQSTVSFKSKKKVRKPESEWFRVENTHEPIIDKEVFYRVQEQIKSRRRQTKEKATPIFAGLVKCADCGWSMRFGTNKTNKTPYSYYACSYYGQFGKGNCSMHYIRYDVLYQAVLERLQYWAKAVQQDEEKVLNKIQKAGNAERIREKKKKASTLKKAENRQNEIDRLFAKMYEDRACEKITERNFVMLSSKYQKEQIELEQQITSLREELSKMEQDMIGAEKWIELIKEYSVPKELTAPLLNAMIEKILIHEATTNEDNERIQEIEIYYRFIGRVE

SEQ ID NO: 11306 - protein, 535 aa, Unknown
  Description of Unknown: Integrase C49 sequence
  PS51736,PTHR30461,IPR006119,PS51737,mobidb-lite, G3DSA:1.10.10.2600,IPR011109,PF07508,PF13408,SSF53041, PF00239,SM00857,G3DSA:3.40.50.1390,cd00338,IPR038109, IPR036162,IPR025827
MSHDQQERTAGNEPNDQATAQASPSLRAVVYVRISDDPEGTERGVDRQEADCRAYAAAHGWEVAQVYRENDTSAFKQRTITLPTGERVRRVVRPEFRAMLKHLSEQRAGVMIAYDLDRAVRDPRDLEDLIDAKVLNGFSVRSVTGSLRLDTDSDVAMARVLVAMANKSSADTARRVARAAKQQAIEGTWHGGQVPFGYRAENHTLVIDPEAAELVREAARRVLAGETLYRILTDWNRRGIRTTHGCRWSDRTLKLVLRNPSIKGVREYRPLLPDGTRSKTSLMQTTAAWPAILDEDTWQQVSDVLDARKQARNFHQPGSGAAKRLYPFSGLIRCSTCGRAMLHRGQVYQCVQQVPGGCNRSIRSGDLTKLVEEAVLATFEQITLNPAKRQSPGADQAARVGLAATLDADRERLARLDDDYYDGLIDKSMWVRQRSRIAERIERTRREYAATVPEHTGPSIDMTTVAQEWADRTPMWQHQAASLVLEAVLVHALPRGMNGATPARRRNETVEAFHARREVYRAGILAHRVEFVWRA

SEQ ID NO: 11307 - protein, 534 aa, Unknown
  Description of Unknown: Integrase C50 sequence
  PS51736,IPR006119,PTHR30461,mobidb-lite,G3DSA:1.10.10.2600, PS51737,IPR011109,PTHR30461:SF3,PF07508,SSF53041, PF00239,SM00857,G3DSA:3.40.50.1390,cd00338,IPR038109, IPR036162
MEDLMVASVFPGAALYMRASTERQIYSTAHQESALKEYAKQHGFEVIAEYRDEGRSGLTLEGREGLLSLLNDIQSGQASYVTVLVYDVSRWGRFQDVDESAYYEYACRKEGISVTYCAEPFTNDGSPLATLLKGLKRVMAAEYSRELSRKVFNAHCRLTADGYKQGGTAGYGLRRQCQSNDGSIRRTLEMGERKHLPTERVGLILGPDEEVAVVRRIFEMCTNKHMTDMKIAETLNAEGLRNQNGRLWNYRTIKEILTNEKYAGNLVFNRYTRRLGSPRRANEVDKWITVKGALPSIVSMEVFDQARHVRLRRARRWTDDEIWEGLDEIVEKHGTISVDLVEESDLPLEMRYAGHFRGLVNTVAAAGLAGPSLFHSTMVRRKLLVVTKQMANEMKRCAIETSINIEKVSTLTYQINGSTVHLLCTKCRHGKRYPRWKVTLRYCPAADFVLWVRMNENNDEIAQIYLLPVQEFSTYKCLWPSTHTLHFYQRFGYASLRQLWKEKLTNNQDMKSNECANQSATGEVEAGTPTGRRK

SEQ ID NO: 11308 - protein, 529 aa, Unknown
  Description of Unknown: Integrase C51 sequence
  PF07508,SSF53041,IPR036162,IPR025827,PTHR30461:SF3, PF00239,SM00857,PS51737,IPR011109,G3DSA:3.40.50.1390, IPR006119,PTHR30461,cd00338,PF13408
MSNRLHEYDVEAEWSPADLALLAQLEQHESLLPEDAPRALLSVRLSVFTEDTTSPVRQELDLRQLARDKGMRVVGVASDLNVSATKVPPWKRKSLGAWLNDRVPEFDALLFWKVDRFIRNMSDLSRMIDWSHRYEKNLISKNDPIDLSTPLGKMMVTLLGGIAEIEAANTKARVESLWDYNKTQSEWLVGKPPYGYTTARDEHGKNRLVIDRQASEALHLARERVMAGQSTSATAVELKELGLMSAGLTAATLARRLRNPALLGYRVEEDKNGGVRRSKVVTGHDGNPIVIAEPIFTQEEFDSVGAKLDERGKNQPTRHIGGATKFRGVMVCVECGTNMIVHHTRNKFGEYAYLRCQGCKSGGRGAPHPQEVYDELVRLVLTAVGDMPVEKREYARGAESRAETKRLEETIALYMKGLEPGGRYTKTRFTMEHAEATLDTLIAELEAIDPDTTTDRWVYVAGGKTFREHWEEGGMDAMAMDLLRVGIKCTVKREKIPKVRAPKVTLELKVPKDVRERLIVREDDFAERF

SEQ ID NO: 11309 - protein, 528 aa, Unknown
  Description of Unknown: Integrase C52 sequence
  PF07508,SSF53041,IPR025827,PTHR30461:SF3,IPR036162,SM00857, PF00239,PS51737,IPR011109,G3DSA:3.40.50.1390,IPR038109, IPR006119,PTHR30461,cd00338,G3DSA:1.10.10.2600,PF13408
MSDRAATYDIEAEWSPADLALLQSLKRDEDLLPEDAPRALLSVRLSVFTDDTTSPVRQELDLRQLARDKGMRVVGVASDLNVSATKVPPWKRKSLGEWLNNRVPEFDALLFWKVDRFIRNMGDLSRMIDWSNRYEKNLISKNDPIDLSTTLGKMMVTLLGGIAEIEAANTKTRVESLWNYNKTQAEWLVGKPPYGYTTARGEDGKTRLVFDQPAYEALHYARRRILEGVSSRAVAAELIEAGMVTGVTASTLIRRLRNPGLRGWRVEEDKQGGLRRSKVVLGHDGQPIRVGEPIFNDEEWDTLQRELDARGKNQPPRQPSGATKFRGVLKCVECQTNMIVHHTRNKHGEYAYLRCQGCKSGGLGSPHPQAVYDALVQRVLDSIGDLPVMKREYARGEEMRKETARLEASIAYYMAGLEPGGRYTKTRFTQEQAEQTLDKLIAELEAIDPDTTKDRWTEVAGGKTFREHWEEGGIDAMAADLLRVGVVCEVSREKIPKVRAPRVQLRLIIPEDVRDRLLIREDSFAEAF

SEQ ID NO: 11310 - protein, 527 aa, Unknown
  Description of Unknown: Integrase C53 sequence
  PF07508,SSF53041,IPR036162,PTHR30461:SF3,SM00857, Coil,PF00239,PS51736,IPR011109,G3DSA:3.40.50.1390, PS51737,IPR006119,PTHR30461,cd00338
MGVAVMTCVFVVCLVNHRGLSGVRYKPMRALVVIRLSRVTDATTSPERQLESCQQLCAQRGWDVVGVAEDLDVSGAVDPFDRKRRPNLARWLAFEEQPFDVIVAYRVDRLTRSIRHLQQLVHWAEDHKKLVVSATEAHFDTTTPFAAVVIALMGTVAQMELEAIKERNRSAAHFNIRAGKYRGSLPPWGYLPTRVDGEWRLVPDPVQRERILEVYHRVVDNHEPLHLVAHDLNRRGVLSPKDYFAKLQGREPQGREWSATALKRSLISEAMLGYATLNGKTVRDDDGAPLVRAEPILTREQLEALRAELVKTDRTKPAVSAPSLLLRVLFCAVCGEPAYKFTGGGRKNARYRCRSWGWAQRCGNGTVAMAEWDAFCEEQVLDLLGDAERLEKVWVAGSDSAVELAEVNAELVDLTSLIGSPAYRAGSPQREALDARIAALAARQEELEGLEARPSGWEWRETGQRFGDWWREQDTAGKNTWLRSMNVRLTFDVRGGLTRTIDFGDLQEYEQHLRLGSVVEQLHTGMS

SEQ ID NO: 11311 - protein, 527 aa, Unknown
  Description of Unknown: Integrase C54 sequence
  PF07508,SSF53041,IPR036162,PTHR30461:SF3, SM00857,PF00239,PS51736,G3DSA:3.40.50.1390, PS51737,IPR011109,IPR006119,PTHR30461, cd00338
MGMAVMTCVFVVCLVNHRGLSGVRYKPMRALVVIRLSRVTDATTSPERQLESCQQLCAQRGWDVVGVAEDLDVSGAVDPFDRKRRPNLARWLAFEEQPFDVIVAYRVDRLTRSIRHLQQLVHWAEDHKKLVVSATEAHFDTTTPFAAVVIALMGTVAQMELEAIKERNRSAAHFNIRAGKYRGSLPPWGYLPTRVDGEWRLVPDPVQRARILEVYHRVVDNHEPLHLVAHDLNRRGVLSPKDYFAKLQGREPQGREWSATALKRSLISEAMLGYATLNGKTVRDDDGAPLVRAEPILTREQLEALRAELVKTDRTKPAVSTPSLLLRVLFCAVCGEPAYKFAGGGRKHPRYRCRSMGFPKHCGNGTVAMAEWDAFCEEQVLDLLGDSERLEKVWVAGSDSAVELAEVNAELVDLTSLIGSPAYRVGSPQREALDTRIAALAARQEELEGLEARPSGWEWRETGQRFGDWWREQDTAAKNTWLRSMNVRLTFDVRGGLTRTIDFGDLQEYEQHLRLGSVVERLHTGMS

SEQ ID NO: 11312 - protein, 527 aa, Unknown
  Description of Unknown: Integrase C55 sequence
  PF07508,SSF53041,IPR036162,PTHR30461:SF3,SM00857, Coil,PF00239,PS51736,IPR011109,G3DSA:3.40.50.1390, PS51737,IPR006119,PTHR30461,cd00338
MGMAVMTCVFVVCLVNHRGLSGVRYKPMRALVVIRLSRVTDATTSPERQLESCQQLCAQRGWDVVGVAEDLDVSGAVDPFDRKRRPNLARWLAFEEQPFDVIVAYRVDRLTRSIRHLQQLVHWAEDHKKLVVSATEAHFDTTTPFAAVVIALMGTVAQMELEAIKERNRSAAHFNIRAGKYRGSLPPWGYLPTRVDGEWRLVPDPVQRERILEVYHRVVDNHEPLHLVAHDLNRRGVLSPKDYFAKLQGREPQGREWSATALKRSLISEAMLGYATLNGKTVRDDDGAPLVRAEPILTREQLEALRAELVKTDRTKPAVSTPSLLLRVLFCAVCGEPAYKFAGGQRKNPRYRCRSMGFPKHCGNGTVALAEWDAFCEEQVLDLLGDSERLEKVWVAGSDSAVELAEVNAELVDLTSLIGSPAYRVGSPQREALDARIAALAARQEELEGLEARPSGWEWRETGQRFGDWWREQDTAAKNTWLRSMNVRLTFDVRGGLTRTIDFGDLQEYEQHLRLGSVVEQLHTGMS

SEQ ID NO: 11313 - protein, 526 aa, Unknown
  Description of Unknown: Integrase C56 sequence
  PF07508,SSF53041,PTHR30461:SF3,IPR036162, SM00857,PF00239,IPR025827,G3DSA:3.40.50.1390, PS51737,IPR011109,IPR006119,PTHR30461, cd00338,PF13408
MISEPEPYIGYIRVSMWREEAISPELQRTAIQAWATRTGRRIIDWVIDLDKTGRNFKRRIMGAIERVERSEARGIAVWKYSRFGRTDSGIAVNLARIEHVGGQLQSATEEIDARTAVGKFYRKILFDLAVFESDRAGEQWKETHQWRRDHGLPATGGNRLGYIWTPRRIPAPDRPGQWIIQDERYDPDPAAVGDVKELFSRKTYGRAGYGALAGWLNELGHTTSRGRPWETSSLRRYMDAGFAAGLLRIHDPACGCDYTAANHGCRRNRWTYIPAAHPAIISPDLWEAYTTHRAEQRARTPRSRNPVYPLTGLMRCGTCRRDVGATSARRRGKQVLGYAYSCASQYKSGTTICTSGVWVQRAVVEDEVLRWLETEAAPGIDAAPPTATTPPVDRTKADAARAHAHALAQHEKVTTALQRLAVAAAMDPDRFPPGVFEAARDQLVAEQQQWAREMQKYQQIEAAPTRATFEPVAVGLVAEWDVLNVSEKNALLRRLLRRVVVTREGRGSSMTRVECHPVWDPDPWSA

SEQ ID NO: 11314 - protein, 525 aa, Unknown
  Description of Unknown: Integrase C57 sequence
  PF07508,SSF53041,PTHR30461:SF3,IPR036162,SM00857, PF00239,PS51736,IPR011109,PS51737,G3DSA:3.40.50.1390, IPR006119,PTHR30461,cd00338
MAVMTCVFVVCLVNHRGLSGVRYKPMRALVVIRLSRVTDATTSPERQLESCQQLCAQRGWDVVGVAEDLDVSGAVDPFDRKRRPNLARWLAFEEQPFDVIVAYRVDRLTRSIRHLQQLVHWAEDHKKLVVSATEAHFDTTTPFAAVVIALMGTVAQMELEAIKERNRSAAHFNIRAGKYRGSLPPWGYLPTRVDGEWRLVPDPVQRERILEVYHRVVDNHEPLHLVAHDLNRRGVLSPKDYFAKLQGREPRGREWSATALKRSLISEAMLGYATLNGKTVRDDDGAPLVRAEPILTREQLEALRAELVKTDRAKPAVSTPSLLLRVLFCAVCGEPAYKFTGGGRKNARYRCRSWGWAQRCGNGTVAMAEWDAFCEEQVLDLLGDAERLEKVWVAGSDSAVELAEVNAELVDLTSLIGSPAYRVGSPQREALDSRIAALAARQEELEGLEARPSGWEWRETGQRFGDWWREQDTSGKNTWLRSMNVRLTFDVRGGLTRTIDFGDLQEYEQHLRLGSVVEQLHTGMS

SEQ ID NO: 11315 - protein, 525 aa, Unknown
  Description of Unknown: Integrase C58 sequence
  PF07508,SSF53041,IPR036162,PTHR30461:SF3,SM00857,PF00239,Coil, PS51736,IPR025827,G3DSA:3.40.50.1390,PS51737,IPR011109,IPR038109 ,IPR006119,PTHR30461,cd00338,G3DSA:1.10.10.2600,PF13408
MKNNNKNIRAAVYVRFSSQRQNDSFSIEYQLQETTKYIELKGYQFIESYVDAAKSGKKTAGRDAFYKMIDDAKRGKFDRIVVFSFSRSFRNTRDALNYNHDLMENYGVVIESVIEPIDFTNPHGKFSGTNLFAMHELQSDIIAAHVRSGMYVAAKHGYFMGGHVPYGYELYGTGEFSRGKERRKYKLHPTESKIIKNAFEMYADGFPLLHVLKTLHADGVTGRDGKKLSKSTLQKILHNPFYTGTRIYNVKDYETLKIENCVPAIIDAATWARVQKRQSEYTGNRPTPRQTKRLYTLTGKIVCGCCGAHLTGTARKSKGHVYEYYRCNSKDKYICKMRNVRRDLLEKYCMQQIRAHILNTDAIKNISVNIAASVNAAPDDLTETAEKLRKRRDKINGIIENLERDIYENEIPRERGKKMISNYENELSEIEIKLFETETALSDAITPDKVNDYLNELLALASDADEQIIKLIFEKLIDKIVVTENQIELFLLVSPFGRVVLNDSIGQPHYAQRLTFDRDTLQKHV

SEQ ID NO: 11316 - protein, 525 aa, Unknown
  Description of Unknown: Integrase C59 sequence
  PF07508,SSF53041,IPR036162,PTHR30461:SF3,SM00857, Coil,PF00239,PS51736,IPR025827,IPR011109, PS51737,G3DSA:3.40.50.1390,IPR038109,IPR006119,PTHR30461, cd00338,G3DSA:1.10.10.2600,PF13408
MKNNNKNIRAAVYVRFSSQRQNDSFSIEYQLQETTKYIELKEYQFIESYVDAAKSGKKTAGRDAFYKMIDDAKRGKFDRIVVFSFSRSFRNTRDALNYNHDLMENYGVVIESVIEPIDFTNPHGKFSGTNLFAMHELQSDIIAAHVRSGMYVAAKHGYFMGGHVPYGYELYGTGEFSRGKERRKYKLHPTESQIIKKAFEMYADGFPLLHVLKTLHADGVTGRDGKKLSKSTLQKILHNPFYTGTRIYNVKDYETLKIENCVPAIIDAATWARVQKRQSEYTGNRPTPRQTKRLYTLTGKIVCGCCGAHLTGTARKSKGHVYEYYRCNSKDKYICKMRNVRRDLLEKYCMQQIRAHILNTDAIKNISVNIAASVNAAPDDLSVTAEKLRKRRDKINGIIENLERDIYENEIPRERGKKMISNYENELSEIEIKLFETETALSDAITPDKVNDYLNDLLALASDADEQIIKLIFEKLIDKIVVTENQIELFLLVSPFGRVVLNDSIGQPHYAQRLTFDRDTLQKHV

SEQ ID NO: 11317 - protein, 525 aa, Unknown
  Description of Unknown: Integrase C60 sequence
  PF07508,SSF53041,IPR036162,PTHR30461:SF3,SM00857, Coil,IPR025827,PS51736,PF00239,PS51737, IPR011109,G3DSA:3.40.50.1390,IPR038109,IPR006119,PTHR30461, cd00338,G3DSA:1.10.10.2600,PF13408
MNANVTIIPPRKIAGNTVDKHEDKPRLRVVAYCRVSTDSEEQATSYDTQVQHYTDYISRNPLWEFAGIYADDGISGTSTKKRVGFNDMIHDCMSGKVDMVITKSISRFARNTIDCLKFVRQLKDKNIPIIFEKENINTMEASGELLLTIMASLAQQESASLSQNVKLGLKFRYQEGKVQINHNWFLGYTKDDEGNLVILEQEAKVVRRIYREYLEGASLRDIAEGLEKDGIKNGAGHLKWNLSNIKGILQNEKYIGDALLQKTITTDFINHVRIKNDGTEPQYYVKDSHTPIIPRDIFFKVQEEMLRRANMFSGEENKKRRVYSSKYALSSLCVCSKCGDVYRRIAWNNRGVHSVVWRCCTRVENGPSACDAPTVQENELQSAIVKAINKVFSISDEVLDTLKNNIREIIAGNNLSEIETVDKKIADKQATLLTLLKAKKDYTKIADEIDELKVKKQQLLIEKAGQEDAKRRIREMEDFLKSERHDISEYDEKLVRKYIKKIKVYEDKFSVTFKSEISVDVERAS

SEQ ID NO: 11318 - protein, 524 aa, Unknown
  Description of Unknown: Integrase C61 sequence
  PF07508,SSF53041,IPR036162,PTHR30461:SF3,SM00857, Coil,PF00239,IPR011109,PS51737,G3DSA:3.40.50.1390, IPR038109,IPR006119,PTHR30461,cd00338,G3DSA:1.10.10.2600
MIKNLENIQHVAIYLRISQEKKGENVETLENHRQILIEFCEEHGFTYEEFGEVISGGKSEITQRVALKRLLDNIEKYDAIACFELTRISRNGLISQTVKQYCIDYDKPILTPYQSYDLANSETDRLLFDVGSMISSHEHSTIGKRSKANKMQMSKAGLHVSGNVPFGYKRNNDTKKLEIDEEAAPTIRYIFQLHSEGYGSFKIRDILNNEGYKSATGKAFNLPSIKRIIRNPAYKGTLIFNNRKKIKRNGKFEYDNVETITVENAHPAIIPPDVWEKANQDREFRALKSINIREKPATKSGVTLLKDLIFCGVCGRKMIIRKDTKSSTGYTLKKCEYLLPNGEKCPNCGKKLDAVIARVLTGLTKYADDLSQMEEQLRKNNASDLNEKNQLKLNQIDKAIMEIEQKQKNLIELAMEGLFSHEEIREKKQELVKRMDELKAKREEVINSINSLSVEEEIELIQEKRKLILSLREDMDQEYGNELLKRFIKKIHFTRVIPEDILKRSTRNSERQNYPFNIKFEFFD

SEQ ID NO: 11319 - protein, 524 aa, Unknown
  Description of Unknown: Integrase C62 sequence
  Coil,PS51736,IPR006119,PTHR30461,PS51737,G3DSA:1.10.10.2600, PTHR30461:SF3,IPR011109,PF07508,SSF53041,PF00239,SM00857, G3DSA:3.40.50.1390,cd00338,IPR038109,IPR036162
MTMIRPLRIAIYARYSSDLQNPSSIEDQVALCRQLVDDQFHGRADPRAVLVFSDSAISGSTLQRPGLIRLMNAIKAGRVDVVVAEGLDRLSRNLKDIAGIYETLDYHHVMIWTAHEGRISELHIGLKGTMNALVLRDLKARIKRGHRSRIAAGYAASSCAYGYRVVRGVVDEKGANINGLREIDEAAAPVISRIYDEYIAGRKIPEIIAGLNKDGIPAPNGGLWKRNAIMGGAKKQEGILRNEIYTGKLIFNRSHVVRDPVSNKKKFIHNPESDWTKVDVPHLRIISDAQWAAVRVIDQPKPQQPRQRKTPVGLTVYNQHALTGWVKCGWCGGSKSLANETRYLCSTHRYAKSCANSRGTKEPVLMARTFGTLYHRIETGPDFTPGLTEFFAHQSRRRTELENQEQDIQARIVRLLDAVEHGVDHENARDRILRLQDELGQIRAELTHDLPAPLPVEAAIRARLMNAVQSVELSNDVPTQRLMFQCLLSEIVLTPIPDKHQGETVVIKLREEGWAEFWSSISSE

SEQ ID NO: 11320 - protein, 523 aa, Unknown
  Description of Unknown: Integrase C63 sequence
  PF07508,SSF53041,IPR036162,PTHR30461:SF3,SM00857, PF00239,Coil,PS51736,G3DSA:3.40.50.1390,IPR011109, PS51737,IPR006119,PTHR30461,cd00338
MMTCVFVVCLVNHRGFSGVRYKPMRALVVIRLSRVTDATTSPERQLESCQQLCAQRGWDVVGVAEDLDVSGAVDPFDRKRRPNLARWLAFEEQPFDVIVAYRVDRLTRSIRHLQQLVHWAEDHKKLVVSATEAHFDTTTPFAAVVIALMGTVAQMELEAIKERNRSAAHFNIRAGKYRGSLPPWGYLPTRVDGEWRLVPDPVQRERILEVYHRVVDNHEPLHLVAHDLNRRGVLSPKDYFAKLQGRDPQGREWSATALKRSLISEAMLGYATLNGKTVRDDDGAPLVRSEPILTREQLEALRAELVKTDRTKPAVSTPSLLLRVLFCAVCGEPAYKFAGGGRKHPRYRCRSMGFPKHCGNGTVAMAEWDAFCEEQVLDLLGDAERLEKVWVAGSDSAVELAEVNAELVDLTSLIGSPAYRVGSPQREALDARIAALAARQEELEGLEARPSGWEWRETGQRFADWWAQQDIAAKNTWLRSMNVRLTFDVRGGLTRTIDFGDLQEYEQHLRLGSVVERLHTGMS

SEQ ID NO: 11321 - protein, 523 aa, Unknown
  Description of Unknown: Integrase C64 sequence
  PF07508,SSF53041,IPR036162,PTHR30461:SF3,SM00857,PF00239,Coil, PS51736,PS51737,IPR011109,G3DSA:3.40.50.1390,IPR006119,PTHR30461 ,cd00338
MMTCVFVVCLVNHRGLSGVRYKPMRALVVIRLSRVTDATTSPERQLESCRQLCAQRGWDVVGVAEDLDVSGAVDPFDRKRRPNLARWLAFEEQPFDVIVTYRVDRLTRSIRHLQQLVHWAEDHKKLVVSATEAHFDTTTPFAAVVIALMGTVAQMELEAIKERNRSAAHFNIRAGKYRGSLPPWGYLPTRVDGEWRLVPDPVQRERILEVYHRVVDNHEPLHLVAHDLNRRGVLSPKDYFAKLQGREPQGREWSATALKRSLISEAMLGYTTLNGKTVRDDDGAPLVRAEPILTREQLEALRAELVKTDRTKPAVATPSLLLRVLFCAVCGEPAYKFAGGQRKNPRYRCRSMGFPKHCGNGTVAMAEWDAFCEEQVLDLLGDAERLEKVWVAGSDSAVELAEVNAELVDLTSLIGSPAYRVGSPQREALDARIAALAARQEELEGLEARPSGWEWRETGQRFGDWWREQDTAAKNTWLRSMNVRLTFDVRGGLTRTIDFGDLQEYEQHLRLGSVVERLHTGMS

SEQ ID NO: 11322 - protein, 522 aa, Unknown
  Description of Unknown: Integrase C65 sequence
  PF07508,SSF53041,IPR036162,PTHR30461:SF3,SM00857, PF00239,PS51736,IPR011109,G3DSA:3.40.50.1390,PS51737, IPR006119,PTHR30461,cd00338
MTCVFVVCLVNHRGLSGVRYKPMRALVVIRLSRVTDATTSPERQLESCQQLCAQRGWDVVGVAEDLDVSGAVDPFDRKRRPNLARWLAFEEQPFDVIVAYRVDRLTRSIRHLQQLVHWAEDHKKLVVSATEAHFDTTTPFAAVVIALMGTVAQMELEAIKERNRSAAHFNIRAGKYRGSLPPWGYLPTRVDGEWRLVPDPVQRERILEVYHRVVDNHEPLHLVAHDLNRRGVLSPKDYFAKLQGREPQGREWSATALKRSLISEAMLGYATLNGKTVRDDDGAPLVRAEPILTREQLEALRAELVKTDRTKPAVSTPSLLLRVLFCAVCGEPAYKFTGGGRKNARYRCRSWGWAQRCGNGTVAMAEWDAFCEEQVLDLLGDAERLEKVWVAGSDSAVELAEVNAELVDLTSLIGSPAYRVGSPQREALDSRIAALAARQEELEGLEARPSGWEWRETGQRFGDWWREQDTSGKNTWLRSMNVRLTFDVRGGLTRTIDFGDLQEYEQHLRLGSVVEQLHTGMS

SEQ ID NO: 11323 - protein, 522 aa, Unknown
  Description of Unknown: Integrase C66 sequence
  PF07508,SSF53041,IPR036162,PTHR30461:SF3,SM00857,PF00239,Coil, PS51736,G3DSA:3.40.50.1390,IPR011109,PS51737,IPR006119, PTHR30461,cd00338
MTCVFVVCLVNHRGLSGVRYKPMRALVVIRLSRVTDATTSPERQLESCQQLCAQRGWEVVGVAEDLDVSGAVDPFDRKRRPNLARWLAFEEQPFDVIVAYRVDRLTRSIRHLQQLVHWAEDHKKLVVSATEAHFDTTTPFAAVVIALMGTVAQMELEAIKERNRSAAHFNIRAGKYRGSLPPWGYLPTRVDGEWRLVPDPVQRERILEVYHRVVDNHEPLHLVAHDLNRRGVLSPKDYFAKLQGREPQGREWSATALKRSLISEAMLGYATLNGKTVRDDDGAPLVRSEPILTREQLEALRAELVKTDRTKPAVSTPSLLLRVLFCAVCGEPAYKFTGGGRKNARYRCRSWGWAQRCGNGTVAMVEWDAFCEEQVLDLLGDSERLEKVWVAGSDSAVELAEVNAELVDLTSLIGSPAYRVGSPQREALDARIAALAARQEELEGLEARPSGWEWRETGQRFGDWWRGQDTSGKNTWLRSMNVRLTFDVRGGLTRTIDFGDLQEYEQHLRLGSVVERLHTGMS

SEQ ID NO: 11324 - protein, 522 aa, Unknown
  Description of Unknown: Integrase C67 sequence
  PF07508,SSF53041,IPR036162,IPR025827,SM00857, Coil,PF00239,PS51736,PTHR30461:SF3,IPR011109, PS51737,G3DSA:3.40.50.1390,IPR038109,IPR006119,PTHR30461, cd00338,G3DSA:1.10.10.2600,PF13408
MKEIIKIDSTIRKTGFEKKTRVAAYARVSSDSDEQLLSLEVQKEHYENYIKSNPCWEYAGLYFDEGISGTKIGKRESLKQLLKDCQSGQIDRIITKSISRLARNTVDCLEIVRKLTGLGIYLYFEKENIDTEHMSSELMLSILSSIAQSESRSISENSMWSIQKRFENGSFVISCPAYGYKNENKKMIIVPEQARVVKEIFNMALSGMGGEAMARVLTDKKIPTKKGGSWTSSTVNAILTNKTYTGDVIFQKTYTDDSFNRHKNCGEKKQYVIENHHEAIISHETFNLVKEIIAWRRSENNIVCGSGKYNKLYAFSGKIRCGECGSKCKRRIIYQHNKAYGIWVCITHLEDIHACSQKSVMESYLKISFLQMLNKLKATSAQILTPFIKSLRNVNSKDGLNKVIELEEKIAKLQEQEQVLSKLFAGGYIEMDSYYLESNQLKAEIDTCLKEKLQLSNSLNGNLTHLNEAQKLQRFVSVTEVFSEFKDEDFLDFVDDVVVKSRTRFLFILKCGLELEEEVKET

SEQ ID NO: 11325 - protein, 522 aa, Unknown
  Description of Unknown: Integrase C68 sequence
  Coil,PS51736,IPR006119,PTHR30461,PS51737, G3DSA:1.10.10.2600,IPR011109,PF07508,PF13408,SSF53041, PF00239,SM00857,G3DSA:3.40.50.1390,cd00338,IPR038109, IPR036162,IPR025827
MTEKNIMVIPARKRVGSTAAKEKIKKLRVAAYCRVSTETEEQNSSYEVQVSHYTEFIKKNNEWEFAGIFADDGISGTNTKKRDEFNRMIAECMDGNIDMVITKSISRFARNTLDCLQYIRQLKDKNISVYFEKENINTTDAKGEVLLTIMASLAQQESQSLSQNVKLGLQYRYQQGKVQVNHKRFMGYTKDEDGNLTIVPEEAEIIKRIYREYLEGASLLQIARGLEADGILTAAGKAKWRPETLKKILQNEKYIGDALLQKTYTVDFLSKKRVKNNGIVPQYYVENSHEPIIPRELFMQVQEEMVRRANLRGGKGGKKRVYSSKYALSSIVYCGQCGDIYRRVHWNNRGYKSIVWRCVSRLEEKGSECTAPTINEETLQAAVVKAINELLDNKEPFLSTLQKNIATVLNEENDNATVDIDGKLEELQQQLLIQAKSKNDYEDVADEIHRLRELKQNALVENAEREGKRQRIAEMTDFLNEQSCELEEYDEQLVRRLIEKVTIYEDKLTVEFKSGIEIDEEI

SEQ ID NO: 11326 - protein, 521 aa, Unknown
  Description of Unknown: Integrase C69 sequence
  PTHR30461:SF3,PF00239,PS51736,G3DSA:3.40.50.1390,IPR038109, IPR006119,IPR037285,G3DSA:1.10.10.2600,PF13408,PF07508, SSF53041,PS51737,cd00338,IPR036162,SM00857, IPR011109,IPR025827,Coil,SSF140560,PTHR30461
MIPNRNVVIIPAMKRAGNNGNKNEVPKLRVAAYCRVSTDSEEQSSSYDVQIEHYTEFIKKNNEWAFAGIFADDGISGTNTKKREEFNKMIDECMAGKIDMIITKSISRFARNTLDCLHYIRKLKEKNVAVYFEKENINTLDAKGEIMITIMASLAQQESQSLSQNVKLGYQYRYQQGQVMVNCSRFLGYTKDENKKLVIVPEEAEIIKRIYREYLEGSSMDKIKKGLEADGVLTGAGGKRWHTSSIRKILSNEKYIGDALLQKTYTVDFLTKKRVKNNGIVPQYYVENNHEAIIPREIYMQVQEELVRRSRGHISSSGKRRNFSSSHAFSQIVFCGECGEIFRRVHWNNSGKKSIVWRCVSRLESTGLSCNARTVAEDILYEKSVEAINILLGQKSDFLPQLKKNIETVVFETSNEAVEKIDKKMLELQKELLQKANAKEDYNDVAGKIYRLREERHRALTEQAERKGSKQKLEEMEKFLNEQDGLLEEYDERLVRMLIDKVTVFDDMLTVEFKSGAEIEV

SEQ ID NO: 11327 - protein, 521 aa, Unknown
  Description of Unknown: Integrase C70 sequence
  PF07508,SSF53041,PTHR30461:SF3,IPR036162,SM00857, PF00239,Coil,PS51736,IPR011109,G3DSA:3.40.50.1390, PS51737,IPR006119,PTHR30461,cd00338
MTCVFVVCLVNHRGLSGVRYKPMRALVVIRLSRVTDATTSPERQLESCQQLCAQRGWDVVGVAEDLDVSGAVDPFDRKRRPNLARWLSFEEQPFDVIVAYRVDRLTRSIRHLQQLVHWAEDHKKLIVSATESHFDTTSPFAAVVIALMGTVAQMELEAIKERNRSAAHFNIRAGKYRGSLPPWGYMPARVDGEWRLVPDPVQRERILEVYHRVVDNHEPLHLVAHDLNRRGVLSPKDYFAKLQGREPRGREWSATALKRSLISEAMLGYATLNGKTVRDDDGAPLVRAEPILTREQLEALRAELVKTDRMKPAVSTPSLLLRVLFCAVCGEPAYKFDAGRKIPRYRCRSFGFAQRCGNGTIPIAEWDAFCEEQVLDLLGDAERLEKVWVAGSDAAVELAELNAELVDLTSLIGSPAYRAGSPQREALDARIAALAARQEELEGLEARPSGWEWRETGQRFGDWWREQDTAAKNTWLRSMNVRLTFDVRGGLTRTIDFGDLQEYEQHLRLGSVVEQLHTGMS

SEQ ID NO: 11328 - protein, 521 aa, Unknown
  Description of Unknown: Integrase C71 sequence
  PF07508,SSF53041,IPR036162,IPR025827, SM00857,Coil,PF00239,PS51736, PTHR30461:SF3,IPR011109,PS51737,G3DSA:3.40.50.1390, IPR038109,IPR006119,PTHR30461,cd00338,G3DSA:1.10.10.2600,PF13408
MKKVITIEPAKQVSHKVDLPSFTKRRVAGYARVSTDHEDQTTSYEAQMKYYTDYINNRSDWEFVKMYSDEGISGTNTKARIGFQRMVEDALDGKIDLILTKSVSRFARNTVDSLSTVRKLKEAGVEIYFEKENIWTFDSKGELLITIMSSLAQEESRSISENVTWGRRRQLAEGQVTFSYSQVLGFKKSDTGGFEIDHEEAKIVRYIFHQVLLGNNPNKIARELTAQGIPTPQGKRQWSYGTVKRMLRNEKYKGDALLQKSFTTDFLTKSTKPNEGELPQYYVENNHEAIIKREVFDLVQVELDKLEKKRQTSNIFTGRLFCGDCGSAFGSKVWHSTSKYKRTIYQCNAKYKGEHKCRTPHVTEEEIKGWFLSAINQLLSNRDEIIANTELLIDMAKDTSPLESRIDDLEHHLETIRQDIEDLVDRNARKAQNQDLYQEQYDTLVTAYQEIQKELQEATSSLEEQKSRSISLDGFIQELKQQDSLITDFNQELWQTSVERLDIKVDKHISLTFKNGVRIDL

SEQ ID NO: 11329 - protein, 520 aa, Unknown
  Description of Unknown: Integrase C72 sequence
  PF07508,SSF53041,IPR025827,PTHR30461:SF3,IPR036162, Coil,PF00239,PS51736,SM00857,IPR011109, G3DSA:3.40.50.1390,PS51737,IPR038109,IPR006119,PTHR30461, cd00338,G3DSA:1.10.10.2600,PF13408
MKKVITIEATPTIIRSSSDDFTLKKRRVAGYARVSTDHEDQATSYESQMRYYSEYINGRDDWEFVKMYSDEGISGTNTKLRTGFKAMVEDALNGKIDLIITKSVSRFARNTVDSLTTVRQLKEVGVEIFFEKENIWTLDSKGELLITIMSSLAQEESRSISENVTWGLRKQFAEGKVHFPYTNVLGFKAGEDGAIVVDQDEAKTVRYIFQQALIGKSPYHIAKDLSEQGIPSPSGKSHWNATTIKRMLRNEKYKGDALLQKTYTIDFLTKKKNINRGELPQYYVENNHEAIVDRETFDAVQQVLDNKGRKSSTTIFSSKLVCGDCGHFFGSKVWHSTSKYRRVIYQCNEKYKGISKCSTPHVTEEEVKQWFVSAVNQVLDNRLEVIDNLYVLLSIGNLEVIDEQIKVLETEAEVVSQLVANLVSENAIISQDQDKYLKKYNQLTSKYEGILQEIESLELHRMKKSKRNKELQVFINALEKQEGLLLEFDEFLWETMIEHVTVSGAKEIFIKFKNGQIVRV

SEQ ID NO: 11330 - protein, 520 aa, Unknown
  Description of Unknown: Integrase C73 sequence
  PF07508,SSF53041,IPR025827,PTHR30461:SF3,SM00857, Coil,PF00239,IPR036162,PS51736,IPR011109, PS51737,G3DSA:3.40.50.1390,IPR038109,IPR006119,PTHR30461, cd00338,G3DSA:1.10.10.2600,PF13408
MKKVITIEATPSIIRSSSDDFSLKKRRVAGYARVSTDHEDQATSYESQMRYYSEYINGRDDWEFVKMYSDEGISGTNTKLRTGFKAMVEDALNGKIDLIITKSVSRFARNTVDSLTTVRQLKEVGVEIYFEKENIWTLDSKGELLITIMSSLAQEESRSISENVTWGLRKQFAEGKVHFPYTNVLGFKAGEDGAIVVDQDEAKTVRYIFQQALIGKSPYHIAKDLSEQGISSPSGKSHWNATTIKRMLRNEKYKGDALLQKTYTIDFLTKKKNINRGELPQYYVENNHEAIVDRETFDAVQQVLDNKCRKSSTTIFSSKLVCGDCGHFFGSKVWHSTSKYRRVIYRCNEKYNGSSKCSTPHVTEEEVKQWFVSAVNQVLDNKLEVIDNLSVLLSIGSPEVIDEKIKILETEAEVVSQLVANLVSENAIISQDQDKYLNKYNQLTSKYEVIVQEIESLELQRMKKSKRNKELQVFMEVLKKQEGLLTDFDELLWETMIGSVTINPGKKIIIKFKNQTVVTI

SEQ ID NO: 11331 - protein, 519 aa, Unknown
  Description of Unknown: Integrase C74 sequence
  PS51736,IPR006119,PTHR30461,G3DSA:1.10.10.2600,PTHR30461:SF3, IPR011109,PF07508,SSF53041,PF00239,SM00857, G3DSA:3.40.50.1390,cd00338,IPR038109,IPR036162
MDKATTPPEFERRRARAAQYLRMSTERQIYSIDNQRDAIRNYAEVMGYDIVATYEDPGRSGLSILGRPGLKRLIEDIESRRADFETVVVYDVSRWGRFQNTDESASYEYRCQRAGVRIEFCAELFVNDGSIGSDVLKAIKRSMAAEYSRMLSNRVFAGQSRIVKLGFSGGGPAGYGLRRLLVDGSGNPKAILHRDERKGLASDRVVLVPGPENEVSTVRWIFNQFVKKGKTAVEIASALNARGLVTEFGRPWTGACVGTILASEKYVGNIVWNRISHRLLQNRLRNPPSALVRADNVIEPLVPRALFDRAQAIRRARTYLRPDEELLADLTKLLKERGRLSSPIIDAAPGCHSASIYAHRFGSMNAAYQLIGYDGSANYRKLDIRRRLIQIRQQTIENLMSDIDGVGGSALYDPQTKIMRVNDEFSVAIWTAQYRMNVTGFPRWPFWKRGLIGPEVTILIRMESDNQTVRDFLIAPAHEAQSALHMLKADNGVRLDAFLFASLDPVVEMARREPMPANI

SEQ ID NO: 11332 - protein, 519 aa, Unknown
  Description of Unknown: Integrase C75 sequence
  PS51736,IPR006119,PTHR30461,G3DSA:1.10.10.2600, PTHR30461:SF3,IPR011109,PF07508,SSF53041, PF00239,SM00857,G3DSA:3.40.50.1390,cd00338, IPR038109,IPR036162
MDRATTPPEFERRRARAAQYLRMSTERQIYSIDNQRDAIRNYAEVMGYDIVATYEDPGRSGLSILGRPGLKRLIEDIESRRADFETVVVYDVSRWGRFQNTDESASYEYRCQRAGVRIEFCAELFVNDGSIGSDVLKAIKRSMAAEYSRMLSNRVFAGQSRIVKLGFSGGGPAGYGLRRLLVDGSGNPKAILHRDERKGLASDRVVLVPGPENEVSTVRWIFNQFVKKGKTAVEIASALNARGLVTEFGRPWTGACVGTILASEKYVGNIVWNRISHRLLQNRLRNPPSAVVRADNVIEPLVTRALFDRAQAIRRARTYLRPDEELLADLTKLLKERGRLSSPIIDAAPGCHSASIYAHRFGSMNAAYQLIGYDGSANYRKLDIRRRLIQIRQQTIENLMSDIDGVGGSALYDPQTKIMRVNDEFSVAIWTAQYRMNVTGFPRWPFWKRGLIGPEVTILIRMESDNQTVRDFLIAPAHEAQSALHMLKADNGVRLDAFLFASLDPVVEMARREPMPANI

SEQ ID NO: 11333 - protein, 517 aa, Unknown
  Description of Unknown: Integrase C76 sequence
  PF07508,SSF53041,IPR036162,PTHR30461:SF3,SM00857, Coil,PF00239,PS51736,IPR011109,G3DSA:3.40.50.1390, PS51737,IPR006119,PTHR30461,cd00338
MRVLGRIRLSRATDESTSVERQREIIELWAQQNGHEIVGWAEDQDVSGSVDPFKTPALGPWLKEDKAWEWDILCAWKLDRLGRDSIRINNLFGWCQENGKTLVSTSEGIDLSTPVGRLIAQVIAFLAEGEREAISERTLASQKKLRELGRWGGGKIFYGYKAEEREGAGWELVPDEHASKVLKGIIDKVLAGQSTESISRDLNESGELAPLDYQRQRAGKPVKGVRWSNAHLRQQLKSKALLGHMTHGGKTVRDEDGLPILKGPPLVTQDTYDQLQQVLEVRSFKVSRRSTNASPLLGVAFCGLKMGDAVCGKPLHLRQHHRNGKVYRYYQCTGGVGIGHPKTHDYANIIKADELEESFESTFLRTYGGEKVKERVFVPAESHQEELEEAVRAAGEIAPLLGTATSDTMRKMYQTQLESIDRRIAALEKLPTSSARYEWREQPATYADAWEQASTEERRQLLIKRKVHAEVSVPKGESRYRDSLPLIHMFTLDIDPEEFEAWEERAAEERLKHGVPS

SEQ ID NO: 11334 - protein, 515 aa, Unknown
  Description of Unknown: Integrase C77 sequence
  PF07508,SSF53041,IPR025827,IPR036162,SM00857,PF00239, PTHR30461:SF3,PS51737,IPR011109,G3DSA:3.40.50.1390, IPR006119,PTHR30461,cd00338,PF13408
MQVRALVGARVSHVQGEEKTSHLTQRTKGESYAESQGWTVVGGFEDLDVSAIKLSPWDRPDLKQWLDEKADDWDALIFSKTDRVFRSANDCVKLAEWCKDHRKILVLVDDGIKLDYFNPEDSKDAFAGAMSKVFLILASVFAEIEGQRFVQRARDRVAYLRPTDRWGYGNPPYGFVVVDHPTGVGKALGHDEGDQAVLHRIADEVLSGNSLVSICVKLNDEGVLSPSDRTRVRAKKEPEGSKWRPLTMKRLLTSPSTQGIKMAKERPVLDAQGEPVRVGPESFDAETWKQLGIELADRATEPSKRRHSTNPLLGVAKCAICGLNMRQHGKTTKYGSYRYYNCIGHPIACPKVSIVAETAEDAVYSIFLNSHSGRRVKERVWQAGSDHSAELDQTLRTIESLREDRAAGLFNDPEDAKMYQQQMAALLSKRTALSDAPIIKAGWVEMETDRTYGEVWESSTEEEKRKMLVDAGVVLWVTNRNDYYVGDLDKLLGEGDGGEEFLASTVLAKAGITSR

SEQ ID NO: 11335 - protein, 514 aa, Unknown
  Description of Unknown: Integrase C78 sequence
  PTHR30461:SF3,PF00239,PS51736,G3DSA:3.40.50.1390,IPR038109, IPR006119,G3DSA:1.10.10.2600,PF13408,PF07508,SSF53041, PS51737,cd03768,SSF109709,IPR036162,SM00857, IPR011109,IPR025827,Coil,PTHR30461
MECVIKMGAEEEKMLKEVRCAIYTRKSNEDGLEQKFNSLDAQRVACEKYIKSKEGWVVLAKRYDDGGFSGKNLERPAIKELFEDVKKGEVDCVVVYTLDRLSRETKDSIEVTSFFRRHRVNFVAVTQIFDNNTPMGKFVQTVLSGAAQLEREMIVERVKNKIATSKEQGLWMGGTLPLGYDVKDKELIINEKEAKTVKHIFERYVELKSMAELARELNSQGYRTKSDIFKKATVRRIITNPIYMGKIRHYEKEYEGKHEAIIEEEKWQKAQELIRNQPYRKARYEEALLKGIIKCKSCDVNMTLTYSKKENKRYRYYVCNNHLRGKGCESENRNVIAGEVEKEVMKRAEQLYENWKEKTEEKIEKLWENLSFGKQKEVVKKLIRTVLVKEDGIEMSLENKVEFIPIWLKKKGNKCTVVEPEGKTNNALLKAVVRAHLWKRQLEEGKYESVKELSAKINIGTRRVQQILRLNYLAPKIKEDIVNGRQPRDLKLVDLREIPMLWSEQREKFYGSAS

SEQ ID NO: 11336 - protein, 513 aa, Unknown
  Description of Unknown: Integrase C79 sequence
  PF07508,SSF53041,PTHR30461:SF3,IPR036162,SM00857, PF00239,IPR011109,PS51737,G3DSA:3.40.50.1390,IPR006119, PTHR30461,cd00338
MSSAPRALVGARVSVVQGPQKVSHLAQIETATNWAISKGYNIVGTFEDLGVSAEKRPEDRPDLGPWLTPEGAAQWDVIVWSKMDRAFRSTRHCVDFARWAEEQHKVVAFADDGLTLDYRPKRPGAVKGIDEMMAELFVYLGSFFAQLELNRFKTRAQDSHRALRGMDRWASGVPPLGFKVVDHPSGKGRGLATDEVGKELLHEMARRLLDGWSFIRIAAWLNEQGVLTNMDRARAAAGKPPKARPWNVNVVIDGLTSPRTQGFKMTGRGKHARTVLDSEGDPIRMAPPTFDDATWAQIQKAAQLRKIGRRNPSRSANPVLGVAFCGCTGCPACGVTEGICGASLAQQHTKNRSGGEDYRYYRCGRTPLNCNGVTAKAEDVDFQLAHEFTYFRGDEPMTRKVFVPGEDRSAELEQVNATIERLRMESDAGLLTTPEDERMWLERMKAQVAKRDQLAATPSRAAGWAIEETGQTKADAWKAADESERRQLYLDAGLRYLLCRKGERSYFDRSYDG

SEQ ID NO: 11337 - protein, 512 aa, Unknown
  Description of Unknown: Integrase C80 sequence
  PF07508,PS00397,SSF53041,IPR036162, IPR006118,SM00857,PF00239,PTHR30461:SF3, PS51736,IPR011109,PS51737,G3DSA:3.40.50.1390, IPR038109,IPR006119,PTHR30461,cd00338,G3DSA:1.10.10.2600
MTAAAIYVRVSSEMQLDGHSLDAQERLCREYCQRHGLAITSVYREEAESASSTERPELQRMLTDARAHVFAAIVFYHTWRFSRSIEDSALMTRLERSGIRLMSVTDAIDSATPAGRLQRNITLAVGQHYLDQLRAETTRGKRERALQGYSNASHPPFGYVRVSDRQNAPGPEAGTVREMFERYAAGAHTDIQIAEWLNAQGKRTAGHWGHRAFSKDTVRAILINPYYIGLVGYRGLSDRETETGKRARASKRTWQWIPGKHEALITPELFDRCRAVRAKRGSRYVGRRASQSHGYILSKMAKCARCGGPLRCMTDNQGEPKYTCTAHDRAVACDATRRSVRETRLLEDLDALVSELSLTEPVKARAIELLESGDETVAADRRRIALDAEMRRLNRMYQAGNIGDGEYDQEIGRVKGELASLAKPADAFDLRAAIAALDDIAGLWRNATGPERAEILRTVFEAVRVDLDAGAVTGYEPKNEYTAVLRAAYSQEDAISGSDGRRFRNWRPRRKS

SEQ ID NO: 11338 - protein, 512 aa, Unknown
  Description of Unknown: Integrase C81 sequence
  PF07508,SSF53041,IPR036162,SM00857,Coil, PF00239,PS51736,IPR011109,G3DSA:3.40.50.1390,PS51737, IPR006119,PTHR30461,cd00338
MIDYVLEDGDTPLTCASLCTCCAPCAHMWHDGYTPRHREEPPLGKRAVIYTRVSRDDTGEGRSNDRQEAECRRLTDYKRLDVVAVEADISISAYSGKARPAWKRVLNMVRAGEVDYVIAYHMDRMTRSMLDLEELILLCEEHNVGIATAVGDIDLTSDMGRMVARILAAVARAEVERKSARQKLANAQRAAEGKPHVSGIRPFGYADDHLTLVPEEADAIRDAARRALAGETMISIAKSWTKAGLISARARRGHDKGKRATEAGWSARGVRNVLISPRYAGIRTYNGEPVGEGDWEPILDRETHLALVDTLGDPARRKGAVKMGRRPTSLLTAFALCEVCDGPVRASAIRGRQTYTCRAGHGHADRAIADAEVSAATIALLASPQWMTLIVPSGDERVEEAKAEVDDLKLKLKTYAELLANDVMDVEQFTQATATARAKLKGAEELLSRAGMGPMFTGLSLGTPAVAGQWEGLGLDRQRAIVQGLLSVKVRRKAKGMSFEDQVVVEPRYVAA

SEQ ID NO: 11339 - protein, 511 aa, Unknown
  Description of Unknown: Integrase C82 sequence
  PF07508,SSF53041,IPR036162,PTHR30461:SF3, SM00857,Coil,PF00239,IPR011109, PS51737,G3DSA:3.40.50.1390,IPR006119,PTHR30461, cd00338
MAQPLRALVGARVSVVQGPQKVSQQAQLETARKWAEAQGHEIVGTFEDLGVSASVRPDDRPDLGKWLTDEGASKWDVIVWSKMDRAFRSTKHCVDFAQWAEERQKVVMFAEDNLRLDYRPGAAKGIDAMMAELFVYLGSFFAQLELNRFKSRAQDSHRILRQTDRWASGLPPLGYKTVPHPSGKGFGLDTDPEGKDLLYQMAGKLLDGGSLIGIAKWLNETGAMSNRARARVAKGKPADQRPWTVGTVKDALTSLKTQGIKMSGKGKNSKPVLDAKGEQIVLAPPTFDWDTWKQIQDAVALREQAPRSRVHTKNPMLGVGICGKCGSTLAQQHSKKKPAKSDPPGSPDRIYRYYRCSRTPVNCDGVFIVADEADTLLEEAFLFEWADQPVTRRVFVPGEDHTYELEQINETIARLRRESDAGLIVGEADEQEYMERMRSLITRRTKLEAMPLRSAGWVEETTGQTYGEAWETEDHQQLLKDAKVKFILYSNKPRNIEVVVPQDRVAVDLAI

SEQ ID NO: 11340 - protein, 510 aa, Unknown
  Description of Unknown: Integrase C83 sequence
  PF07508,SSF53041,PTHR30461:SF3,IPR036162,SM00857, PF00239,Coil,G3DSA:3.40.50.1390,IPR011109,PS51737, IPR006119,PTHR30461,cd00338
MPQPLRALVGARVSVVQGPQKVSQQAQLETARKWAEAQGHEIVGTFEDLGVSASVRPDERPDLGKWLTDEGASKWDVIVWSKMDRAFRSTKHCVDFAQWAEERQKVVMFAEDNLRLDYRPGAAKGIDAMMAELFVYLGSFFAQLELNRFKSRAQDSHRVLRQTDRWASGLPPLGYKTVPHPSGKGFGLDTDEDTKAVLYDMAGKLLDGWSLIGIAKDLNDRGVLGSRSRARLAKGKPIDQAPWNVSTVKDALTNLKTQGIKMTGKGKHAKPVLDDKGEQIVLAPPTFDWDTWKQIQDAVALREQAPRSRVHTKNPMLGIGICGKCGATLAQQHSRKKPAKSDVPGQVVVYRYYRCSRTPVNCDGVFIVADEADTLLEEAFLYEWADQPVTRRVFVPGEDHTYELEQINETIARLRRESDAGLIVSDEDERIYLERMRSLITRRTKLEAMPRRSAGWVEETTGQTYGEAWETEDHQQLLKDAKVKFILYSNKPRNIEVVVPQDRVAVDLAI

SEQ ID NO: 11341 - protein, 508 aa, Unknown
  Description of Unknown: Integrase C84 sequence
  PF07508,SSF53041,IPR036162,SM00857,PF00239,PS51736,G3DSA:3.40. 50.1390,IPR011109,PS51737,IPR006119,PTHR30461,cd00338
MFPQRIRRAPRRQGYARDPWWSQCDTYPILAVTPLIVGMGSYCQCMRAIIYCRVSSDPHARGKSVTEQEADCRATSKAHGWDIGEVLVDNDRGASRYSRKDRPAYRRLAETLAPGDVLVTWEASRAQRDLSAYLQLRDLCAERGVLWSYSGRTYDLARGDDRFTTGLDALLSEKEVEVTRERVLRSMRANAAAGRPHGKLPYGYMIVRDPHTGKTLDRVANPDTAPTFREAVQRVLDGDSLYAVCQDFNARGVPAPRPRRDGTPAKWIPVTLRKILESPTYAGLRLSNGEVIGQATWEPLISMEEHERLKALFADPHRLTHRGSEPQWLLAGIARCGVCGATVKRIKSRGVQTYTCRDGFCAARMVTTVEDYVVEAMMRRLEGQDLVGQIDSDNAEYASAVEAVRALRQRLDSFTDAAADGEVTPAALARIEAKLLPQIERAEGRVRALAHSPAVAKIAGAGARERWEALTVRDRRDLVRALVDVQIHRVGKGRRNVPIGEGIGLTWL

SEQ ID NO: 11342 - protein, 508 aa, Unknown
  Description of Unknown: Integrase C85 sequence
  Coil,PS51736,IPR006119,PTHR30461,PS51737, G3DSA:1.10.10.2600,PTHR30461:SF3,IPR011109,PF07508,PF13408, SSF53041,PF00239,SM00857,G3DSA:3.40.50.1390,cd00338, IPR038109,IPR036162,IPR025827
MKKAIAYMRFSSPGQMSGDSLNRQRRLIAEWLKVNSDYYLDTITYEDLGLSAFKGKHAQSGAFSEFLDAIEHGYILPGTTLLVESLDRLSREKVGEAIERLKLILNHGIDVITLCDNTVYNIDSLNDPYSLIKAILIAQRANEESEIKSSRVKLSWKKKRQDALESGTIMTASCPRWLSLDDKRTAFVPDPDRVKTIELIFKLRMERRSLNAIAKYLNDHAVKNFSGKESAWGPSVIEKLLANKALIGICVPSYRARGKGISEIAGYYPRVISDDLFYAVQEIRLAPFGISNSSKNPMLINLLRTVMKCEACGNTMIVHAVSGSLHGYYVCPMRRLHRCDRPSIKRDLVDYNIINELLFNCSKIQPVENKKDANETLELKIIELQMKINNLIAALSVAPEVTAIAEKIRVLDKELRRASVSLKTLKSKAVSSLGDFHAIDLTSKNGRELCRTLAYKTFEKIIINTDNKTCDIYFMNGIVFKHYPLMKTISAQQAISTLKYMVDGEVYF

SEQ ID NO: 11343 - protein, 507 aa, Unknown
  Description of Unknown: Integrase C86 sequence
  PF07508,SSF53041,IPR036162,IPR025827,SM00857, Coil,PF00239,PTHR30461:SF3,PS51737,IPR011109, G3DSA:3.40.50.1390,IPR006119,PTHR30461,cd00338,PF13408
METMPQPLRALVGARVSVVQGPQKVSQQAQLETARKWAEAQGHEIVGTFEDLGVSASVRPDERPDLGKWLTDEGASKWDVIVWSKMDRAFRSTKHCVDFAQWAEERQKVVMFAEDNLRLDYRPGAAKGIDAMMAELFVYLGSFFAQLELNRFKSRAQDSHRVLRQTDRWASGLPPLGYKTVPHPSGKGFGLDTDEDTKAVLYDMAGKLLDGWSLIGIAKDLNDRGVLGSRSRARLAKGKPIDQAPWNVSTVKDALTNLKTQGIKMTGKGKHAKPVLDDKGEQIVLAPPTFDWDTWKQLQDAVALREQAPRSRVHTKNPMLGIGICGKCGATLAQQHSRKKSDKSVVYRYYRCSRTPVNCDGVFIVADEADTLLEEAFLYEWADQPVTRRVFVPGEDHTYELEQINETIARLRRESDAGLIVSDEDERIYLERMRSLITRRTKLEAMPRRSAGWVEETTGQTYGEAWETEDHQQLLKDAKVKFILYSNKPRNIEVVVPQDRVAVDLAI

SEQ ID NO: 11344 - protein, 504 aa, Unknown
  Description of Unknown: Integrase C87 sequence
  PF07508,SSF53041,IPR036162,PTHR30461:SF3,SM00857,PF00239,Coil, PS51736,G3DSA:3.40.50.1390,IPR011109,PS51737,IPR006119,PTHR30461 ,cd00338
MRALVVIRLSRVTDATTSPERQLESCQQLCAQRGWDVVGVAEDLDVSGAVDPFDRKRRPNLARWLAFEEQPFDVIVAYRVDRLTRSIRHLQQLVHWAEDHKKLVVSATEAHFDTTSPFAAVVIALMGTVAQMELEAIKERNRSAAHFNIRAGKYRGSLPPWGYMPARVEGEWRLLVDPVQRERILEVYHRVVDNHEPLHQIAHDLNQRGLPSPKDYFAQLQGREPKGREWSATALKRSLISEAMLGYTTLNGKTVRDDDGAPLVRAEPILTREQLESLRAELVKTSRAKPAVSTPALLLRVLFCAVCGEPAYKFTGGGRKNARYRCRSWGWAQRCGNGTVAMAEWDAFCEEQVLDLLGDAERLEKVWVAGSDSAVELAEVNAELVDLTSLIGSPAYRAGSPQREALDARIAALAARQEELEGLEARPSGWEWRETGQRFGDWWREQDTAAKNTWLRSMNVRLTFDVRGGLTRTIDFGDLQEYEQHLRLGSALDLVNAEKPPTGR

SEQ ID NO: 11345 - protein, 504 aa, Unknown
  Description of Unknown: Integrase C88 sequence
  PF07508,SSF53041,PTHR30461:SF3,IPR036162,SM00857, PF00239,IPR025827,Coil,G3DSA:3.40.50.1390,PS51737, IPR011109,IPR006119,PTHR30461,cd00338,PF13408
MPQPLRALVGARVSVVQGPQKVSQQAQLETACKWAEAQGHEIVGTFEDLGVSASVRPDERPDLGKWLTDEGASKWDVIVWSKMDRAFRSTKHCVDFAQWAEERQKVVMFAEDNLRLDYRPGAAKGIDAMMAELFVYLGSFFAQLELNRFKSRAQDSHRVLRQTDRWASGLPPLGYKTVPHPSGKGFGLDTDEDTKAVLYDMAGKLLDGWSLIGIAKDLNDRGVLGSRSRARLAKGKPIDQAPWNVSTVKDALTNLKTQGIKMTGKGKHAKPVLDDKGEQIVLAPPTFDWDTWKQIQDAVALREQAPRSRVHTKNPMLGIGICGKCGATLAQQHSRKKSDKSVVYRYYRCSRTPRNCDGVFIVADEADTLLEEAFLYEWADQPVTRRVFVPGEDHTYELEQINETIARLRRESDAGLIVSDEDERIYLERMRSLITRRTKLEAMPRRSAGWVEETTGQTYGEAWETEDHQQLLKDAKVKFILYSNKPRNIEVVVPQDRVAVDLAI

SEQ ID NO: 11346 - protein, 504 aa, Unknown
  Description of Unknown: Integrase C89 sequence
  PF07508,SSF53041,IPR036162,PTHR30461:SF3, SM00857,IPR025827,PF00239,Coil, G3DSA:3.40.50.1390,IPR011109,PS51737,IPR006119, PTHR30461,cd00338,PF13408
MPQPLRALVGARVSVVQGPQKVSQQAQLETARKWAEAQGHEIVGTFEDLGVSASVRPDERPDLGKWLTDEGASKWDVIVWSKMDRAFRSTKHCVDFAQWAEERQKVVMFAEDNLRLDYRPGAAKGIDAMMAELFVYLGSFFAQLELNRFKSRAQDSHRVLRQTDRWASGLPPLGYKTVPHPSGKGFGLDTDEDTKAVLYDMAGKLLDGWSLIGIAKDLNDRGVLGSRSRARLAKGKPIDQAPWNVSTVKDALTNLKTQGIKMTGKGKHAKPVLDDKGEQIVLAPPTFDWDTWKQIQDAVALREQAPRSRVHTKNPMLGIGICGKCGATLAQQHSRKKSDKSVVYRYYRCSRTPVNCDGVFIVADEADTLLEEAFLYEWADEPVTRRVFVPGEDHTYELEQINETIARLRRESDAGLIVSDEDERIYLERMRSLITRRTKLEAMPRRSAGWVEETTGQTYGEAWETEDHQQLLKDAKVKFILYSNKPRNIEVVVPQDRVAVDLAI

SEQ ID NO: 11347 - protein, 501 aa, Unknown
  Description of Unknown: Integrase C90 sequence
  PF07508,SSF53041,PTHR30461:SF3,IPR025827,SM00857, PF00239,IPR036162,PS51736,IPR011109,PS51737, G3DSA:3.40.50.1390,IPR006119,PTHR30461,cd00338,PF13408
MSIGELRRSGLDLLRYPRHMTNRAVFYLRLSSTDDASTSISRQEDDLRQHAEREGWEVVRVLTDDGISGRKARANAAEALRMLREGEADVLAVWKFDRWSRQGLGAVADLVATLDAVPRASFVALRDGLNSGQPAWRIIASVLAEVARMEADNTATRVKSSIAALKKASRYSGGVVPFGYRTAPAPDGPGRILEPNPDEAAVVREIADRILAGESLARLALELTARGIPTSRSDAREARNAGKPYEDLDPGRWKATTIRTVWTGDHLLGRVTHKGSPLTDPDGVPVRVWEPILDLPTLTRLRARLTAPGKPRRVKAARLLSGVVYCAHCGSKCYVRTSGGYPIYGCSAVALGRECSQPRITAAGLEEYVTERFLSVVGDAPEVEEVELVADSGTAEALAEIEGALQEASAALLADDADPAAIVARIGALKARRAELRALPAELTREIRPTGRTLREAWHATDDVDARRALLLEGLDHVAVSMRRKHGKLFEPERVDIKWYS

SEQ ID NO: 11348 - protein, 500 aa, Unknown
  Description of Unknown: Integrase C91 sequence
  PF07508,SSF53041,IPR036162,PTHR30461:SF3,SM00857,PF00239,Coil, PS51736,G3DSA:3.40.50.1390,IPR011109,PS51737,IPR006119,PTHR30461 ,cd00338
MRALVVIRLSRVTDATTSPERQLESCQQLCAQRGWDVVGVAEDLDVSGAVDPFDRKRRPNLARWLAFEEQPFDVIVAYRVDRLTRSIRHLQQLVHWAEDHKKLVVSATEAHFDTTTPFAAVVIALMGTVAQMELEAIKERNRSAAHFNIRAGKYRGSLPPWGYLPTRVDGEWRLVPDPVQRERILEVYHRVVDNHEPLHLVAHDLNRRGVLSPKDYFAKLQGREPRGREWSATALKRSLISEAMLGYATLNGKTVRDDDGAPLVRSEPILTREQLEALRAELVKADRTKPAVSTPSLLLRVLFCAVCGEPAYKFAGGQRKNPRYRCRSMGFPKHCGNGTVAMAEWDAFCEEQVLDLLGDAERLEKVWVAGSDSAVELAEVNAELVDLTSLIGSPAYRVGSPQREALDARIAALAARQEELEGLEARPSGWEWRETGQRFGDWWREQDIAGKNTWLRSMNVRLTFDVRGGLTRTIDFGDLQEYEQHLRLGSVVEQLHTGMS

SEQ ID NO: 11349 - protein, 500 aa, Unknown
  Description of Unknown: Integrase C92 sequence
  PF07508,SSF53041,PTHR30461:SF3,IPR036162,SM00857, PF00239,Coil,PS51736,IPR011109,G3DSA:3.40.50.1390, PS51737,IPR006119,PTHR30461,cd00338
MRALVVIRLSRVTDATTSPERQLESCQQLCAQRGWDVVGVAEDLDVSGAVDPFDRKRRPNLARWLAFEEQPFDVIVAYRVDRLTRSIRHLQQLVHWAEDHKKLVVSATEAHFDTTTPFAAVVIALMGTVAQMELEAIKERNRSAAHFNIRAGKYRGSLPPWGYLPTRVDGEWRLVPDPVQRERILEVYHRVVDNHEPLHLVAHDLNRRGVLSPKDYFAKLQGREPQGREWSATALKRSLISEAMLGYATLNGKTVRDDDGAPLVRAEPILTREQLEALRAELVKTDRTKPAVSTPSLLLRVLFCAVCGEPAYKFAGGGRKHPRYRCRSMGFPKHCGNGTVAMAEWDAFCEEQVLDLLGDAERLEKVWVAGSDSAVELAEVNAELVDLTSLIGSPAYRAGSPQREALEARIAALAARQEELEGLEARPSGWEWRETGQRFGDWWREQDTAAKNTWLRSMNVRLTFDVRGGLTRTIDFGDLQEYEQHLRLGSVVERLHTGMS

SEQ ID NO: 11350 - protein, 500 aa, Unknown
  Description of Unknown: Integrase C93 sequence
  PF07508,SSF53041,IPR036162,PTHR30461:SF3,SM00857,PF00239,Coil ,PS51736,IPR011109,PS51737,G3DSA:3.40.50.1390,IPR006119, PTHR30461,cd00338
MRALVVIRLSRVTDATTSPERQLESCQQLCAQRGWDVVGVAEDLDVSGAVDPFDRKRRPNLARWLAFEEQPFDVIVAYRVDRLTRSIRHLQQLVHWAEDHKKLVVSATEAHFDTTTPFAAVVIALMGTVAQMELEAIKERNRSAAHFNIRAGKYRGSLPPWGYLPTRVDGEWRLVPDPVQRERILEVYHRVVDNHEPLHLVAHDLNRRGVLSPKDYFAKLQGREPRGREWSATALKRSLISEAMLGYATLNGKTVRDDDGAPLVRSEPILTREQLEALRAELVKADRTKPAVSTPSLLLRVLFCAVCGEPAYKFAGGQRKNPRYRCRSMGFPKHCGNGTVAMAEWDAFCEEQVLDLLGDAERLEKVWVAGSDSAVELAEVNAELVDLTSLIGSPAYRVGSPQREALDARIAALAARQEELEGLEARPSGWEWRETGQRFGDWWREQDIAAKNTWLRSMNVRLTFDVRGGLTRTIDFGDLQEYEQHLRLGSVVERLHTGMS

SEQ ID NO: 11351 - protein, 500 aa, Unknown
  Description of Unknown: Integrase C94 sequence
  PF07508,SSF53041,PTHR30461:SF3,IPR036162,SM00857, PF00239,Coil,PS51736,IPR011109,G3DSA:3.40.50.1390, PS51737,IPR006119,PTHR30461,cd00338
MRALVVIRLSRVTDATTSPERQLESCQRLCAQRGWDVVGVAEDLDVSGAVDPFDRKRRPNLARWLAFEEQPFDVIVAYRVDRLTRSIRHLQQLVHWAEDHKKLVVSATEAHFDTTTPFAAVVIALMGTVAQMELEAIKERNRSAAHFNIRAGKYRGSLPPWGYLPTRVDGEWRLVPDPVQRERILEVYHRVVDNHEPLHLVAHDLNRRGVLSPKDYFAKLQGREPQGREWSATALKRSLISEAMLGYATLNGKTVRDDDGAPLVRAEPILTREQLEALRAELVKTDRTKPAVATPSLLLRVLFCAVCGEPAYKFTGGGRKNARYRCRSWGWAQRCGNGTVAMAEWDAFCEEQVLDLLGDAERLEKVWVAGSDSAVELAEVNAELVDLTSLIGSPAYRAGSPQREALDARIAALAARQEELEGLEARPSGWEWRGTGQRFGDWWREQDTAAKNTWLRSMNVRLTFDVRGGLTRTIDFGDLQEYEQHLRLGSVVEQLHTGMS

SEQ ID NO: 11352 - protein, 500 aa, Unknown
  Description of Unknown: Integrase C95 sequence
  PF07508,SSF53041,IPR036162,PTHR30461:SF3,SM00857,PF00239,Coil, PS51736,IPR011109,PS51737,G3DSA:3.40.50.1390,IPR006119, PTHR30461,cd00338
MRALVVIRLSRVTDATTSPERQLESCQQLCAQRGWEVVGVAEDLDVSGAVDPFDRKRRPNLARWLAFEEQPFDVIVAYRVDRLTRSIRHLQQLVHWAEDHKKLVVSATEAHFDTTTPFAAVVIALMGTVAQMELEAIKERNRSAAHFNIRAGKYRGSLPPWGYLPTRVDGEWRLVPDPVQRERILEVYHRVVDNHEPLHLVAHDLNRRGVLSPKDYFAKLQGREPQGREWSATALKRSLISEAMLGYATLNGKTVRDDDGAPLVRSEPILTREQLEALRAELVKTDRTKPAVSTPSLLLRVLFCAVCGEPAYKFTGGGRKNARYRCRSWGWAQRCGNGTVAMAEWDAFCEEQVLDLLGDAERLEKVWVAGSDSAVELAEVNAELVDLTSLIGSPAYRVGSPQREALDARIAALAARQEELEGLEARPSGWEWRETGQRFADWWAQQDIAAKNTWLRSMNVRLTFDVRGGLTRTIDFGDLQEYEQHLRLGSVVERLHTGMS

SEQ ID NO: 11353 - protein, 500 aa, Unknown
  Description of Unknown: Integrase C96 sequence
  PF07508,SSF53041,IPR036162,PTHR30461:SF3,SM00857, Coil,PF00239,IPR011109,PS51737,G3DSA:3.40.50.1390, IPR006119,PTHR30461,cd00338
MTQTLRALVGARVSVVQGPQKVSHIAQQESGTRWATERGHEIVGTFKDLDVSASVSPFERPDLGPWLSPERQDEWDILVFSKIDRMFRSTRDCVKFAEWAEERKKILVFAEDSMTLNYRDKSDSLEKMMSELFIYIGSFFAQLELNRFRSRAKDSHRVLRGTDRWASGVPPLGFKVIDHPSGKGKGLATDPEGKELLYDMAGKLLEGWSFIRISQYLNEKKIPTQLDKARMAKGKPAYENPWSVNTVIESLTSLRTQGLKMTRSGKKFVTVLDEAGEPIRMAPPTFDAATWKQIQEAAALRQNNRRSRSYTANPMLGVGFCGQCGASLAQQFSRSKLKDGTVNEHRYYRCGRTPVNCQNVFLRADDGDDLLEQTFLEAYGDEPVTRRVFVPGEDHTEELEQVRATIERLRRESDAGLIVSAEDERIYLERMKSLIDRRTQLEAVPRRAAGWVTEETGQTYREAWETEDHRTLLSEAGIRFELKSSKPMNFALHVPQKEAG

SEQ ID NO: 11354 - protein, 500 aa, Unknown
  Description of Unknown: Integrase C97 sequence
  PF07508,SSF53041,IPR036162,IPR025827, SM00857,PF00239,PS51736,IPR011109, PS51737,G3DSA:3.40.50.1390,IPR038109,PTHR30461:SF21, IPR006119,PTHR30461,cd00338,G3DSA:1.10.10.2600,PF13408
MPFNHKELYRRMTPMTATLESPPRHEAPPRLRAAIYLRMSTDKELGIERQREDCVALCERLGWEPVLYIDNDRSAVKENVRRESYEEMCADIREGLLDAIITWRSDRLYRKMRDLLPLIDLIEGVNRNGKRIPIETCQTGLIDLTTDAGRMTAKILAAVAENEGEVRTARQMRAYEQIATSGRPLGAPAFGYTYDKQAKKRHVVPEEAAAIREAYDDILAGGTVYSIAKKWNELGLKTPRGNVFIDTAVAKILRSPRYAGLYSFRGEIIGKGDWEPIVDVETWEAVSAILDRKNKGPTGPRVRVTLLSGIARCGNCGFKMAASSNATGGRVYRCRNFGVCHHGVTRMRHKVDKYVEAMVVAKLEERKWVVGTQADAEKAKALHAEAETLRMRKLSFTDALADGTLTPAQVKEATNKVDTKLEQIETQLARLTKSRVYDGLLSHDNIEAVWVELPLDRKRAIIQQLCDKIVVRHVGVTGRAASKLPLGHNIDIHWHNPSDN

SEQ ID NO: 11355 - protein, 500 aa, Unknown
  Description of Unknown: Integrase C98 sequence
  PF07508,SSF53041,IPR036162,PTHR30461:SF3,SM00857, PF00239,Coil,PS51736,G3DSA:3.40.50.1390,PS51737, IPR011109,IPR006119,PTHR30461,cd00338
MRALVVIRLSRVTDATTSPERQLESCQQLCAQRGWDVVGVAEDLDVSGAVDPFDRKRRPNLARWLAFEEQPFDVIVAYRVDRLTRSIRHLQQLVHWAEDHKKLVVSATEAHFDTTTPFAAVVIALMGTVAQMELEAIKERNRSAAHFNIRAGKYRGSLPPWGYLPTRVDGEWRLVPDPVQRERILEVYHRVVDNHEPLHLVAHDLNRRGVLSPKDYFAKLQGREPQGREWSATALKRSLISEAMLGYATLNGKTVRDDDGAPLVRSEPILTREQLEALRAELVKTDRTKPAVSTPSLLLRVLFCAVCGEPAYKFAGGGRKHPRYRCRSMGFPKHCGNGTVAMAEWDAFCEEQVLDLLGDAERLEKVWVAGSDSAVELAEVNAELVDLTSLIGSPAYRVGSPQREALDARIAALAARQEELEGLEARPSGWEWRETGQRFADWWAQQDTAGKNTWLRAMNVRLTFDVRGGLTRTIDFGDLQEYEQHLRLGSVVEQLHTGMS

SEQ ID NO: 11356 - protein, 500 aa, Unknown
  Description of Unknown: Integrase C99 sequence
  PF07508,SSF53041,IPR036162,PTHR30461:SF3,SM00857,Coil,PF00239 ,PS51736,IPR011109,G3DSA:3.40.50.1390,PS51737,IPR006119, PTHR30461,cd00338
MRALVAIRLSRVTDATTSPERQLESCQQLCAQRGWDVVGVAEDLDVSGAVDPFDRKRRPNLARWLAFEEQPFDVIVAYRVDRLTRSIRHLQQLVHWAEDHKKLVVSATEAHFDTTTPFAAVVIALMGTVAQMELEAIKERNRSAAHFNIRAGKYRGSLPPWGYLPTRVDGEWRLVPDPVQRERILEVYHRVVDNHEPLHLVAHDLNRRGVLSPKDYFAKLQGREPQGREWSATALKRSLISEAMLGYATLNGKTVRDDDGAPLVRAEPILTREQLEALRAELVKTDRTKPAVSTPSLLLRVLFCAVCGEPAYKFTGGGRKNARYRCRSWGWAQRCGNGTVAMAEWDAFCEEQVLDLLGDSERLEKVWVAGSDSAVELAEVNAELVDLTSLIGSPAYRAGSPQREALDARIAALAARQEELEGLEARPSGWEWRETGQRFGDWWREQDTAAKNTWLRSMNVRLTFDVRGGLTRTIDFGDLQEYEQHLRLGSVVERLHNGMS

SEQ ID NO: 11357 - protein, 499 aa, Unknown
  Description of Unknown: Integrase C100 sequence
  PF07508,SSF53041,PTHR30461:SF3,IPR036162,SM00857, Coil,PF00239,PS51736,IPR011109,PS51737, G3DSA:3.40.50.1390,IPR006119,PTHR30461,cd00338
MIRLSRVTDATTSPERQLESCQQLCAQRGWEVVGVAEDLDVSGAVDPFDRKRRPNLARWLSFEEQPFDVIVAYRVDRLTRSIRHLQQLVHWAEDHKKLIVSATEAHFDTTSPFAAVVIALMGTVAQMELEAIKERNRSAAHFNIRAGKYRGSLPPWGYMPARVDGEWRLLVDPVQRERILEVYHRVVDNHEPLHQIAHDLNQRGLPSPKDYFAQLQGREPKGREWSATALKRSLISEAMLGYTTLNGKTVRDDDGAPLVRAEPILTREQLESLRAELVKTSRAKPAVSTPALLLRVLFCAVCGEPAYKFTGGGRKNARYRCRSWGWAQRCGNGTVAMAEWDAFCEEQVLDLLGDSERLEKVWVAGSDSAVELAEVNAELVDLTSLIGSPAYRVGSPQREALDARIAALAARQEELEGLEARPSGWEWRETGQRFADWWRDQDTAGKNTWLRSMNVRLTFDVRGGLTRTIDFGDLQEYEQHLRLGAALDLVNAEKPPTGR

SEQ ID NO: 11358 - protein, 499 aa, Unknown
  Description of Unknown: Integrase C101 sequence
  PF07508,SSF53041,IPR036162,PTHR30461:SF3, SM00857,PF00239,PS51736,G3DSA:3.40.50.1390, IPR011109,PS51737,IPR006119,PTHR30461, cd00338
MIRLSRVTDATTSPERQLESCQQLCAQRGWEVVGVAEDLDVSGAVDPFDRKRRPNLARWLAFEEQPFDVIVAYRVDRLTRSIRHLQQLVHWAEDHKKLVVSATEAHFDTTTPFAAVVIALMGTVAQMELEAIKERNRSAAHFNIRAGKYRGSLPPWGYLPTRVDGEWRLVPDPVQRERILEVYHRVVDNHEPLHLVAHDLNQRGVLSPKDYFAKLQGREPQGREWSATALKRSLISEAMLGYATLNGKTVRDDDGAPLVRAEPILTREQLEALRAELVKTDRTKPAVSAPSLLLRVLFCAVCGEPAYKFAGGGRKHPRYRCRSMGFPKHCGNGTVAMAEWDAFCEEQVLDLLGDAERLEKVWVAGSDSAVELAEVNAELVDLTSLIGSPAYRVGSPQREALDARITALAARQEELEGLEARPSGWEWRETGQRFGDWWRDQDTAGKNAWLRSMNVRLTFDVRGGLTRTIDFGDLQEYEQHLRLGAALDLVNAEKPPTGR

SEQ ID NO: 11359 - protein, 499 aa, Unknown
  Description of Unknown: Integrase C102 sequence
  PF07508,SSF53041,IPR036162,PTHR30461:SF3,SM00857, Coil,PF00239,PS51736,IPR011109,PS51737, G3DSA:3.40.50.1390,IPR006119,PTHR30461,cd00338
MRALVVIRLSRVTDATTSPERQLESCQQLCAQRGWDVVGVAEDLDVSGAVDPFDRKRRPSLARWLAFEEQPFDVIVAYRVDRLTRSIRHLQQLVHWAEDHKKLVVSATEAHFDTTTPFAAVVIALMGTVAQMELEAIKERNRSAAHFNIRAGKYRGSLPPWGYLPTRVDGEWRLVPDPVQRERILEVYHRVVDNHEPLHLVAHDLNRRGVLSPKDYFAKLQGREPQGREWSATALKRSLISEAMLGYATLNGKTVRDDDGAPLVRSEPILTREQLEALRAELVKTDRTKPAVSTPSLLLRVLFCAVCGEPAYKFDAGRKIPRYRCRSFGFAQRCGNGTVPIAEWDAFCEEQVLDLLGDAERLEKVWVAGSVSAVELAEVNAELVDLTSLIGSPAYRVGSPQREALDARIAALAARQEELEGLEARPSGWEWRETGQRFGDWWREQDTSAKNTWLRSMNVRLTFDVRGGLTRTIDFGDLQEYEQHLRLGSVVERLHTGMS

SEQ ID NO: 11360 - protein, 499 aa, Unknown
  Description of Unknown: Integrase C103 sequence
  PS51736,PTHR30461,IPR006119,PS51737, G3DSA:1.10.10.2600,PTHR30461:SF3,IPR011109,PF07508, SSF53041,PF00239,SM00857,G3DSA:3.40.50.1390, cd00338,IPR038109,IPR036162
MSSSQPIQAAIYVRMSTESQNYSTDHQRAKIHEYALSKRIEVVREYVDEGKSGLDIRRRTGLRSLIDDVQSGNADFQLIIVYDVSRWGRFQDVDEAAYHEHTCRRAGIKVVYSGEQFSDDATPLGALMKSIKRMMAAEYSRELSTKTFNAQCRFTEIGFKQGGHAGYGLRRLALTKDGTPRRVLEYGEAKGAVTDRVILIPGPAHEAITIRRVYALYLEQKLSEPAIARLLNAEGIASEFDRPWTHSMVNSLLTNLKYCGTLAFNRKSCKLSSRRKSNPHAEWVVNEGAVEPLISLSLFAQARDERARRVRRYTLDELLVLLQRCHETHGRVNAKIIAADPSMPDPQLFVRGFGSLIAAYDAAGLIPCPSHVFVETKKLIAAKLRDLFAEVKRLALSSGATVHEVKAPHTLVINQCVRVRIEIATRRRPKRGLVNWRVMPLLDADFVLTARLHGDTHELIDYFLIPAVKLANGPLYLKESNLERLAELRYLSLASMFGP

SEQ ID NO: 11361 - protein, 499 aa, Unknown
  Description of Unknown: Integrase C104 sequence
  PS51736,IPR006119,PTHR30461,G3DSA:1.10.10.2600,PTHR30461:SF3, IPR011109,PS00397,PF07508,SSF53041,PF00239, SM00857,G3DSA:3.40.50.1390,IPR006118,cd00338,IPR038109, IPR036162
MARLVSRGAALYVRASTEHQNYSTDHQESALREYAVQHDFEVIAIYRDEGRSGLTLNRRNGLLQLLNDVQSGQAGYVAVLVYDVSRWGRFQDVDESAYYEYACRKAGIMISYCAEPFTNDGSPLATLLKGLKRAMAAEYSRELSAKVFRAQCRLTAAGYKQGGSAGYGLRRQCHSADGLTLRTLEIGERKSLPTDRVGFVLGPSEEVAVVCRIFDMCTDREMPDTKIAEILNAEGLTNQFGRTWSAHNVKGILTNEKYAGTLIFNRSTQRLRSSRRPNDTDKWVRVEDAFPGIVSNEMFNKTKQVRLCRGKHWTDDEMLDGLREILVEHGNVSADLIDNSCLPSAKSYALRFRGLVAAYEAAGVSGPSLSRATIARFRIRCVTKDMAIELERCALRAKAKVEQLTTRTYRINGVIVRLLCTRCRYERSHPCWKVTVRHSPPADFVVWIRMNEANEEVAQIYLLPVQSFPEHQYLWPSTRTLLRYQQFAYASMSRVFGLD

SEQ ID NO: 11362 - protein, 498 aa, Unknown
  Description of Unknown: Integrase C105 sequence
  PF07508,SSF53041,IPR025827,IPR036162,SM00857, PF00239,PTHR30461:SF3,PS51736,PS51737,IPR011109, G3DSA:3.40.50.1390,IPR038109,IPR006119,PTHR30461,cd00338, G3DSA:1.10.10.2600,PF13408
MRHWCQRNGVPEPVAYTDAAISGASDNRPGYRALVADITGGRVDLVVVDDLSRLSRDSSEIGQLLKRVRFAGARLVGASDGVDTARKGHKIDVGLRGLMGEMYLDELADKTHRGLTGRALAGASAGGLPYGYRVAGTGQRTIDPDHAQVVRRIYNMAAAGHTPRQIAAALNADGVPSPRGSSWAMSVIYGDRKRGIGILANPIYRGRQIWNRSTWTKHPDTGRRLRSERPENEWIITEHPELRIITDAQWQAADATLQNRRSRSGAPPGRSPRHMLSGLLKCCDCGGPMVAVDAYRYGCARAKDRGPTVCASRLRVARTHVESALLAGIKRDLLSEAAYHAFEREARRLLTQAAPDTGNIEKRIRDAERTRENIMAALKAGIITAGTRQALIDAEQGVTDASAELKAARNYQPAQILPRARETWRRLVEQLADARDTPEIRSAVRELLGDEIVLGEDAGGVFAEARNGSQILVVAGARSEQYLSIPYRIMIPTNGRGV

SEQ ID NO: 11363 - protein, 498 aa, Unknown
  Description of Unknown: Integrase C106 sequence
  PF07508,SSF53041,PTHR30461:SF3,IPR036162,SM00857, PF00239,PS51736,PS51737,IPR011109,G3DSA:3.40.50.1390, IPR006119,PTHR30461,cd00338
MPTYDRSMRVIGRLRISRQTEESTSIERQRELIQNWADTHDHEIVGWAEDKDVSGSVDPFDTPGLGPWLKRDRLDDWDILVAWKLDRIARRAIAINRVFHLCQEHDKTLVCISDNIDLSTWVGRLIANVIAGVAEGELEAIRERTLASHRKLRELGRWPGGRPAYGYKAVENENGPGWKLVHDEYSATIMREIVDRTLQGEAGNAIAQDLQARGVLPPAEYRRQMNGEKLRGGEWMGQVIRRMLKSRTLLGHVTHQKVTVIHETEGTPILKGEPLVTLEEFEELQAILGGSSRPKNHNRSTGASPMLDVALCGECGKPLHLRTQRTERKTKVHVHRYYYCPDKHGQALRAEIVERTVEEQFLDMFGDKPAMERVFREGENHEIEIKQAIQSIEALTPLLGAATSGTVLKSLTDQISAISNRVTYLESLPKAESGYILRATGKTYREEWESRDEQGRRSLLKRSGVTVKFLLQGKTRTTEGALQTEIKFPGDVEERLAS

SEQ ID NO: 11364 - protein, 497 aa, Unknown
  Description of Unknown: Integrase C107 sequence
  PTHR30461:SF3,PF00239,PS51736,G3DSA:3.40.50.1390, IPR038109,IPR006119,G3DSA:1.10.10.2600,PF13408, PF07508,SSF53041,PS51737,cd03768,IPR036162 ,IPR006118,SM00857,IPR011109,PS00397,IPR025827,Coil,PTHR30461
MYPFYHFLGNFERGTTMITTNKVAIYVRVSTTNQVEEGYSIDEQKDKLSSYCDIKDWNVYKVYTDGGFSGSNTDRPALESLIKDAKKRKFDTVLVYKLDRLSRSQKDTLHLIEDVFIKNGIEFLSLQENFDTSTPFGKAMIGLLSVFAQLEREQIKERMQLGKLGRAKSGKSMMWAKTSYGYDYHKETGTVTINPAQALTIKFIFESYLRGRSITKLRDDLNEKYPKHVPWSYRAVRTILDNPVYCGFNQYKGEIYPGNHEPIISKEEYDKTQSELKIRQRTAAENVNPRPFQAKYILSGIAQCGYCGAPLKIMLGVKRKDGSRLKKYECHQRHPRTLRGVTTYNDNKKCDSGFYYKDKLEAYVLKEISKLQDDADYLDKIFSGDNAETIDRESYKKQIEELSKKLSRLNDLYIDDRITLEELQSKSAEFISMRGTLETELENDPALRKNKRKADMRKLLNAEKVFSMDYENQKVLVRRLINKVKVTAEDIVINWKI

SEQ ID NO: 11365 - protein, 497 aa, Unknown
  Description of Unknown: Integrase C108 sequence
  PTHR30461:SF3,PF00239,PS51736,G3DSA:3.40.50.1390,IPR038109, IPR006119,G3DSA:1.10.10.2600,PF13408,PF07508,SSF53041, PS51737,cd03768,IPR006118,IPR036162,SM00857, IPR011109,PS00397,IPR025827,Coil,PTHR30461
MYPFYHFLGNFERGTTMITTNKVAIYVRVSTTNQVEEGYSIDEQKDKLSSYCDIKDWNVYKVYTDGGFSGSNTDRPALESLIKDAKKRKFDTVLVYKLDRLSRSQKDTLHLIEDVFIKNGIEFLSLQENFDTSTPFGKAMIGLLSVFAQLEREQIKERMQLGKLGRAKSGKSMMWAKTSYGYDYHKETGTVTINPAQALTIKFIFESYLRGRSITKLRDDLNEKYPKHVPWSYRAVRTILDNPVYCGFNQYKGEIYPGNHEPIISKEEYDKTQSELKIRQRTAAENVNPRPFQAKYILSGIAQCGYCGAPLKIMLGVKRKDGSRLKKYECHQRHPRTLRGVTTYNDNKKCDSGFYYKDKLEASVLKEISKLQDDADYLDKIFSGDNAETIDRESYKKQIEELSKKLSRLNDLYIDDRITLEELQSKSAEFISMRGTLETELENDPALRKNKRKADMRKLLNAEKVFSMDYENQKVLVRRLINKVKVTAEDIVINWKI

SEQ ID NO: 11366 - protein, 497 aa, Unknown
  Description of Unknown: Integrase C109 sequence
  PTHR30461:SF3,PF00239,PS51736,G3DSA:3.40.50.1390,IPR038109, IPR006119,G3DSA:1.10.10.2600,PF13408,PF07508,SSF53041, PS51737,cd03768,IPR006118,IPR036162,SM00857, IPR011109,PS00397,IPR025827,Coil,PTHR30461
MYPFYHFLGNFERGTTMITTNKVAIYVRVSTTNQVEEGYSIDEQKDKLSSYCDIKDWNVYKVYTDGGFSGSNTDRPALESLIKDAKKRKFDTVLVYKLDRLSRSQKDTLHLIEDVFIKNGIEFLSLQENFDTSTPFGKAMIGLLSVFAQLEREQIKERMQLGKLGRAKSGKSMMWAKTSYGYDYHKETGTVTINPAQALTIKFIFESYLRGRSITKLRDDLNEKYPKHVPWSYRAVRTILDNPVYCGFNQYKGEIYPGNHEPIISKEEYDKTQSELKIRQRTAAENVNPRPFQAKYILSGIAQCGYCGAPLKIMLGVKRKDGSRLKKYECHQRHPRTLRGVTTYNDNKKCDSGFYYKDKLEAYVLKEISKLQDDADYLDKIFSGDNAETIDRESYKKQIEELSKKLSRLNDLYIDDRITLEELQSKSAEFISMRGTLETELENDPALRKNKRKADMRKLLNAEKVFSMDYESQKVLVRRLINKVKVTAEDIVINWKI

SEQ ID NO: 11367 - protein, 495 aa, Unknown
  Description of Unknown: Integrase C110 sequence
  PF07508,SSF53041,PTHR30461:SF3,IPR036162,SM00857, PF00239,PS51736,PS51737,IPR011109,G3DSA:3.40.50.1390, IPR006119,PTHR30461,cd00338
MRVIGRLRISRQSEESTSIDRQRELIQNWADTHDHEIVGWAEDIDVSGSVDPFEAPGLGPWLKRDRLGEWDILVAWKLDRIARRAIAINRVFHLCQEHDKTLVCISDNIDLSTWVGRLIANVIAGVAEGELEAIRERTLASHRKLRELGRWPGGRPAYGYKAVERTDGPGWKLVHDEYSATIMREIVDRTLQGEAGNAIAQDLQERGVLPPAEYRRQMNGEKLRGGEWMGQVIRKMLKSRTLLGHVTHQQVTVINEKEGTPILKGEPLVSLEEWEELQAMLGGSSRPKNHNRTTAASPMLDVALCAECEKPLHLRTQRTQRKEKLHVHRYYYCPDKHGSAIRGEDVENAVENQFLEDFGDVPAMERVFREGENHEIEIKQAIRSIEALTPLLGTATSGTVLKSLTDQISALSNRVTYLESLPKAESGYILRPTGKTYREEWEERDEQGRRALLRRSGITATFRLTGKGRGGRNPAPGALEFNLRVPEDAHARMAS

SEQ ID NO: 11368 - protein, 494 aa, Unknown
  Description of Unknown: Integrase C111 sequence
  PF07508,SSF53041,IPR036162,PTHR30461:SF3, SM00857,PF00239,IPR025827,PS51736, G3DSA:3.40.50.1390,IPR011109,PS51737,IPR006119, PTHR30461,cd00338,PF13408
MVRMKPRAVLYLRLSAVVDDSTSIDRQERDLRAHAERQGWTVERVLVDEGISGRKARAKAAEAVRLIADGEADVLAVWKLDRFTRQGWDGLGALSRALDARKHDGKPALFVALQDGLTSDQSAFRLIAGVLSEVARSEADNTAARVKHSIAYRKTTTSKYTGGAAVPFGYRSVPAPDGTGRVLVHDPEESAVVREVADRLLAGVEPLSRIAADLQARNVPTSKSPARRALRAGEPADGLDRGLWRSSTLRSLFTSDLLLGRVKHHGDLIRDADGLPASVWPPLLDLATLEALRARLGATGAPQPRKGRASRLLSGVAYCAVCDSRMYVTTSSGRPIYACASSWNSGSCPSPKINALGLEEYVAARFLAFAGDWPEVETIVETDATTTDAARREVEAALREASAHMLDDGADVAALAARIGALKARRAELRALPASSTSRTVLTGRTLAEAWAEADDDTVKRSLLLETLDSVTVAPTTSRRAPIEPERVTFRWNS

SEQ ID NO: 11369 - protein, 494 aa, Unknown
  Description of Unknown: Integrase C112 sequence
  PF07508,SSF53041,IPR036162,IPR025827,SM00857, PF00239,PTHR30461:SF3,PS51736,IPR011109,G3DSA:3.40.50.1390, PS51737,IPR006119,PTHR30461,cd00338,PF13408
MAPMKPRAVLYLRLSAVVDDSTSIDRQERDLRAHAERQGWAVERVLVDEGISGRKARAKAAEAVRLIADDEADVLAVWKLDRFTRQGWDGLGALSRALDARKRDGKPALFVALQDGLTSDQSAFRLIAGVLSEVARSEADNTAARIKSSITYRKLTTSKYTGGAAVPFGYRSIPAPDGVGRVLIHDPEEAAIVREVSARLLEGVEPLSRIAADLQARGIPTSKSPARRALRSGEPADGLDPGLWRSSTLRSLFTSDLLLGRVKHHGDLIRDADGLPASVWPPLLDLATLEALRARLGASGAPQARKGRASRLLSGLAYCAVCESRMYVTTSSGRPIYACASSWNSGSCPSPKINAIGLEDHVAVRFLAFAGDWPEVETIVETDATATDASLREVEAALREASGHMLDDGADVAALAARIGVLKARRAELRALPASSTSRTVLTGRTLAEAWGETGDETVKRSLLLEALDSVTVAPATSRRAPIDPERVTFRWNS

SEQ ID NO: 11370 - protein, 493 aa, Unknown
  Description of Unknown: Integrase C113 sequence
  PTHR30461:SF3,PF00239,PS51736,G3DSA:3.40.50.1390, IPR038109,IPR006119,G3DSA:1.10.10.2600,PF13408, PF07508,SSF53041,PS51737,cd03768,IPR036162 ,IPR006118,SM00857,IPR011109,PS00397,IPR025827,Coil,PTHR30461
MYLFYQKRGTNSMKTMNKVAIYVRVSTTNQVEEGYSIDEQKDKLSSYCDIKDWNVYKVYTDGGFSGSNTDRPALESLIKDAKKRKFDTVLVYKLDRLSRSQKDTLHLIEDVFIKNGIEFLSLQENFDTSTPFGKAMIGLLSVFAQLEREQIKERMQLGKLGRAKSGKSMMWAKTSYGYDYHKETGTVTINPAQALTIKFIFESYLRGRSITKLRDDLNEKYPKHVPWSYRAVRTILDNPVYCGFNQYKGEIYPGNHEPIISKEEYDKTQSELKIRQRTAAENVNPRPFQAKYILSGIAQCGYCDAPLKIMLGVKRKDGSRLKKYECHQRHPRTLRGVTTYNDNKKCDSGFYYKDKLEASVLKEISKLQDDADYLDKIFSGDNAETIDRESYKKQIEELSKKLSRLNDLYIDDRITLEELQSKSAEFISMRGTLETELENDPALRKNKRKADMRKLLNAEKVFSMDYESQKVLVRRLINKVKVTAEDIVINWKI

SEQ ID NO: 11371 - protein, 486 aa, Unknown
  Description of Unknown: Integrase C114 sequence
  PF07508,SSF53041,PTHR30461:SF3,IPR036162,SM00857, Coil,PF00239,IPR011109,PS51737,G3DSA:3.40.50.1390, IPR006119,PTHR30461,cd00338
MRVLGRVRLSRFSDESTSVERQREIIAKWAADNDHTVVGYAEDVDVSRSVDPFDTPALGPWFTPEQRGEWDIVACWKLDRIATGSIYLNKVMAWCGEHEKSLVSVTENFDLGTWVGRLIANVIAGVAEGELEAIRERTQASRRKLVAVGRWTGGRPTYGYRAVEQDGGGWTLEPDPESSAILRRIVDRALAGESTLSIVRGLNDEGVLSPADYVRYRNGKPTLGAKWTTTATLDLMRSRTLLGQIVHNGAVVRDDSGKPVLGGPPLIDYDTFTRLQAALDARSRTQKVERVDASPLLGVAVCWECGSNLFHQRQMNRGKPYRYYKCPNKCSQAVKADDAEAVVEDMFLDKVGGHDELERVFIPGADHSTELREAQEAVDELTKVLGTMSSNTVRTAVLGQLEALDKRIQELESLPLTEARVELQPTGRLYRDAWGSLDSDGRRELLVKAGITARLKVEGRPVGGRAPGAFYFDLVVPEDLRERMSL

SEQ ID NO: 11372 - protein, 484 aa, Unknown
  Description of Unknown: Integrase C115 sequence
  PF07508,SSF53041,IPR036162,IPR025827,SM00857,PF00239,Coil, PS51736,PS51737,IPR011109,G3DSA:3.40.50.1390,IPR038109, IPR006119,PTHR30461,cd00338,G3DSA:1.10.10.2600,PF13408
MKYGVYVRVSTDRDEQVSSVENQIDVCRYWLDQHGYDWDENSIYFDDGITGTVLLERHAMQLILEKAKKRELQMVLFKSIHRLARDLKDALEIKEILIANGIRLVTIEEGYDSHYEGKNDMKFEMFAMFASQYPKTLSVSISAALSAKVRRGEHTGGRLPFGYSDRDKKYVINEEEAEIVREIYDMYSKGIGYIGIAKILNERGVPSKTGGKWQMSSVQRIIKNPIYKGDYILNQYTTVKISGRKKQIKNPEEKWTIFKNHHPAIVPEEQWELVNRPRSAKKRRPALWNEFRGVMFCAHCGSAMQVVYSAKKKKDGTKEEWRYLKCSRYKRYGRDECVRHAPIQYHEFREFILDNLKEKEKQLETKFNLNEETSNADKKNKLQREIQRIEEKRKKLIDLYMEELIEKEEFLSRRNELEKIIKEKEVQFVSMEDKNEVKRTQDEFRKAFALLDESKNLYEEFKRIIDRIEIFENGDIKIVYRIEM

SEQ ID NO: 11373 - protein, 484 aa, Unknown
  Description of Unknown: Integrase C116 sequence
  PF07508,SSF53041,IPR025827,IPR036162,SM00857, PF00239,Coil,PS51736,IPR011109,PS51737, G3DSA:3.40.50.1390,IPR038109,IPR006119,PTHR30461,cd00338, G3DSA:1.10.10.2600,PF13408
MKYAVYVRVSTDRDEQVSSVENQIDVCRYWLDQHGYDWDENSIYFDDGITGTVLLERHAMQLILEKAKKRELQMVLFKSIHRLARDLKDALEIKEILIANGIRLVTIEEGYDSHYEGKNDMKFEMFAMFASQYPKTLSVSISAALSAKVRRGEHTGGRLPFGYSDRDKKYVINEEEAEIVREIYDMYSKGIGYIGIAKILNERGIPSKTGGKWQMSSVQRIIKNPIYKGDYILNQYTTVKISGRKKQIKNPEEKWTIFKNHHPAIVSEKQWELVNKPRSAKKRRPALWNEFRGIMFCAHCGSAMQVIYSAKKKKDGTKEEWRYLKCSRYKRYGRDECVRHAPIQYHEFREFILENLKEKEKQLETEFNLNEETSSAEKKNKLQREIQRIEEKRKKLIDLYMEELIEKEEFLSRRKELEKTIKEKEVQFVSMEDKSEVKRTQDEFRKAFSLLDESKNLYEEFKRIIDRIEIFENGDIKIVYRIEM

SEQ ID NO: 11374 - protein, 484 aa, Unknown
  Description of Unknown: Integrase C117 sequence
  PF07508,SSF53041,IPR025827,IPR036162,SM00857, PF00239,PS51736,G3DSA:3.40.50.1390,IPR011109,PS51737, IPR038109,PTHR30461:SF21,IPR006119,PTHR30461,cd00338, G3DSA:1.10.10.2600,PF13408
MTATLERHLDTPQQEALRVGVYLRMSTDKELGIDRQREDCLALAERLGWVPVEYIDNDRSATKENVKREGFDALSDDIRDGRIDSIITWRSDRLYRKMKDLLPLIDLIQGVNKTGKRIPIETCQTGLIDLTTDAGRMTAKILAAVSENEGEVRTARQMRAYEQIADSGRRLGAPAFGWTRDPRDPQIVPEEAAAIREGYADVLAGCTLYSIAKKWSDAGLRTTRGNAFVGSVVGKILRSPRNAGLLTFRDEIVGEGTWEPIVDRETWEAACAVLDQKNTGQKGPRVRSTLLSGIVRCGACGNKMAAGKNSNGEPIYKCKRYEVCKHGVTRVRKKVDKYVEMSMVAKLEQRKWIVGTQVDAEQAKGLHAEAEALRARKASFGEALADGTLTPAQVKDATDRVNVKLEEIDAKLARLTRSRVFDGLLGHDDLEKVWLGLDLERKRAIIESLCDKIVIQHVGQTGRSAAKLPLGHAIKIHWHDPSND

SEQ ID NO: 11375 - protein, 484 aa, Unknown
  Description of Unknown: Integrase C118 sequence
  Coil,PS51736,IPR006119,PTHR30461,PS51737, G3DSA:1.10.10.2600,IPR011109,PF07508,PF13408,SSF53041, PF00239,SM00857,G3DSA:3.40.50.1390,cd00338,IPR038109, IPR036162,IPR025827
MKILKYAVYVRVSTDRDEQVSSVQNQVDICRYWLEKNGYEWDSNAVYFDDGISGTAWLERHAMQLILEKARRNELDTVVFKSIHRLARDLRDALEIKEILIGHGIRLVTIEENYDSLYEGGNDIKFEMFAMFAAQLPKTLSVSVSAAMQAKARRGEYIGKPGLGYHVIDKKLVINEEEAEVVREIFDLSHKGYGFKKIANILNDKGTYTKFGQLWSHATVGKILKNQKYKGDLVLNSYKTVKVDGKKKRVYTPKERLTIIEDHYPAIVSKELWNAVNSDRTSKKKTKQDTRNEFRGMMFCKHCGGPITAKYTSRFAKGSKKEWVYMKCSNYVRFNRCVNFDPVKYDDIREVIIYRLKQQEKELEIHFNPKMHQKRKDKSTEIKKQIKLLKVKKEKLIDLYIEGLIDKEMFSKRDFNFENEIKEQELALLKLTDQNKRNKEEQQIKKAFSMLDEEKDMHEVFKTLIKKITLSKDKYIEIEYTFSL

SEQ ID NO: 11376 - protein, 481 aa, Unknown
  Description of Unknown: Integrase C119 sequence
  PF07508,SSF53041,IPR036162,IPR025827,SM00857, Coil,PF00239,PS51736,G3DSA:3.40.50.1390,PS51737, IPR011109,IPR038109,IPR006119,PTHR30461,cd00338, G3DSA:1.10.10.2600,PF13408
MKYAVYVRVSTDRDEQVSSVENQIDICRYWLEKNGYEWDPNAVYFDDGISGTAWLERHAMQLILEKARRNELDTVVFKSIHRLARDLRDALEIKEILIGHGIRLVTIEENYDSLYEGGNDIKFEMFAMFAAQLPKTISVSVSAAMQAKARRGEFIGKPGLGYDVIDKKLVINEKEAEIVREIFDLSYKGYGFKKIANILNDKGTYTKFGQLWSHTTVGKILKNQTYKGNLVLNSYKTVKVDGKKKRVYTPKERLTIIEDHYPAIVSKELWNAVNSDRASKKKTKQDTRNEFRGMMFCKHCGEPITAKYSGRYAKGSKKEWVYMKCSNYIRFNRCVNFDPVHYDDIREAIIYGLKQQEKELEIHFNPKMHQKRNDKSTEIKKQIKLLKVKKEKLIDLYVEGLIDKEMFSKRDLNFENEIKEQELALLKLTDQNKRNKEEKKIKEAFSMLDEEKDMHEVFKTLIKKITLSKDKYIDIEYTFSL

SEQ ID NO: 11377 - protein, 481 aa, Unknown
  Description of Unknown: Integrase C120 sequence
  IPR006119,PTHR30461,PS51737,IPR011109,PF07508, SSF53041,PF00239,SM00857,G3DSA:3.40.50.1390,cd00338, IPR036162
MTIRAVVGARVSHVQGPEKTSHHSQRSKGEAYAESQNWDVVGAFEDLDVSAIKLSPWDRPDLKEWLDRADDWDALIFAKTDRVFRSAADCVKLAEWCRNHKKILVLVDDGIKLDYYNPEDAKDAFAGAMSKVFLILASVFAEIEGQRFVQRARDRVTFLRDTDRWASGTPPYGFVTAPHPGGKGKTLIHDIEAQKVVHDAAKRLLGGDSLTRIAKDFNEEGVLTNRGGRWVTSTVRRVLSHPGMQGIKTYKGKVVLGPDGEPVRVGPASFDTETWDRLQAELAQRGMEPRQRRHSTNPLLGVVKCYSCGGNLAQRTHVSKGREYRYYACGRAPLACPGVSISALDAEGLVEQGFLETHRDRRIKVRVWRDGSDNSAELEQTKKTIESLREDRAMGLFTTPADELMFRQQMKALIAKRDLLAEQPVIRAGWTEVVSEETYGEVWPSATVEEKRKMLTDAGVTLTVTNPRQWHLHVESLLGQD

SEQ ID NO: 11378 - protein, 480 aa, Unknown
  Description of Unknown: Integrase C121 sequence
  PF07508,SSF53041,IPR036162,SM00857,PF00239,PS51736,PS51737, IPR011109,G3DSA:3.40.50.1390,IPR006119,PTHR30461,cd00338
MLRFHLKLSDRDCTVQLVRAIIYCRVSSDPNLRERSVQEQESECRAVAFANGWDVGEVLVDNDRGASRYSRGDRPAYRRLAEILQPGDVLVTWEASRAQRDLGAYLQLRTLCEQRGVPWSYAGKTHDLTRGDDRFTTGLDALLSEKEVEQTRERVLRSVRANAAAGRPHGKLAYGYMIVRDPHTGQSLDRVPNPDTAPIVREAVQRVLNGEALYAVCHDFNARGIPGPRPRRDGTPAKWIPVTLRKILESPTYAGLRWSNGEVIGQATWEPLVTMEEHERLKAMFADPHRLTHRGSEPQWLLAGIARCGVCGATVKRIKSRGNQTYTCRDGFCAARLVTTVDDYVTEAVMRRLEGQDLVGQIDSDNAEYATAIDAVRALRQRLDSFTDAAAEGEVTPAALARIEAKLLPQIERAEGRVRALAHSPAVAKIAGAGARERWDALAVRDRRDLVRALVDVQIFRVGKGRRNVPIGEGIGLTWL

SEQ ID NO: 11379 - protein, 479 aa, Unknown
  Description of Unknown: Integrase C122 sequence
  PF07508,SSF53041,IPR025827,IPR036162,PTHR30461:SF3, Coil,SM00857,PS51736,PF00239,G3DSA:3.40.50.1390, PS51737,IPR011109,IPR006119,PTHR30461,cd00338, PF13408
MERQREFIETWARQNDHEIVGWAEDLDVSGSVDPFDTQGLGPWLKEPKLREWDILCAWKLDRLARRAVPLHKLFGMCQDEQKVLVCVSDNIDLSTWVGRLVASVIAGVAEGELEAIRERTLSSQRKLRELGRWAGGKPAYGFKAQEREDSAGYELVHDEHAANVMLGVIEKVLAGQSTESVARELNEAGELAPSDYIRARAGRKTRGTKWSNAQIRQLLKSKTLLGHVTHNGSTVRDDDGIPIRKGPALISEEKFDQLQAALDARSFKVTNRSAKASPLLGVAICGLCGRPMHIRQHRRNGNLYRYYRCDSGSHSGGGGAAPEHPSNIIKADDLEALVEEHFLDEVGRFNVQEKVYVPASDHRAELDEAVRAVEELTQLLGTMTSATMKSRLMGQLTALDERIARLENLPSEEARWDYRATDQTYAEAWEEADTEGRRQLLIRSGITAEVKVTGGDRGVRGVLEFHLKVPEDVRERLSA

SEQ ID NO: 11380 - protein, 479 aa, Unknown
  Description of Unknown: Integrase C123 sequence
  PTHR30461:SF3,PF00239,PS51736,G3DSA:3.40.50.1390,IPR038109, IPR006119,G3DSA:1.10.10.2600,PF13408,PF07508,SSF53041, PS51737,cd03768,IPR036162,IPR006118,SM00857, IPR011109,PS00397,IPR025827,Coil,PTHR30461
MNKVAIYVRVSTKGQAEEGYSIDEQIALLTSYCSIHKWKIHDTYVDAGISGATIERPELSRLSRDAQKKKFNTMIVYDLKRLGRSQRNNIAFIEDVLEKNGIGFISLTENFDTSTPLGKAMVGILSAFGQLDRDTIRERMMMGKIGRAKSGKPMMTSTIAFGYTYDKVTSSLNINPAEAIIVKTIFNEYLSGRSLTKLRDYLNENDLFRNGKPWNYQGVSRILRNPVYMGMVRFRGEVYQGNHDPIIDSETFEAVQKELKKRQLETYEFNKNTRPFRAKYMLSGIIKCGYCGSPMGVTLGTKRKDGTRNIRYQCVNRFPRTTKGITVYNNGQKCNSGFYEKDDIEIYVLGQVRLLQLNKAKLNKMFETPEIINVEEIENQINSLNNKMKRLNDLYLNDMISLDELKTQTYTFLKQKDLLENELNNNPAIHQEENRKQFQKLLGTKDITQLSYEEQSFAIKNLIDKVFVKPGIIDINWRI

SEQ ID NO: 11381 - protein, 478 aa, Unknown
  Description of Unknown: Integrase C124 sequence
  PF07508,SSF53041,IPR036162,PTHR30461:SF3,SM00857, Coil,IPR025827,PS51736,PF00239,PS51737, IPR011109,G3DSA:3.40.50.1390,IPR038109,IPR006119,PTHR30461, cd00338,G3DSA:1.10.10.2600,PF13408
MRVCKYRRVSTDMQREEGVSLSTQDERLDAFIKSQGWTVVADYADEGFSAKNMNRPAIQQLIQDLKRDKFDVVLVYRLDRLVRSVSDLHELLQIMDKHDVKFKSCTEVFDTTSATGRMFITIIATLAQWERETIAERVFDNMLARSEKGMRNGAPAPYGYIYKDGSLELVKEEAKWVKFIFDKYKTTGSQNIAKTLNKRGIKTRKGEVWSDFSIRYLLRNPIYAGYVRWNYRSLAKGKCTGDEVIQKIDQDNFQAIITKEEFDEIQILIKERSTVAFRSDNFYPYSGVAKCAKCGNSLTGAFKNKKSGGIYRFYKCAGRFRTGICDAPVISEEAIDIALMKCLDLPEFDLKYEEQNKIDREQLEKELTKIELKKSRIKELYLDGDISKNEYRKRMDSLIDDEIRIQKKLEIEEIEATYEEVLEWMSLIKESWNELSFETRKAAIRTIFSSLTVKIIKDPVFGRYPQLPVVEITNYKLK

SEQ ID NO: 11382 - protein, 477 aa, Unknown
  Description of Unknown: Integrase C125 sequence
  PF07508,SSF53041,IPR036162,PTHR30461:SF3,SM00857, PF00239,Coil,PS51736,G3DSA:3.40.50.1390,IPR011109, PS51737,IPR006119,PTHR30461,cd00338
MAGQRVLGRIRLSRLTEESTSAARQRELIQQWADMNEHTVVGWAEDLDVSGSIDPFDSPSLGPWFREDKRDEWDILVAWKLDRIGRRAIALNRVFGWMMDHNKTLVCVSDNIDLSTWVGRLVANVIAGVAEGELEAIRERTRAGRKKILESGRWPGGVVPYGLRPVPNPGGGWKLEVDPEPASVIHRIVDEIIAGSAVEAVANRLDEDGIPAPKGGTWLPSTIWKLCGSNHLLGHARYGGKSVRDAEGRPVLNAEPILTWDQWDALQRALEARRRGGSRTRDTSPLLGVAVCYECDKPLFHKIYKRDYGRRLYRYYHCRDKTHNQQVEAEVVETLLEESFLQRIGDLPVLERVFIPSENHEIELEEARRAIEELTPLLATVTSATMRKSLLEQLSALDSRLTELEALPTREAHWEYRETGQTYAEAWKEADTEGRRQILLRSGITLAVILTGKTRNSGGALKFDFRVPEDIEKRLSA

SEQ ID NO: 11383 - protein, 476 aa, Unknown
  Description of Unknown: Integrase C126 sequence
  PF07508,SSF53041,IPR036162,SM00857, PF00239,PS51737,IPR011109,G3DSA:3.40.50.1390, IPR038109,IPR006119,PTHR30461,cd00338, G3DSA:1.10.10.2600
MHFMQNRGSGPDAECDIYVRISQDLTGDELGVQRQEKRCRALAEQLGLKVRHVWVDNDLSATKKNVVRPDFEAMLQSKPQAIVCWHTDRLIRVTRDLERVIELGVNVYAVEAGHLDLSTPAGRAVARTVTAWATYEGEQKAARQKLANQQAAQQGRPYTAGIRPFGYADDHMTLIAEEAAAIVDGANMILAGESLSAVARKWTEAGLQSPRSKVRGAKAWTLRGVKKVLTSPRYIGQSTYHGEVMGEGQWPPILDPEVHYGVVAILNNPERFSGGRRTGRTPGTLLAGIGLCGYDGCTDTVNGRGYRGVPVYGCGLTHTRTPRSIADDRASKATLARLMFPDFLGQILESQNAQDGRSGAQLQSQAQELRERLDGLAVAYAEGTISLSQMTAGSAALQKKLEAIESELVSTAGIPPLDPVKGVAGLIEGWPSLPLPTRRAWVDFCCIVTLNPARGRHMSSMSVDDHVTIEWRDVSE

SEQ ID NO: 11384 - protein, 475 aa, Unknown
  Description of Unknown: Integrase C127 sequence
  PS51736,IPR006119,PTHR30461,PS51737,G3DSA:1.10.10.2600, IPR011109,PF07508,PF13408,SSF53041,PF00239, SM00857,G3DSA:3.40.50.1390,cd00338,IPR038109,IPR036162, IPR025827
MTPRPAIGCTRLSTGPQARMYGQEVQAQEITRYAEAQGYDLLEIVPEVISGKTDPENRATVQRYLRLAEERPGLTFIFPRVDRVGRGAERILKIVRELHERHADVQVIGIPGDLRTKEGMLLLTMLAGVAEYDHTNLRGNMQAGMRQKAQAGLWPHGSPPWGYAMERDDRGKALRPVPVPEQAAAVRRLYELAIDHGETVTLQTMQAEGWPAPTEAGWKRRTVHNLLNNSLYSGVRVYQGITVTYEPIVPPELVARVQQLRQARRSGGRIPREPLLFSGHLRCVCGAAMGRDVDMSSYKGKRYATYETYRCWRKKNQRLDNPSVEQMHAPTLQARALEPLLWEALVEHLTSSELLAGIVAPQGAPPSGPDPLRVAELEAAIARAYEPLTAGAVGYTLAIAESLAQPYAQELERLRRQARAQAAPPPPDFEAQATAFRGALSKPLELGERRELLDVLAVQIVIGAEGWQEIRVQLP

SEQ ID NO: 11385 - protein, 474 aa, Unknown
  Description of Unknown: Integrase C128 sequence
  PF07508,SSF53041,IPR036162,PTHR30461:SF3,SM00857, Coil,PF00239,PS51736,G3DSA:3.40.50.1390,PS51737, IPR011109,IPR006119,PTHR30461,cd00338
MGRTRISRSTEESTSIERQREFIAAWAEQNGHEVIGWAEDIDVSGSLDPFETPSLGEWLKDERLHEWDIIVSWKLDRITRRAIPMGKLFGWLMENQKTLVCTSDSIDLSTPMGRLIAYVIATIAEGELEAIRERSKVSHKKLKELGRYAGGRVLYGQRPVAHEDAGWKLDIDEHAAEILNLIIDKLFAGQSVDSIAFDLNEMGELSPSDYQRQWYGNKVRGTKWSSTAIRRLLRSKSLLGYATEDGATMRDSKGAAILRAPALVTREKYDRIQSELEARSRVPQRTLRASPLLGIVLCLDCGQRMYYYCSTRNPDRKYYYCQRDHGRVSIRAERAADDVESLFLEKYGDMKIREKVFIQAENHEVELEDARKAVEEISSFLSTASSATVRSRLMEQLGALDSRITELEALPSRDARWEFVDGKQTYGEAWKAANTDERRALLLKWGITVSFRRRGNAVESVLNEPEDALNRLTA

SEQ ID NO: 11386 - protein, 473 aa, Unknown
  Description of Unknown: Integrase C129 sequence
  PF07508,SSF53041,IPR036162,SM00857, PF00239,IPR011109,PS51737,G3DSA:3.40.50.1390, IPR038109,IPR006119,PTHR30461,cd00338, G3DSA:1.10.10.2600
MNHRSSQADAECDIYVRISQDLTGDELGVQRQEERCRALCTQLGLKVRHVWVDNDLSATKKNVVRPDFEAMLLSKPQAIVCWHTDRLIRVTRDLERVIELGVNVYAVEAGHLDLSTPAGRAVARTVTAWATYEGEQKAARQKLANQQAAQQGRPYTAGIRPFGYGDDHMSIMADEAAAIVEGAQMILAGESLSAVARKWDAAKLQSPRSKVTGAKGWTLRGVKQVLTSPRYAGMATYHGEVMGQAQWPPILDPEVHYSVVAILNNPERFSGGKRTGRTPGTLLAGIGQCGYDDCTDTVNGRGYRGVLVYGCAATHTRTPRSIADDRASKATLARLMFPDFLGQILETQNAQDGQSGAQLQSQAQELRDRLDGLAVAYAEGAISLSQMTAGSTALQKKLEEIESQMVNSAGIPPLDPVKGIAGLIEGWPSLPLPTRRAWVDFCCIVTLNPAKGRHMSSMTVDDHVTIEWRDVSE

SEQ ID NO: 11387 - protein, 473 aa, Unknown
  Description of Unknown: Integrase C130 sequence
  PTHR30461:SF3,PF00239,PS51736,G3DSA:3.40.50.1390,IPR038109, IPR006119,G3DSA:1.10.10.2600,PF13408,PF07508,SSF53041, PS51737,cd03768,IPR006118,IPR036162,SM00857, IPR011109,PS00397,IPR025827,Coil,PTHR30461
MKCIAYVRVSTEEQAKHGYSIAAQTEKLEAYCVSQSWDLVETVVDDGYSAKDMDRPYFQKMINRIKQGGIDVLLVYRLDRLTRSVLDLYNILQILDDHNCKFKSATEVYDTTNAMGRLFITLVAAIAQWERENLAERVKMGIEKKVKLGKWKGGTPPYGYNYENDLLTINEDEEPVVKKIFKLAKQLGFYTIAKMLTELGYPTKKGGDWHVDTVRDIANNPVYAGYVTNNTKEESKKPPREQNLYEGIHPRIIPREDFWALQDELDKRRTFGGKRETSNYYFSSILKCARCGSSMSGHKGSNGIKTYRCSGKKAGKKCTSHIISEKNLTQNILTSLDRLIKGSIKSSNTSLRNISELEKELKSIQRLIDKQKTMFKKDIIDIDELISETDALRVQEKKIAKELNAYYQSRNSNQDDLNYVIENIDALWEAADDHDKKELMTRLFKQIVVDTKDEYKRGTGKAREIIIVSASAK

SEQ ID NO: 11388 - protein, 473 aa, Unknown
  Description of Unknown: Integrase C131 sequence
  PF07508,SSF53041,IPR025827,IPR036162,SM00857, PF00239,PTHR30461:SF3,PS51736,PS51737,IPR011109, G3DSA:3.40.50.1390,IPR038109,IPR006119,PTHR30461,cd00338, G3DSA:1.10.10.2600,PF13408
MLRMRIIGYVRLSRASREESTSVVRQREIIAKTCAARDFELVDIVEDVDVSATKTRLERPGLSEVRERIKSGEADAVMVWRLDRIARSVVDFGVLLDDGLDIVSATEPLDTASPMGRAMAEVLQVFARLEAKTIGVRISASQEHLRRVGRFPGGVIPYGYRAVPHPDGVGRALEPHPEEAAIVRRMADEVLAGSSVYAVTTGLNRDGIRPRRASEWTATSVQRILRSNTVLGRVKVRGELLRDDATGLPLQVWEPLLSVGEVERLRAITDWSPTPGRSEATKEGQRRKATRLLSGLIFCPGCGYPLIAKSRKSSTGAPLYACGARSRGRVCPGGVAIECERIEEEVARQFLRVVGRLRVVEPRVSVREVAGLAAVEEALRATTDALRAPDADLPVLFERLTKLRAERDRLAALPEEPVVEMTESGRTFSEAWAEADTAARRSLLANSGAVISIAKAPQRGKWSPERVRVDFHG

SEQ ID NO: 11389 - protein, 473 aa, Unknown
  Description of Unknown: Integrase C132 sequence
  PF07508,SSF53041,IPR025827,IPR036162,PTHR30461:SF3, PF00239,SM00857,PS51736,PS51737,IPR011109, G3DSA:3.40.50.1390,IPR038109,IPR006119,PTHR30461,cd00338, G3DSA:1.10.10.2600,PF13408
MLRMRIIGYVRLSRASREESTSVVRQREIIAKTCAARDFELVDIIEDVDVSATKTRLERPGLSEVRERIKSGEADAVMVWRLDRIARSVVDFGVLLDDGLDIVSATEPLDTASPMGRAMAEVLQVFARLEAKTIGVRISASQEHLRRVGRFPGGVIPYGYRAVPHPDGVGRALEPHPEEAAIVRRMADEVLAGSSVYAVTTGLNRDGIRPRRASEWTATSVQRILRSNTVLGRVKVRGELLRDDATGLPLQVWEPLLSVGEVERLRAITDWSPTPGRSEATKEGQRRKATRLLSGLIFCPGCGYPLIAKSRKSSTGAPLYACGARSRGRVCPGGVAIECERIEEEVARQFLRVVGRLRVVEPRVSVREVAGLAAVEEALRATTDALRAPDADLPVLFERLTKLRAERDRLAALPEEPVVEMTESGRTFSEAWAEADTAARRSLLANSGAVISIAKAPQRGKWSPERVRVDFHG

SEQ ID NO: 11390 - protein, 473 aa, Unknown
  Description of Unknown: Integrase C133 sequence
  PF07508,SSF53041,IPR036162,SM00857,PF00239, IPR011109,PS51737,G3DSA:3.40.50.1390,IPR038109,IPR006119, PTHR30461,cd00338,G3DSA:1.10.10.2600
MQNRGSGQVAECDIYVRISQDLTGDEYGVQRQEKRCRALAAQLGLNVRHVWVDNDLSATKKNVVRPDFEAMLQSKPQAIVCWHTDRLIRVTRDLERVIELGINVYAVEAGHLDLSTPAGRAVARTVTAWATYEGEQKAARQKLANQQAAQQGRPYTAGIRPFGYGDDHMTIIADEAAAIVKGAQMILAGESLSAVARKWDEAKLQSPRSKVTGAKGWTLRGVKQVLTSPRYAGMATYLGEVMGQAQWPPILDPEVHYSVVAILNSPERFSGGKRTGRTPGTLLAGIGQCGYDGCTDTVNGRGYRGVLVYGCKDTHTRTPRSIADDRASKATLARLMFPDFLGQILESQNAQDGQSGAQLQSQAQELRDRLDGLAVAYAEGAISLSQMTAGSTALQKKLEEIESQMVSSAGIPPLDPVKGIAGLIEGWPTLPLPTRRAWVDFCCIVTLNPAKGRHLTSMTVDDHVTIEWRDVSE

SEQ ID NO: 11391 - protein, 473 aa, Unknown
  Description of Unknown: Integrase C134 sequence
  PF07508,SSF53041,IPR036162,PTHR30461:SF3, SM00857,Coil,IPR025827,PS51736, PF00239,G3DSA:3.40.50.1390,PS51737,IPR011109, IPR038109,IPR006119,PTHR30461,cd00338,G3DSA:1.10.10.2600,PF13408
MSPDKPLRAVGYVRLSKATDTSTSPERQRRDIARFIEARGWETVATVEDIDVSATRRRLDRPGIHELRRIFSRGAADVVVVSRLDRIARNVADVSTLLDEGIAIVSASEAFDTSTAQGRAMAQVAQVFAELEAKTIGLRVSSSRGHLPAVGRWPGGPTPYGFTTDELPGGGGRTLVHHPDEAPVVRRMVTRAIEGAGPSAIARELNADGIPSRRGVEWNVRTVGRILRHGSLRGYATVKGDKVRDEIGLPVVIWPPLITPEEARQLDAALARTPHPGSYGDGGPEPLLQGLALCSSCGSPMTPRHFRRPDLAAMYVCQSRNRGRLCDRPQTANAARLEGVAERLFLASYGRIPVVETVEEATVPDGLPEVLQAIEETTDAMRAPGADVMALAERLVALNGERERLKALPHTTTRSKATGELYADLWERSGTVERRELMRGLQAFVIVHPARARGHWNDDRVELVDYMAGQLDD

SEQ ID NO: 11392 - protein, 472 aa, Unknown
  Description of Unknown: Integrase C135 sequence
  PF07508,SSF53041,IPR025827,IPR036162,SM00857, Coil,PF00239,PS51736,PS51737,IPR011109, G3DSA:3.40.50.1390,IPR006119,PTHR30461,cd00338,PF13408
MYARISDDTEGRAAGVARQVEDSLALAKRAGWSLSPYEPFVDNDISASTRSKARRPAFERLIELIEAGEIDGIVFYSNSRLTRRPREFEDIIDLVERTGLKLNSVVSGQADLSTADGRQIARMLAAADAAEAERTSERVTRAFVQRRQEGKPNPSSRAFGFEKGGMTVRQDEAELIREAATRIADEGWSLGQVVADWNRRKVPTVRAAGGWTRITLARALKNPRSAGLVAHDGEVLGRGSFEQIITPELQERVKAALTGNRNGHTVSYSQRKHALAGFLVCGKCGKPMKVNGLYNPDGSYRKDSYIVCSRSQFGCGNVKRNLLHVEEHIDSIIRARIELAVPTGDVEQEDAAASEVAELQAALDEVEEDIAEHQAEFKSNPRMRLKDYNATLAMLRDRQDAIESALASVETGHRIDPDFDLLAAWEDGSVEERRAVLEWAVDHIKLHPIGRVGPTKAKALVPTSTEVVPRRR

SEQ ID NO: 11393 - protein, 472 aa, Unknown
  Description of Unknown: Integrase C136 sequence
  PF07508,SSF53041,IPR036162,IPR025827, SM00857,PTHR30461:SF3,PF00239,PS51736, IPR011109,G3DSA:3.40.50.1390,PS51737,IPR038109, IPR006119,PTHR30461,cd00338,G3DSA:1.10.10.2600,PF13408
MIPMKIIGYVRLSRASREESTSVVRQREIIEKTCAARDFELVDIVEDVDVSATKTRLDRPGLSEVRERIRAGHADAVMVWRLDRIARSVVDFGVLLDDGLDIISATEPLDTASPMGRAMAEVLQVFARLEAKTIGVRISASQEHLRKVGRFPGGVIPYGYRAVPHPDGVGRALEPHPAEAAVVRRMADEVLAGDSVYAVTTRLNRDGIPARRGTKWSTTSVQRILRSNAVLGRVKVRGELLRDDATGLPSVVWEPLLSVAEVERLRALTDWTPTPGRSEATAEGKRRKASRLLSGLIFCPGCGYPLTAKSRHTTGAPIYVCEARARGRVCPGGIAIECERVEEEVARQFLAVVGRWSLVEPRISVREVSGLAAVEEALRSTTDALRAPDADLPALFERLTKLRTERDRLAALPEEPVVEMLETGRTFAEAWAETDTAGRRSLLLNSGVSISIARAPQRGKWNPERVSVAFHG

SEQ ID NO: 11394 - protein, 472 aa, Unknown
  Description of Unknown: Integrase C137 sequence
  PF07508,SSF53041,IPR036162,PTHR30461:SF3,SM00857, PF00239,IPR025827,PS51736,G3DSA:3.40.50.1390,IPR011109, PS51737,IPR006119,PTHR30461,cd00338,PF13408
MIRMRIIGYVRLSRASREESTSVVRQREIIAKTCAARDFELVDIVEDVDVSATKTRLERPGLTEARERIKAGEADAVMVWRLDRIARSVVDFGVLLDEGLDIISATEPLDTASPMGRAMAEVLQVFARLEAKTIGVRISASQEHLRRVGRFPGGVIPYGYRAVPHPEGIGRALEPDPVEAGIVRRMADEVLSGASIYAVTVGLNRDGVPPRRGAKWSTTAVQRILRSNAVLGRVKVRGELLRDDATGLPLQVWEPLLSVEEVERLRALTDWTPTPGRSEATAEGRRRKASRLLSGLIHCPGCGYPLTAKSRHTTGAPIYVCEARARGRVCPGGVAIECERVEAEVERKFLAVVGRWLVVEPRVSVREVAGLAAVEEALRATTDALRDPDADLPVLFERLTRLREERDRLGALPEEPVVEMVESGRTFSEAWAEADTAARRSLLSNSGASISIERAPQRGKWSPERVRVDFHG

SEQ ID NO: 11395 - protein, 472 aa, Unknown
  Description of Unknown: Integrase C138 sequence
  PF07508,SSF53041,IPR036162,IPR025827, SM00857,PTHR30461:SF3,PF00239,PS51736, PS51737,IPR011109,G3DSA:3.40.50.1390,IPR006119, PTHR30461,cd00338,PF13408
MLGMRIIGYVRLSRASREESTSVVRQREIIAKTCAARDFELVDIVEDVDVSATKTRLERPGLSEVRERIKAGEADAVMVWRLDRIARSVVDFGVLLDDGLDIISATEPLDTASPMGRAMAEVLQVFARLEAKTIGVRISASQEHLRRVGRFPGGVIPYGYRAVPHPDGVGRALEPHPEEAAVVRRMADEVLGGSSVYAVTTGLNRDGIRPRRASEWTATSVQRILRSNAVLGRVKVRGELLRDDATGLPLQVWEPLLSVGEVERLRALTDWTPTPGRSEATKEGRRRKAARLLSGLIFCPGCGFPLIAKSRRATGAPLYVCDARARGRVCPGGVAIECERVEEEVARQFLRVVGRWSVVEPRVSVREVAGLAAVEEALRATTDGLRAPDADLPLLFERLTKLRAERDRLAALPEEPVVEMTESGRTFSEAWAEADTAARRSLLSNSGASITIERAPQRGKWSPERVRVDFHG

SEQ ID NO: 11396 - protein, 472 aa, Unknown
  Description of Unknown: Integrase C139 sequence
  PF07508,SSF53041,IPR036162,IPR025827,SM00857, PF00239,PTHR30461:SF3,PS51736,G3DSA:3.40.50.1390,IPR011109, PS51737,IPR006119,PTHR30461,cd00338,PF13408
MIPMKIIGYVRLSRASREESTSVVRQREIIEKTCAARDFELVGIVEDVDVSATKTRLDRPGLTEARERIRAGEADAVMVWRLDRIARSVVDFGVLLDEGLDIISATEPLDTASPMGRAMAEVLQVFARLEAKTIGLRISASQEHLRKVGRFPGGVIPYGYRAVPHPDGVGRALEPDPAEAAVVRRMADEVLGGSSVYAVTVGLNRDGVLPRRGSKWSTTAVQRILRSNAVLGRVKVRGELLRDDATGLPSVVWEPLLSVEEVERLRALTDWTPTPGRSEATIEGKRRKASRLLSGLIHCPGCDHPLTAKNRHTTGAPIYVCEARARGRVCSGGVAIECERVEAEVERRFLAVVGRWLVVEPRVSVREVAGLAAVEEALRATTDALRDPDADLPALFERLTRLREERDRLGALPEEPVVEMIESGRTFAEAWADHDTAGRRALLANSGAVISIARAPQRGKWNPERVRVDFHG

SEQ ID NO: 11397 - protein, 470 aa, Unknown
  Description of Unknown: Integrase C140 sequence
  PF07508,SSF53041,IPR036162,SM00857, Coil,PF00239,PS51736,IPR011109, PS51737,G3DSA:3.40.50.1390,PTHR30461:SF21,IPR006119, PTHR30461,cd00338
MNKSPRVVVYLRQSEDRADDGLGVDRQREECMRLLTARGWTLQREYVDNDVSATKSKPRPQFEEMMRAVDGGEVDVIVSRHLDRLLRRLAELERTLERCAPVGAAIITASDGIDTSTDGGRTTARILASVAQGEIERKSARQLSQARQAAKAGKWVGGRRPFGYESDGVTIRDREAELVRQGYADILAGESLGEVARRWNAAGSTSTQNGTPWTRIGVRHVLTNARHAGLRRHGVHPDEQRRNPELGVVAAAEWPPLVDESTWRAAVRIIADPSKRRGPTRGSGMLTGVCVCGVCEAPVRREAARRGIPAYKCQTGKHVSRRCELVDRYVSGVVLRVLKRPDAVDLWTPERPDAPELLSKADVLRRRIEDIGADYADGLIDRAEFRAMRERAMSNLAEVESKIAAAGATSPLSIVASADIDTDWKAMSIAQKRAVIGALCTVVLRPAGQGARTFDTQTVAFRPKNPALQM

SEQ ID NO: 11398 - protein, 469 aa, Unknown
  Description of Unknown: Integrase C141 sequence
  PF07508,SSF53041,IPR036162,IPR025827,SM00857, PF00239,PTHR30461:SF3,PS51736,PS51737,IPR011109, G3DSA:3.40.50.1390,IPR006119,PTHR30461,cd00338,PF13408
MRIIGYVRLSRASREESTSVVRQREIIEKTCAARDFELVDIVEDVDVSATKTRLERPGLTEARERIKAGEADAVMVWRLDRIARSVVDFGVLLDEGLDIISATEPLDTASPMGRAMAEVLQVFARLEAKTIGVRISASQEHLRRVGRFPGGVIPYGYRAVPHPEGIGRALEPDPVEAGIVRRMADEVLSGASIYAVTVGLNRDGVPPRRGAKWSTTAVQRILRSNAVLGRVKVRGELLRDDATGLPLQVWEPLLSVEEVERLRALTDWTPTPGRSEATAEGRRRKASRLLSGLIHCPGCGYPLTAKSRHTTGAPIYVCEARARGRVCPGGVAIECERVEAEVERKFLAVVGRWLVVEPRVSVREVAGLAAVEEALRATTDALRDPDADLPVLFERLTRLREERDRLGALPEEPVVEMVESGRTFAEAWAEADTAARRSLLSNSGASISIERAPQRGKWSPERVRVDFHG

SEQ ID NO: 11399 - protein, 467 aa, Unknown
  Description of Unknown: Integrase C142 sequence
  Coil,PS51736,IPR006119,PTHR30461,PS51737,G3DSA:1.10.10.2600, PTHR30461:SF3,IPR011109,PF07508,PF13408,SSF53041,PF00239, SM00857,G3DSA:3.40.50.1390,cd00338,IPR038109,IPR036162,IPR025827
MKCVIYRRVSTDMQVEEGISLDMQQLRLEQYAKSQGWVVVNDYCDEGYSAKNTERPAFQKMIKDMKKKQFDIILVYRLDRFTRSVSDLHSILKIMDEYNVKFKSSTEIFDTTTATGRMFITLVATLAQWERETTAERVRDSMHKKAELGLRNGAKSPMGYDLNKGNLYINPTEAEIVKYIFEMFKTKGIISIVKSLNSRGVKTKRGKIFNYDAVRYIINNPIYIGKIRWGDDILTDIAQKDFETFIDKDTWYTVQQVQDSRKRGKVRLHNFFVFSNVLKCARCGKHFLGNKQVRSHNRIVMSYRCSSRHHKGTCDMPQVPEDVIEKEFLNLLEDAIVDLDDTEEKPIELSNLQEQYNRIQDKKARLKYLFIEGDIPKNEYKKDMLTLTQEENIIQKQLANITDTASSLEIKELLNQLKDEWYNLNNESKKAAVNAIVSSITVEVTKPARVGKNPIAPVIKVTDFKIK

SEQ ID NO: 11400 - protein, 465 aa, Unknown
  Description of Unknown: Integrase C143 sequence
  Coil,PS51736,IPR006119,PTHR30461,PS51737, PTHR30461:SF3,IPR011109,PS00397,PF07508,PF13408, SSF53041,PF00239,SM00857,G3DSA:3.40.50.1390,IPR006118, cd00338,IPR036162,IPR025827
MRTQHLRAVSTPQTLQVALYARVSSDQQAERHTIDSQLAELTAQAVQDGHCIRNDLRFIDNGHSGASLIRPALERLRDLVALSAIDLVYVQSPDRLARSYAHQVLLLEEFTHAGTQVIFLNRPIGTTPEDSLLLQLQGMFAEYERAKVLERSRRGKRHRAQTGAVSVLTRAPFGYHYITREAGGGAARYEIDEEAARIVRQIFTWVGHERLTLAAVCRRLRHNAIASPSGQPHWSRTVIHTMLRNPAYAGQAVYGRRQCVPWQPPLHPPRGHDGLPRKPYRQVPAAAERHISIAVPAIIDEDLFASVAERLEENRKRNRERLAGVQYLLRGLLVCQKCGYGFTGYHPYGPWRYYRCCGTDRTRFHGERRCDARLVAVDRLDEAVWSEVYRLLDDPTRVIEEYQRRLDAIQATPHQLELDALGRQLAKARRAIERLIDSYTEGLIEKPEFEPRLTGLASERWRALL

SEQ ID NO: 11401 - protein, 464 aa, Unknown
  Description of Unknown: Integrase C144 sequence
  PF07508,SSF53041,IPR036162,PTHR30461:SF3,SM00857, Coil,PF00239,PS51736,IPR011109,PS51737, G3DSA:3.40.50.1390,IPR038109,IPR006119,PTHR30461,cd00338, G3DSA:1.10.10.2600
MSRLTEESTSVDRQRELIEKWSEMNDHTIVGWAEDVDVSGSIDPFEAPQLGPWFQEDKRGDWDILVAWKLDRIGRRAIPLNKVFGWMLEHEKTLVCVSDNIDLSTWVGRLVANVIAGVAEGELEAIRERTKASRKKLLESGRWTGGPVPYWLIPEKLPEGGWVLSLNTETAPILRRAIDEVLDGTAVHTVAERLNDQGVPSPGGKKWTSQTLWRILQHKYLKGHSTDRGKTVRDSSGVPISNCEALLTPSEWDRLQAVLTQWKLPETSNRVKNTSPLLGVVVCYICDKPLYYRSYTRNYGKGLYRSYYCRNHRTPGIKADMLDEYLEENLMREVGDKNVLERYFVPAENHQIELDEAIRATEELTALLGTMTSATMRSSLTAQLAALDSRIASLEKLPTSESRWEYRELPRTYREMWESDDDPQFRRELLLKSGITLAATMTGGQKLHLHIPDDILERMALKGE

SEQ ID NO: 11402 - protein, 464 aa, Unknown
  Description of Unknown: Integrase C145 sequence
  PF07508,SSF53041,IPR036162,SM00857,PF00239, PS51736,G3DSA:3.40.50.1390,IPR011109,PS51737,IPR038109, IPR006119,PTHR30461,cd00338,G3DSA:1.10.10.2600
MRAIIYNRVSSDPTGRARSVADQERENRAVCERNDWPVAEVLTDNDRSATRFATRDRPEYLRLAEILRKGDVLVTWEASRAQRDLDAYVALRNLCAERGVMWCYSGKLYDLTAGDDRFTTGLDALLAEKEAEQTRERIMRGHRANLDAGRPHGHVPYGYRIVRDPTTGRPERRVPDEAQAPIVQDAARRILGGESLRSVVAGLNERTPEKRWSPSTLRRILVNPTYAGYRTHRGQIVREGTWDPLLSQDDHDRLVALFEGKRTVPRGSAPKYLLTGIAVCGVCDAPLQMRQQGSVPAAKKRPGGKLWFYGCEHGHVGRDRAKVDQAVSDVVVALLSDPAALATLAEPIEESDAEPVDDVQELRDRLSAAADAYDSGKLSIDMLAKVEARLLPRIEAAEARQRERFTSPVVARVATAPDPLTVWNDEMLLEDRREFLRATVRVVVYRVRSRWELGVEVYPKRLAQ

SEQ ID NO: 11403 - protein, 463 aa, Unknown
  Description of Unknown: Integrase C146 sequence
  PF07508,SSF53041,IPR036162,SM00857, PF00239,PS51736,IPR011109,G3DSA:3.40.50.1390, PS51737,IPR006119,PTHR30461,cd00338
MRAIIYCRVSSDPHARGKSVTEQESDCRATAKAHGWDVGEVLVDNDRGASRYSRKDRPAYRRLAETLTPGDVLVTWEASRAQRDLSAYLQLRDLCSERGVLWSYSGRTYDLARGDDRFTTGLDALLSEKEVEVTRERVLRSMRANAAAGRPHGKLAYGFMIVRDPHTGQSLDRVPNPETAPTFKEAADRVLDGESLYAVCNDFNARGIPAPRPRRDGTPAKWIPVTLRKILESPTYAGLRQSHGEVTGPATWEPLISMEQHERLKALFADPNRLTQRGSEPRWLLAGIARCGVCGATVKRIKSRGIQTYMCRDKFCAARMVATVDDYVVEAVMRRLEGQDLVGQIDSDNAEYGAAIENVRALQQRLDSFTDAAAEGEVTPAALARIEAKLLPQIERAEGRVRALAHSPAVARIAGAGARERWELLAVRDRRDIVRALVDVQIHRIGKGRRNVPIGEGIELSWL

SEQ ID NO: 11404 - protein, 460 aa, Unknown
  Description of Unknown: Integrase C147 sequence
  PF07508,SSF53041,PTHR30461:SF3,IPR036162,IPR025827, Coil,PF00239,PS51736,SM00857,IPR011109, G3DSA:3.40.50.1390,PS51737,IPR038109,IPR006119,PTHR30461, cd00338,G3DSA:1.10.10.2600,PF13408
MKCAIYRRVSTDEQAEKGFSLENQLLRLQAFAESQGWEVVHDYMDDGYSGKNMNRPQIKRMLHDLKLNKFDIVLVYRLDRFTRSVKDLNDLLEVFKDHEVDFKSATESIDTATATGRMILNMMVSTAQWERETISERVKDVVRKKKDLGLISTGYPPYGYVMNDGVISQVPHEVEIVKFIFEKAKVYGFQKISKLLNEQGLVTRNGTKWLISTASRIAHNPFYSGEMRYKRDGETSTVPINVEGYEPVITKEEHREILKAIKKRNRNQTRSKSDELYPFSGILLCPDCGHHMKGTRVSSRGYYYKYYRCDRASDHFCNGKLIRYEKVDKAFAEYIHDAFQIDRIEIKEETNTKDIQREIKRGKSKIERLKDLYVDGDISKKKYKNDVGELNEKIYDLEQKLLSAENKISHDHIRENLKRLSEFWGLIDDKTKMESIRGVFDTITIEIQGKDFVITDHTLL

SEQ ID NO: 11405 - protein, 459 aa, Unknown
  Description of Unknown: Integrase C148 sequence
  PS51736,IPR006119,cd03768,PTHR30461,PS51737, G3DSA:1.10.10.2600,IPR011109,PF07508,SSF53041,PF00239, SM00857,G3DSA:3.40.50.1390,IPR038109,IPR036162
MRLEANKKRRRCAVYTRKSSEEGLDQDFNSIDAQRDAGHAYIASQRAEGWIPVADDYDDPAYSGGNMDRPGLKRLLADIERGLVDIVVVYKIDRLTRSLADFSKMVEVFERHDVSFVSVTQQFNTTTSMGRLMLNVLLSFAQFEREVTGERIRDKIAASKRKGMWMGGVPPLGYDVVHRKLVVNEAEAAVVRRLFAEFPHAASTTLFVQQLRHEGVMTKSWVARSGNDRVGKLLDKGALYKILNNPVYLGQIRHKGVSHPGEHEAIVTREQWDAVQTALTSKPTGVGRGQIRSERPALLKGLIFTTDGRAMTPHATKGRGSRLYRYYLSTRDAKEGHGASGVSMLPAGEVEEAVMAQLRGILRAPEMVARVWREVARGNDAHDMTEMQVAIALSRIDTVWENLFPLEQHRIVQLLVERIVVSPQELRVQLHRNGIEHFALDVVRATGRTPAQAAGEVLA

SEQ ID NO: 11406 - protein, 458 aa, Unknown
  Description of Unknown: Integrase C149 sequence
  PF07508,SSF53041,IPR036162,PTHR30461:SF3,SM00857,PF00239,Coil, PS51736,G3DSA:3.40.50.1390,cd03768,PS51737,IPR011109,IPR038109 ,IPR006119,PTHR30461,G3DSA:1.10.10.2600
MKVAIYTRVSTLEQKEKGHSIEEQERKLRAYSDINDWTIQGVYVDAGYSGAKTDRPELNRLKENLSKIDLVLVYKLDRLTRNVKDLLDLLEIFERENVSFRSATEVYDTSTAMGRLFVTLVGAMAEWERETIRERAMMGKQAAIRKGMILTPPPFYYDRVDNKYIPNKYKDVVVWAYEEVKKGNSAKGIARKLNASDIPPPNGIQWEDRTITRALRSPLSKGHYFWGDIFIENSHEPIITDEMYNEIKERLNERVNAKTITHTSVFRGKLICPNCNGRLCLNTSYRKLKRGDVIHKNYYCNNCKVNKNGAFSFTEKEALKVFYDYLSKLDLSKYKTKEKEDKKIVTIDINKVMEQRKRYHKLYANGMMQEEELFELIKETDEKISEYEKQKERVPKKRLDVSKIKKFKNILLDSWNAFTLEDKADFIKMAIKSIEIEYIHVKRGKTKHSIKIKNIDFY

SEQ ID NO: 11407 - protein, 458 aa, Unknown
  Description of Unknown: Integrase C150 sequence
  PF07508,SSF53041,IPR036162,PTHR30461:SF3,SM00857, Coil,PF00239,PS51736,IPR011109,PS51737, cd03768,G3DSA:3.40.50.1390,IPR038109,IPR006119,PTHR30461, G3DSA:1.10.10.2600
MNYERSYLRSCQVSTLEQKEHGYSIEEQERKLKSFCEINDWSVSDVFIDAGFSGAKRDRPELQRMMNDIKRFDLVLVYKLDRLTRNVRDLLDLLEVFEQNNVAFRSATEVYDTSTAMGRLFVTLVGAMAEWERETIRERVMMGKRAAIKQGMILTPPPFYYDRVDNTYIPNDYKKVVLWAYDEVLKGNSSKAIARKLNDSDIPPPNGKRWEDRTITRALRNPITRGHYTWGDVFIENSHEPIITEEMYQQIKERLEERINTKIVSHVSVFRGKFICPRCGGTLTMNTATRKRKKGYVTYKTYYCNTCKTKKQSFGFSENEALRVFRDYLSKLDLDKYEVKTKQKDDVVTIDIDKIMEQRKRYHKLYAKGLMQEEELFELIKETDETIAEYEKQKELVPRKSLDIDKIKKFKNALLESWKIFSLEDKADFIKMAIKSIDIDYVKLKNRHSIKINDIEFY

SEQ ID NO: 11408 - protein, 458 aa, Unknown
  Description of Unknown: Integrase C151 sequence
  PF07508,SSF53041,IPR036162,PTHR30461:SF3,SM00857, Coil,PF00239,PS51736,IPR011109,PS51737, cd03768,G3DSA:3.40.50.1390,IPR038109,IPR006119,PTHR30461, G3DSA:1.10.10.2600
MNYERSYLRSCQVSTLEQKEHGYSIEEQERKLKSFCEINDWSVSDVFIDAGFSGAKRDRPELQRMMNDIKRFDLVLVYKLDRLTRNVRDLLDLLEVFEQNNVAFRSATEVYDTSTAMGRLFVTLVGAMAEWERETIRERVMMGKRAAIKQGMILTPPPFYYDRVDNTYIPNDYKKVVLWAYDEVMKGNSSKAIARKLNDSDIPPPNGKRWEDRTITRALRSPITRGHYTWGDVFIENSHEPIITEEMYQQIKERLEERINTKIVSHVSVFRGKFICPRCGGTLTLNTVTRKRKKGYVTYKTYYCNTCKAKKESFGFSENEALRVFRDYLSELDLDKYKVKTKQNDDVVTIDIDKIMEQRKRYHKLYAKGLMQEEELFELIKETDETIAEYEKQKELVPRKSLDIDKIKKFKNALLESWEIFSLEDKADFIKMAIKSIDIEYVKLKNRHSIKINDIEFY

SEQ ID NO: 11409 - protein, 458 aa, Unknown
  Description of Unknown: Integrase C152 sequence
  PF07508,SSF53041,PTHR30461:SF3,IPR036162,SM00857, Coil,PF00239,PS51736,IPR011109,cd03768, G3DSA:3.40.50.1390,PS51737,IPR038109,IPR006119,PTHR30461, G3DSA:1.10.10.2600
MNYERSYLRSCQVSTLEQKEHGYSIEEQERKLKSFCEINDWSVSDVFIDAGFSGAKRDRPELQRMMNDIKRFDLVLVYKLDRLTRNVRDLLDLLEVFEQNNVAFRSATEVYDTSTAMGRLFVTLVGAMAEWERETIRERVMMGKRAAIKQGMILTPPPFYYDRVDNTYIPNDYKKVVLWAYDEVLKGNSSKAIARKLNDSDIPPPNGKRWEDRTITRALRSPITRGHYTWGDVFIENSHEPIITEEMYQQIKERLEERINTKIVSHVSVFRGKFICPRCGGTLTLNTTTRKRKKGYVTYKTYYCNTCKGKKKSFGFAENEALRVFHDYLSKLDLEKYEVKTKQKDDVVTIDIDKIMEQRKRYHKLYAKGLMQEEELFELIKETDEIIAEYEKQKELVPSKTLDVDKIKNFKNVLLESWEIFSLEDKADFIKMAIKSIDIEYVKLKNRHSIKINDIEFY

SEQ ID NO: 11410 - protein, 450 aa, Unknown
  Description of Unknown: Integrase C153 sequence
  Coil,PS51736,IPR006119,PTHR30461,PS51737, G3DSA:1.10.10.2600,PTHR30461:SF3,IPR011109,PF07508,PF13408, SSF53041,PF00239,SM00857,G3DSA:3.40.50.1390,cd00338, IPR038109,IPR036162,IPR025827
MKRVALYMRVSTEQQAKHGDSLREQKETLYEYIEQHKDLKVVNEYVDGGISGQKINRDEFQKLLQDVKENKIDLILFTKLDRWFRNLRHYLNTQEILEKHNVSWNAVSQQYYDTTTAYGRTFIAQVMSFAELEAQIDSERIKAVMANKIAQGEVVSGKTPLGYSIENKKLVINDDAPIVIDIFNYFLSSGSLRKTVYYLGSQYGIVRDYQSVKNMLTNKKYIGELRNNKNYCPPIIDKKLFYAVQKALPKNLKTNAKRDYIFKGLLKCSDCQGSVAGQTIKARYKKKDGTESIYERTCYRCVKRRNNKLRCTNKRAFYEKNLERYIFEATKQKFEQIQINYSKKQPKIIKKKNSKKNIENKLDRLKKAYLNEVIDLEEYKKDREALMKELNEIEVEPAKIDIKNVEFILSKEFDEIYKESSEEEKNALWRSIIDNIIVFPDGNITVNFLI

SEQ ID NO: 11411 - protein, 447 aa, Unknown
  Description of Unknown: Integrase C154 sequence
  PF07508,SSF53041,IPR036162,PTHR30461:SF3,SM00857, PF00239,PS51736,IPR011109,PS51737,cd03768, G3DSA:3.40.50.1390,IPR038109,IPR006119,PTHR30461,G3DSA:1.10.10 .2600
MNATDKVLCAIYTRKSTEEGLEQNFNSLDAQRDACENYVASQKSEGWLMLRERYDDGGFSGGTLERPAIKRLLEDVRQGLVNTIVVYKIDRLSRSLADFAKLVELFDEYKVTFVSVTQSFNTTTSMGRLTLNILLSFAQFERELAGERVRDKIAASRQRGIWMGGMPALGYDVVERKLIPNKAEALIVKELFNRFATTPSMATLVNDLRSRGVTSKCWTTTKGVVRQGKLIDKGLIYKMFHNPVYLGLAAYKGQTFPGEHEPLISQELWDKVQGHLKSGAPLSKARSAGRGSAQSLLRGLIFSDQGRAFTPGWTRKRNKTYRYYVNTDSIKLGKEGCEIQRIPAGEIETLVIEKMRDVLRSPEILARTVREVRIARPGTEEAQAIEALQSIEQVWDQLFPAEQSQIARTLIERITVAPNGISIKWRGEGLNKLLRDTLESNALREAA

SEQ ID NO: 11412 - protein, 433 aa, Unknown
  Description of Unknown: Integrase C155 sequence
  Coil,IPR006119,PTHR30461,PS51737,G3DSA:1.10.10.2600,IPR011109, PF07508,PF13408,SSF53041,PF00239,SM00857,G3DSA:3.40.50.1390, cd00338,IPR038109,IPR036162,IPR025827
MKCSLYIRVSSQQYQEEKKEAIETLSAYIQENGWSVAEVYTDEIKGRNIVRKEAETMIEDGDYGRYDAIVTYDLPQLARNGHISEEIERLITERGIHVLTVDGSYNTLENDPAHFALYRNLYEKEAKKRSEFIKSQIRKRTESGKFKGSIPPYGYQLKDGKLVPRKDETPGVVRRIYKEYLDGAGMDGIRARLNEEGVRSPSSIVGKKNATKEWKKTSLRKILSNPHYVGDLVQGRERTLEPYERKREKVPEDQQVLIPNTHEAIISRKDFEAVRAIRKDHQETHFLKTQQKRLFRGIMHCNECGSSMWYRENRKGYICGRHARYGNDYCTSHVVKEDYVKGQLTHELIQFQNILREPETTGGLAEELWEMGVAEPERVVSDMKERVEQWSLSGYAIGDETLRAFVKEIIVTEDGEPHVTYKSPLHEMEERLE

SEQ ID NO: 11413 - protein, 430 aa, Unknown
  Description of Unknown: Integrase C156 sequence
  PF07508,SSF53041,IPR036162,PTHR30461:SF3,SM00857, PF00239,IPR025827,PS51736,IPR011109,G3DSA:3.40.50.1390, PS51737,IPR038109,IPR006119,PTHR30461,cd00338, G3DSA:1.10.10.2600,PF13408
MSTDQDEQLSSYENQVNYYRDYISKHEDYELVDIYADEGISATNTKKRDAFNRLIQDCRAGKVDRILVKSISRFARNTLDCIKYVRELKELGVGVTFEKENIDSLDSKGEVLLTILSSLAQDESRSISENATWGIRKKFERGEVRVNTTKFMGYDKDDNGRLIINPQQAETVKFIYEKFLEGYSPESIAKYLNDNEIPGWTGKANWYPSAIQKMLQNEKYKGDALLQKTFTVDFLTKKRVQNDGQVNQYYVENSHEAIIDKDTWELVQLELERRKAYREEHQLKSYIMQNDDNPFTTKVFCAECGSAFGRKNWTTSRGKRKVWQCNNRYRVKGQIGCQNNHIDEETLEKAVVMAVERLSENVDLLHGKWNKILEENCPLEKHYSTKLAEMINKPSWEFDSYEMCQVLDSITISEDGQITVRFHEGTEVDL

SEQ ID NO: 11414 - protein, 430 aa, Unknown
  Description of Unknown: Integrase C157 sequence
  PF07508,SSF53041,IPR036162,IPR025827,SM00857, PTHR30461:SF3,PF00239,PS51736,G3DSA:3.40.50.1390,IPR011109, PS51737,IPR038109,IPR006119,PTHR30461,cd00338, G3DSA:1.10.10.2600,PF13408
MSTDQDEQLSSYENQVNYYRDYISKHEDYELVDIYADEGISATNTKKRDAFNRLIQDCRAGKVDRILVKSISRFARNTLDCIKYVRELKELGVGVSFEKENIDSLDSKGEVLLTILSSLAQDESRSISENATWGIRKKFERGEVRVNTTKFMGYDKDENGRLIINPQQAETVKFIYEKYLEGYSPESIAKYLNDNEIPGWTGKANWYPSAIQKMLQNEKYKGDALLQKTFTVDFLTKKRVQNDGQVNQYYVENSHEAIIDKDTWELVQLELTRRRDFRGEHQLKAYIMQNDDNPFTTKVFCAECGSAFGRKNWTTSRGKRKVWQCNNRYRVKGQIGCQNNHIDEETLEKAVVMAVELLSENEDLLHGKWNKILEENRPLEKHYSTKLAEVINKPSWEFDSYEMCQVLDSITISEDGQISVKFLEGTEVDL

SEQ ID NO: 11415 - protein, 430 aa, Unknown
  Description of Unknown: Integrase C158 sequence
  PF07508,SSF53041,IPR036162,PTHR30461:SF3,SM00857, PF00239,IPR025827,PS51736,IPR011109,PS51737, G3DSA:3.40.50.1390,IPR038109,IPR006119,PTHR30461,cd00338, G3DSA:1.10.10.2600,PF13408
MSTDQEEQLSSYENQVNYYREYISKHEDYELVDIYADEGISATNTKKRDAFNRLIQDCRAGKVDRILVKSISRFARNTLDCIKYVRELKELGVGVTFEKENIDSLDSKGEVLLTILSSLAQDESRSISENAMWGIRKKFERGEVRVNTTKFMGYDKDDNGRLIINPQQAETVKFIYEKFLDGYSPESIAKYLNDNEIPGWTGKANWYPSAIQKMLQNEKYKGDALLQKTFTVDFLTKKRVQNDGQVNQYYVENSHEAIIDEETWETVQLEMARRKTYRDEHQLKSYIMQSEDNPFTTKVFCGACGSAFGRKNWATSRGKRKVWQCNNRYRVKGQIGCQNNHIDEETLEKAVVMAVELLSENVDLLHGKWNKILEENRPLEKHYSTKLAEVINKPSWEFDSYEMCQVLDSITISEDGQISVKFLEGTEVDL

SEQ ID NO: 11416 - protein, 430 aa, Unknown
  Description of Unknown: Integrase C159 sequence
  PF07508,SSF53041,PTHR30461:SF3,IPR025827,IPR036162, PF00239,SM00857,PS51736,IPR011109,G3DSA:3.40.50.1390, PS51737,IPR038109,IPR006119,PTHR30461,cd00338, G3DSA:1.10.10.2600,PF13408
MSTDQEEQLSSYENQVNYYREYISKHEDYELVDIYADEGISATNTKKRDAFNRLIQDCRAGKVDRILVKSISRFARNTLDCIKYVRELKELGVGVTFEKENIDSLDSKGEVLLTILSSLAQDESRSISENATWGIRKKFEHGEVRVNTTKFMGYDKDENGRLIINPQQAETVKFIYEKFLDGYSPESIAKYLNDNEISGWTGKANWYPSAIQKMLQNEKYKGDALLQKTFTVDFLTKKRVQNDGQVDQYYVENSHEAIIDKDIWELVQLELARRKAYREEHQLKSYIMQNDDNPFTTKVFCKECGSAFGRKNWTTSRGKRKVWQCNNRYRVKGQIGCQNNHIDEETLEKAVVMAVELLSENVDLLHGKWNKIIEENRPLEKHYSTKLADIINKPSWEFDSYEMCQALDSITIVEDGQITVRFLEGTEVDL

SEQ ID NO: 11417 - protein, 430 aa, Unknown
  Description of Unknown: Integrase C160 sequence
  PF07508,SSF53041,IPR036162,PTHR30461:SF3,SM00857, PF00239,IPR025827,PS51736,IPR011109,G3DSA:3.40.50.1390, PS51737,IPR038109,IPR006119,PTHR30461,cd00338, G3DSA:1.10.10.2600,PF13408
MSTDQDEQLSSYENQVNYYRDYISKHEDYELVDIYADEGISATNTKKRDAFNRLIQDCRAGKVDRILVKSISRFARNTLDCIKYVRELKELGVGVTFEKENIDSLDSKGEVLLTILSSLAQDESRSISENATWGIRKKFERGEVRVNTTKFMGYDKDENGRLIINPQQAETVKFIYEKFLEGYSPESIAKYLNDNEIPGWTGKANWYPSAIQKMLQNEKYKGDALLQKTFTVDFLTKKRVQNDGQVNQYYVENSHEAIIDEETWETVQLEMARRKTYRDEHQLKSYIMQSEDNPFTTKVFCGACGSAFGRKNWATSRGKRKVWQCNNRYRIKGVEGCYSSHLDEATLEQIFLKALELLSENIDLLDGKWEKILAENRLLDKHYSMALSDLLRQEQIDFNPSDMCRVLDHIRIGLDGEITVCLLEGTEVDL

SEQ ID NO: 11418 - protein, 430 aa, Unknown
  Description of Unknown: Integrase C161 sequence
  PF07508,SSF53041,PTHR30461:SF3,IPR036162,SM00857, PF00239,IPR025827,PS51736,IPR011109,G3DSA:3.40.50.1390, PS51737,IPR038109,IPR006119,PTHR30461,cd00338, G3DSA:1.10.10.2600,PF13408
MSTDQDEQLSSYENQVNYYRDYISKHEDYELVDIYADEGISATNTKKRDAFNRLIQDCRAGKVDRILVKSISRFARNTLDCIKYVRELKELGVGVTFEKENIDSLDSKGEVLLTILSSLAQDESRSISENATWGIRKKFERGEVRVNTTKFMGYDKDENGRLIINPQQAETVKFIYEKFLEGYSPESIAKYLNDNEIPGWTGKANWYPSAIQKMLQNEKYKGDALLQKTFTVDFLTKKRVQNDGQVNQYYVENSHEAIIDEETWETVQLEMARRKTYRDEHQLKSYIMQSEANPFTTKVFCGACGSAFGRKNWATSRGKRKVWQCNNRYRIKGVEGCYSSHLDEATLEQIFLKALELLSENIDLLDGKWEKILAENRLLDKHYSMALSDLLRQEQIDFNPSDMCRVLDHIRIGLDGEITVCLLEGTEVDL

SEQ ID NO: 11419 - protein, 430 aa, Unknown
  Description of Unknown: Integrase C162 sequence
  PF07508,SSF53041,IPR036162,PTHR30461:SF3,IPR025827, SM00857,PF00239,PS51736,IPR011109,PS51737, G3DSA:3.40.50.1390,IPR038109,IPR006119,PTHR30461,cd00338, G3DSA:1.10.10.2600,PF13408
MSTDQEEQLSSYENQVNYYREFISKHEDYELVDIYADEGISATNTKKRDAFNRLIQDCRVGKVDRILVKSISRFARNTLDCIKYVRELKELGVGVTFEKENIDSLDSKGEVLLTILSSLAQDESRSISENATWGIRKKFERGEVRVNTTKFMGYDKDESGRLIINPQQAETVKFIYEKFLEGYSPESIAKYLNDNEIPGWTGKANWYPSAIQKMLQNEKYKGDALLQKTFTVDFLTKKRVQNDGQVNQYYVENSHEAIIDKDTWELVQLELARRKVYREEHQLKSYIMQNDDNPFTTKVFCAECGSAFGRKNWTTSRGKRKVWQCNNRYWVKGQIGCQNNHIDEETLEKAVVMAVELLSENVDLLHGKWNKILEENRPLEKHYCTKLAEMINKPLWEFDSYEMCQVLDSITISEDGQISAKFLEGTEVEL

SEQ ID NO: 11420 - protein, 430 aa, Unknown
  Description of Unknown: Integrase C163 sequence
  PF07508,SSF53041,IPR036162,IPR025827,SM00857, PF00239,PTHR30461:SF3,PS51736,G3DSA:3.40.50.1390,PS51737, IPR011109,IPR038109,IPR006119,PTHR30461,cd00338, G3DSA:1.10.10.2600,PF13408
MSTDQEEQLSSYENQVNYYREFISKHEDYELVDIYADEGISATNTKKRDAFNRLIQDCRAGKVDRILVKSISRFARNTLDCIKYVRELKELGVGVIFEKENIDSLDSKGEVLLTILSSLAQDESRSISENATWGIRKKFERGEVRVNTTKFMGYDKDENGKLIVNPQQAEIVKLIYGKYLEGYSPESIAKYLNDNEIPGWTGKANWYPSAIQKMLQNEKYKGDALLQKTFTVDFLTKKRVQNDGQVNQYYVEGSHEGIIDEETWETVQLEIARRKTYREEHQLKSYIMQSQDNPFTTKVFCGACGSAFGRKNWATSRGKRKVWQCNNRYRIKGVEGCYSSHLDEATLEQIFLKALELLSENIDLLDGKWEKILAENLLLDKHYSMALSDLLKQKQMDFNPSDICRVLDHIRIGLDGEITVRFLEGTEVGL

SEQ ID NO: 11421 - protein, 413 aa, Unknown
  Description of Unknown: Integrase C164 sequence
  PF07508,SSF53041,IPR036162,IPR025827,SM00857, mobidb-lite,PF00239,PS51736,IPR011109,G3DSA:3.40.50.1390, PS51737,IPR038109,IPR006119,PTHR30461,cd00338, G3DSA:1.10.10.2600,PF13408
MSVKKIRVNKQKHKQRICAYIRVSTTNGSQLESLENQKQYFENLYSNRDDIDFVGVYHDRGISGSKNNRPNFQAMIENCRKGMIDIIHTKSIARFARNTVTVLEISRELKAIGVDIFFEEQNIHTLSSEGEVMLSVLASIAEDELRSMSGNQRWAFQKKFQRGELVINTKRFLGYDIDENGELIINPEEALIVRQIFALYLEGYGTHRIAKLLNEKGVATVTGAKWHDTTIRQMLSNEKYNGSVLLQKYFHDGVNGPKKLNQGELEQYFIEDNHEAIISMDDWQAVQDKLISKRLQQGRNKTYKFTGLLKCQHCGSSLKRQVSYKKKIVWCCSKYIKEGKAACQGMRVPEVDISNWVITSPVTVIERDGNGEKYYSYSGQESADQRSSSGQEENQGSRILPSVHRPRRTAIKL

SEQ ID NO: 11422 - protein, 413 aa, Unknown
  Description of Unknown: Integrase C165 sequence
  PF07508,SSF53041,IPR036162,IPR025827,SM00857, mobidb-lite,PF00239,PS51736,G3DSA:3.40.50.1390,IPR011109, PS51737,IPR038109,IPR006119,PTHR30461,cd00338, G3DSA:1.10.10.2600,PF13408
MSVKKIRVNRQKHRKRVCAYIRVSTTNGSQLDSLENQKQYFENLYSNRDDIDFIGVYHDRGISGSKDNRPNFQAMIEDCRRGKIDVIHTKSIARFARNTVTVLEISRELKAIGVDIFFEEQNIHTLSSEGEVMLSVLASIAEDELRSMSGNQRWAFQKKFQRGELVINTKRFLGYDVDENGELIINPEEALIVREIFALYLAGNGTHRIAKQLNEKGVATVTGAKWHDTTIRQMLSNEKYKGSVLLQKYFHDGVNGPKKLNQGELEQYLIEDNHEAIISKEDWQAVQDKLNSRRWQQGRNKTYKFTGLLKCQHCGSTLKRQVSYKKKIVWCCSKYIKEGKVACRGMRVPEVDISNWEITSPITVLERDRSGEKYYSYSGQESADQRTSSGQEENQSSRILSSVHRPRRTAIKL

SEQ ID NO: 11423 - protein, 413 aa, Unknown
  Description of Unknown: Integrase C166 sequence
  PF07508,SSF53041,IPR036162,IPR025827,mobidb-lite, SM00857,PF00239,PS51736,PS51737,IPR011109, G3DSA:3.40.50.1390,IPR038109,IPR006119,PTHR30461,cd00338, G3DSA:1.10.10.2600,PF13408
MSVKKIRVNRQKHRKRVCAYIRVSTTNGSQLDSLENQKQYFEKLYSNRDDIDFIGVYHDRGISGSKDNRPNFQAMIEDCRRGKIDVIHTKSIARFARNTVTVLEISRELKAIGVDIFFEEQNIHTLSSEGEVMLSVLASIAEDELRSMSGNQRWAFQKKFQRGELVINTKRFLGYDVDENGELIINPEEALIVREIFSLYLAGNGTHRIAKHLNEKGVATVTGAKWHDTTIRQMLSNEKYKGSVLLQKYFHDGVNGPKKLNQGELEQYLIEDNHEAIISKEDWQAVQDKLNSRRWQQGRNKTYKFTGLLKCQHCGSTLKRQVSYKKKIVWCCSKYIKEGKVACRGMRVPEVDISNWEITSPITVLERDRDGEKYYSYSGQESAEQRSTSGQKENQCGRILPSVHRSRRTAIKL

SEQ ID NO: 11424 - protein, 413 aa, Unknown
  Description of Unknown: Integrase C167 sequence
  PF07508,SSF53041,IPR036162,IPR025827,mobidb-lite, PF00239,SM00857,PS51736,IPR011109,PS51737, G3DSA:3.40.50.1390,IPR038109,IPR006119,PTHR30461,cd00338, G3DSA:1.10.10.2600,PF13408
MSVKKIRVNNQKHKQRICAYIRVSTTNGSQLESLENQKQYFENLYSNRDDIDFVGVYHDKGISGSKDNRPNFQAMIENCRKGMIDVIHTKSIARFARNTVTVLEITRELKAIGVDIFFEEQNIHTLSSEGEVMLSVLASIAEDELRSMSGNQRWAFQKKFQRGELVINTKRFLGYDLDENGELIINPEEALIVRQIFALYLEGYGTHRIAKLLNEKGVATVTGAKWHDTTIRQMLSNEKYNGSVLLQKYFHDGVNGPKKLNQGELEQYFIEDNHEAIISMEDWQAVQGKLNSRRWQQGRNKTYKFTGLLKCQHCGSTLKRQVSYKKKIVWCCSKYIKEGKAACKGMRVPEVDISNWTVTSPVTVIERDRDGEKYYSNTGQESADQRSSSGQEENQSSRILSSVHRPRRTAIKL

SEQ ID NO: 11425 - protein, 413 aa, Unknown
  Description of Unknown: Integrase C168 sequence
  PF07508,SSF53041,IPR036162,IPR025827,SM00857, PF00239,mobidb-lite,PS51736,G3DSA:3.40.50.1390,IPR011109, PS51737,IPR038109,IPR006119,PTHR30461,cd00338, G3DSA:1.10.10.2600,PF13408
MSVKKIRVNRQKHRKRVCAYIRVSTTNGSQLDSLENQKQYFENLYSNRDDIDFMGVYHDRGISGSKDNRPNFQAMIEDCRRGKIDVIHTKSIARFARNTVIVLEISRELKAIGVDIFFEEQNIHTLSSEGEVMLSVLASIAEDELRSMSGNQRWAFQKKFQRGELVINTKRFLGYDVDENGELIINPEEALIVREIFALYLAENGTHRIAKQLNEKGVATVTGAKWHDTTIRQMLSNEKYKGSVLLQKYFHDGVNGPKKLNQGELEQYLIEDNHEAIISKEDWQAVQDKLNSRGWQQGRNQTYKFTGLLKCQYCGSTLKRQVSYKKKIVWCCSKYIKEGKVACQGMRVPEVDISNWVITSPITVIERDRNGEKYYSYSGQESADQRSASGQEENQGSRILSSVHRPRRTAIKL

SEQ ID NO: 11426 - protein, 413 aa, Unknown
  Description of Unknown: Integrase C169 sequence
  PF07508,SSF53041,IPR036162,IPR025827,SM00857, PF00239,mobidb-lite,PS51736,G3DSA:3.40.50.1390,IPR011109, PS51737,IPR038109,IPR006119,PTHR30461,cd00338, G3DSA:1.10.10.2600,PF13408
MSVKKIRVNRQKHRKRVCVYIRVSTTNGSQLESLENQKQYFENLYSNRDDIDFVGVYHDRGISGSKDNRPNFQAMIENCRKGMIDVIHTKSIARFARNTVTVLETSRELKSIGVDIFFEEQNIHTLSSEGEVMLSVLASIAEDELRSMSGNQRWAFQKKFQRGELVINTKRFLGYDIDEKGELIINPEEALIVRQIFALYLEGYGTHRIAKLLNEKGVATVTGAKWHDTTIRQMLSNEKYNGSVLLQKYFHDGVNGPKKLNQGELEQYFIEDNHEAIISMKEWQAVQDKLNSRRWQQGRNKTYKFTGLLKCQHCGSTLKRQVSYKKKIVWCCSKYIKEGKATCQGMRVPEVDISNWEITSTVTVIERDRNGEKYYSYSGQESADQCSTSGQEENQSSRILSSVHRPRRTAIKL

SEQ ID NO: 11427 - protein, 413 aa, Unknown
  Description of Unknown: Integrase C170 sequence
  PF07508,SSF53041,IPR036162,IPR025827,SM00857, mobidb-lite,PF00239,PS51736,G3DSA:3.40.50.1390,IPR011109, PS51737,IPR038109,IPR006119,PTHR30461,cd00338, G3DSA:1.10.10.2600,PF13408
MSVKKIRVNKQKHRKKVCVYIRVSTTNGSQLDSLENQKQYFENLYTNRNDIDFVGVYHDRGISGSKDKRPDFQAMIEECRKGQIDVIHTKSIARFARNTVTVLEISRELKAIGVDIFFEEQNIHTLSSEGEVMLSVLASIAEDELRSMSGNQRWAFQKKFQRGELVINTKRFLGYDVDENGELIINPEEALIVREIFALYLAGNGTHRIAKQLNEKGVATVTGAKWHDTTIRQMLSNEKYKGSVLLQKYFHDGVNGPKKLNQGELEQYLIEDNHEAIISKEDWQSVQDKLTSRRWQQGRNKTYKFTGLLKCQHCSSTLKRQVSYKKKIVWCCSKYIKEGKVACQGMRVPEVDISNWVITSPVTVIERDRNGEKYYSYSGQESADQGSSSGQEENQGSRILSSVHRPRRTAIKL

SEQ ID NO: 11428 - protein, 413 aa, Unknown
  Description of Unknown: Integrase C171 sequence
  PF07508,SSF53041,IPR036162,IPR025827,mobidb-lite, SM00857,PF00239,PS51736,IPR011109,PS51737, G3DSA:3.40.50.1390,IPR038109,IPR006119,PTHR30461,cd00338, G3DSA:1.10.10.2600,PF13408
MSVKKIRVNRQKHKKRVCAYIRVSTTNGSQLDSLENQKQYFENLYSNRDDIDFVGVYHDRGISGSKDNRPNFQAMIENCRKGMVDIIHTKSIARFARNTVTVLEISRELKAIGVDIFFEEQNIHTLSSEGEVMLSVLSSIAEDELRSMSSNQRWAFQKKFQRGELVINTKRFLGYDVDENGELIINPEEALIVRQIFALYLEGYGTHRIAKLLNEKGVATVTGAKWHDTTIRQMLSNEKYNGSVLLQKYFHDGVNGPKKLNQGELEQYFIEDNHEAIISMKEWQAVQDKLNSRRWQQGRNKTYKFTGLLKCQHCGSTLKRQVSYKKKIVWCCSKYIKEGKAACKGMRVPEADISNWAITSPVTVIERHKNGEKYYSYSSQESADQRSSSGQEENQSSRILSSVHRPRRTAIKL

SEQ ID NO: 11429 - protein, 412 aa, Unknown
  Description of Unknown: Integrase C172 sequence
  PF07508,SSF53041,PTHR30461:SF3,IPR036162,SM00857, IPR025827,PF00239,PS51736,PS51737,IPR011109, G3DSA:3.40.50.1390,IPR038109,IPR006119,PTHR30461,cd00338, G3DSA:1.10.10.2600,PF13408
MRTVRRIQPMMTPQKPKLRVAAYARVSDSRLHHSLSTQVSYYSRLIQSHPDWELVGVYYDEGISGKEQSNRQGLQDLLKACDDGKIDRILTKSIARFGRNTVDLLSTVRVLRQKNIGITFEKEGIDSLSSEGELMLTLLASVAQEESHNISENLRWQIKKKFEQGQPHTPQDIYGYRWNGENYVIEPDEAKVVRQVFQWFLDGDNAPMITKKLNEQGVLTRLGNPFTVSSVREFFKQEAYFGRLVLQKTYREPFSRNPKRNNGQKNKYIVEDAHEAIVSKSYFDVVLQEKERRYKVMYQESHMHKGTFRELIECSHCGKIMITRVDSKKVHRTIRYCCRTRDRFGTSSCPSKTLSEKRILATFEDKIGFKPDKNWVTENIKKVIYDSSVGLITVFPIKGRKYELKVRKEHFL

SEQ ID NO: 11430 - protein, 411 aa, Unknown
  Description of Unknown: Integrase C173 sequence
  PF07508,SSF53041,PTHR30461:SF3,IPR025827,SM00857, PF00239,IPR036162,PS51736,PS51737,IPR011109, G3DSA:3.40.50.1390,IPR038109,IPR006119,PTHR30461,cd00338, G3DSA:1.10.10.2600,PF13408
MRTVRRIQPIKSPCRPKLKVAAYARVSDSRLHHSLSTQISYYNRLIQAHPDWELVGIYYDEGISGKEQSNRQGFQNLIKDCDNGKIDRIITKSIARFGRNTVELLTTVRQLRLKNIGVTFEKENVDSLSSEGELMLTLLASVAQEESQNMSENIRWRVQKKFEKGIPHTPQDMYGYRWDGEQYQIEPNEAKVIRKVFKWYLNGDSVKQIVDKLNQEHVLTRLGNPFTVASIREFFKQEAYFGRLVLQKTYREAFSRNPKRNKGQRNKYIIENAHEPIVTKEYFELVLHEKERRYQLMHQESHLNKGIFRDKIFCSDCGCLMIVKVDSKHVKKTVRYYCRTRNRFGASSCPCRTLGEKRLLASFKSKLGIVPYKEWVENNIKHIEYDFGHRIIRVTPVKGRKYTIEIREGRY

SEQ ID NO: 11431 - protein, 411 aa, Unknown
  Description of Unknown: Integrase C174 sequence
  PF07508,SSF53041,PTHR30461:SF3,IPR025827,IPR036162, PF00239,SM00857,PS51736,IPR011109,G3DSA:3.40.50.1390, PS51737,IPR038109,IPR006119,PTHR30461,cd00338, G3DSA:1.10.10.2600,PF13408
MRTVRRIQPIKSPCKPKLKVAAYARVSDSRLHHSLSTQISYYNRLIQAHPDWELVGIYYDEGISGKEQSNRQGFQNLLKDCDDGKIDRIITKSIARFGRNTVELLTTVRQLRLKNIGVTFEKENIDSLSSEGELMLTLLASVAQEESQNMSENIRWRVQKKFEKGIPHTPQDMYGYRWDGEQYQIEPNEAKVIRKVFKWYLDGDSVQQIVDKLNQEQVLTRLGNPFTVASIREFFKQEAYFGRLVLQKTYREAFSRNPKRNKGQLNKYIIENAHEPIVTKEYFELVLHEKERRYQLMHQESHLNKGIFRDKIFCSDCGCLMIVKVDSKHVKKTVRYYCRTRNRFGASSCPCRTLGEKRLLASFKSKLCIVPDKEWVENNIKHIEYDFGQRIIWVIPVKGRKYPIEIREGRY

SEQ ID NO: 11432 - protein, 410 aa, Unknown
  Description of Unknown: Integrase C175 sequence
  PTHR30461:SF3,PF00239,PS51736,G3DSA:3.40.50.1390,IPR038109, IPR006119,G3DSA:1.10.10.2600,PF13408,PF07508,SSF53041, PS51737,cd00338,IPR036162,IPR006118,SM00857, IPR011109,PS00397,IPR025827,Coil,PTHR30461
MTTVALYARVSSKKQAQNNTIESQIAELKCRIAADKHELLDEYEFKDNGISGWILGREGLEALRDKVAEGEIDKIYIHSPDRLSRKSAHQVVLLEEFEKAGVEVIFSNHKIENNPESKLLLGMQGLLSEYECTKTMERSRRGKRHRARKGCISVIGIAPFGYKRMKHVDREKTSFEINEEEAKIVRQIFMWIGQERISIREAIRRLKDMSVRTRTEKKVWRPIIIWKMLRNPAYKGQAAFGKLKRVERISRKKSKQKVKNVYVYRTDEESWIYIPVPKIVDEGLFNKVQKQLDENRKRARMQRREEINLLQGLTICQNCKSTYSGVHHRDGEKTYSYYRCSSIVRITDDEEKCNNKLVRADMLEIAVWEKVKDVLKNPEMIKKEHWNFCFSISHASEQIQILQLKALDRW

SEQ ID NO: 11433 - protein, 713 aa, Unknown
  Description of Unknown: Integrase A1 sequence
  G3DSA:1.10.10.60,SSF46689
MSREPAQLWWTAAEIAAAGLPDLPASRQGVEALARRANWRADPKHSRQRQGRGGGWQYHWSLFPLPAQTRLLQASAGAAPAAKPVLGRAEAWAWFETVPEAVKAEARRRLAVLDEVDTLTGLGTAKTLAVEEIARGHDMGARTIWDWFGMIDGVAPSDRLPYLAPRHRAAARKDTKVALDPEWFERLKGLYLRLGGPSFSQSWRDAERLAKANGWACLPERTARRRFDQEVPRVVQIHAREGVEGLERCYPPMIRSKALLHAMEAVNADCHRFDVFVLWPGSDRPERPQIVAYQDLYSGKILSWRIDHTPNEVAVMAAFGEMVETYGIPKHCTFDNGREFAAKWLSGGAKTRYRGKIRDDDPMGVLPLLNIKIHWAKPAHGQAKPIERAFRDFASDISKDIRFQGAYTGNRPDAKPEDYATRAIPLDDFVRVVGERIAEHNARVGRQSETAAGRSFDETFAESYAASTVVRATEEQRRLWLMGQKPVTLNRHHGRVRLFRNYYWSDWMVEYAGQKIVARFDVEDLHAGIHVYDLAGAYLGFAPCQQAEGFYNLTAAKDEARRRQAWKRVQKQALAAARRMTPAEIGRELDASAPAPAAPVEAKVVAMTPKGPRPAAAQVTRPAYRDPTTPEQQAEIVAFQEHHYADQARKAEAAEVETALDRFRWALEIERKAAAGEPVGEAEARRFERYRQTAEWRGMRRMHEHSGNAMFLS

SEQ ID NO: 11434 - protein, 704 aa, Unknown
  Description of Unknown: Integrase A2 sequence
  G3DSA:1.10.10.60,SSF46689
MTLTPTKEWWTAAEIAAQALPDLANSRQGVEAQAKRDDWRAHPEHARKRAGRGGGWEYHWRLFPSRAQRELIGRATAPTSEGGSTGREDVWAWFDGLPEKTKDKARCNLRIVQEVETSCRAMTKNLAVGMVASQHGCSERTIWNLYRRIEGVDPADWLAYLAPKHRASSKKGVTARASAEFFDLLKGDYLRLGPHSFTSSYERAVKICKAKGLAYLTPRTARRWFDQNVPRVTQVFAREGEAGLAKCFPPQIRDRSTLTALEGVNADCHKIDVFVQWPGIEKPVRPQIVGFQDLYSNKILSWRVDLDPNKVAVMSAFGELVETWGIPHHCLFDNGREFANKWLTGGVPTRFRFKIRDDDALGVLPQMGIQIHWAQPAHGQAKPIERGFRDFADRIALDPRFAGAYVGKRPDAKPEDYGSRAIPLEDFLRVLDEGIRDHNARQGRLTDTAKGRSFDDTFAESYASAPIRKATPEQHRLWLMGQEVRKLHRTHGELTLHRNKYWADWMNEHAGEKVVARFDPENLHAGVYIYSLAGAFMGMSECSQKVGFFDLVGAKLHAKVKRQRRKAEKALLDAMRPVSVQDIAAELDRLPQPETPLVEAKVVEMAPARHRKPLVQRSLPVPDTAADERLKVFTAEFGKPKPAPEAKTETAEDRFRRALDIERRSEAGEPISEEDAEFLSRMQKLPKYRAQRLSYDSWGDQAIN

SEQ ID NO: 11435 - protein, 701 aa, Unknown
  Description of Unknown: Integrase A3 sequence
  G3DSA:1.10.10.60,SSF46689
MAETPRQEWWSAAEIAAAGLPDVPGSKRKVNDMAAREGWKAQPGKSRRRNRTGGGWEYHWSLLPVRARLALSEPVEDEPAPKIGRDEAWAQFEAATGAAQKKARDRLAVLNQVEEIEVAGMTRSLAVTTVSERSGASAKSIWNWLDRVEGIAHADRLAYLVDRRGTRKKAAPAAPSADFCTLVKSDFLRQSQPSFTSCYDRAARIAKKEGLAVPPIHQVRRWYKASVSEPTEIYWRKGVEALRRFYPHQTRDKSAMVPLECVQGDYHKFDVFVRWPGEKDPVRVQAVVFSDVYSGKILAWRLDTTANSHTVQLAIGDLIERYGVPQQALLDNGREFAAKAITGGTPTRFRFKIDDEDIPGLLPLLGINVIWATPYSGQSKPIERAFRDLCDRVAKHPAFEGAYTGNRPDAKPENYGSRAIPLEEFRAVVAEEIEAHNARPARRSEVAFGRSFNDVFNEGYQRAAISRATDEQRRLWLLRVEGLRGDSKNGELKLHGSRYWAEWMYRIAGKKIAARFDQDDLHAGLHVYDLSGSYLGHAPCMEAAPFLSVEDARTHARKRNQFIRATKDLAKAERELDHHQIAARLRAAGKEVEDELPEAEVVRLVPAHPKAPKPARRGRQSTDQIENAARLDAQITRISERRAAPVEDDPRGRFDRAMTLEAMQAEGQPMTVEQATWLAEYQQSAEYRGFARMRRAFGEDE

SEQ ID NO: 11436 - protein, 695 aa, Unknown
  Description of Unknown: Integrase A4 sequence
  PF07508,G3DSA:1.10.10.2600, SSF53041,PF13408,PS51737,cd00338,PTHR30461:SF3, PF00239,PS51736,SM00857,G3DSA:3.40.50.1390,PS00397, PTHR30461
MFSNSLEDFFGPEVDIYARVSSEDQQERETIENQIEYATKYCELNKLTIREWYLDDGITGTIPLRDRPAGAKLIKDAQEGKSKKILIFNMKRLGRVARVTLDAVYELEKHGAKIKSMTEPFDTSTPAGRFILTVLAGQAELDRDTMLETMWHGANRAARKGKWLGGIVPYGYKKNHDGFLEINCDPLPGKEDMSEASVIELLYHLCVNGKMSTIQIADYLNALGIPPSYVKDNRSIKRGRRKEKTAGVWRPARVGNMIKNSTYRGIHVYGKRSNKDRELIERKVPAIISEEMWHQAQIILKANQIEAVKNTKRQYLLRGLIKCGCCGLNYHGTAYRSSPFYVCNGKTAYAGPLMGKCKSRNIPAPWVENLVWEQCVNFINNPGDTVKELVNVDEKVLDHTAAYIDEKELVQKSLLNKDDERQSILELYRKKMISSNDVEIQLTEITNEKKELEDRLRELNILIEGNARKEKRTDDVFQILDGLREVIKEELPFETKRAIVKALVKKIIVHTHFEDGVKRFHNASVHAEFSFDGIKVINGTPVRENNNLDTIIEREFSFEGNYNRYLLLDKTTGQRLRRCRHLKKMTIEELSNSIGISSTTILMLEKHNNKASLRTLKLLSSVLEVPISYLGMFEKMPDSTFGDKVRKARYYHGLTKEELAAQIKVDKKTIQNWESNKCVPRDMKKLNQIIKILHM

SEQ ID NO: 11437 - protein, 675 aa, Unknown
  Description of Unknown: Integrase A5 sequence
  PF07508,G3DSA:1.10.10.2600,SSF53041,PF13408,PS51737, cd00338,PF00239,PS51736,SM00857,G3DSA:3.40.50.1390, PS00397,PTHR30461
MSDKKQDIYAIYIRVSTERQVEHGDSIEMQEALGMQIIKENNGIHYRTYIEPAVSASKTNLKNREVLMECLNDAKNGLFNKLIVYKRDRLARKLEDAMAIWDILKKANCELIFSATDEMQAMMNDPYGKMLEAIKASIAEIESATISVRVSDTLKNKAKKGEFTGGNLPYGYILKDKKIVLIPEEVKIIKEIEDLYLAGYGLYSIAKWLNGEKVSNLGYRPEGRAYRRKQHKNSSEYWTRDVIHTILFNPFYTGIIEYSTSGDKRSVNDDSLIIRAKGSHEPCRTLERHEQILREKKRRESEISEPRRYTTSFLLTGLLYCSECGNKFYGRNSTQNKKKYSYYVCGGKSTIKHIGKEPCPSKQFKKEVLEEFILQKIIEYISSVNLDSEIKKIQESLNESDLKLKTALEEINKKIERLNKDYTAIRRLLLDLDENDENYELLKESYQNDQAEILKKLNEAKKAKQELENQLNIQSDQENIIQSIIEEIRDFSKNIHYVPYHMKKVMIDKIIEKIEINKDGDVKLYFSIPLSPKEEQENKDIERKISFISFGGVGDTTTTKTIKIGIHLDHHKYNFFEWIQTISNKIKSSFINWIKLHVDIKSARQMHRDTGIAETTCREIINKERIPMPKTIKRIVEAYHLNLKSFIDFMGISISEESLFHVIETTISGRRVKAS

SEQ ID NO: 11438 - protein, 673 aa, Unknown
  Description of Unknown: Integrase A6 sequence
  SSF53041,PF13408,PS51737,cd00338,PTHR30461:SF3,PF00239,PS51736 ,SM00857,G3DSA:3.40.50.1390,PTHR30461
MSNTLLPGQRLRRRIRVAIYRRVSTNKQVDGFGLDAQDELCRRWLDLMIGVGNYIVVDVYTDGGVSGKLAEREDLDRMNADIAAGRIDLVIFGKLDRIGRTMKNIHRWVYDTQDIEVEKGRKVRIVTADNRIDSEGEMFEVTLALLAYMAQMEHSLILERTMSGRIQKVMAGGWPHGGIPYGYMIDPETGDVVVNPLEAVVIEKAIEFLVDSPEYLTRGEVAKRLNALGYRTRKGYLWDGANLAQRLKKALCGFSEFTFAAGTDEEQVHVLTLPEIVPGERALAATVALERSAKTKSPSVDYPLSKRLISLCGAGMVGGIDKRSGTRKYRCQKTREGAEYEHECQSLYADDVEAAVMAEVTGLVVDRDRLHELIKEALGTTPQRLESYRRRLTEIDETLAKKRKTRKKAIARLVAAVEVDDDEDDDFADEMREEIEELKARYKEEEADLLQERERVESWIADIEGEEERALQVLAAADKLRTKVGKLSKREQADLIEMLDIQVQIEGVAKVHRRGNVDPLSKWHWETGAEVPAELTDEMWAKVSSIISNTQKWKDIRGAFDVTLEKIRTGRVWTDFLKDERLGGRGYATLMRRVRHWDETGEYQQALKVLEGYRKVPAAPQFSLPPMRVTGAVARAPKGITAGQTGDVANGELGDVDGRGSRMQIACVASLTV

SEQ ID NO: 11439 - protein, 670 aa, Unknown
  Description of Unknown: Integrase A7 sequence
  SSF53041,cd00338,PTHR30461:SF3,PF00239,PS51736, SM00857,G3DSA:3.40.50.1390,PS00397,PTHR30461
MVKRTLPRQRMKQATVRVAIYLRVSTAQQLEGYGLKVQEDQCRAWIAYALRGVNYTIVEVYVDGGVSGKLASREELDRMTADAMAERLDLIVFGKLDRIGRTMKNIHRWVYDVTDKGVRVATADGRIDSEDEMFGIQLSLLAYMAEVEHALILERTMGGRMQKVAVGGWPLGEPPFGFMLDSNGNPALNAPEIKQIEEFADFMIDSPDPVTREDAARHLNALGYRTRRGKEWDGGNLVGRVMAALKGYVEFAFAGENEDGEEITTSFRIDLPKALPDDRAEALKAALARGSRVKGRHSKYLLSNRLISVCGAHRTGATTPEHGRFYRCMAGRQGNPINERHEDCWEIPVEEVDAAVWDEVKDLLSDKDKLRKLVEESLGSVPDRAESYRRRLTELDAQIEKKRSGRKRKVALLLASIDDDSENGEEDAKLVEELKAELKGQEADLVEERERVAEWLYEIEGQEGRAKDMLAMIDKVETRLDDFTFDQKLDLLDLLDVRVQITGKGVPRHKGLVDPIGEWHRETGLTIPIEITDEQWVKVQPILSGNRQWRDVRGGFEVMLDKLRTGRAWNEYSGCEAIGGRSYGALYRRVTHWFGSGEYERALEELTPYVGVPVPPLYVLPPMEVTGSADPKYTVERAAQECPDPNCNDAKTGTSSSRILFAQMDFNPTR

SEQ ID NO: 11440 - protein, 670 aa, Unknown
  Description of Unknown: Integrase A8 sequence
  SSF53041,cd00338,PTHR30461:SF3,PF00239,PS51736,SM00857, G3DSA:3.40.50.1390,PS00397,PTHR30461
MVKRTLPRQRMKQATVRVAIYLRVSTAQQLEGYGLKVQEDQCRAWIAYALRGVNYTIVEVYVDGGVSGKLASREELDRMTADAMAERLDLIVFGKLDRIGRTMKNIHRWVYDVTDKGVRVATADGRIDSEDEMFGIQLSLLAYMAEVEHALILERTMGGRMQKVAVGGWPLGEPPFGFMLDSNGNPALNAPEIKQIEEFADFMIDSPDPVTREDAARHLNALGYRTRRGKEWDGGNLVGRVMAALKGYVEFAFAGENEDGEEITTSFRIDLPKALPDDRAEALKAALARGSRVKGRHSKYLLSNRLISVCGAHRTGATTPEHGRFYRCMAGRQGNPINERHEDCWEIPVEEVDAAVWDEVKDLLSDKDKLRKLVEESLGSVPDRADSYRRRLAELDAQIAKKRSGRKRKVALLLASIDDDSENGEEDAKLVEELKAELKGQEADLVEERERVAEWLYEIEGQEGRAKDMLAMIDKVETRLDDFTFDQKLDLLDLLDVRVQITGKGVPRHKGLVDPIGEWHRETGLTIPIEITDEQWVKVQPILSGNRQWRDVRGGFEVMLDKLRTGRAWNEYSGCEAIGGRSYGALYRRVTHWFGSGEYERALEELTPYVGVPVPPLYVLPPMEVTGSADPKYTVERAAQECPDPNCNDAKTGTSSSRILFAQMDFNPTR

SEQ ID NO: 11441 - protein, 669 aa, Unknown
  Description of Unknown: Integrase A9 sequence
  SSF53041,PF13408,PS51737,cd00338,PTHR30461:SF3, PF00239,PS51736,SM00857,G3DSA:3.40.50.1390,PS00397, PTHR30461
MRTTTLPRKRKMLRVAIYLRVSTSKQLDGWGLDVQDERCRAWVDYQLKGTPHAIVDVYCDGGVSGKLAHRDDLDRLTSDIEAGLIDVVVFAKLDRIGRTMKNIHRWVYDVTDFGVRVATADGRIDSDDQMFGIQLSLLAYMAEVEHALILERTMGGRVKKISGGGWASGTPPYGYMLDEDGEPVVNPAELEQIMKFAELAVDQGASRGEAAKGLNEAGYRTRTGKLWEGNNLILRMRLAIRGYVDFTFSGVNEDGEEITTSYRLELPPLFEDESRRKALETVLLEDMKGEARVSYGEHMLTGHLVSQCGHPRYGAARREYDDVVYRCKNQATIAEGHTCKQIPGEETEKVVWDEVAKKLADPESIKGLVDDWLGTIPERAESYRSRMQEIDDKLNKLRNTRRKKIAMLVASLDEDDEEDQKLIAELKEEIASKEKDLRQEQERIAEWLEEAEHKEERAESMRTLIDRIGTNVHNISQVDKKRLLELLRVRVQIVGESVSGQKGGTKDPMLEWHREKKIKIPLSISDEQWAQVEGILAGGRKPKPEDRPCFEMLLEKLREIKGWHDYDHDERMGGKGWGFFYRLARRWFVEGMYAKALEVLTPYEGVDAPDGYTLPPMKIYGVIDDSAEDVVVTSESAVKAEVGGRTPSTKGIRGNASGFEFEIGSTKAS

SEQ ID NO: 11442 - protein, 669 aa, Unknown
  Description of Unknown: Integrase A10 sequence
  SSF53041,cd00338,PTHR30461:SF3,PF00239,PS51736, SM00857,G3DSA:3.40.50.1390,PS00397,PTHR30461
MKRTLPRQRMKQATVRVAIYLRVSTAQQLEGYGLKVQEDQCRAWIAYALRGVNYTIVEVYVDGGVSGKLASREELDRMTADAMAERLDLIVFGKLDRIGRTMKNIHRWVYDVTDKGVRVATADGRIDSEDEMFGIQLSLLAYMAEVEHALILERTMGGRMQKVAVGGWPLGEPPFGFMLDSNGNPALNAPEIKQIEEFADFMIDSPDPVTREDAARHLNALGYRTRRGKEWDGGNLVGRVMAALKGYVEFAFAGENEDGEEITTSFRIDLPKALPDDRAEALKAALARGSRVKGRHSKYLLSNRLISVCGAHRTGATTPEHGRFYRCMAGRQGNPINERHEGCWEIPVEEVDAAVWDEVKDLLSDKDKLRKLVEESLGSVPDRADSYRRRLAELDAQIAKKRSGRKRKVALLLASIDDDSENGEEDAKLVEELKAELKGQEADLVEERERVAEWLYEIEGQEGRAKDMLAMIDKVETRLDDFTFDQKLDLLDLLDVRVQITGKGVPRHKGLVDPIGEWHRESGLTIPIEITDEQWVKVQPILSGNRQWRDVRGGFEVMLDKLRTGRAWNEYSGCEAIGGRSYGALYRRVTHWFGSGEYERALEELTPYVGVPVPPLYVLPPMEVTGSADPKYTVERAAQECPDPNCNDAKTGTSSSRILFAQMDFNPTR

SEQ ID NO: 11443 - protein, 668 aa, Unknown
  Description of Unknown: Integrase A11 sequence
  SSF53041,PS51737,cd00338,PTHR30461:SF3,PF00239, PS51736,SM00857,G3DSA:3.40.50.1390,PS00397,PTHR30461
MRTKTLPRKTKTLRVAIYLRVSTSKQLDGYGLDVQDERCRAWVDYQLKGTPHTIVDVYCDGGVSGKLAHREDLDRLTADIEAGLIDVVVFAKLDRIGRTMRNIHRWVYDVTDHGVRIATADGRIDSDDQMFGIQLSLLAYMAEVEHALILERTMGGRIQKIAGGGWASGTPPYGYMLDEEGEPVINPAELEVILKAAEFLVDQRMSRGQAAAELNELQYRTRTGKLWEGNNLVLRLRLAVRGYVDFSFSGMNEDGEEITTSYRVELPPLFEDESRRKALEEALEDMKGNPRTSYSNHLLSGHLYSLCGSSRYGVSRADQGDFIYRCSNHATAAEGHTCKQIDGKETETVVWDEVEKLLTDPEAIKGVIDDWLGTIPDRADSYRARLKEIDDKLHRLRNTRRKKIAMLVASLDEDDEEDQKLIAELKEEIAGKEKELREEQERITEWLEEAEHKEERADNLRSIIDRVGVNMQGLTKADKKGVLELLRIRVDIVGDSVSGQKGGTKDPMLEWHREHGISIPLAVSDEQWARIESILAGGRKPKLEDRPCFEMLLEKLREKKGWHDYDHDERMGGKGWGFLYRLGRRWFTEGMYAAALEAMGPYEGVPAPDGYTLPPMKIYGVIDDSTEDVVHTSGDAVKAEAGGRTPSTKGIRATTSGFEFEIASTKAS

SEQ ID NO: 11444 - protein, 663 aa, Unknown
  Description of Unknown: Integrase A12 sequence
  G3DSA:1.10.10.60,SSF46689
MELWVSPKECANLPGLPKTSAGVIYVAKKQGWQNRTRAGVKGGKAIEYNANSLPVEAKAALLLRQGEIETSLGYFEIARPTLEAHDYDREALWSKWDNASDSQRRLAEKWLPAVQAADEMLNQGISTKTAFATVAGHYQVSASTLRDKYYQVQKFAKPDWAAALVDGRGASRRNVHKSEFDEDAWQFLIADYLRPEKPAFRKCYERLELAAREHGWSIPSRATAFRRIQQLDEAMVVACREGEHALMHLIPAQQRTVEHLDAMQWINGDGYLHNVFVRWFNGDVIRPKTWFWQDVKTRKILGWRCDVSENIDSIRLSFMDVVTRYGIPEDFHITIDNTRGAANKWLTGGAPNRYRFKVKEDDPKGLFLLMGAKMHWTSVVAGKGWGQAKPVERAFGVGGLEEYVDKHPALAGAYTGPNPQAKPDNYGDRAVDAELFLKTLAEGVAMFNARTGRETEMCGGKLSFDDVFEREYARTIVRKPTEEQKRMLLLPAEAVNVSRKGEFTLKVGGSLKGAKNVYYNMALMNAGVKKVVVRFDPQQLHSTVYCYTLDGRFICEAECLAPVAFNDAAAGREYRRRQKQLKSATKAAIKAQKQMDALEVAELLPQIAEPAAPESRIVGIFRPSGNTERVKNQERDDEYETERDEYLNHSLDILEQNRRKKAI

SEQ ID NO: 11445 - protein, 663 aa, Unknown
  Description of Unknown: Integrase A13 sequence
  G3DSA:1.10.10.60,SSF46689
MTNWFTTKELVGLPGLPEHSQNISRMAKKNGWEFRQKEGVKGVAYEFSMNSLPIQTQTALMKKQGKVQVGDQVLELPKKKSEQSYCREALWARWSKNNNAAKEKAQQALRTVQAVFALKNNGIKLMDAYQSVSEEYGVALSTLRRSCAKVKGIDECDWAPALLPKNFESSQTQKPNQFAYVTPEAWEFFKADYLSLEQPAMSVCYERLIDTAPSKGWKVPSLKSLGRRLEHEVPVQQRIMLREGEHALHQMFPPQERTVEGLHALEWINGDGYQHNVFVKWFNGEILRPKTWFWQDIYSRKIIGWRCDISENTDSIRLSLMDVCEKFGVPKELTLDNTRAAANKWMTGGVPNRYRFKVKADDPLGIIPMMNIKLHWSSVILGKGHGQAKPIERAFGVGGLEEYIDKHPLCRGAYTGPNPMAKPDNYGSKAIDAEDFLQAIAKGVEMYNAKENRHTEVCKGFMSFNQAFNASYETAAIRKATTDQLQMMMLQAEAVRVSKHGTISLDAGGSLKGRKNRYYSELMMNYVGQKLVARFDPLKLHESIEVYTLNGVRICTAECLDKTGFGDTQAAREHKRKRTQFTKANKIAAQAQTDIDALEVAAMMKPLEEEVLPETKVVEPFRPVSIGNTAAKAIALEDEEEDYEQNFSQSVSNLFEQKFKNKL

SEQ ID NO: 11446 - protein, 662 aa, Unknown
  Description of Unknown: Integrase A14 sequence
  G3DSA:1.10.10.60,SSF46689
MKEWYTAKELLGLAGLPKQATNITRKAQREGWEFRQVAGTKGVSFEFNIKSFPVALRAEILLQQGRIETSQGYFEIARPTLEAHDYDREALWSKWDNASDSQRRLAEKWLPAVQAADEMLNQGISTKTAFATVAGHYQVSASTLRDKYYQVQKFAKPDWAAALVDGRGASRRNVHKSEFDEDAWQFLIADYLRPEKPAFRKCYERLELAAREHGWSIPSRATAFRRIQQLDEAMVVACREGEHALMHLIPAQQRTVEHLDAMQWINGDGYLHNVFVRWFNGDVIRPKTWFWQDVKTRKILGWRCDVSENIDSIRLSFMDVVTRYGIPEDFHITIDNTRGAANKWLTGGAPNRYRFKVKEDDPKGLFLLMGAKMHWTSVVAGKGWGQAKPVERAFGVGGLEEYVDKHPALAGAYTGPNPQAKPDNYGDRAVDAELFLKTLAEGVAMFNARTGRETEMCGGKLSFDDVFEREYARTIVRKPTEEQKRMLLLPAEAVNVSRKGEFALKVGGSLKGAKNVYYNMALMNAGVKKVVVRFDPQQLHSTVYCYTLDGRFICEAECLAPVAFNDAAAGREYRRRQKQLKSATKAAIKAQKQMDALEVAELLPQIAEPEAPESRIVGIFRPSGNTERVKNQERDDEYETERDEYLNHSLDILEQNRRKKAI

SEQ ID NO: 11447 - protein, 662 aa, Unknown
  Description of Unknown: Integrase A15 sequence
  G3DSA:1.10.10.60,SSF46689
MKEWYTAKELLGFAGLPKQATNITRKAQREGWVFRQVTGTKGVSFEFNIKSFPVALRAEILLQQGGIETSQGRFEIARPTLEAYDYDREALWSKWDNASDSQRRLAEKWLPAVQAADEMLNQGISTKTAFATVAGHYQVSASTLRDKYYQVQKFAKPDWAAALVDGRGASRRNVHKSEFDEDAWQFLIADYLRPEKPAFRKCYERLELAAREHGWSIPSRATAFRRIQQLDEAMVVACREGEHALMHLIPAQQRTVEHLDAMQWINGDGYLHNVFVRWFNGDVIRPKTWFWQDVKTRKILGWRCDVSENIDSIRLSFMDVVTRYGIPEDFHITIDNTRGAANKWLTGGAPNRYRFKVKEDDPKGLFLLMGAKMHWTSVVAGKGWGQAKPVERAFGVGGLEEYVDKHPALAGAYTGPNPQAKPDNYGDRAVDAELFLKTLAEGVAMFNARTGRETEMCGGKLSFDDVFEREYARTIVRKPTEEQKRMLLLPAEAVNVSRKGEFTLKVGGSLKGAKNVYYNMALMNAGVKKVVVRFDPQQLHSTVYCYTLDGRFICEAECLAPVAFNDAAAGREYRRRQKQLKSATKAAIKAQKQMDALEVAELLPQIAESEAPESRIVGIFRPSGNTERVKNQERDDEYETERDEYLNHSLDILEQNRRKKVI

SEQ ID NO: 11448 - protein, 662 aa, Unknown
  Description of Unknown: Integrase A16 sequence
  G3DSA:1.10.10.60,SSF46689
MSNLKIKTHYSAMEIASFKLNSAPHAHKNVQEKAKRECWTARKREGRGGGLEYAFESLPQEIQAEILLKHTESKSFTEPTRGVAHKNYLPEVIWAPFDKASEKQRAEAQQKLVLLHKIDDLTRNNIKLMDALEMVATEFNVAKGSLKRWYYKVRTFERSDWLPLLLDKHGTNRKSAEAEFTPEAWESFKADYFRNERPQFGSCYERLKRAAREQGWVIPSASSVKRKIEREIPKVQQVFLRNGEHALSQYYPTMQRSVADLEVLEWINGDGYQHNVFVQWHNGDIVRPKTWIWQDIRTRKILAYRVDLSENSDTIRLSLMDLIWKYGIPKKCTIDNTRAAANKWMTGGVKNRYRFKVKEDDVKGIIPLLGIELFWTSIQFGKGHGQAKPVERAFSHGGLGELIDKHPKLAGFYAGENVYNKPDNYNGGKEGASYEDFILALEDGIRTFNEREQRETEICQGVYSFNQVFERDYAKARVRKASQEQMRILMLMSEATTLKKDGTFELDVGGKVHNRRNRYLCTDLIGSHHKKVIVKFDPQDLHSKVWVYSTEMIYLGEAECTERVAFGDKAAGREHDKARKQWVKAQKQAAKAQQTMNAQEVARFLPEPTFEEEIQQPQIIELFHTQGNAVKKTEVVLDDEENTFEQGWRKGLEMIKQEKGIK

SEQ ID NO: 11449 - protein, 658 aa, Unknown
  Description of Unknown: Integrase A17 sequence
  SSF53041,PS51737,cd00338,PTHR30461:SF3, PF00239,PS51736,SM00857,G3DSA:3.40.50.1390, PS00397,PTHR30461
MGAKTLARKRKTLRVAIYLRVSTSKQLDGWGLDVQDERCRDWINYQLKGTPHTIVDVYCDGGVSGKLAHRDDLDRLTADIEAGLIDVVVFAKLDRIGRTMKNIHRWVYDVTDFGVRVATADGRIDSDDQMFGIQLSLLAYMAEVEHALILERTMGGRVKKVSGGGWASGTPPYGYMLDDEGEPIINPDELEVILKAAELLIDQKMSRGQAAEALNELKYRTRTGKLWEGNNLVLRLRLAVRGYVDFSFSGTNEDGEEITTSYRLELPELLPEDRRKALEAALEDMKGTPRTSYSNHLLSGHLISVCGHSRYGSARHEYGDVVYRCSNSATAAEGHTCKQIAGPETEKVVWDEVAKLLADPDAIKGLIDEWLGSIPERAESYRARTQEIDAKLGKLRTTRRKKIAMLVASLDEDDESDMNLISELKEEIAAKEKELREEQERIAEWLEEAEHKEGKASDMHALIDRIGTNATDLDRPAKKSILELLQVRVEIVGEGKSGRAGGSKDPILEWHRENGITIPLTVSDEQWSRVERILAGGRKPKPDDRPCFEMLLEKLRHDKGWHDYDRDERMGGKGWGFFYRLGRRWFAEGMYAKALEELAPYDGVEAPSGYTLPPMKIYGAIDDSTEDVVKTEAGGRTASTKGIRGNASAFEFEIGSTR

SEQ ID NO: 11450 - protein, 656 aa, Unknown
  Description of Unknown: Integrase A18 sequence
  G3DSA:1.10.10.60,SSF46689
MSQDWFTAKELAGLSGMPGTHSAVVRRAKRDGWKSRQRRAQGGGREYAFSSLPLETQAAVLKKFGSSAKAVTKIKPEKATKTTGREELWDLYEAAPNTMKEAAQHRLVVIESIERLQDNGASKTQAIHQAMITYRESRATIYRWLQIANSVEPEDRLAALAPSYKPGRPRAACDERAWDHFKALYLTPEQRTVAHCYELTEQAAKAEGWDWPPLRTINRRVKDIPRHIRVLEREGENALLRLYPSMKRTVRDIHALFWINGDGYQHNVFVRMPNGEIGRPKTWFWQDIYSRQIVGFRTDQSENTDMIRLALGDVIEQYGIPEHVTIDNTRAAANKWLTGGVSNRYRFKVKETDPLGLLPQLGIKVHWTSVVAGKGWGQAKPVERAFGVGGLGDYVDKHPKFEGAYTGPNVTAKPDNYGEKAVDWDVFVKTLRQAIAQWNEKEKRRTEICAGVHSFKQAFDDSYQRNAEHIRRATAAQRRLWLMQAESVLVQRDASVSLTIGNGPNGKNRYGADFLVDYAGERVVVRFDPDNLHNAVHLYRNDGRYLGEAECLHAAGFGDTSAGREWNRENKRRSKASKQAAKAEKRMSVLEATEYLPEPEDSVPEDESNVRRGDFGRVQKAVAGSDIADQPYQSPADKYGFNDAMERHLKKFKGEA

SEQ ID NO: 11451 - protein, 655 aa, Unknown
  Description of Unknown: Integrase A19 sequence
  PF07508,SSF53041,PF13408,PS51737, cd03768,PTHR30461:SF3,PF00239,PS51736,SM00857, G3DSA:3.40.50.1390,PTHR30461
MKTVAIYSRKSRFTGKGDSIENQIEMCKEHIKKFVSPNVEFLIYEDEGFSGGNTNRPAFQRLINDIKYGNINLLICYRLDRISRNVADFSSVLDVLQEYKVDFISIKEQFDTSSPMGRAMIYIASVFAQLERETIAERIKDNMLEMAKKGKWTGGKLPLGFTSKKIAYIDEEGKKRFKVTLEHDSKDLEFVKFLYEKYLELGSLHKLETYTHENNIRSASGKIFEKSTLKIILQNPIYVKADENVFNYFENKGWSVYGEPDGLHSLLSYNKTETAKKDGKLTKRNKDESESLVAVSDVKGFIDSSLWLKVQYQFKKNKNTFPRLGKTHNALLVGKLFCGNCGTRMIIQHGRTSTKTGIKTFYYVCSLKKTSKKKLCSAHNVKTDFLENLVLDSLEKLYYKKDFINDSLKINLKENKDNIKEINTTKKLIELNKNKINSLIEKLSLDFDNILSDILIPQIKKIKIENDVLESKLEELKLKKQESEMNRIEIDLITSLLNKCKNIKELTRTEQKQIIDCLVDSIYYYSNDNGNDKIKIKFINDIDSINTLLSDEEKRQFEKLSFYSHSMSSMNKKTTLNNILSKKEMYLLDMLPNKTIGDKIKKLRISTGLNYNDFARKVKVGTMTIYRWETGDRTPNKIYLKQLIENFNLDKDYFK

SEQ ID NO: 11452 - protein, 655 aa, Unknown
  Description of Unknown: Integrase A20 sequence
  G3DSA:1.10.10.60,SSF46689
MGFSGLPTTERGIRKLVENLAITSGVERRKRQGTKAFEYPISILSSAHQVLLLKKQGKVQVGDQVLELPKKKSEQSYCREALWARWSKNNNAAKEKAQQALRTVQAVFALKNNGIKLMDAYQSVSEEYGVALSTLRRSCAKVKGIDECDWAPALLPKNFESSQTQKPNQFAYITPEAWEFFKADYLSLEQPAMSVCYERLIDTAPSKGWKVPSLKSLGRRLEHEVPVQQRIMLREGEHALHQMFPPQERTVEGLHALEWINGDGYQHNVFVKWFNGEILRPKTWFWQDIYSRKIVGWRCDISENTDSIRLSLMDVCEKFGVPKELTLDNTRAAANKWMTGGVPNRYRFKVKADDPLGIIPMMNIKLHWSSVILGKGHGQAKPIERAFGVGGLEEYIDKHPLCRGAYTGPNPMAKPDNYGSKAIDAEDFLQAIAKGVEMYNAKENRNTEVCKGFMSFNQAFNASYETAAIRKATTDQLQMMMLQAEAVRVSKHGTISLDAGGSLKGRKNRYYSESMMNHVGQKLVARFDPLKLHESIEVYTLNGVRICTAECLDKTGFGDTQAAREHKRKRTQFTKANKIAAQAQTEMDALEVAAMMKPLEEEVLPESKVVEPFRPVSIGNTAAKAIALEDEDEDYEQNFSQSVSNLFEQKFKNKL

SEQ ID NO: 11453 - protein, 655 aa, Unknown
  Description of Unknown: Integrase A21 sequence
  G3DSA:1.10.10.60,SSF46689
MGFSGLPTTERGIRKLVENLAITSGVERRKRQGTKAFEYPISILSSAHQVLLLKKQGKVQVGDQVLELPKKKSEQSYCREALWARWSKNNNAAKEKAQQALRTVQAVFALKNNGIKLMDAYQSVSEEYGVALSTLRRSCAKVKGIDECDWAPALLPKNFESSQTQKPNQFAYITPEAWEFFKADYLSLEQPAMSVCYERLIDTAPSKGWKVPSLKSLGRRLEHEVPVQQRIMLREGEHALHQMFPPQERTVEGLHALEWINGDGYQHNVFVKWFNGEILRPKTWFWQDIYSRKIVGWRCDISENTDSIRLSLMDVCEKFGVPKELTLDNTRAAANKWMTGGVPNRYRFKVKADDPLGIIPMMNIKLHWSSVILGKGHGQAKPIERAFGVGGLEEYIDKHPLCRGAYTGPNPMAKPDNYGSKAIDAEDFLQAIAKGVEMYNAKENRNTEVCKGFMSFNQAFNASYETAAIRKATTDQLQMMMLQAEAVRVSKHGTISLDAGGSLKGRKNRYYSESMMNHVGQKLVARFDPLKLHESIEVYTLNGVRICTAECLDQTGFGDTQAAREHKRKRTQFTKANKIAAQAQTEMDALEVAAMMKPLEEEVLPESKVVEPFRPVSIGNTAAKAIALEDEDEDYEQNFSQSVSNLFEQKFKNKL

SEQ ID NO: 11454 - protein, 637 aa, Unknown
  Description of Unknown: Integrase A22 sequence
  PF07508,G3DSA:1.10.10.2600,SSF53041,PF13408,PS51737,cd00338, PTHR30461:SF3,PF00239,PS51736,SM00857,G3DSA:3.40.50.1390, PTHR30461
MDKDWNGLADLIANLITKYAGVLDLDNLPDPMPVDNNIENKNIFDIAKTQIDKNKSDIIYLIYKSKLFWKYKDIEKYIEVNAMSKEKIKVYLYTRVSTSIQIDGYSLEAQKTRMKAFALYNDYEIVGEYEDAGKSGKSIEGRVQFTRMMEDIKSGKDGVSFVLVFKLSRFARNAADVLSTLQTMQDFGVNLICVEDGIDSSKDAGKLMISVLSAVAEIERENIRVQTMEGRIQKAREGKWNGGFAPYGYQLVDGKLFINEEEAVAIRTIFEQYVNTTIGANGLSKYLENHGIRKIPRQNGKNPLFDAGLIRKILKNPVYKGKIAFGRRTLEKVHGTRNEYKQVEQDEYLIAEGIHEAIISDELWQAAQVKLKSQAKKYEHVNKGKDVRTHLLSGIVKCPICGVGMFGNKCIKKKKDGTKYKDFYYYGCKHRQMIRGHKCTFSKQIREELLDDAVAELIIKIVSNPKFASIMQEKINMKVDTSEIEKEIDNYQKELRKSHSIKFKLIEEIDNLNVDDKHYKRRKQDLDDRLYRMYDKIEELESLLIDAKAKKQTIEAEKLTGDNIYKVLIYFDKLYNVMNDVERRQLITALISEIQIYEEKQPNGQWLKSITFKLPVIDEDLNISLDNDKQVECVVLM

SEQ ID NO: 11455 - protein, 626 aa, Unknown
  Description of Unknown: Integrase A23 sequence
  G3DSA:1.10.10.2600,SSF53041,PS51737,cd00338,PF00239, SM00857,G3DSA:3.40.50.1390,PTHR30461
MSVKVEGMVILAGGYDRQSAERENSSTASPATQRAANRGKAEALAKEYARDGVEVKWLGHFSEAPGTSAFTGVDRPEFNRILDMCRNREMNMIIVHYISRLSREEPLDIIPVVTELLRLGVTIVSVNEGTFRPGEMMDLIHLIMRLQASHDESKNKSVAVSNAKELAKRLGGHTGSTPYGFDTVEEMVPNPEDGGKLVAIRRLVPSAHTWEGAHGSEGAVIRWAWQEIKTHRDTPFKGGGAGSFHPGSLNGLCERLYRDKVPTRGTLVGKKRAGSDWDPGVLKRVLSDPRIAGYQADIAYKVRADGSRGGFSHYKIRRDPVTMEPLTLPGFEPYIPPAEWWELQEWLQGRGRGKGQYRGQSLLSAMDVLYCYGSGQLDPETGYSNGSTMAGNVREGDQAHKSSYACKCPRRVHDGSSCSITMHNLDPYIVGAIFARITAFDPADPDDLEGDTAALMYEAARRWGATHERPELKGQRSELMAQRADAVKALEELYEDKRNGGYRSAMGRRAFLEEEAALTLRMEGAEERLRQLDAADSPVLPIGEWLGDRGSDPTGPGSWWALAPLEDRRAFVRLFVDRIEVIKLPKGVQRPGRVPPIADRVRIHWAKPKVEEETEPETLNGFTAAA

SEQ ID NO: 11456 - protein, 612 aa, Unknown
  Description of Unknown: Integrase A24 sequence
  G3DSA:1.10.10.2600,SSF53041,PS51737, cd00338,PF00239,SM00857,G3DSA:3.40.50.1390,PTHR30461
MTIHAAGYDRQSAERDSGSAASPATQRAANYGKAESLAREVARDGVEFKWLGHYSEAPGTSAFSGVDRPEWNRLVADCRAGKVNMIIVHYISRLTRRDPLEAIPVLTELLHLGVVIVSVNEGQFRAGNLMDLIHLIMRLDASHQESKNKSIAVKDAKELARALGGHVGFIPYGFDTEARMVPNPNDNGKPVQIQVLKHGAQKWDDAPHGSEPEVIRWLWREIKAHRDTPFKGGGAGSFHPGSLNGLVTRLWQNGVPTRGKTTGKKRADSDWDPSVLKRILRDPRIAGFQAEIVYRLKPDGTRGGFSHYRIKRDPVTMRPLELECGPIIPPAEWWELQAWLDGRGRGKGQYRGQSLLSAMDLLYCHGSGATDPETGYGDGSTMSGNLREGEAAKRATYSCKCPRRIHNGSSCSITMHNLDPYIAGRIMARIATVDPGDPDDADTVALLHEATRRWGMLNERPEKAGQRAELLAERADAVRALEELYEDRRAGGYKGAMGRKAFLQEEAAHTLRMEGAEERLRELDAAANPTLPVHEWLGEPGTDPLGPDSWWAKSELADKRAFIKLFIDRIEVIKTPKGAQRPGRVPDIASRVIIHWAKPSEDAQEEPETLAA

SEQ ID NO: 11457 - protein, 605 aa, Unknown
  Description of Unknown: Integrase A25 sequence
  G3DSA:1.10.10.2600,SSF53041,PS51737,cd00338,PF00239,SM00857 ,G3DSA:3.40.50.1390,PTHR30461
MDTYAGAYDRQSRERENSSAASPATQRSANEDKAADLQREVERDGGRFRFVGHFSEAPGTSAFGTAERPEFERILNECRAGRLNMIIVYDVSRFSRLKVMDAIPIVSELLALGVTIVSTQEGVFRQGNVMDLIHLIMRLDASHKESSLKSAKILDTKNLQRELGGYVGGKAPYGFELVSETKEITRNGRMVNVVINKLAHSTTPLTGPFEFEPDVIRWWWREIKTHKHLPFKPGSQAAIHPGSITGLCKRMDADAVPTRGETIGKKTASSAWDPATVMRILRDPRIAGFAAEVIYKKKPDGTPTTKIEGYRIQRDPITLRPVELDCGPIIEPAEWYELQAWLDGRGRGKGLSRGQAILSAMDKLYCECGAVMTSKRGEESIKDSYRCRRRKVVDPSAPGQHEGTCNVSMAALDKFVAERIFNKIRHAEGDEETLALLWEAARRFGKLTEAPEKSGERANLVAERADALNALEELYEDRAAGAYDGPVGRKHFRKQQAALTLRQQGAEERLAELEAAEAPKLPLDQWFPEDADADPTGPKSWWGRASVDDKRVFVGLFVDKIVVTKSTTGRGQGTPIEKRASITWAKPPTDDDEDDAQDGTEDVAA

SEQ ID NO: 11458 - protein, 603 aa, Unknown
  Description of Unknown: Integrase A26 sequence
  PF07508,G3DSA:1.10.10.2600,SSF53041,PF13408,PS51737, cd00338,PTHR30461:SF3,PF00239,PS51736,SM00857, G3DSA:3.40.50.1390,PTHR30461
MARKKNIAAGQNAVIYARYSSHNQREVSIEQQVRECMKHAAELGLHVVGTYEDRAISGKTDKRPNFQRMMRDAEKGKFQAVVAWKSNRIGRNMLQAMVNEAKLEDCGVKVFYAEEDFDDTAAGRFALRNMMNVNQFYSENMAEDITRGLYDNASKCMANGRQPLGYKRGEDGRVVLDDANAAVVREIFTRVAAGDLFVDIARDLNAQGIKTSKGANWNKGSFQSICQNERYRGIYIYGDVRVVDGIPRIVSDDLWYRVQEAMRMKKNPVGTRHRVGAEDYLLTGKLRCGHCGSYMTGVSGTSRNGELHYYYTCQKRRTEHACDKKNIRRDVIEPAVAQAIKMYCLTDDVIEWMADRTVEYWEKHDNDLQIEALEQQLEENKKATSNMLKAIEMGIITEATRTRMVELETEQSRLSVQLNTAKEDVVKIDREQIISYLELLQQGDIHDRDFQMELFKNFLVAVYVYDDNRMKLVFSCMGDQNSVEISLETGEDPPDGGLSPDAKMFVLTPDSSTKKALYFVESMVLFFFSAAKNGGCTALSASFSDVLQAIQCSPRVIGASAGQKVPVQLTISSICPNTSSIWRTSVNWVRARSRLWSGRAVWK

SEQ ID NO: 11459 - protein, 594 aa, Unknown
  Description of Unknown: Integrase A27 sequence
  PF07508,G3DSA:1.10.10.2600,SSF53041,cd00338, PF00239,PS51736,SM00857,G3DSA:3.40.50.1390,PTHR30461
MSPFIAPDVPEHLLDTVRVFLYARQSKGRSDGSDVSTEAQLAAGRALVASRNAQGGARWVVAGEFVDVGRSGWDPNVTRADFERMMGEVRAGEGDVVVVNELSRLTRKGAHDALEIDNELKKHGVRFMSVLEPFLDTSTPIGVAIFALIAALAKQDSDLKAERLKGAKDEIAALGGVHSSSAPFGMRAVRKKVDNLVISVLEPDEDNPDHVELVERMAKMSFEGVSDNAIATTFEKEKIPSPGMAERRATEKRLASVKARRLNGAEKPIMWRAQTVRWILNHPAIGGFAFERVKHGKAHINVIRRDPGGKPLTPHTGILSGSKWLELQEKRSGKNLSDRKPGAEVEPTLLSGWRFLGCRICGGSMGQSQGGRKRNGDLAEGNYMCANPKGHGGLSVKRSELDEFVASKVWARLRTADMEDEHDQAWIAAAAERFALQHDLAGVADERREQQAHLDNVRRSIKDLQADRKPGLYVGREELETWRSTVLQYRSYEAECTTRLAELDEKMNGSTRVPSEWFSGEDPTAEGGIWASWDVYERREFLSFFLDSVMVDRGRHPETKKYIPLKDRVTLKWAELLKEEDEASEATERELAAL

SEQ ID NO: 11460 - protein, 591 aa, Unknown
  Description of Unknown: Integrase A28 sequence
  PF07508,G3DSA:1.10.10.2600,SSF53041,PS51737,cd00338, PF00239,PS51736,SM00857,G3DSA:3.40.50.1390,PTHR30461
MDSDPRVARVGAAVRCYGYAFHSPSCSFQDRVRSRLVVASPVRDRHTHSGVSSYQHATILLHRHTRDGTISDVKNTDLIEDQRTRVALYVRVSLDRREKASVEEQLADLRLTVDRLGWDIVAELADNDVPASRYSKADRPNWMRLLQIIRRGEVDAVGFWELSRSTRRRTEWAEFAELAIDCRLRILVGSSVYRAENPHEMHILDMMATQGVLEVDQLSERIHRSQRANAERGRPAGVPGYGYRRRYDPATGRLIGQEPDPDEAKVIRMIARWLRAGRSLSWIAEELNRRRIPTDKGRVAGEKYVDSRGRERVSLGWVPANLRRVMSRPELKGIRTYKGKEVAQGQWEPILSVEEWAEVQAALNRTKQRSAATGQRYVRDAAARWLLSGIAICDVCGGDIRAVPRSRRGRPAGDDPSRWRYRCNGVYKGAPMGHVTRRADWLDEAVEALLIRELSRPDVVEAFAVQEDPGVIERARAEILKIEEELRQLEEDVAVGLVTPRIASARERALQRRLEQLRKEATPRLVDPLVGQLVGASDVWAWWQEWELDQRRAALRAVTREIRVLPARVPGRNTRPPVEEMVRIVFGPVGG

SEQ ID NO: 11461 - protein, 589 aa, Unknown
  Description of Unknown: Integrase A29 sequence
  PF07508,G3DSA:1.10.10.2600,SSF53041,PS51737,cd00338, PTHR30461:SF3,PF00239,PS51736,SM00857,G3DSA:3.40.50.1390 ,PTHR30461
MRTDTLATATEIAAGRTPMRRAVIYARQSEAREDKSQGSTITQVRETTDLINRTEDLKLTEVYEDIDFSAFNGEERPAFERMLKDARSGLVDVIVVNYLSRLSREEPKDALPVILELQRLGVQFISVYEGVVTDDLIGLVTLLMRLNSSWEESRNKSLAVSGTKRTLKAAGGFVGGVPPFGFRTEVKQLEKLTIRVLVPEPDEVKVIQDVVNRILEHKDVPYVPGKPHPGSITGVCAWLNETGVPTRGIESHAKRGIAAPSWKVTTLRRVLTDPRLMGHQTEPIYETVPKKNGKGTWKKRVGYRSVRDEHGRPVISHKVIVDPIQYHELQKCLEVAKETSAPKGTSLTRGDSLLSALGVLTCDDGHSMCKQAGKTPRETTYICQRKKGVTSTHEGRVGVLRDRLDKYVAERILKRLKALDYHDPDDIALLVEATERFTAKHAAPDVAADKQAVTIERADYKAALAELWDDFDAGVYKGNMGRDRFIKKRDDLEAAIQRCDERLTELEGKVPTLVSPKVWTETKEPGGDMTGEGSWWHSASMTDRRDFVKLFVDKIKVSKAPNYGTEYEPVPIEERVTIEWAKPAEGSAA

SEQ ID NO: 11462 - protein, 589 aa, Unknown
  Description of Unknown: Integrase A30 sequence
  PF07508,G3DSA:1.10.10.2600,SSF53041,PS51737,cd00338, PTHR30461:SF3,PF00239,PS51736,SM00857,G3DSA:3.40.50.1390, PTHR30461
MRTDTLTTATEVAAGRKPMRRAVIYARQSEAREDKSQGSTITQVRETTDLINKTEDLKLTEVYEDIDFSAFNGEERPAFERMLKDARSGLVDVIVVNYLSRLSREEPKDALPVILELQRLGVQFISVYEGVVTDDLIGLVTLLMRLNSSWEESRNKSLAVSGTKRTLKAAGGFVGGVPPFGFRTEVKQLEKLTIRVLVPEPDEVKVIQDVVARILKHKDQPYVPGKPHPGSITGVCAWLNETGVPTRGIESHAKRGIAAPSWKVTTLRRVLTDPRLMGHQTEPIYETVPKKNGKGTWKKRVGYRSVRDEHGRPVISHKPIVDPIQYHELQKCLAVAKEKSAPKGTSLTRGDSLLSALGVLYCEGAHTMCKQAGNTPRETTYMCQRKKGVTSTHEGRVGVLRDRLDKYVAERILKRLKALDYEDPDDIALLVEATERFTAKHAAPDVAADKQAVTVERADYKAALAELWDDFDAGVYKGTMGRDRFIKKRDDLEAAIQRCDERLTELEGKVPTLVSPKVWTETKEPNGDMTGEGSWWHSATMADRRDFVKLFVDKIVVSKAPNHGTQYEPVPIEDRVKIEWAKPAEGSAA

SEQ ID NO: 11463 - protein, 588 aa, Unknown
  Description of Unknown: Integrase A31 sequence
  PF07508,SSF53041,PS51737,cd00338,PTHR30461:SF3, PF00239,SM00857,G3DSA:3.40.50.1390,PTHR30461
MSTLYLPPQYQGPPDAGDLWLGYIRVSTWKEEKISPELQETAIRQWAARTGRRLLEPMIVDLDESGRHFKRRIMGAIERVERREARGIAVWRFSRFGRNRTGNAAALARLEAVGGELESATEPVDARTAVGELQREMIFAFGNFESNRAGEQWRETHEHRIKNQLPATGRRRFGYVWHPRRVPDLDASGGFRLQDERYTLHPDFASIVEEMYERKLDKPVGQGLNTIAHWLNEELQVPTLRGGLWHTSTIARYMDSGFAAGWLRIHDRECRCGYGKDQKISKCQNDRMIYVPGAQPKIIEPEMWEEYQAHRKLTKPIAPRARKATYTLSGMLSHGRCRHHMSHASDSRKTGQVSGYWLVCSRNKNVSKIACPKGINVKREQVEDEVFDWLGREKIADDVDALAPVVENTAPKEDPKQAAQRKRAHLTRELRTVDAAIDRLVEENAMNPQKYPGESFERVKAKFLDRKGKLVKELNDLGEVETMPVREDFKELIVGLLDEWETFQPIERNAMLLQIVRRVACYDIRDDEGKLLSVRTEVHPLWEPDPWAPKKVCRGPFGTRPGWTPADLWNGPDAIEAAIEAALAEADA

SEQ ID NO: 11464 - protein, 588 aa, Unknown
  Description of Unknown: Integrase A32 sequence
  PF07508,G3DSA:1.10.10.2600,SSF53041,PS51737,cd00338, PTHR30461:SF3,PF00239,PS51736,SM00857,G3DSA:3.40.50.1390, PTHR30461
MRTDTLATATEVAAGRTPMRRAVIYARQSEARKDKSEGSTVTQINDGTAFIEKAEDLKLTKVYEDIDFSAFTGDERPDFENMLRDARAGLIDVIVVLYIARLSRQEPKDALPVILELQRLGIQIISVYEGAVTDDLIGLVTLLMRLNAAYEESANKSKAVSGTKRTLKAAGGFVGGVPPFGFRTEPKREGKLTIRVLVPEPDEVKVIQVVVARILKYKDHPYVPGKPHPGSITGVCAWLNETGVPTRGVESHAKREIAAPSWKVTTLRRVLTDPRLMGHQTEPMYETVPKKDGSGTWKKRIGYRSVRDESGRPRIVHDEIIDPVRFYELQKCLSIAKETSAPKGTSLTRGDSVLSALGVLFCEGGHTMCKQAGNSPRDTTYMCQRKKGVTSSHEGRVGVLRDRLDKYVAERILKRLKALDYHDPDDIALLVEATQRYTAKHTSPDVAADKSAVTVERADYKAALAELWDDFDAGVYKGTMGRDRFIKKRDDLETAIARCDERLNELEAKVPTLVSPKVWTETKEPGGDMTGEGSWWHSASMTDRRDFVKLFVDKIVVSKAPNYGTQYEPVPIEERVKIEWAKPAESAA

SEQ ID NO: 11465 - protein, 587 aa, Unknown
  Description of Unknown: Integrase A33 sequence
  PF07508,G3DSA:1.10.10.2600,SSF53041,PF13408,PS51737,cd03768, PTHR30461:SF3,PF00239,PS51736,SM00857,G3DSA:3.40.50.1390, PS00397,PTHR30461
MEGLFLFDGGIMKKNFKMPGSSSETPIRVAIYVRVSTVYQIDKDSLPMMKQDLTSYCKYILNTDDFVIFEDAGYSGKNTDRPAYQKMMSQIRQGLFTHLLVWKIDRISRNLLDFANMYAELKDLGVTFVSKNEQFDTSTAIGEAMLKIILVFAELERNMTSERVTATMINRASNGVWNGGRIPFGYSYDKPTQVFSIDPEENKVYNFLVETYEDTQSIVHTSRRLNEAGYRSRNGNMWSPVAVWTILRNPWYKGVYRYNYYKIPGRKAIKDESEWVIVENHHPASIDPDRFDRIQATLDKNARYRNTPGRKTAQKNVHVFSGLVWCAECGSAFTASPGKLHVSGYRPSKYGCPNVRKTKTCHAKYTSDVVLGEFLLNYILNILNAQKQFAYIHSTDDLQKRLLHGSTFSNVDHVDPDGLASLLNMLEKCSGSDPVLLKRPRSKPKMDPELKRMMADQKKQQRALDRLNDLYLYSDDSISEREYLVRKQQITDRLQEINEAIGMMSQEPWMRTMNDEEFIRQASSFILTQKLADKQYIYYENLAESLDPEILKNFFVSILDSIILRDGRPETVVFRNGLSHTFTYKDS

SEQ ID NO: 11466 - protein, 582 aa, Unknown
  Description of Unknown: Integrase A34 sequence
  PF07508,G3DSA:1.10.10.2600,SSF53041,PF13408,PS51737, cd00338,PTHR30461:SF3,PF00239,PS51736,SM00857, G3DSA:3.40.50.1390,PTHR30461
MAKVEIIKANKELSNRNKKGPIEILRVGAYCRVSTDSEDQISSYKSQVAYYDDLIDNNPNWIKVDIYADEAITGTQVTKRTDFQRLINDCMNHEIDMVITKSISRFARNTLDTLKYVRMLKENNVAVYFEDEKINTLTMDGELLLVVLSSVAQQEVENISANVKKGLKMRMSRGELIGFNGCLGYDYHAEDKSLSVNEEEAETVRYIFNRYIEGAGCFVIARELENLGYKTAGGKTKWFDSSVRGIIKNEKYVGDIRAGKTFTVDPISKRRLKNLGEEDQFYIRDHHEPIISREVFDKAHEILNIRAESYKRYERGKSSRNKFTRQYAFSCIMECGYCGARLTRRHWMGKNGYSKIIWQCVTYARKGHKNCPYCKGVAESLIEEAFVKSYQYLFETNRYLIDDFMLKLEQNLSRKNYEKERDELSRKLSDLSKKRNALIDMKLDSVIDDQAYESKYYDLTDKINLATTKLESIEKSIVDDLDEKERLQEIRKVLSNNQTIETFDRKVFESIVSKVIVGGFDAEGNACPYNVTFILKSGLSDYPYTIGMKPETSEVIPSNNHSPHKETPTCGGYCVAHQIVAK

SEQ ID NO: 11467 - protein, 579 aa, Unknown
  Description of Unknown: Integrase A35 sequence
  PF07508,G3DSA:1.10.10.2600,SSF53041,PF13408,PS51737,cd00338, PTHR30461:SF3,PF00239,PS51736,SM00857,G3DSA:3.40.50.1390, PS00397,PTHR30461
MITVALYARVSSKSQAQNNTIESQIAELKHRIAADKHELLNEYEFKDDGLSGWSLEREGLDALRDKVGEDQIDKIYIHSPDRLSRKSAHQMILLDEFEKAGVEVIFLNHKTENNPESKLLLGMQGLVAEYECTKIMERSRRGKLHRAKKGCVSVIGIAPFGYNRIKHVDREKTKFEINEEEAKIVKQMFMWVGQERISIREVVRRLRDKSIRTRTGKKVWCPIIIWKLLRNPAYKGQAAFGKLKRVERRERNKQKVSICRTDEDSWIYIPVPKIVDEGLFNKVQKQLDENRKRARIQREGGKKKYLLQGLVVCQNCGYAYSGAQCGVEGKKFSYYRCSSTIRITDGREKCTNKLVRTDMLETAIWEKVKNLLKNPEIIKNEYHRRIAENKNDESSDKKFARRENQIKQGIEKLMEDYYSQENVGDKGYISKEEFKQTMKRMRERLRGIEEEKKKVADQKAIEKGMNLIINSIKSLYSSVKSNLEQLDWQTKRGIIKALVERIQIGYDQVEVAFRIEEPAQGGEIFNLQHCTGRHDVYNNVTKNNIIEFSRIIPRVFLCSKRGNLNNKINTLLIYTEGIL

SEQ ID NO: 11468 - protein, 578 aa, Unknown
  Description of Unknown: Integrase A36 sequence
  PF07508,SSF53041,cd00338,PF00239,SM00857, G3DSA:3.40.50.1390,PTHR30461
MTSLYVPPASAALRGELPWVPYIRVSTWKEEKISPELQLTAIQQWAHRTGRTLLDPPIVDLDATGRNFKRKIEQALEHVEDRRAQGIAVWKFSRFGRTRTGNALALARLERVGGELESATEPLDAKTAIGELQREMIFAFGNFESNRAGEQWKETHEHRRKLKLPASGGQRFGYIWHPRRVPDATVPGGVRLQEERYDYHPEYASVLEELYEKKTSGQGFHLLAHWLNEELAVPTMRGARLWQNATVQRILDSGFGAGLLRSHDPECPCGYGIQHRDNCKEGRMLFLPGGQPPVIDLQKWEEYQAHRADIKGRAPRLRKATYPLSGLTAHMLCRGKCQAKSGTNRTHAAYGTPKPGYAIACSKRNDQGRAGCPTGVHVLRTEVEAEVLRWLADNVAEDVDAAPSEHRAEGGNGDAEARANLARARLTAELTKLEKAIDRLVTNHALNPDMYPNDSFGRVRNELVEQRQKVAEQIKKLTTETARMPTKEEIRPLMVGLMEEWETFDNEELNAMLRQVIRRVACEVHGVYRKEKQTIEYEVHPVWEPDPWACEKCGTVMTGLAPRVCRNKECAAFGSDVI

SEQ ID NO: 11469 - protein, 578 aa, Unknown
  Description of Unknown: Integrase A37 sequence
  PF07508,SSF53041,cd00338,PF00239,SM00857,G3DSA:3.40.50.1390, PTHR30461
MTSLYVPPASAALRGELPWVPYIRVSTWKEEKISPELQITAIQQWAHRTGRTLLDPPIVDLDATGRNFKRKIEQALEHVEDRRAQGIAVWKFSRFGRTRTGNALALARLERVGGELESATEPLDAKTAIGELQREMIFAFGNFESNRAGEQWKETHEHRRKLKLPASGGQRFGYIWHPRRVPDATVPGGVRLQEERYDYHPEYASVLEELYEKKTSGQGFHLLAHWLNEELAVPTMRGARLWQNATVQRILDSGFGAGLLRSHDPECPCGYGIQHRDNCKEGRMLFLPGGQPPVIDLQKWEEYQAHRADIKGRAPRLRKATYPLSGLTAHMLCRGKCQAKSGTNRTHAAYGTPKPGYAIACSKRNDQGRAGCPTGVHVLRTEVEAEVLRWLADNVAEDVDAAPSEHRAEGGNGDAEARANLARARLTAELTKLEKAIDRLVTNHALNPDMYPNDSFGRVRNELVEQRQKVAEQIKKLTTETARMPTKEEIRPLMVGLMEEWETFDNEELNAMLRQVIRRVACEVHGVYRKEKQTIEYEVHPVWEPDPWACEKCGTVMTGLAPRVCRNKECAAFGSDVI

SEQ ID NO: 11470 - protein, 578 aa, Unknown
  Description of Unknown: Integrase A38 sequence
  PF07508,G3DSA:1.10.10.2600,SSF53041,PF13408,PS51737,cd00338, PTHR30461:SF3,PF00239,PS51736,SM00857,G3DSA:3.40.50.1390, PS00397,PTHR30461
MGYVTKKAAQRFEEKKAAIYVRVSTQYQVDRASLPVQREELINYAKYALGISDYVIFEDAGYSAKNTDRPDYQQMMARMRTGEFSHLLVWKIDRISRNLLDFSVMYAELKELGVVFVSKNEQFDTSSAMGEAMLKIILIFAELERKTTSERVSAVFVSRANDGIWNGGKVPYGYSYDKESKTFSIAEDEAKIVRLIYSLYESEKSIVRVARIMNERGLKSRAGSDWSPTTVHTILSSPFYSGTYRYNYRDESNAKRFREKGKDEWVLVENHHPAIVSPERQAAVGVILESKRYNKNATYQRKNVHVFAGLLTCGCCGSTMAATTDKVRADGWRPSMYICSRRRKSEDCTNKYVSDVTLGPFVLNFFANLIKASNSFGRTTSIETLEKKLLRGEALSHVDHIERPGLEELYNHLRSGFDEKCFESPTIAATESSADLSERDLLLSEKRRLERALNRLKTIYLYGDDEMASKDFNIERERITKALSEVDSRINELDIANAFDLSLSDEAFMQKASQFILTQQLLDKRYVNYERFIRKIDPKIVKDFLNETVSNFCIKDGLTTSILLKNGIELRFSYKTAE

SEQ ID NO: 11471 - protein, 577 aa, Unknown
  Description of Unknown: Integrase A39 sequence
  PF07508,SSF53041,cd00338,PTHR30461:SF3,PF00239, SM00857,G3DSA:3.40.50.1390,PTHR30461
MTSLYVPPSFTGGPPPDDLPWLGYIRVSTWKEEKISPELQESAIRQWAARTGRRLLDEMIVDLDATGRNFNRKIQQAIEAVENRKARGIAVWRFSRFGRNRTGNAVALARLERAGGDLESATEPLDAKTAVGELQREMIFAFGNFESNRAGEQWRETHEHRRNLKLPATGGHRFGYIWHPRRVPDATAPGGWRLQEEFYEVHPEYASIAEEMYDRKLNLGGFSGIAHWLNDELGVPNLRGNRWKTRGVRRYLDSGFAAGLLRTHDPKCGCGYGTTHFEQCKEGRVLYLPGAQPALITPQEWEAYLDHREDIKSRPPRTRKAVYTLSGISGHGHCRGTAVFRNDRVRSGENKGAPIRGHHLVCSANKNQGKSACEPGLYVLRTEAEEAVLQWLADKVAEDVDALVPEPRKERVPEVDPRARAIHERARIEAEVAKLDAAIGRLVVDNAKDPDKFPEGAFEAARNQLVKEKGEALDDLKKIAAVEAMPTQEKFRPLMVGLIEEWETFSAEERNAMLRQVIWRAVMTTTPAPEKIGRKSLVATFEVHPKWEPDPWKCKRCGKHIPGPGPLVCPDGKCQRA

SEQ ID NO: 11472 - protein, 576 aa, Unknown
  Description of Unknown: Integrase A40 sequence
  G3DSA:1.10.10.60,SSF46689
MIQDTFVRQRAKQLYWQGYPPAEIARLMGINQNTIYAWKKRDEWYETPPVQRVSQSMDARLIQLTDKKDKTGGDFKEIDLLTRQLKKLSAGQPAGAGAGKKPRKRKLKNHFTEEQIVALREKILDSLSWHQRGWYEQRHHRNRMILKSRQIGATWYFAREALLDALRDDVKYPYQRNQIFLSASRRQAHQFRGFIQKMAEEVDVELKGGDKIVLSNGAELHFLGTSAATAQSYTGNLKFDEFFWVSNFTNLRKVAGAMATLKGLTRTYFSTPSGETHEAYPFWTGDRWNEKRPKAQRKAFDVGWKTLNSGLLCPDKTWRQIVTLKDVIDHGWEYTDLEEIQDENSEDEFRNLYMCEFVRDGESAFNLNALIGCGVDGYDEWPDWKPFASRPMGNRPVWIGYDANGSSGNGDSGAICVVVPPLVPGGKFRTVETEQVRGLEFEEQAKVIENFTFKYNVQHVGIDVTGGNGEAVYQIVKKFFPMAMPYTMSMTSKRALVLKMLQLIRAGRWEYDRSERALINAFNSVRKVKTPGGFITYDTDRSRGVSHGDLAWANMLAIINEPLGQESGSGGFAMEF

SEQ ID NO: 11473 - protein, 573 aa, Unknown
  Description of Unknown: Integrase A41 sequence
  PF07508,SSF53041,cd00338,PTHR30461:SF3,PF00239,SM00857 ,G3DSA:3.40.50.1390,PTHR30461
MKLDIPSTFHGSRTFGEPWLGYIRVSTWREEKISPELQQSAIESWAARTGRRIVDWIVDLDATGRNFKRKIMGGIQRVEGREAVGIAVWKFSRFGRNDLGIAINLARLEQAGGDLASATEEVDARTAVGRFNRAILFDLAVFESDRAGEQWKETHAHRRALKLPATGRQRFGYVWYPRRVPDLTAPGGFRLQEERYERHPEFAPVAAELYERKLAGQGFSQLAYWLNDELLIPTTRGNRWGTNTVQRYLDSGFAAGLLRVHDPECRCKLGQDHFSACKENRWLWLPGAQPALIVPEQWKEYGAHREQTRRTPPRARRASYPTSGIMRHGHCRGTAVARSGRDGKGGFVPGHVFVCFNRRNKGKSACEPGLYVRRDEVEAEVLKWLADTVADDIDNAPSLPAQHTAPSTAPNPRARLVEERTRTEAELAKIEGALDRLVTDYAMDPDKYPADTFGRVRDQLLNKKGDIVKHLKSLSEVEVEPTREEFRPLIVGLLQEWDILHTTEKNAMLRRLLRRLVINSRMTVDLKDATTAGGSTRTAPVPSRYRGRFAFGGRAAPAGVGCGAAVRGRPTRS

SEQ ID NO: 11474 - protein, 571 aa, Unknown
  Description of Unknown: Integrase A42 sequence
  PF07508,G3DSA:1.10.10.2600,SSF53041,PS51737,cd00338, PF00239,PS51736,SM00857,G3DSA:3.40.50.1390,PTHR30461
MDTHAGVYARQSKRRANKSEISTADQLKEGVARARSMGATQIATYEDLGISAYSGDERPDFERLVADCRAGRINVLIVYYISRLSRREVADVLPLLQELLTRGVTLVSITEGVFKRDNIMDLIHLIFRLDAAHQESKNKSLAVKNAKDRARALGGHVGSAPFGFETYEVIVQTKGEDGRSRPVAIRRLRPNKEDCKIAVEHIFTPVLKYMDLPFDPTRSEFHPGSVSGVTTAMNQKAIPTRGKKLGKARATAQWERKTIRRILMDPRFIGYEADTIYNSAGTRKISSYRIRRDENGNPVRTSWEPIVDPADWWRIQEWLAGRQAAKGNNRGGSLLSGDGLAWCPCGSTFGQHSFPPVKERNRDRTRVYRCTKGQRQSDVHTGAVMVSMANLDNYVVNRIFSLIGAAEGDEDTLLILLEAQRRYGRLRENPETAGERDRILTERAEVRQGLEDLYDERDAGGFRTDIGRRRFLKSEAALGERLEGLDRRLAELEEAHAPKLPLAMWEAEGRDPMREGGWWSTRSLEDQREFVRLFVKRVTVRPLKRRGVAEPMHERVKIEWHRPTEEVDLVA

SEQ ID NO: 11475 - protein, 571 aa, Unknown
  Description of Unknown: Integrase A43 sequence
  PF07508,SSF53041,PS51737,cd00338,PTHR30461:SF3,PF00239, SM00857,G3DSA:3.40.50.1390,PTHR30461
MTGRRADYQTLVSLGLSEDDMRAMGLWDPAEGDPETLMDLYLRRSTKREDVATLRGHLRDAVRYASQTDRTIRHVWFEQLSASKTYVRRREFEKATQAVLDGMSKTLGVWKTDRFDRRGMGAVGRLLDEFDTRRAGLVSITEGLDSRQRGARMLFALLSERAREEAKDIALRVKAGHDAHKEENRRGTGKPPFGTLSPRTADGKPSGKVEPNPDEFETARRLLDLLLGTAEGLPDEWADKEGQPLTTKDVAHILNVEKRTTRGGHTWSPTAVSKLAQSPLFYGMVPVRERKTDEHGNPLGEWKGYGEPATDEKGNVRMCGTGVGKPAEFWRVRELIRSRTNEDFGKGQPGAKYLGTGVYRCGRLRDKGKGKEEHCLASMSHRGGRYRCQDRQTRGAVVCEGCTTLCERIDAAVGNAWLAHVAALEPGDPVLLEIGRRWLAFSNPEDQAARENTLKSLDSAKARLKKLEDDYYVFGRVSDERYEELSEKLSTTIQNMTQQLEELDHGQDYSVFSDGETLRETWMETDVPTRRMLLRCALGKKGVIVLPAKRQGDPTPIEDRLIFDWLSGVPA

SEQ ID NO: 11476 - protein, 570 aa, Unknown
  Description of Unknown: Integrase A44 sequence
  PF07508,SSF53041,PS51737,cd00338,PTHR30461:SF3, PF00239,SM00857,G3DSA:3.40.50.1390,PTHR30461
MTLPDIPPTFHGSAHAGEPWIGYIRVSTWKEEKISPELQRTAIEQWAARTGRRIVDWIVDLDESGRHFKRKIMGGIERIERREVRGIAVWRYSRFGRNRTGNAANLARVEAAGGLLESATEPVDASTAIGRFARGMYMEFAAFESDRAGEQWKETHEHRLAAKLPATGRGRFGYIWHRRAVPDATAPNGIRLQQERYTLHPDYASVVEELYERKTEEYEGFNALAHWLNEELVIPTLRGKAWGVSSVSRYLDSGFAAGLLRTHDKTCPCGYSSGKRSGCPDNRFIYLPGAQPRIITPDQWEAYKEHRKTTKATPPRARKATYPLTGLLRHGYCRHHMSAASYTYKGEQMRGRNLVCSRNKHTSKVECPKGINTRRDYVEREVKKWLEREAAPGIDASPRLPVQRTEPTEDPRARAQRERARLQVDLTKVEKALDRLVMDNALNPEKYPADSFARVRDQLAGQRGSIMNAMNELGEVEATPTREEFVPLIANLIEAWDLMEPIEKNALLRQIVRRIVCHDIRTEGSRWIEVRVEVHPVYEPDPWAPIAGEVVARKDEPAEVDDRADGETLF

SEQ ID NO: 11477 - protein, 570 aa, Unknown
  Description of Unknown: Integrase A45 sequence
  PF07508,SSF53041,PS51737,cd00338,PTHR30461:SF3,PF00239,SM00857, G3DSA:3.40.50.1390,PTHR30461
MTLPDIPATFHGSPLAGEPWIGYIRVSTWKEEKISPELQRTAIEQWAERTGRRIVDWIIDLDESGRHFKRKIMGGIERIERREVRGIAVWRYSRFGRNRTGNAANLARVEAVGGLLESATEPIDASTAIGRLARGMYMEFAAFESDRAGEQWKETHEHRLAAKLPATGRPRFGYIWHRRRIPDPTAPDGIRLQQERYALHHDHASVVEELYERKIEEHDGFNSLVHWLNEELVIPTMRGKAWGVSSLSRYLDSGFAAGLLRTHDKTCPCGYSSGTKSRCPDNRFIYLPGAQPRIITPDQWEAYKEHRKLTKATPPRARKATYPLTGLVRHGYCRFHVSAASYTSHGEQLRGHLLVCSRHKSANRLDCPKGLSVKREYVEGEVLTWLKREAAPGIDATPSVPAQRAELVEDPRARAQRERARLQVELSKVEGALDRLVMDNAMNPEKYPADSFARVRDQFAGQRGTIIKAMAELGEAEATPTREEFVPLMLGLVAAWEHMQPIEKNALLRQLVRRVVCHDIRREGSRWIETRVEVHPVFEPDPWAPIMGEVVARRDEPAEVDDRADGETLF

SEQ ID NO: 11478 - protein, 563 aa, Unknown
  Description of Unknown: Integrase A46 sequence
  PF07508,G3DSA:1.10.10.2600,SSF53041,PF13408,PS51737, cd03768,PTHR30461:SF3,PF00239,PS51736,SM00857, G3DSA:3.40.50.1390,PS00397,PTHR30461
MKKSAIYIRVSTHHQIDKDSLPLQKNDLINYSKFILSINDYEIFEDAGYSGKNTDRPAFQEMMNRIRNGEFTHLLVWKIDRISRNLLDFCDMYEEIKKNNCIFVSKNEQFDTSSAMGEAMLKIILVFAELERKLTGERVTSVMLDRATKGLWNGAPVPLGYKWCEETKFPIIDENERLTVEFIYNKYLETESTSAVRNALNAESIKTKRGGAWTTKTISDIIRNPFYKGTYRYNYRESARGKKKNEKEWIIVDDNHSSIINKELWSKCNTIMDENAERNSARFRSNSKTHVFARLLECGECNRNLYAKQDKPSLDGFIPSLYICSGRYNGLGCSQKTISDKIIGTFILNYVSNIIRLHKTLKLSQLKVDELEKLLLKGKPFENVVGIKNKSLNELYFALTQYTKGDKRIFMPKENKILEIEDDSSVEKLLRERNKFERALSRLEDLFLFDENEMSEKDYILKKNKIKEKLNEINKKMNELNSIKNIGSVYELDFLISSSKNAILFEELTQSKSIDYNNLIKETDRKVIKSFINAIITKIVVKDKNILSVKFKNGLVTEFIYNN

SEQ ID NO: 11479 - protein, 560 aa, Unknown
  Description of Unknown: Integrase A47 sequence
  PF07508,G3DSA:1.10.10.2600,SSF53041,PS51737,cd00338,PF00239 ,SM00857,G3DSA:3.40.50.1390,PTHR30461
MAKKPKAKVYSYLRFSDPKQAAGSSADRQMEYAARWATEHDMQLDATLTLRDEGLSAFHQRHIKQGALGVFLRAIEDGRIQPGSVLIVEGLDRLSRAEPIQAQAQLAQIINAGITVVTASDGREYNRERLKAQPMDLVYSLLVMIRAHEESDTKSKRVKAAIRRQCEGWVAGTWRGIIRNGKDPHWVRLGEHGKFEHVPERVLAVRTMIDLFLEGHGAIEITRRLTEQNLYVSNAGNYSVHMYRIVRNQALIGEKRISVDGEEFRLDGYYPPILTREEFAELQQTMSERGRRKGKGEIPNIITGLSITVCGYCGRAMTTQNSKARAPKGKSVVRRLSCPMNSFNEGCPIGGSCESEIVERALMRYCSDQFNLSRLLEGDDGTARRTAQLAVARQRASDIEAQIQRVTDALLSDDGKAPAAFTRRARELETQLEEQRREIEALEHQIAASSAHGIPAAAEAWAQLVDGVLALDYDARMKARQLVADTFRKIVVYQRGFAPIDDAAADRWKRSGTIGLMLVTKRGGMRLLNVDRRTGCWQAEDDLDPSLIPSDGLPMLPLDA

SEQ ID NO: 11480 - protein, 551 aa, Unknown
  Description of Unknown: Integrase A48 sequence
  PF07508,SSF53041,PF13408,PS51737,cd00338, PTHR30461:SF3,PF00239,PS51736,SM00857,G3DSA:3.40.50.1390, PTHR30461
MYHMPSKRALLVIRLSRVTDATTSPERQLADCQALCAQRGYEVAGVAEDLDVSGSIDPFDRKKRPNLAHWLHDRHNEFDVVVAYRVDRLTRSVRYLQKLVNWAEDHDKLVVSATEPHFDTTSPFAAVLIALLGTVAQMELEAIAERNRSAARHNIRAGKYRGSKPPWGYMPQRDDEGVWRLVQDPDQVKIIHEVVQRVLEGEPTQRIANDLTLRGIPTPKDAFAISQGRKPEGLAWNMTTLKRSLKSEAMLGRVTNAAGKSIRKEDGAPVIRSTPILTREVFDRVQVELETRARSGGPTTRSTALLLRVIYCAICGMPAYQYSGGTSGKASRYRCSSSPRSNTDPNIKKCGNRTFAVAEADAVVVKTLLGLLGDSERKEKIWESGCDHSAELADLDATLADLTDQLGTGVFARGTPQRARLDARIAELAARQAALSAEAVRPAGWTWHGTGERFSDWWERQDVTAKNVWLRSMNIQLTFDRERFYLDLGDIVQLTEQFDPQGPVAQWQGLLAAMQAEGIAGVEIRGGEAQATPRDDDMRGALGMTGAPLAD

SEQ ID NO: 11481 - protein, 551 aa, Unknown
  Description of Unknown: Integrase A49 sequence
  PF07508,G3DSA:1.10.10.2600,SSF53041,PF13408,PS51737,cd03768, PTHR30461:SF3,PF00239,PS51736,SM00857,G3DSA:3.40.50.1390, PS00397,PTHR30461
MKKMKIKIAIYVRVSTHHQVDKDSLPLQRSDLINYCKFIIGSNDYEIFEDAGYSGKNTSRPKYQEMMNRIKEGEFSHLLVWKIDRISRNLLDFCDMYENLKKYNCTFISKNEQFDTSSAMGEAMLKIILVFAELERKLTAERVKAIMLDRASKGMWNGAPIPLGYSWDETIKFPVPDPNESKTVDFIFNQYKKVKSTSIVRNILNSNGIKTKKGGTWTTKTITDIIRNPFYIGTYRYNFREPARGKKKDESEWIVLENNHEGIISKELWQECNDIMDRNASRSNAQFRDNTKTHIFSRLLECGECHGSLTAKQDKPHLDGYIPSIYCCSSRYNNLGCNQKTVSEKIIGNFTFNLISEIIKSSKNESISNEYELEKALLKNESLKNVIAIDGTYELYNNIFNDNDNFKIKKEEESISFEVEGLKKEKEKYKRALERLENLYLFDDESMSKKDYLIKKNRLKDKLIEIGYKLSSYKINTNDDINFIKLAANAILNDTLAKDENIDIKNFITEVGRDVIKEFTNAIISKITTKDKRVTSIKFKNGINLNFIYNT

SEQ ID NO: 11482 - protein, 551 aa, Unknown
  Description of Unknown: Integrase A50 sequence
  PF07508,SSF53041,PS51737,cd00338,PTHR30461:SF3, PF00239,SM00857,G3DSA:3.40.50.1390,PTHR30461
MSATAQVSATSPTPFMAGMTTPLRGLSVLRLSVLTDETTSPERQRAANHGAGSALGIDFSDREAVDLGVSASKTTPFERPELGAWLRRPDDFDALVFWRFDRAVRSMDDMHELSKWARDHRKMIVIAEGPGGRLVLDFRNPLDPMAQLMVTLFAFAAQFEAQSIRERVLGAQAAMRVMPLRWRGSKPPYGYMPAPLEGGGVTLVQDKKAVAVIERVIKELMKGKTLSAICAELNAAGIPSPRDHWSLIQKRKKGGRVGNSVGEKITKESFKWRHGALKKLLTSESLLGWKMTESGPVRDSEGAPVMATREPILTREEFDAVGALLKDENADGTKWFRSDSVAMLTRVILCDACGGNMSVGRPSANSKGISVVYKCGSWGRGEKCPEPASVKQEWADEYVRDRFLSAVGGMRQTETRHIPGYDPQPEIDATTAEYEAHMAEQGQQKSKAAQEAWKRRATALDARLAELETREARPARVEVIELDKTVADAWRDTDDKGRRDMLRDAGVTIRIKRAKRGRTFKLNEDRVIWHMDNEFFAQGAEELEGIARAEA

SEQ ID NO: 11483 - protein, 550 aa, Unknown
  Description of Unknown: Integrase A51 sequence
  PF07508,G3DSA:1.10.10.2600,SSF53041,PF13408,PS51737,cd00338, PTHR30461:SF3,PF00239,PS51736,SM00857,G3DSA:3.40.50.1390,PS00397 ,PTHR30461
MITVALYARVSSKSQAQNNTIESQIAELKHRIAADKHELLNEYEFKDDGLSGWSLEREGLDALRDKVGEDQIDKIYIHSPDRLSRKSAHQMILLDEFEKAGVEVIFLNHKTENNPESKLLLGMQGLVAEYECTKIMERSRRGKLHRAKKGCVSVIGIAPFGYNRIKHVDREKTKFEINEEEAKIVKQMFMWVGQERISIREVVRRLRDKSIRTRTGKKVWCPIIIWKLLRNPAYKGQAAFGKLKRVERRERNKQKVSICRTDEDSWIYIPVPKIVDEGLFNKVQKQLDENRKRARIQREGGKKKYLLQGLVVCQNCGYAYSGAQCGVEGKKFSYYRCSSTIRITDGREKCTNKLVRTDMLETAIWEKVKNLLKNPEIIKNEYHRRIAENKNDESSDKKFARRENQIKQGIEKLMEDYYSQENVGDKGYISKEEFKQTMKRMRERLRGIEEEKKKVADQKAIEKGMNLIINSIKSLYSSVKSNLEQLDWQTKRGIIKALVERIQIGYDQVEVAFRIEEPAQGGEIFNLQHCTGRHNSEAIVFAFANLQIKR

SEQ ID NO: 11484 - protein, 548 aa, Unknown
  Description of Unknown: Integrase A52 sequence
  PF07508,SSF53041,PF13408,PS51737,cd00338, PF00239,SM00857,G3DSA:3.40.50.1390,PTHR30461
MQEKPKVYSYLRFSDPKQATGSSADRQLEYAHRWGAEHGMQLDASLTLRDEGLSAYHQRHVTRGALGTFLRAVEDGRVPTGSVLIVEGLDRLSRAEPIQAQAQLSQIVGAGITVVTASDGREYNREKLRAQPMDLVYSLLVMIRAHEESDTKSKRVKAAIRRQCQGWIAGTHRKPIRVGRDPQWVREVDGRFELIPERAEAMRLAVSMYLDGHGAHSIVRHLASRGLVISDKSKTNSSHLYKILVNRCLVGEKTVEIDGEEFRLEGYYPAVLKGPEFDKMRAIGDLRMRQKGKGEIPGIITGIGICVCGYCGKPMTAQNLNKHSKITGRRLNGFRRIMCNSFRSTEADCPMPGSVSARPIERAITHYCADQMNLTSLIEGDSGATAISAKLVRARQRANEVEAQVERLTDMLIDDKDAAPAAVLKRIRDLEAQGERYRNDIEALERELATAARTPPGAAQAWADLVKGIEELDYDTRMKGRRLVSETFSRIVVYTRGFTPRDDDRSIGLLLVAKRGTTRMLNVHRKTGEWQAAEELASHDIPLPQAAE

SEQ ID NO: 11485 - protein, 548 aa, Unknown
  Description of Unknown: Integrase A53 sequence
  PF07508,SSF53041,PF13408,PS51737,cd00338,PTHR30461:SF3,PF00239, PS51736,SM00857,G3DSA:3.40.50.1390,PTHR30461
MPSKRALLVIRLSRVTDATTSPERQLADCQALCAQRGYEVAGVAEDLDVSGSIDPFDRKKRPNLAHWLHDRHNEFDVVVAYRVDRLTRSVRYLQKLVNWAEDHDKLVVSATEPHFDTTSPFAAVLIALLGTVAQMELEAIAERNRSAARHNIRAGKYRGSKPPWGYMPQRDDEGVWRLVQDPDQVKIIHEVVQRVLEGEPTQRIANDLTLRGIPTPKDAFAISQGRKPEGLAWNMTTLKRSLKSEAMLGRVTNAAGKSIRKEDGAPVIRSTPILTREVFDRVQVELETRARSGGPTTRSTALLLRVIYCAICGMPAYQYSGGTSGKASRYRCSSSPRSNTDPNIKKCGNRTFAVAEADAVVVKTLLGLLGDSERKEKIWESGCDHSAELADLDATLADLTDQLGTGVFARGTPQRARLDARIAELAARQAALSAEAVRPAGWTWHGTGERFSDWWERQDVTAKNVWLRSMNIQLTFDRERFYLDLGDIVQLTEQFDPQGPVAQWQGLLAAMQAEGIAGVEIRGGEAQATPRDDDMRGALGMTGAPLVD

SEQ ID NO: 11486 - protein, 547 aa, Unknown
  Description of Unknown: Integrase A54 sequence
  G3DSA:1.10.10.2600,SSF53041,PF13408,PS51737,cd00338, PTHR30461:SF3,PF00239,SM00857,G3DSA:3.40.50.1390,PTHR30461
MWACSHLRADGTTPTSSSTLLTMSARDYDIEAEWTPADLALLKELEEAEALLPADAPRALLSVRLSVFTDDTTSPVRQELDLRQLAREKGHRVVGLASDLNVSATKVPPWKRKSLGDWLNNRAPEFDALLFWKIDRFIRNLNDLNVMIRWSETYSKNLISKNDPIDLTTTMGKMMVSLLGGVAEIEAANTKTRVESLWDYTKTQGEWHVGKPPFGYKTARDEAGKVVLVEDPLAVETLHTARELVMSGMSTTAAAKVLKERGLISSTTATLTRRLRNPGVLGLRVEEDKDGGIRRSKLILGRDGQPIRIADPIFTEEQFEELQAVLDKRGKRQPHRQPGGATSFLGVLKCAVCETNMINHYTRNRHGDYAYLRCQGCKSGGYGAPNPQEVYDRLVEQVLAVLGDFPVEMREYARGEEKRKELKRLEESIAYYMKELEPGGRFTKTRFTQDQAEGTLDKLIAELEAIDPESAKDRWVYVAGGKTFREHWEEGGIDAMSADLIRAGIMCQVTRTKVPKVRAPQVHLKLMIPKDVRTRLVIRPDDFGQTF

SEQ ID NO: 11487 - protein, 547 aa, Unknown
  Description of Unknown: Integrase A55 sequence
  G3DSA:1.10.10.2600,SSF53041,PF13408,PS51737,cd00338,PTHR30461:SF3 ,PF00239,SM00857,G3DSA:3.40.50.1390,PTHR30461
MWACSHLRADGTTPTSSSTLLTMSARDYDIEAEWTPADLALLKELEEAEALLPADAPRALLSVRLSVFTDDTTSPVRQELDLRQLAREKGHRVVGLASDLNVSATKVPPWKRKSLGDWLNNRAPEFDALLFWKIDRFIRNLNDLNVMIRWSETYSKNLISKNDPIDLTTTMGKMMVSLLGGVAEIEAANTKTRVESLWDYTKTQGEWHVGKPPFGYKTARDEAGKVVLIEDPLAVETLHTARELVMSGMSTTAAAKVLKERGLISSTTATLTRRLRNPGVLGLRVEEDKDGGIRRSKLILGRDGQPIRIADPIFTEEQFEELQAVLDKRGKRQPHRQPGGATSFLGVLKCAECGTNMINHFTRNRHGDYAYLRCQGCKSGGYGAPNPQEVYDRLVEQVLTVLGDFPVEMREYARGEEKRKELKRLEESIAYYMKELEPGGRFTKTRFTQDQAEGTLDKLIAELEAIDPESAKDRWVYVAGGKTFREHWEEGGIDAMSADLIRAGIMCQVTRTKVPKVRAPQVHLKLMIPKDVRTRLVIRPDDFGQTF

SEQ ID NO: 11488 - protein, 547 aa, Unknown
  Description of Unknown: Integrase A56 sequence
  PF07508,SSF53041,cd00338,PTHR30461:SF3,PF00239, SM00857,G3DSA:3.40.50.1390,PTHR30461
MKRDLPSTFRGSRTPGEPWLGYIRVSTWREEKISPELQQSAIESWAARTGRRIVDWIVDLDATGRNFKRKIMGGIQRVEGREAVGIAVWKFSRFGRNDLGIAINLARLEQAGGDLASATEEVDARTAVGRFNRAILFDLAVFESDRAGEQWKETHAHRRALKLPATGRQRFGYVWHPRRVPDLTAPGGFRLQEERYERHPEFAPVAAELYERKLAGQGFSQLAYWLNDELLIPTTRGNRWGTNTVQRYLDSGFAAGLLRVHDPECRCKLGQDHFSACKENRWLWLPGAQPALIVPEQWKEYGAHREQTRKTPPRARRASYPTSGIMRHGHCRGTAVARSGRDGKGGFVPGHVFVCFNRRNKGKSACEPGLYVRRDEVEAEVLKWLADTVADDIDNAPALPAQRTAPGTAPDPRARLVEERTRTEAELAKIEGALDRLVTDYALDPDKYPADTFGRVRDQLLGKKGDIIKHLKSLSEVEVAPTREEFRPLIVGLLQEWDILHTTEKNAILRRLLRRLVIHNRKSDQGAQWSVVRSFEFHPVWEPDPWS

SEQ ID NO: 11489 - protein, 547 aa, Unknown
  Description of Unknown: Integrase A57 sequence
  PF07508,SSF53041,cd00338,PTHR30461:SF3,PF00239,SM00857, G3DSA:3.40.50.1390,PTHR30461
MKLDIPSTFHGSRTFGEPWLGYIRVSTWREEKISPELQQSAIESWAARTGRRIVDWIVDLDATGRNFKRKIMGGIQRVEGREAVGIAVWKFSRFGRNDLGIAINLARLEQAGGDLASATEEVDARTAVGRFNRAILFDLAVFESDRAGEQWKETHAHRRALKLPATGRQRFGYVWYPRRVPDLTAPGGFRLQEERYERHPEFAPVAAELYERKLAGQGFSQLAYWLNDELLIPTTRGNRWGTNTVQRYLDSGFAAGLLRVHDPECRCKLGQDHFSACKENRWLWLPGAQPALILPEQWKEYGAHREQTRRTPPRARRASYPTSGIMRHGHCRGTAVARSGRDGKGGFVPGHVFVCFNRRNKGKSACEPGLYVRRDEVEAEVLKWLADTVADDIDNAPSLPAQHTAPSTAPNPRARLVEERTRTEAELAKIEGALDRLVTDYAMDPDKYPADTFGRVRDQLLNKKGDIVKHLKSLSEVEVEPTREEFRPLIVGLLQEWDILHTTEKNAMLRRLLRRLVINSRKSDQGAQWSLVRTYEFHPVWEPDPWS

SEQ ID NO: 11490 - protein, 547 aa, Unknown
  Description of Unknown: Integrase A58 sequence
  G3DSA:1.10.10.2600,SSF53041,PF13408,PS51737, cd00338,PTHR30461:SF3,PF00239,SM00857, G3DSA:3.40.50.1390,PTHR30461
MWACSHLRADGTTPTSSSTLLTMSARDYDIEAEWTPADLALLKELEEAEALLPADAPRALLSVRLSVFTDDTTSPVRQELDLRQLAREKGHRVVGLASDLNVSATKVPPWKRKSLGDWLNNRAPEFDALLFWKIDRFIRNLNDLNVMIRWSETYSKNLISKNDPIDLTTTMGKMMVSLLGGVAEIEAANTKTRVESLWDYTKTQGEWHVGKPPFGYKTARDEAGKVVLVEDPLAVETLHTARELVMTGMSTTAAAKVLKERGLISSTTATLTRRLRNPGVLGLRVEEDKDGGIRRSKLILGRDGKPIRIADPIFTEEQFEELQAVLDKRGKRQPHRQPGGATSFLGVLKCAECGTNMINHFTRNRHGDYAYLRCQGCKSGGYGAPNPQEVYDRLVEQVLAVLGDFPVEMREYARGEEKRKELKRLEESIAYYMKELEPGGRFTKTRFTQDQAEGTLDKLIAELEAIDPESAKDRWVYVAGGKTFREHWEEGGIDAMSADLIRAGIMCQVTRTKVPKVRAPQVHLKLMIPKDVRTRLVIRPDDFGQTF

SEQ ID NO: 11491 - protein, 547 aa, Unknown
  Description of Unknown: Integrase A59 sequence
  G3DSA:1.10.10.2600,SSF53041,PF13408,PS51737,cd00338, PTHR30461:SF3,PF00239,SM00857,G3DSA:3.40.50.1390,PTHR30461
MWACSHLGADGTTPTSSSNLLTMSARDYDIEAEWTPADLALLKELEEAEALLPADAPRALLSVRLSVFTDDTTSPVRQELDLRQLAREKGHRVVGLASDLNVSATKVPPWKRKSLGDWLNNRAPEFDALLFWKIDRFIRNLNDLNVMIRWSETYSKNLISKNDPIDLTTTMGKMMVSLLGGVAEIEAANTKTRVESLWDYTKTQGEWHVGKPPFGYKTGRDETGKVVLVEDPLAVETLHTARELVMSGMSTTAAAKELKERGLISSTTATLTRRLRNPGILGLRVEEDKDGGIRRSKLILGRDGQPIRIADPIFTEEQFEELQAVLDKRGKRQPHRQPGGATSFLGVLKCAECGTNMINHYTRNRHGDYAYLRCQGCKSGGYGAPNPQEVYDRLVEQVLAVLGDFPVEMREYARGEEKRKELKRLEESIAYYMKELEPGGRFTKTRFTQDQAEGTLDKLIAELEAIDPESAKDRWVYVAGGKTFREHWEEGGIDAMSADLIRAGIMCQVTRTKVPKVRAPQVHLKLMIPKDVRTRLVIRPDDFGQTF

SEQ ID NO: 11492 - protein, 547 aa, Unknown
  Description of Unknown: Integrase A60 sequence
  G3DSA:1.10.10.2600,SSF53041,PF13408,PS51737,cd00338,PTHR30461:SF3 ,PF00239,SM00857,G3DSA:3.40.50.1390,PTHR30461
MWACSHLGADGTTPTSSSTLLTMSARDYDIEAEWTPADLALLKELEEAEALLPADAPRALLSVRLSVFTDDTTSPVRQELDLRQLAREKGHRVVGLASDLNVSATKVPPWKRKSLGDWLNNRAPEFDALLFWKIDRFIRNLNDLNVMIRWSETYSKNLISKNDPIDLTTTMGKMMVSLLGGVAEIEAANTKTRVESLWDYTKTQGEWHVGKPPFGYKTGRDAAGKVVLVEDPPAVETLHTARELVMSGMSTTAAAKELKERGLISSTTATLTRRLRNPGILGLRVEEDKDGGIRRSKLILGRDGQPIRIADPIFTEEQFEELQAVLDKRGKRQPHRQPGGATSFLGVLKCAECGTNMINHFTRNRHGDYAYLRCQGCKSGGYGAPNPQEVYDRLVEQVLAVLGDFPVEMREYARGEEKRKELKRLEESIAYYMKELEPGGRFTKTRFTQDQAEGTLDKLIAELEAIDPEAAKDRWVYVAGGKTFREHWEEGGIDAMSADLIRAGIQCQVTRTKVPKVRAPQVHLKLMIPKDVRTRLVIRPDDFGQTF

SEQ ID NO: 11493 - protein, 545 aa, Unknown
  Description of Unknown: Integrase A61 sequence
  PF07508,G3DSA:1.10.10.2600,SSF53041,PS51737,cd00338, PTHR30461:SF3,PF00239,PS51736,SM00857,G3DSA:3.40.50.1390, PTHR30461
MELKNIVNSYNITNILGYLRRSRQDMEREKRTGEDTLTEQKELMNKILTAIEIPYELKMEIGSGESIDGRPVFKECLKDLEEGKYQAIAVKEITRLSRGSYSDAGQIVNLLQSKRLIIITPYKVYDPRNPVDMRQIRFELFMAREEFEMTRERMTGAKYTYAAQGKWISGLAPYGYQLNKKTSKLDPVEDEAKVVQLIFNIFLNGLNGKDYSYTAIASHLTNLQIPTPSGKKRWNQYTIKAILQNEVYIGTVKYKVREKTKDGKRTIRPEKEQIVVQDAHAPIIDKEQFQQSQVKIANKVPLLPNKDEFELSELAGVCTCSKCGEPLSKYESKRIRKNKDGTESVYHVKSLTCKKNKCTYVRYNDVENAILDYLSSLNDLNDSTLTKHINSMLSKYEDDNSNMKTKKQMSEHLSQKEKELKNKENFIFDKYESGIYSDELFLKRKAALDEEFKELQNAKNELNGLQDTQSEIDSNTVRNNINKIIDQYHIESSSEKKNELLRMVLKDVIVNMTQKRKGPIPAQFEITPILRFNFIFDLTATNSFH

SEQ ID NO: 11494 - protein, 543 aa, Unknown
  Description of Unknown: Integrase A62 sequence
  PF07508,G3DSA:1.10.10.2600,SSF53041,PF13408,PS51737, cd00338,PTHR30461:SF3,PF00239,PS51736,SM00857,G3DSA:3.40.50.1390 ,PTHR30461
MQNNRAAIYARFSTDLQNERSVDDQIAVCREFANRNGLVVAGEYYDKARSGASIFGRDGLLGLMEDARTGKFKTVIVEALDRLSRDQEDLAGLHKRLAFAGVEILAIHDGKTDAIQVGIRGLVSTLFLADLKNKIRRGMTGVIRDGRHAGGKAYGYQPTPGQPGVMQIFEPEAEIVRRIYRETIEGKMSREIAIGLNQDKITPPRGTQWNASTINGSAQRGYGIIRNPLYAGEIVWNRVHMVRDPETGKRISRPNPESEHKRTPAPHLAIVDRETYDQALSMLEGKSRRGQGGSNTRRPKRLLSGITRCGHCGGGMSIHDHHGKTVRIRCSRSTQSGVCGNNKRYRLDKIEKTVVTGLRDQLNHPEVLVEYVKAYREERRLDADTAVRERASVERRVADLDGQLDRLMKAMTRGILPIEAVEAQYAPLKAEKEELEKKLVDIPAVPVVELHPAAITRYKNSIDALANRLASLDDITDSDVHKAFRDLVDHVTIIDREDGGVEVEIVGQLAALVGKQAEMLGGRVVAGERFEQSPQIILGRFVA

SEQ ID NO: 11495 - protein, 542 aa, Unknown
  Description of Unknown: Integrase A63 sequence
  G3DSA:1.10.10.2600,SSF53041,PF13408,PS51737,cd00338, PTHR30461:SF3,PF00239,SM00857,G3DSA:3.40.50.1390,PTHR30461
MSEEISAPAELPPNTHQARYPGAMTQTQTPDTFRAKRRPRASLYVRLSKQADDSNLSLDGMVEDVRALCEKEGLEEVALHVDDGKSGGFRDRDEFGLWLDDARQGRCEVLVPYHTDRLTREGLNVAAQILDVVEGKDPHTGRQSHKPVRLLDCFGLDSLHGDAFRFRFVIQAEVGRSERERIRERQRARHKRLRRAGRWAGGTPPFGFRVVPNPELGDDGKPKGFVLEVVPEEAKHIKEAAYAILRPVEPDNLTRVVRRWNHQGIKPRRAAAWSRVTLRQVLTGDIIMGLATEKGKPLRDADGELQFIHPEILPPAYVHALRKALAVKKPDARKGGRRPARLLSGLLTCHACGAVLQVARRSPNAKAPKQAEVTYRCPTKANGGICAQPVSVSAVAIEEHLETRYLATVGDMPYYIERTTVTGLDELAVVDSEIKETLSAMATSADADTFARLQRLQARRQELEDAEPEKRTTLVPTGFTMREHWRDALVDDRRDLLAQAFECMVLGPGQRGPRGFNPARLVAPWAEEPDAGEDYGGETAAE

SEQ ID NO: 11496 - protein, 540 aa, Unknown
  Description of Unknown: Integrase A64 sequence
  PF07508,G3DSA:1.10.10.2600,SSF53041,PS51737,cd00338, PTHR30461:SF3,PF00239,SM00857,G3DSA:3.40.50.1390,PTHR30461
MLTMSSRKRQPAAERAAYNIDAEWTEADLALLQELEEAEARLPLDAPRALLSVRLSVFTDDTTSPVRQELDLRQLAREKGLRVIGVASDLNVSATKVPPWKRKSLGDWLSNRAPEFDALLFWKIDRFIRNLNDLNVMVRWSETYSKNLISKNDPIDLTTTMGKMMVQLLGGVAEIEAANTKTRVESLWDYTKTQGEWLVGKPAYGYMTQRDETGKVVLVIDPQASEALHLARELAIGGMAARVVADELKKRELVTGGLTASTLLRRLRNPALLGYRVEENKETTGMRRSKLLYGRDGKPIRVADPIFTQEEFDSLQAVLDARGKNQPPRHVGGATKFLGVLKCVNCETNMIVHHTRNKHGDYAYLRCQGCKSGGYGSPNPTEVYDRLVEQVLAVLGDFPVETREYARGEEMRKELKRLEESIAYYMKELEPGGRYTKTRFTQDQAEGTLDKLIAELEAIDPESAKDRWVYVAGGKTFREHWEQGGMEAMSLDLLRAGIKVQVNRTKVPKVRAPEVHLKLMIPKDVRQRLVIRPDDFGDTF

SEQ ID NO: 11497 - protein, 540 aa, Unknown
  Description of Unknown: Integrase A65 sequence
  PF07508,G3DSA:1.10.10.2600,SSF53041,PS51737,cd00338, PTHR30461:SF3,PF00239,SM00857,G3DSA:3.40.50.1390,PTHR30461
MLTMSSRKRQPAAERAAYNIDAEWTEADLALLQELEEAEARLPLDAPRALLSVRLSVFTDDTTSPVRQELDLRQLAREKGLRVIGVASDLNVSATKVPPWKRKSLGDWLSNRAPEFDALLFWKIDRFIRNLNDLNVMVRWSETYSKNLISKNDPIDLTTTMGKMMVQLLGGVAEIEAANTKTRVESLWDYTKTQGEWLVGKPAYGYMTQRDETGKVVLVIDPEASEALHLARELAIGGMAARVVADELKTRELVTGGLTASTLLRRLRNPALLGYRVEENKETTGMRRSKLLYGRDGKPIRVADPIFTQEEFDSLQAVLDARGKNQPPRHVGGATKFLGVLKCVNCETNMIVHHTRNKHGDYAYLRCQGCKSGGYGSPNPTEVYDRLVEQVLAVLGDFPVETREYARGEEMRKELKRLEESIAYYMKELEPGGRYTKTRFTQDQAEGTLDKLIAELEAIDPESAKDRWVYVAGGKTFREHWEQGGMEAMSLDLLRAGIKVQVTRTKVPKVRAPEVHLKLMIPKDVRQRLVIRPDDFGDTF

SEQ ID NO: 11498 - protein, 540 aa, Unknown
  Description of Unknown: Integrase A66 sequence
  PF07508,G3DSA:1.10.10.2600,SSF53041,PS51737,cd00338,PTHR30461:SF3 ,PF00239,SM00857,G3DSA:3.40.50.1390,PTHR30461
MLTMSSRKRQPAAERAAYNIDAEWTEADLALLQELEEAEARLPLDAPRALLSVRLSVFTDDTTSPVRQELDLRQLAREKGLRVIGVASDLNVSATKVPPWKRKSLGDWLSNRAPEFDALLFWKIDRFIRNLNDLNVMVRWSETYSKNLISKNDPIDLTTTMGKMMVQLLGGVAEIEAANTKTRVESLWDYTKTQGEWLVGKPAYGYMTQRDETGKVVLVIDPQASEALHLARELAIGGMAARVVADELKKRELVTGGLTASTLLRRLRNPALLGYRVEENKETTGMRRSKLLYGRDGKPIRVADPIFTQEEFDSLQAVLDARGKNQPPRHVGGATKFLGVLKCVNCETNMIVHHTRNKHGDYAYLRCQGCKSGGYGSPNPTEVYDRLVEQVLAVLGDFPVETREYARGEEMRKELKRLEESIAYYMKELEPGGRYTKTRFTQDQAEGTLDKLIAELEAIDPESAKDRWVYVAGGKTFREHWEQGGMEAMSLDLLRAGIKVQVTRTKVPKVRAPEVHLKLMIPKDVRQRLVIRPDDFGDTF

SEQ ID NO: 11499 - protein, 538 aa, Unknown
  Description of Unknown: Integrase A67 sequence
  PF07508,SSF53041,PF13408,PS51737,cd00338, PF00239,SM00857,G3DSA:3.40.50.1390,PTHR30461
MREVAEAGTLLSVTTSVLEQLRQQKAGKVELSNAQVEAALPIVGSYGRISDAYEDAETGVTESGVKRQLKVNGLISQARGWQLHDRVYVDNHLSAYKSHVVRDAFEDLLEDLASGVVDGIICYNLDRLARQVKDLERVIAIYDAGRKAGRQMYFATNEGSIDLSSDDGITLARIMVAFANKASRDTARRVALKHQEIRDEGRNVGGGRPFGWDWKFEGNREHVLNPVESAAIREAAEGLIAGTQTFRGVVRDWTERGFTTPRGRHWTPQAVKGVMRSPRLAGWLVHKGQIAVHSRTGGLVRAQAPAILTDEEYEALLVATETTRSRYTAASGRNKYLLSGIVRCAECGARLVGNRRTDKHFYYACRVGGGLNREGGAACGKVTASGFELDLMVEELILPVVIEHTGDAVLNAKKPHQEDLMGLTEERTSWVKRLDEGAAPDVVLPRISKIDQKIEELRHRQAEWLREQRGAAASVGVTEETWPHLSIEEKRNHVSRYIEAIYVSRATRRGNTFDRSRVSSPVWRTTAGRGEPQLSAVQ

SEQ ID NO: 11500 - protein, 537 aa, Unknown
  Description of Unknown: Integrase A68 sequence
  PF07508,G3DSA:1.10.10.2600,SSF53041,PF13408,PS51737,cd00338, PTHR30461:SF3,PF00239,PS51736,SM00857,G3DSA:3.40.50.1390, PTHR30461
MKAAIYSRKSKFTGKGESVENQIELCKSYAKNNGYDEFYIYEDEGFSGGNINRPEFKSMMKDAKYKKFDAIICYRLDRISRNVSDFSSLIDELKALSIDFISIREQFDTSSPMGTAMMFISSVFAQLERETIAERIKDNMYELAKTGRWLGGTPPFGFSSEPTYYLDNNSKQKKMMKLSPIDEEISLVRILFEQYLSLGSLGKLQKYLIQNNIKTKRDSNWDIKALQLLLRNPVYVKSSDLVTSYLSTKGATVFGDPNGNGILSYNKKDSKDKYKDISEWILSVSKHEGVIMDNLWIKVQRQLDKNKDLAPRLVNGSEYGVFNSVLQCAKCGGKMIQKQGHTSKKTGEILRYYICTNKINSTETTCDSKNVRLDILEKHVMKELFKATADKGSLIKAIEEYKKSLESEYIDKDNIKTYEKQISQKELQVKNLIDKLSLNPNIFDLLSSRIEELNKELKELKFKKFELENTNSNLKAAIKEIDASTSMILNFKSMWEKADYSMKKLLINSLVDYISYNSDTMEVVIKPFCTNKKKGAL

SEQ ID NO: 11501 - protein, 537 aa, Unknown
  Description of Unknown: Integrase A69 sequence
  PF07508,G3DSA:1.10.10.2600,SSF53041,PS51737,cd00338, PTHR30461:SF3,PF00239,SM00857,G3DSA:3.40.50.1390,PTHR30461
MSSRKRQPAAERAAYNIDAEWTEADLALLQELEEAEARLPLDAPRALLSVRLSVFTDDTTSPVRQELDLRQLAREKGLRVIGVASDLNVSATKVPPWKRKSLGDWLSNRAPEFDALLFWKIDRFIRNLNDLNVMVRWSETYSKNLISKNDPIDLTTTMGKMMVQLLGGVAEIEAANTKTRVESLWDYTKTQGEWLVGKPAYGYMTQRDETGKVVLVIDPQASEALHLARELAIGGMAARVVADELKKRELVTGGLTASTLLRRLRNPALLGYRVEENKETTGMRRSKLLYGRDGKPIRVADPIFTQEEFDSLQAVLDARGKNQPPRHVGGATKFLGVLKCVNCETNMIVHHTRNKHGDYAYLRCQGCKSGGYGSPNPTEVYDRLVEQVLAVLGDFPVETREYARGEEMRKELKRLEESIAYYMKELEPGGRYTKTRFTQDQAEGTLDKLIAELEAIDPESAKDRWVYVAGGKTFREHWEQGGVEAMSLDLLRAGIKVQVTRTKVPKVRAPEVHLKLMIPKDVRQRLVIRPDDFGDTF

SEQ ID NO: 11502 - protein, 536 aa, Unknown
  Description of Unknown: Integrase A70 sequence
  G3DSA:1.10.10.60,SSF46689
MNAMTAIEHRPAEITPAEARAAVLALHEHGGNVSATARTLGVTRAKLQRRIRKADMWGISAHGEVMASIPRRIEAAPGRVRRYLLTCAQSNTKVHAEFWRNLLALRDHFGAELMVSRVRYNHNDAQVSQEKDGRAADDSLWYAAEVEPYLADERVEICPTLIWAGDMNIIPTATSPLSGLDSFTGAASCVFPHPQIALKSVATAPGTPHKANYTTGAVTLKRYIKRKAGLKAEFHHAFGALLVEVDGAGDWFARQINATDAGVIYDLDLKVDAGAVTPGHPVEVFTPGDIHGTRVDRAVLAAVWGPGGLVDVLKPRHQILHDVLNFGSRSHHNGFFDSLAIHYGHADGVEDEIRETAAILNATLRPWSQSWVVKSNHDEHLEKWIEVSDFKRDPLNAAFYLSAASAKVEAIRRRDRGFDLLAWALDRAGLEGGVNFLARDGKLLIAGVRHDQHGDLGPNGARGSAANIARTGEKANVGHSHAAAISQGCYQSGTFSDLDMGYNRGPSSWSHSAILTYANGKRAIVTLRAGKWRAEP

SEQ ID NO: 11503 - protein, 536 aa, Unknown
  Description of Unknown: Integrase A71 sequence
  G3DSA:1.10.10.60,SSF46689
MNAMTAIEHRPAEITPAEARAAVLALHEHGGNVSATARTLGVTRAKLQRRIRKADMWGISAHGEVMASIPRRIEAAPGRVRRYLLTCAQSNTKVHAEFWRNLLALRDHFGAELMVSRVRYNHNDAQVSQEKDGRAADDSLWYAAEVEPYLADERVEICPTLIWAGDMNIIPTATSPLSGLDSFTGAASCVFPHPQIALKSVATAPGTPHKANYTTGAVTLKRYIKRKAGLKAEFHHAFGALLVEVDGAGDWFARQINATDAGVIYDLDLKVDAGAVTPGHPVEVFTPGDIHGTRVDRAVLAAVWGPGGLVDVLKPRHQILHDVLNFGSRSHHNGFFDSLAIHYGHADGVEDEIRETAAILNTTLRPWSQSWVVKSNHDEHLEKWIEVSDFKRDPLNAAFYLSAASAKVEAIRRRDRGFDLLAWALDRAGLEGGVNFLARDGKLLIAGVRHDQHGDLGPNGARGSAANIARTGEKANVGHSHAAAISQGCYQSGTFSDLDMGYNRGPSSWSHSAILTYANGKRAIVTLRAGKWRAEP

SEQ ID NO: 11504 - protein, 534 aa, Unknown
  Description of Unknown: Integrase A72 sequence
  PF07508,G3DSA:1.10.10.2600,SSF53041,PS51737, cd00338,PF00239,PS51736,SM00857,G3DSA:3.40.50.1390,PTHR30461
MSNEYCMYLRKSRADAEAEARGEEEILSRHERTLLDLSKKLKLHVTKIFREVVSGETISNRPEVQQLLEEVEEGRWAGVLVMEIERLARGDTVDQGIVAQTFKYSSTKIITPTKTYDPDNEFDEEYFEFGLFMSRREYKTINRRQQRGRTASIKEGKYLGSKPPYGYERIKLEGQKGYSLVPNIEQAPIVKFIFELYTKGEPLGNGTYNRLGTSLIARKLNALKVPTAKGGNWVTSTINGILRNPVYMGKIKWGSRPMQKKRKKGELSISRPRVKLEEMTLVDGLHEGLVSEEVWNLAQELLAQNPARPIPTKYKVKNPLMGLVICGECGRKMIRRPYSKKDLPSTLMCQDPQCTNVSSHLHLVEKKIIEGLKTWLINYKAEWKKIKQDDGKSLNTNEIREKAIAKINNQISSLELQMNNLHDLLEQGIYSTEKFIERSKNISERIKKYLVEKEELEKEIKTEEAVQGNNKEIVPVVERVIETYYLTDNPEMRNNLLKSVLVKVIYKKEYGTRWHRDPDDFELTLHPKILQNYY

SEQ ID NO: 11505 - protein, 531 aa, Unknown
  Description of Unknown: Integrase A73 sequence
  PF07508,SSF53041,PS51737,cd00338,PTHR30461:SF3, PF00239,PS51736,SM00857,G3DSA:3.40.50.1390,PTHR30461
MGVAVMTCVFVVCLVNHRGLSGVRYKPMRALVVIRLSRVTDATTSPERQLESCQQLCAQRGWDVVGVAEDLDVSGAVDPFDRKRRPNLARWLAFEEQPFDVIVAYRVDRLTRSIRHLQQLVHWAEDHKKLVVSATEAHFDTTTPFAAVVIALMGTVAQMELEAIKERNRSAAHFNIRAGKYRGSLPPWGYLPTRVDGEWRLVPDPVQRERVLEVYHRVVDNHEPLHLVAHDLNQRGVLSPKDYFAKLQGREPQGREWSATALKRSLISEAMLGYATLNGKTVRDDDGAPLVRSEPILTREQLEALRAELVKTDRTKPAVSTPSLLLRVLFCSVCGEPAYKFTGGGRKNARYRCRSWGWAQRCGNGTVAMAEWDAFCEEQVLDLLGDAERLEKVWVAGSDSAVELAEVNAELVDLTSLIGSPAYRAGSPQREALDARIAALAARQEELEGLEARPSGWEWRETGQRFGDWWREQDTAAKNTWLRSMNVRLTFDVRGGLTRTIDFGDLQEYEQHLRLGAALYLVNAEKPPTGR

SEQ ID NO: 11506 - protein, 530 aa, Unknown
  Description of Unknown: Integrase A74 sequence
  PF07508,SSF53041,PS51737,cd00338,PTHR30461:SF3,PF00239, PS51736,SM00857,G3DSA:3.40.50.1390,PTHR30461
MFSVGMAVMTCVFVVCLVNHRGLSGVRYKPMRALVVIRLSRVTDATTSPERQLESCQQLCAQRGWDVVGVAEDLDVSGAVDPFDRRRRPNLARWLAFEEQPFDVIVAYRVDRLTRSIRHLQQLVHWAEDHKKLVVSATEAHFDTTTPFAAVVIALMGTVAQMELEAIKERNRSAAHFNIRAGKYRGSLPPWGYLPTRVDGEWRLVPDPVQRERILEVYHRVVDNHEPLHLVAHDLNRRGVLSPKDYFAKLQGREPRGREWSATALKRSLISEAMLGYATLNGKTVRDDDGAPLVRAEPILTREQLEALRAELVKTDRAKPSVSTPSMLLRVLFCAVCGEPAYKFTGGGRKNARYRCRSWGWAQRCGNGTVAMAEWDSFCEEQVLDLLGDSERLEKVWVAGSDSAVELAEVNAELVDLTSLIGSPAYRVGSPQREALDARIAALAARQEELEGLEARPSGWEWRETGQRFGDWWREQGTAAKNTWLRSMNVRLTFDVRGGLTRTIDFGDLQEYEQHLRLGSVVERLHAGMS

SEQ ID NO: 11507 - protein, 530 aa, Unknown
  Description of Unknown: Integrase A75 sequence
  PF07508,SSF53041,PS51737,cd00338,PTHR30461:SF3, PF00239,PS51736,SM00857,G3DSA:3.40.50.1390,PTHR30461
MFSVGMAVMTCVFVVCLVNHRGLSGVRYKPMRALVVIRLSRVTDATTSPERQLESCQQLCAQRGWDVVGVAEDLDVSGAVDPFDRRRRPNLARWLAFEEQPFDVIVAYRVDRLTRSIRHLQQLVHWAEDHKKLVVSATEAHFDTTSPFAAVVIALMGTVAQMELEAIKERNRSAAHFNIRAGKYRGSLPPWGYLPTRVDGEWRLVPDPVQRERILEVYHRVVDNHEPLHLVAHDLNRRGVLSPKDYFAKLQGREPQGREWSATALKRSLISEAMLGYATLNGKTVRDDDGAPLVRAEPILTREQLEALRAELVKTDRTKPAVSTPSLLLRVLFCAVCGEPAYKFTGGGRKNARYRCRSWGWAQRCGNGTVAMAEWDAFCEEQVLDLLGDSERLEKVWVVGSDSAVELAEVNAELVDLTSLIGSPAYRVGSPQREALDARIAALAARQEELEGLEARPSGWEWRETGQRFGDWWREQDTSGKNTWLRSMNVRLTFDVRGGLTRTIDFGDLQEYEQHLRLGSVVERLHTGMS

SEQ ID NO: 11508 - protein, 530 aa, Unknown
  Description of Unknown: Integrase A76 sequence
  PF07508,SSF53041,PS51737,cd00338,PTHR30461:SF3,PF00239, PS51736,SM00857,G3DSA:3.40.50.1390,PTHR30461
MFSVGMAVMTCVFVVCLVNHRGLSGVRYKPMRALVVIRLSRVTDATTSPERQLESCQQLCAQRGWDVVGVAEDLDVSGAVDPFDRGRRPNLARWLAFEEQPFDVIVAYRVDRLTRSIRHLQQLVHWAEDHKKLVVSATEAHFDTTTPFAAVVIALMGTVAQMELEAIKERNRSAAHFNIRAGKYRGSLPPWGYLPTRVDGEWRLVPDPVQRERILEVYHRVVDNHEPLHLVAHDLNRRGVLSPKDYFAKLQGREPQGREWSATALKRSLISEAMLGYATLNGKTVRDDDGAPLVRAEPILTREQLEALRAELVKTDRTKPAVSTPSLLLRVLFCAVCGEPAYKFTGGGRKNARYRCRSWGWAQRCGNGTVAMAEWDAFCEEQVLDLLGDSERLEKVWVVGSDSAVELAEVNAELVDLTSLIGSPAYRVGSPQREALDARIAALAARQEELEGLEARPSGWEWRETGQRFGDWWREQDTSGKNTWLRSMNVRLTFDVRGGLTRTIDFGDLQEYEQHLRLGSVVERLHTGMS

SEQ ID NO: 11509 - protein, 530 aa, Unknown
  Description of Unknown: Integrase A77 sequence
  PF07508,SSF53041,PS51737,cd00338,PTHR30461:SF3, PF00239,PS51736,SM00857,G3DSA:3.40.50.1390,PTHR30461
MGMAVMTCAFVVCLVNHRGLSGVRYKPMRALVVIRLSRVTDATTSPERQLESCQQLCAQRGWDVVGVAEDLDVSGAVDPFDRKRRPNLARWLAFEEQPFDVIVAYRVDRLTRSIRHLQQLVHWAEDHKKLVVSATEAHFDTTTPFAAVVIALMGTVAQMELEAIKERNRSAAHFNIRAGKYRGSLPPWGYLPTRVDGEWRLVPDPVQRERILEVYHRVVDNHEPLHLVAHDLNRRGVLSPKDYFAKLQGREPQGREWSATALKRSLISEAMLGYATLNGKTVRDDDGAPLVRAEPILTREQLEALRAELVKTSRAKPAVATPSLLLRVLFCAVCGEPAYKFDAGRKIPRYRCRSFGFAVRCGNGTVPIAEWDAFCEEQVLDLLGDSERLEKVWVAGSDSAVELAEVNAELVDLTSLIGSPAYRAGSPQREALDARIAALAARQEELEGLEARPSGWEWRETGQRFGDWWRDQDTAGKNTWLRSMNVRLTFDVRGGLTRTIDFGDLQEYEQHLRLGSALDLVNAEKPPTGR

SEQ ID NO: 11510 - protein, 530 aa, Unknown
  Description of Unknown: Integrase A78 sequence
  PF07508,SSF53041,PS51737,cd00338,PTHR30461:SF3,PF00239, PS51736,SM00857,G3DSA:3.40.50.1390,PTHR30461
MCFSGYGRDDLCLRGLSGQPPRSQWCTVQTMRALVVIRLSRVTDATTSPERQLESCQQLCAQRGWDVVGVAEDLDVSGAVDPFDRKRRPNLARWLSFEEQPFDVIVAYRVDRLTRSIRHLQQLVHWAEDHKKLIVSATEAHFDTTTPFAAVVIALMGTVAQMELEAIKERNRSAAHFNIRAGKYRGSLPPWGYLPTRVDGEWRLVPDPVQRARILEVYHRVVDNHEPLHLVAHDLNRRGVLSPKDYFAKLQGREPQGREWSATALKRSLISEAMLGYATLNGKTVRDDDGAPLVRAEPILTREQLEALRAELVKTDRTKPAVSTPSLLLRVLFCAVCGEPAYKFAGGGRKHPRYRCRSMGFPKHCGNGTVAMAEWDAFCEEQVLDLLGDSERLEKVWVAGSDSAVELAEVNAELVDLTSLIGSPAYRVGSPQREALDTRIAALAARQEELEGLEARPSGWEWRETGQRFGDWWREQDTAAKNTWLRSMNVRLTFDVRGGLTRTIDFGDLQEYEQHLRLGSVVERLHTGMS

SEQ ID NO: 11511 - protein, 530 aa, Unknown
  Description of Unknown: Integrase A79 sequence
  PF07508,SSF53041,PS51737,cd00338,PTHR30461:SF3, PF00239,PS51736,SM00857,G3DSA:3.40.50.1390,PTHR30461
MGVAVMTCVFVVCLVNHRGLRGVRYKPMRALVVIRLSRVTDATTSPERQLESCRQLCAQRGWEVVGVAEDLDVSGAVDPFDRKRRPNLARWLAFEEQPFDVIVAYRVDRLTRSIRHLQQLVHWAEDHKKLVVSATEAHFDTTTPFAAVVIALMGTVAQMELESIKERNRSAAHFNIRAGKYRGSLPPWGYLPTRVDGEWRLVPDPVQRERILEVYHRVVDNHEPLHLVAHDLNRRGVLSPKDYFAKLQGREPQGRAWSATALKRSLISEAMLGYTTLNGKTVRDDDGAPLVRAEPILTREQLEALRAELVKTDRTKPAVSTPSLLLRVLFCAVCGEPAYKFDAGRKIPRYRCRSFGFAQRCGNGTIPIAEWDAFCEEQVLDLLGDSERLEKVWVAGSDSAVELAEVNAELVDLTSLIGSPAYRVGSPQREALDARIAALAARQEELEGLEARPSGWEWRETGQRFGDWWRDQDTAGKNTWLRSMNVRLTFDVRGGLTRTIDFGDLQEYEQHLRLGSALDLVNAEKPPTGR

SEQ ID NO: 11512 - protein, 529 aa, Unknown
  Description of Unknown: Integrase A80 sequence
  PF07508,G3DSA:1.10.10.2600,SSF53041,PF13408,PS51737,cd00338, PTHR30461:SF3,PF00239,PS51736,SM00857,G3DSA:3.40.50.1390, PTHR30461
MSDRASTYDIEAEWSPADLALLRSLEEAETLLPPDAPRALLSVRLSVFTEDTTSPVRQELDLRQLARDKGMRVVGVASDLNVSATKVPPWKRKELGDWLGNKTPQFDALLFWKIDRFIRNMGDLSRMIEWANRYEKNLISKNDPIDLKTPIGKMMTTLLGGVAEIESANTKARVESLWDYAKTQSDWLVGKPAYGYVTQRDESGKVSLAVDPKAREALHLARELVLGGMAARSVAEELKKREMVTPGLTAATLLRRMRNPALMGYRVEEDKRGGLRRSKLVLGHDGKPIRVADPVFTEEEFETLQAVLDSRGKNQPPRQPSGATKFLGVLKCVDCRSNMIVHFTRNKHGEYAYLRCQKCKSGGLGAPHPQEVYDALVEQVLAVLGDFPVERREYARGEEARAEVKRLEESIAYYMQGLEPGGRYTKTRFTRENAERALDKLIAELEAVDPETTEDRWIYEPIGKTFRQHWEEGGMEAMALDLIRAGITCDVTRTKVPRVRAPQVELDLDIPSDVRERLVMRRDDFAEAF

SEQ ID NO: 11513 - protein, 529 aa, Unknown
  Description of Unknown: Integrase A81 sequence
  PF07508,G3DSA:1.10.10.2600,SSF53041,PF13408,PS51737, cd00338,PTHR30461:SF3,PF00239,PS51736,SM00857, G3DSA:3.40.50.1390,PTHR30461
MSNRLHEYDVEAEWSPADLALLRSLEEAESLLPESAPRALLSVRLSVFTEDTTSPVRQELDLRQLARDKGMRVVGVASDLNVSATKVPPWKRKSLGTWLNDRVPEFDALLFWKVDRFIRNMSDLSRMIDWSNRYEKNLISKNDPIDLSTPLGKMMVTLLGGIAEIEAANTKARVESLWDYNKTQSEWLVGKPPYGYTTARDEQGKNRLVIDPKASEALHLTRLHLLEGGSVRSFVPVLKEKGLVSTGLTPSTLIRRLRNPALLGYRVEEDKKGGLRRSKVVVGHDGQPIVIADPIFTREEWDTLQAAMDARNKNQPPRQPSGATKFRGVLKCVECGTNMIVHHTRNKHGEYAYLRCQGCQSGGLGSPHPQDVYDALVGQVLTVLGDWPVQTREYARGAEARAETKRLEETIAVYMKGLEPGGRYTKTRFTMEQAEATLDKLIAELEAIDPDTTTDRWVYVAGGKTFREHWEEGGMDAMTSDLLRAGITATVTRTKIPKVRAPKVELDLDIPKDVRERLIVREDDFAETF

SEQ ID NO: 11514 - protein, 528 aa, Unknown
  Description of Unknown: Integrase A82 sequence
  PF07508,SSF53041,PF13408,PS51737,cd00338,PF00239,PS51736,SM00857 ,G3DSA:3.40.50.1390,PTHR30461
MTSSVLEQLRQAKSGAPKLSNAQVEAVLPVVGSYARISDAYEDAETGVTEQGTTRQRKVNKLLAEARGWQLHDREYVDNNLSAFKTHVVRDAFEDLLEDLASGVIDGIICYNLDRLARQVKDLERVIEIYDAGRKSGREMFFATNEGSIDLSSDDGITLARVMVAFANKASRDTARRVALKHQEIRDEGRNVGGSRPFGWDWKMEGSREHVLNPVESEAIRAAATGLIDGSMNYRSIVRDWNEQGLRTPRGREWSPQAVKAVMKNPRLAGWLVHKGSIAVHSRTGELVRAQAPAILTDEEYEALLTATEATRSRYTAASGRNRYLLSGIVRCAECGARLVGNRRTDKHFYYACRVGGDRASDGKSNACGKVTASGFELDRMVEELVVPMIIEASASLVQNAEKPHQAELVGLQDERDKLLQMYREGQAPSDAALPRLAELDQKVAELRHKQAEWLRSQKAAERGVEVTEETWPGLSIEEKRGHVAELIEAIYVSRATRRGNTFDRTRVSTPVWRKRGDVAGSTPSAAE

SEQ ID NO: 11515 - protein, 527 aa, Unknown
  Description of Unknown: Integrase A83 sequence
  PF07508,SSF53041,PS51737,cd00338,PTHR30461:SF3, PF00239,PS51736,SM00857,G3DSA:3.40.50.1390,PTHR30461
MGMAVMTCVFVVCLVNHRGLSGVRYKPMRALVVIRLSRVTDATTSPERQLESCQQLCAQRGWDVVGVAEDLDVSGAVDPFDRKRRPNLARWLAFEEQPFDVIVAYRVDRLTRSIRHLQQLVHWAEDHKKLVVSATEAHFDTTTPFAAVVIALMGTVAQMELEAIKERNRSAAHFNIRAGKYRGSLPPWGYLPTRVDGEWRLVPDPVQRERILEVYHRVVDNHEPLHLVAHDLNRRGVLSPKDYFAKLQGREPRGREWSATALKRSLISEAMLGYATLNGKTVRDDDGAPLVRAEPILTREQLEALRAELVKTDRTKPAVSTPSLLLRVLFCAVCGEPAYKFTGGGRKNARYRCRSWGWAQRCGNGTVAMAEWDAFCEEQVLDLLGDAERLEKVWVAGSDSAVELAEVNAELVDLTSLIGSPAYRVGSPQREALDARIAALAARQEELEGLEARPSGWEWRETGQRFGDWWREQDIAAKNTWLRSMNVRLTFDVRGGLTRTIDFGDLQEYEQHLRLGSVVEQLHAGMS

SEQ ID NO: 11516 - protein, 527 aa, Unknown
  Description of Unknown: Integrase A84 sequence
  PF07508,SSF53041,PS51737,cd00338,PTHR30461:SF3,PF00239, PS51736,SM00857,G3DSA:3.40.50.1390,PTHR30461
MGMAVMTCVFVVCLVNHRGLSGVRYKPMRALVVIRLSRVTDATTSPERQLESCQQLCAQRGWDVVGVAEDLDVSGAVDPFDRKRRPNLARWLAFEEQPFDVIVAYRVDRLTRSIRHLQQLVHWAEDHKKLVVSATEAHFDTTTPFAAVVIALMGTVAQMELEAIKERNRSAAHFNIRAGKYRGSLPPWGYLPTRVDGEWRLVPDPVQRERILEVYHRVVDNHEPLHLVAHDLNRRGVLSPKDYFAKLQGREPQGREWSATALKRSLISEAMLGYATLNGKTVRDDDGAPLVRAEPILTREQLEALRAELVKTDRTKPAVSAPSLLLRVLFCAVCGEPAYKFTGGGRKNARYRCRSWGWAQRCGNGTVAMAEWDAFCEEQVLDLLGDAERLEKVWVAGSDSAVELAEVNAELVDLTSLIGSPAYRAGSPQREALDARIAALAARQEELEARELRPSGWEWRETGQRFGDWWREQDTSGKNTWLRSMNVRLTFDVRGGLARTIDFGDLQEYEQHLRLGSVVEQLHTGMS

SEQ ID NO: 11517 - protein, 527 aa, Unknown
  Description of Unknown: Integrase A85 sequence
  PF07508,SSF53041,PS51737,cd00338,PTHR30461:SF3, PF00239,PS51736,SM00857,G3DSA:3.40.50.1390,PTHR30461
MGMAVMTCVFVVCLVNHRGLSGVRYKPMRALVVIRLSRVTDATTSPERQLESCQQLCTQRGWDVVGVAEDLDVSGAVDPFDRKRRPNLARWLAFEEQPFDVIVAYRVDRLTRSIRHLQQLVHWAEDHKKLIVSATEAHFDTTSPFAAVVIALMGTVAQMELEAIKERNRSAAHFNIRAGKYRGSLPPWGYMPARVDGEWRLLVDPVQRERILEVYHRVVDNHEPLHLVAHDLNQRGILSPKDYFAQLQGREPQGRAWSATALKRSLISEAMLGYTTLNGKTVRDDDGAPLVRAEPILTREQLEALRAELVKTDRTKPAVSTPSLLLRVLFCAVCGEPAYKFAGGGRKHPRYRCRSMGFPKHCGNGTVAMAEWDAFCEEQVLDLLGDAERLEKVWVAGSDAAVELAELNAELVDLTSLIGSPAYRAGSPQREALDARIEALAARQEELEARELRPSGWEWRETGQRFADWWAAQDVAGKNAWLRSMNVRLTFDVRGGLTRTIDFGDLQEYEQHLRLGSVVEQLHTGMS

SEQ ID NO: 11518 - protein, 527 aa, Unknown
  Description of Unknown: Integrase A86 sequence
  PF07508,SSF53041,PS51737,cd00338,PTHR30461:SF3,PF00239, PS51736,SM00857,G3DSA:3.40.50.1390,PTHR30461
MGMAVMTCVFVVCLVNHRGLSGVRYKPMRALVVIRLSRVTDATTSPERQLESCQQLCAQRGWDVVGVAEDLDVSGAVDPFDRKRRPNLARWLAFEEQPFDVIVAYRVDRLTRSIRHLQQLVHWAEDHKKLVVSATEAHFDTTTPFAAVVIALMGTVAQMELEAIKERNRSAAHFNIRAGKYRGSLPPWGYLPTRVDGEWRLVPDPVQRERILEVYHRVVDNHEPLHLVAHDLNRRGVLSPKDYFAKLQGREPQGREWSATALKRSLISEAMLGYATLNGKTVRDDDGAPLVRAEPILTREQLEALRAELVKTDRTKPAVSTPSLLLRVLFCAVCGEPAYKFTGGGRKNARYRCRSWGWVQRCGNGTVAMAEWDAFCEEQVLDLLGDSERLEKVWVAGSDSAVELAEVNAELVDLTSLIGSPAYRVGSPQREALDARIAALAARQEELEGLEARPSGWEWRETGQRFADWWREQDTAAKNTWLRSMNVRLTFDVRGGLTRTIDFGDLQEYEQHLRLGSVVERLHTGMS

SEQ ID NO: 11519 - protein, 527 aa, Unknown
  Description of Unknown: Integrase A87 sequence
  PF07508,SSF53041,PS51737,cd00338,PTHR30461:SF3, PF00239,PS51736,SM00857,G3DSA:3.40.50.1390,PTHR30461
MGMAVMTCVFVVCLVNHRGLSGVRYKPMRALVVIRLSRVTDATTSPERQLESCQQLCAQRGWDVVGVAEDLDVSGAVDPFDRKRRPNLARWLAFEEQPFDVIVAYRVDRLTRSIRHLQQLVHWAEDHKKLVVSATEAHFDTTTPFAAVVIALMGTVAQMELEAIKERNRSAAHFNIRAGKYRGSLPPWGYLPTRVDGEWRLVPDPVQRERILEVYHRVVDNHEPLHQIAHDLNQRGILSPKDYFAQLQGREPQGREWSATALKRSLISEAMLGYATLNGKTVRDDDGAPLVRAEPILTREQLESLRAELVKADRAKPAVSTPSLLLRVLFCAVCGEPAYKFTGGGRKNARYRCRSWGWAQRCGNGTVAMAEWDAFCEEQVLDLLGDAERLEKVWVAGSDSAVELAEVNAELVDLTSLIGSPAYRVGSPQREALDARIAALAARQEELEGLEARPSGWEWRETGQRFGDWWREQDIAAKNTWLRSMNVRLTFDVRGGLTRTIDFGDLQEYEQHLRLGSVVERLHAGMS

SEQ ID NO: 11520 - protein, 527 aa, Unknown
  Description of Unknown: Integrase A88 sequence
  PF07508,SSF53041,PS51737,cd00338,PTHR30461:SF3,PF00239, PS51736,SM00857,G3DSA:3.40.50.1390,PTHR30461
MGMAVMTCVFVVCLVNHRGLSGVRYKPMRALVVIRLSRVTDATTSPERQLESCQQLCAQRGWEVVGVAEDLDVSGAVDPFDRKRRPNLARWLASEEQPFDVIVAYRVDRLTRSIRHLQQLVHWAEDHKKLVVSATEAHFDTTTPFAAVVIALMGTVAQMELEAIKERNRSAAHFNIRAGKYRGSLPPWGYLPTRVDGEWRLVPDPVQRERILEVYHRVVDNHEPLHLVAHDLNRRGVLSPKDYFAKLQGREPQGREWSATALKRSLISEAMLGYATLNGKTVRDDDGAPLVRSEPILTREQLEALRAELVKTDRIKPAVSTPSMLLRVLFCAVCGEPAYKFAGGGRKHPRYRCRSMGFPKHCGNGTVAMAEWDAFCEEQVLDLLGDAERLEKVWVAGSDSAVELAEVNAELVDLTSLIGSPAYRAGSPQREALDARIAALAARQEELEGLEARPSGWEWRETGQRFGDWWREQDTAGKNTWLRSMNVRLTFDVRGGLTRTIDFGDLQEYEQHLRLGSVVERLHTGMS

SEQ ID NO: 11521 - protein, 527 aa, Unknown
  Description of Unknown: Integrase A89 sequence
  PF07508,SSF53041,PS51737,cd00338,PTHR30461:SF3, PF00239,PS51736,SM00857,G3DSA:3.40.50.1390,PTHR30461
MGVSVMTCVFVVCLVNHRGLSGVRYKPMRALVVIRLSRVTDATTSPERQLESCQQLCAQRGWEVVGVAEDLDVSGAVDPFDRKRRPNLARWLAFEEQPFDVIVAYRVDRLTRSIRHLQQLVHWAEDHKKLVVSATEAHFDTTTPFAAVVIALMGTVAQMELEAIKERNRSAAHFNIRAGKYRGSLPPWGYLPTRVDGEWRLVPDPVQRERILEVYHRVVDNHEPLHLVAHDLNRRGVLSPKDYFAKLQGREPQGREWSATALKRSLISEAMLGYATLNGKTVRDDDGAPLVRAEPILTREQLEALRAELVKTDRTKPAVSTPSLLLRVLFCAVCGEPAYKFAGGGRKHPRYRCRSMGFPKHCGNGTVAMAEWDAFCEEQVLDLLGDAERLEKVWVAGSDSAVELAEVNAELVDLTSLIGSPAYRVGSPQREALDARIAALAARQEELEGLEARPSGWEWRETGQRFGDWWREQDTAAKNTWLRSMNVRLTFDVRGGLTRTIDFGDLQEYEQHLRLGSVVEQLHAGMS

SEQ ID NO: 11522 - protein, 527 aa, Unknown
  Description of Unknown: Integrase A90 sequence
  PF07508,SSF53041,PS51737,cd00338,PTHR30461:SF3,PF00239, PS51736,SM00857,G3DSA:3.40.50.1390,PTHR30461
MGVAVMTCVFVVCLVNHRGLSGVRYKPMRALVVIRLSRVTDATTSPERQLESCQQLCAQRGWDVVGVAEDLDVSGAVDPFDRKRRPNLARWLAFEEQPFDVIVAYRVDRLTRSIRHLQQLVHWAEDHKKLVVSATEAHFDTTTPFAAVVIALMGTVAQMELEAIKERNRSAAHFNIRAGKYRGSLPPWGYLPTRVDGEWRLVPDPVQRERILEVYHRVVDNHEPLHLVAHDLNRRGVLSPKDYFAKLQGREPQGREWSATALKRSLISEAMLGYATLNGKTVRDDDGAPLVRAEPILTREQLEALRAELVKTDRTKPAVATPSLLLRVLFCAVCGEPAYKFTGGGRKNARYRCRSWGWAQRCGNGTVAMAEWDAFCEEQVLDLLGDAERLEKVWVAGSDSAVELAEVNAELVDLTSLIGSPAYRVGSPQREALDARIAALAARQEELEGLEARPSGWEWRETGQRFGDWWQEQDIAAKNTWLRSMNVRLTFDVRGGLTRTIDFGDLQEYEQHLRLGSVVERLHTGMS

SEQ ID NO: 11523 - protein, 527 aa, Unknown
  Description of Unknown: Integrase A91 sequence
  PF07508,SSF53041,PS51737,cd00338,PTHR30461:SF3, PF00239,PS51736,SM00857,G3DSA:3.40.50.1390,PTHR30461
MGVAVMTCVFVVCLVNHRGLSGVRYKPMRALVVIRLSRVTDATTSPERQLESCRQLCAQRGWGVVGVAEDLDVSGAVDPFDRKRRPNLARWLAFEEQPFDVIVAYRVDRLTRSIRHLQQLVHWAEDHKKLVVSATEAHFDTTTPFAAVVIALMGTVAQMELEAIKERNRSAAHFNIRAGKYRGSLPPWGYLPTRVDGDWRLVPDPVQRERILEVYHRVVDNHEPLHLVAHDLNRRGVLSPKDYFAKLQGREPQGREWSATALKRSLISEAMLGYATLNGKTVRDDDGAPLVRAEPILTREQLEALRAELVKTDRTKPAVATPSLLLRVLFCAVCGEPAYKFTGGGRKNARYRCRSWGWAQRCGNGTVAMAEWDAFCEEQVLDLLGDAERLEKVWVAGSDSAVELAEVNAELVDLTSLIGSPAYRVGSPQREALDARIAALAARQEELEGLEARPSGWEWRETGQRFGDWWREQDTAAKNTWLRSMNVRLTFDVRGGLTRTIDFGDLQEYEQHLRLGSVVERLHAGMS

SEQ ID NO: 11524 - protein, 527 aa, Unknown
  Description of Unknown: Integrase A92 sequence
  PF07508,SSF53041,PS51737,cd00338,PTHR30461:SF3,PF00239, PS51736,SM00857,G3DSA:3.40.50.1390,PTHR30461
MGMAVMTCVFVVCLVNHRGLSGVRYKPMRALVVIRLSRVTDATTSPERQLESCQQLCAQRGWDVVGVAEDLDVSGAVDPFDRKRRPNLARWLAFEEQPFDVIVAYRVDRLTRSIRHLQQLVHWAEDHKKLVVSATEAHFDTTTPFAAVVIALMGTVAQMELEAIKERNRSAAHFNIRAGKYRGSLPPWGYLPTRVDGEWRLVPDPVQRERILEVYHRVVDNHEPLHLVAHDLNRRGVLSPKDYFAKLQGREPRGREWSATALKRSLISEAMLGYATLNGKTVRDDDGAPLVRSEPILTREQLEALRAELVKADRTKPAVSTPSLLLRVLFCAVCGEPAYKFAGGQRKNPRYRCRSMGFPKHCGNGTVAMAEWDAFCEEQVLDLLGDAERLEKVWVAGSDSAVELAEVNAELVDLTSLIGSPAYRVGSPQREALDARIAALAARQEELEGLEARPSGWEWRETGQRFGDWWREQDASGKNTWLRSMNVRLTFDVRGGLTRTIDFGDLQEYEQHLRLGSVVERLHTGMS

SEQ ID NO: 11525 - protein, 527 aa, Unknown
  Description of Unknown: Integrase A93 sequence
  PF07508,SSF53041,PS51737,cd00338,PTHR30461:SF3, PF00239,PS51736,SM00857,G3DSA:3.40.50.1390,PTHR30461
MGMAVMTCVFVVCLVNHRGLSGVRYKPMRALVVIRLSRVTDATTSPERQLESCRQLCAQRGWDVVGVAEDLDVSGAVDPFDRKRRPNLARWLAFEEQPFDVIVAYRVDRLTRSIRHLQQLVHWAEDHKKLVVSATEAHFDTTTPFAAVVIALMGTVAQMELEAIKERNRSAAHFNIRAGKYRGSLPPWGYLPTRVDGEWRLVPDPVQRERILEVYHRVVDNHEPLHLVAHDLNRRGVLSPKDYFAKLQGREPQGREWSATALKRSLISEAMLGYATLNGKTVRDDDGAPLVRAEPILTREQLEALRAELVKTDRTKPAVSTPSLLLRVLFCAVCGEPAYKFAGGGRKHPRYRCRSMGFPKHCGNGTVAMAEWDAFCEEQVLDLLGDSERLEKVWVAGSDSAVELAEVNAELVDLTSLIGSPAYRVGSPQREALDARIAALAARQEELEGLEARPSGWEWRETGQRFGDWWQEQDTAAKNTWLRSMNVRLTFDVRGGLTRTIDFGDLQEYEQHLRLGSVVEQLHTGMS

SEQ ID NO: 11526 - protein, 527 aa, Unknown
  Description of Unknown: Integrase A94 sequence
  PF07508,SSF53041,PS51737,cd00338,PTHR30461:SF3,PF00239, PS51736,SM00857,G3DSA:3.40.50.1390,PTHR30461
MGVAVMTCVFVVCPVNHRGLSGVRYKPMRALVVIRLSRVTDATTSPERQLEACQQLCAQRGWDVVGVAEDLDVSGAVDPFDRKRRPNLARWLAFEEQPFDVIVAYRVDRLTRSIRHLQQLVHWAEDHKKLVVSATEAHFDTTTPFAAVVIALMGTVAQMELEAIKERNRSAAHFNIRAGKYRGSLPPWGYLPTRVDGEWRLVPDPVQRERILEVYHRVVDNHEPLHLVAHDLNRRGVLSPKDYFAKLQGREPQGREWSATALKRSLISEAMLGYATLNGKTVRDDDGAPLVRSEPILTREQLEALRAELVKTDRTKPAVSTPSLLLRVLFCAVCGEPAYKFAGGGRKHPRYRCRSMGFPKHCGNGTVAMAEWDAFCEEQVLDLLGDAERLEKVWVAGSDSAVELAEVNAELVDLTSLIGSPAYRVGSPQREALDARIAALAARQEELEGLEARPSGWEWRETGQRFGDWWREQDAAAKNTWLRSMNVRLTFDVRGGLTRTIDFGDLQEYEQHLRLGSVVERLHAGMS

SEQ ID NO: 11527 - protein, 526 aa, Unknown
  Description of Unknown: Integrase A95 sequence
  PF07508,SSF53041,PF13408,PS51737,cd00338, PTHR30461:SF21,PF00239,PS51736,SM00857,G3DSA:3.40.50.1390, PTHR30461
MTSSVLDQLRQAKTGPAPKENAEAALSLPVVGSYARISDAYEDAETGVTDTGTTRQRKVNKLLAEARGWQLHDREYVDNNLSAYKSHVVRDDFEDLLEDLAAGVVDGIICYNLDRLARQVKDLERVIEIYDAGRKAGRSMYFATNEGSIDLSSDDGITLARVMVAFANKASRDTARRVGLKHQEMRDEGRNVGGGRPFGWDWQFEGSRQHVLNPVESEAIRQAAAGLTDGSKTWSGIQREWNEAGFTTPRGRPWTPQAIKGVLRSPRLAGWLVHKGGIAVHSRTGELIRAQAPAILTDEEYEALLVATEATRSRYTNASGRQRYLLSGIARCAECGGALVGNRRTDKHWYYACRTSNGHTPDGRIPCGGVTCSGYELDRMIEELVLPMIVEGTGGASLNAEKPHQRELAGLRDERKTWVKRLDDGSAPDIVLPRISRIDQRIEELRHKQAEWLREQRVRERHVGVTNETWPHLSTEEKRGHIADLIEAIYVSRATRRGNTFDRSRVSTPVWRATADASASTDAGSR

SEQ ID NO: 11528 - protein, 525 aa, Unknown
  Description of Unknown: Integrase A96 sequence
  G3DSA:1.10.10.2600,SSF53041,PF13408,PS51737,cd00338,PTHR30461:SF3 ,PF00239,SM00857,G3DSA:3.40.50.1390,PTHR30461
MSARDYDIEAEWTPADLALLKELEEAEALLPADAPRALLSVRLSVFTDDTTSPVRQELDLRQLAREKGYRVVGLASDLNVSATKVPPWKRKSLGDWLNNRAPEFDALLFWKIDRFIRNLNDLNVMIRWSETYSKNLISKNDPIDLTTTMGKMMVSLLGGVAEIEAANTKTRVESLWDYTKTQGEWHVGKPPFGYKTGRDAAGKVVLVEDPPAVETLHTARELVMSGMSTTAAAKELKERGLISSTTATLTRRLRNPGILGLRVEEDKDGGIRRSKLILGRDGQPIRIADPIFTEEQFEELQAVLDKRGKRQPHRQPGGATSFLGVLKCAECGTNMINHFTRNRHGDYAYLRCQGCKSGGCGAPNPQEVYDRLVEQVLAVLGDFPVEMREYARGEEKRKELKRLEESIAYYMKELEPGGRFTKTRFTQDQAEGTLDKLIAELEAIDPESAKDRWVYVAGGKTFREHWEEGGIDAMSADLIRAGIRCQVTRTKVPKVRAPQVHLKLMIPKDVRTRLVIRPDDFGQTF

SEQ ID NO: 11529 - protein, 525 aa, Unknown
  Description of Unknown: Integrase A97 sequence
  G3DSA:1.10.10.2600,SSF53041,PF13408,PS51737,cd00338, PTHR30461:SF3,PF00239,SM00857,G3DSA:3.40.50.1390,PTHR30461
MSARDYDIEAEWTPADLALLKELEEAEALLPADAPRALLSVRLSVFTDDTTSPVRQELDLRQLAREKGHRVVGLASDLNVSATKVPPWKRKSLGDWLNNRAPEFDALLFWKIDRFIRNLNDLNVMIRWSETYSKNLISKNDPIDLTTTMGKMMVSLLGGVAEIEAANTKTRVESLWDYTKTQGEWHVGKPPFGYRTGRDDSGKVVLVEDPLAVETLHTARELVMTGMSTTAAAKELKERGLISSTTATLTRRLRNPGILGLRVEEDKDGGIRRSKLILGRDGQPIRIADPIFTEEQFEELQAVLDKRGKRQPHRQPGGATSFLGVLKCAECGTNMINHFTRNRHGDYAYLRCQGCKSGGYGAPNPQEVYDRLVEQVLAVLGDFPVEMREYARGEEKRKELKRLEESIAYYMKELEPGGRFTKTRFTQDQAEGTLDKLIAELEAIDPESAKDRWVYVAGGKTFREHWEEGGIDAMSADLIRAGIRCQVTRTKVPKVRAPQVHLKLMIPKDVRTRLVIRPDDFGQTF

SEQ ID NO: 11530 - protein, 525 aa, Unknown
  Description of Unknown: Integrase A98 sequence
  G3DSA:1.10.10.2600,SSF53041,PF13408,PS51737,cd00338, PTHR30461:SF3,PF00239,SM00857,G3DSA:3.40.50.1390 ,PTHR30461
MSARDYDIEAEWTPADLALLKELEEAEALLPADAPRALLSVRLSVFTDDTTSPVRQELDLRQLAREKGHRVVGLASDLNVSATKVPPWKRKSLGDWLNNRAPEFDALLFWKIDRFIRNLNDLNVMIRWSETYSKNLISKNDPIDLTTTMGKMMVSLLGGVAEIEAANTKTRVESLWDYTKTQGEWHVGKPPFGYKTARDEAGKVVLVEDPLAVETLHTARELVMTGMSTTAVAKVLKERGLISSTTATLTRRLRNPGILGLRVEEDKDGGIRRSKLILGRDGQPIRIADPIFTEEQFEELQAVLDKRGKRQPHRQPGGATSFLGVLKCAVCETNMINHYTRNRHGDYAYLRCQGCKSGGCGAPNPQEVYDRLVEQVLAVLGDFPVEMREYARGEEKRKELKRLEESIAYYMKELEPGGRFTKTRFTQDQAEGTLDKLIAELEAIDPDSAKDRWVYVAGGKTFREHWEEGGIDAMSADLIRAGIQCQVTRTKVPKVRAPQVHLKLMIPKDVRTRLVIRPDDFGQTF

SEQ ID NO: 11531 - protein, 525 aa, Unknown
  Description of Unknown: Integrase A99 sequence
  G3DSA:1.10.10.2600,SSF53041,PF13408,PS51737,cd00338, PTHR30461:SF3,PF00239,SM00857,G3DSA:3.40.50.1390,PTHR30461
MSARDYDIEAEWTPADLALLKELEEAEALLPADAPRALLSVRLSVFTDDTTSPVRQELDLRQLAREKGHRVVGLASDLNVSATKVPPWKRKSLGDWLNNRAPEFDALLFWKIDRFIRNLNDLNVMIRWSETYSKNLISKNDPIDLTTTMGKMMVSLLGGVAEIEAANTKTRVESLWDYTKTQGEWHVGKPPFGYKTGRDDSGKVVLVEDPLAVETLHTARELVMTGMSTTAAAKELKERGLISSTTATLTRRLRNPGILGLRVEEDKDGGIRRSKLILGRDGQPIRIADPIFTEEQFEELQAVLDKRGKRQPHRQPGGATSFLGVLKCAECGTNMINHFTRNRHGDYAYLRCQGCKSGGYGAPNPQEVYDRLVEQVLAVLGDFPVEMREYARGEEKRKELKRLEESIAYYMKELEPGGRFTKTRFTQEQAEGTLDKLIAELEAIDPESAKDRWVYVAGGKTFREHWEEGGIDAMSADLIRAGIRCQVTRTKVPKVRAPQVHLKLMIPKDVRTRLVIRPDDFGQTF

SEQ ID NO: 11532 - protein, 525 aa, Unknown
  Description of Unknown: Integrase A100 sequence
  G3DSA:1.10.10.2600,SSF53041,PF13408,PS51737,cd00338, PTHR30461:SF3,PF00239,SM00857,G3DSA:3.40.50.1390, PTHR30461
MGARDYDIEAEWTPADLALLRELEEAESRLPSDAPRALLSVRLSVFTDDTTSPVRQELDLRQLAREKGLRVVGLASDLNVSATKVPPWKRKSLGDWLNNRAPEFDALLFWKIDRFIRNLNDLNVMIRWSETYSKNLISKNDPIDLTTTMGKMMVSLLGGVAEIEAANTKTRVESLWDYTKTQGEWHVGKPPFGYKTARDEAGKVVLVEDPVAVETLHTARELVMTGMSTTAAAKVLKERGLISSTTATLTRRLRNPGVLGLRVEEDKDGGIRRSKLILGRDGKPIRIADPIFTEEQFDELQAVLDKRGKRQPHRQPGGATSFLGVLKCAECGTNMINHFTRNRHGDYAYLRCQGCKSGGYGAPNPQEVYDRLVEQVLAVLGDFPVEMREYARGEEKRKELKRLEESIAYYMKELEPGGRFDKTRFTRDQAEGTLDKLIAELEAIDPESAKDRWVYVAGGKTFREHWEEGGIDAMSADLNRAGIQCQVTRTKIPKVRAPQVHLKLMIPKDVRTRLVIRPDDFGQTF

SEQ ID NO: 11533 - protein, 525 aa, Unknown
  Description of Unknown: Integrase A101 sequence
  PF07508,SSF53041,PS51737,cd00338,PTHR30461:SF3, PF00239,PS51736,SM00857,G3DSA:3.40.50.1390,PTHR30461
MAVMTCVFVVCLVNHRGLSGVRYKPMRALVVIRLSRVTDATTSPERQLESCQQLCAQRGWDVVGVAEDLDVSGAVDPFDRKRRPNLARWLAFEEQPFDVIVAYRVDRLTRSIRHLQQLVHWAEDHKKLIVSATEAHFDTTTPFAAVVIALMGTVAQMELEAIKERNRSAAHFNIRAGKYRGSLPPWGYMPARVDGEWRLLVDPVQRERILEVYHRVVDNHEPLHLVAHDLNQRGILSPKDYFAKLQGREPKGREWSATALKRSLISEAMLGYTTLNGKTVRDDDGAPLVRAEPILTREQLESLRAELVKTDRTKPAVSTPSLLLRVLFCAVCGEPAYKFTGGGRKNARYRCRSWGWAQRCGNGTVAMAEWDAFCEEQVLDLLGDAERLEKVWVAGSDAAVELTELNAELVDLTSLIGSPAYRAGSPQREALDARIAALAARQEELEGLEARPSGWEWRETGQRFGDWWRDQDTAGKNTWLRSMNVRLTFDVRGGLTRTIDFGDLQEYEQHLRLGSVVEQLHTGMS

SEQ ID NO: 11534 - protein, 524 aa, Unknown
  Description of Unknown: Integrase A102 sequence
  PF07508,G3DSA:1.10.10.2600,SSF53041,PS51737,cd00338, PTHR30461:SF3,PF00239,SM00857,G3DSA:3.40.50.1390, PTHR30461
MIKNLENIHHVAIYLRISQEKKGENVETLENHRQILIEFCEEHGFTYEEFGEVISGGKSEITQRVALKRLLDNIEKYDAIACFELTRISRNGLISQTVKQYCIDYDKPILTPYQSYDLANSETDRLLFDVGSMISSHEHSTIGKRSKANKMQMSKAGLHVSGNVPFGYKRNNETKKLEIDEEAAPTIRYIFQLHSEGYGSFKIRDILNNEGYKSATGKAFNLPSIKRIIRNPAYKGTLIFNNRKKIKRNGKFEYDNVETITVENAHPAIIPPDVWDKANQDRESRALKSISIREKPATKSGVTLLKDLIFCGVCGRKMIIRKDTKSSIGYTLKKCEYLLPNGEKCPNCGKKLDAVIARVLTGLIKYADDLSQMEERLRKNNASDLNEKNQLKLNQIDKAIMEIEQKQKNLIELAMEGLFSHEEIREKKQELVKRMDELKAKREEVVNSINALSVEEEIELIQEKRKLILSLREDMDQEYGNELLKRFIKKIHFTRVIPEDILKRSTRNSERQNYPFNIKFEFFD

SEQ ID NO: 11535 - protein, 523 aa, Unknown
  Description of Unknown: Integrase A103 sequence
  PF07508,G3DSA:1.10.10.2600,SSF53041,PS51737,cd00338, PTHR30461:SF3,PF00239,PS51736,SM00857,G3DSA:3.40.50.1390, PTHR30461
MTRPTNLDVIIHLRKSRKDIEEEKKALETGVPFDTLDKHKRELMELVRREQHNVIRIFEEIVSGEFLSERPEAQEMLRNVEDGECDAVIVMDLDRLGRGDMIDAGTIFRAFKYSETLIITPTEVIDCNAEGAELLFGVKSIIAREELKQINKRLQGGRRRAVKDGRHIAKKPPYGYLRDENLKLYPHPEEAPVVKKIFELLAEGSGRYKVIDYLMRSGYKAPSNKDIWEQSTISYIVKNEVYLGHLVWGKQKHTKRNGKRVRKNLPPELWTRHDNAHEPIVSQELFDRANEAHTGRLRVSRKEGTAITNPLAGIAKCGVCGRTLTQTHSYDRPNPQIRCNNPACKSIQKGSLTYLFEEKLISSLEELVEQRKMTQSELNNSAERKNKNEERILALTNYIQKATTELNEQHSMRETTFEMLERKVYTEELFLQRHKIISDKIKQLESEIEKSQEEIAQLKIRMRMQAQLIPKIHKVIQAYKSLEDAEQKNNLLKSVIEKVMYIRKKEWLKPEQFELEVILRFPT

SEQ ID NO: 11536 - protein, 523 aa, Unknown
  Description of Unknown: Integrase A104 sequence
  PF07508,SSF53041,PS51737,cd00338,PTHR30461:SF3,PF00239,PS51736 ,SM00857,G3DSA:3.40.50.1390,PTHR30461
MMTCVFVVCLVNHRGLSGVRYKPMRALVVIRLSRVTDATTSPERQLESCQQLCAQRGWDVVGVAEDLDVSGAVDPFDRKRRPNLARWLAFEEQPFDVIVAYRVDRLTRSIRHLQQLVHWAEDHKKLVVSATEAHFDTTSPFAAVVIALMGTVAQMELEAIKERNRSAAHFNIRAGKYRGSLPPWGYMPTRVEGEWRLVPDPVQRERILEVYHRVVDNHEPLHLVAHDLNRRGVLSPKDYFAKLQGREPQGREWSATALKRSLISEAMLGYATLNGKTVRDDDGAPLVRSEPILTREQLESLRAELVKADRAKPAVSTPSLLLRVLFCAVCGEPAYKFTGGGRKNARYRCRSWGWAQRCGNGTVAMAEWDAFCEEQVLDLLGDSERLEKVWVAGSDSAVELAEVNAELVDLTSLIGSPAYRVGSPQREALDARIAALAARQEELEGLEARPSGWEWRETGQRFGDWWRDQDTAAKNTWLRSMNVRLTFDVRGGLTRTIDFGDLQEYEQHLRLGSVVERLHAGMS

SEQ ID NO: 11537 - protein, 523 aa, Unknown
  Description of Unknown: Integrase A105 sequence
  PF07508,SSF53041,PS51737,cd00338,PTHR30461:SF3, PF00239,PS51736,SM00857,G3DSA:3.40.50.1390,PTHR30461
MMTCVFVVCLVNHRGLSGVRYKPMRALVVIRLSRVTDATTSPERQLESCQQLCAQRGWDVVGVAEDLDVSGAVDPFDRKRRPNLARWLAFEEQPFDVIVAYRVDRLTRSIRHLQQLVHWAEDHKKLVVSATEAHFDTTTPFAAVVIALMGTVAQMELEAIKERNRSAAHFNIRAGKYRGSLPPWGYLPTRVDGEWRLVPDPVQRERILEVYHRVVDNHEPLHLVAHDLNRRGVLSPKDYFAKLQGREPQGREWSATALKRSLISEAMLGYATLNGKTVRDDDGAPLVRAEPILTREQLEALRAELVKTGRTKPAAATPSLLLRVLFCAVCGEPAYKFAGGQRKNPRYRCRSMGFPKHCGNGTVAMAEWDAFCEEQVLDLLGDAERLEKVWVAGSDSAVELAEVNAELVDLTSLIGSPAYRVGSPQREALDARIAALAARQEELEGLEARPSGWEWRETGQRFGDWWREQDISAKNTWLRSMNVRLTFDVRGGLTRTIDFGDLQEYEQHLRLGSVVEQLHAGMS

SEQ ID NO: 11538 - protein, 523 aa, Unknown
  Description of Unknown: Integrase A106 sequence
  PF07508,G3DSA:1.10.10.2600,SSF53041,PF13408,PS51737,cd00338, PTHR30461:SF3,PF00239,PS51736,SM00857,G3DSA:3.40.50.1390, PTHR30461
MNENVTLIPARIRAGNRITRQENKPKLRVAAYCRVSTDSDEQAGSYDVQVKHYTEYIGRNKEWELAGIYADDGISGTNIKKREGFIEMIDDCMEGKVDMIITKSISRFARNTIDCLKYVRKLKEKNIAIIFEKENINTLEASGELLLTIMASLAQQESASLSQNIKLGLQFRYQEGKVQPNHEHFLGYTKDEDGKLIVDENEAKIVRRIFREYLEGASFRDIANGLEKDKIRTGGKRYKWHLSTIRGILRNEKYMGDALLQKTITTDFIEKIRIKNDGTVPQYYVKDSQEPIIARDIFMLVQEEMIRRANLTSGVDGKKKRVYSSKYALSSICTCTKCGDIYRRIAWNNRGKKSTVWRCCTRVEHGPSACNALTIQESELQDATVKAINKILICSDRMLQILSDNIEMAIADDNSVEMEKLNGILKGKQKELVKLAHAKKDYTALADEIDILRDKKKELQVQRAETEGVKKRIEELTDFLKGENHQLIEYDECMVRKYIEEIKVYEDKFTICFKAKVEIEVVR

SEQ ID NO: 11539 - protein, 523 aa, Unknown
  Description of Unknown: Integrase A107 sequence
  PF07508,G3DSA:1.10.10.2600,SSF53041,PF13408,PS51737, cd00338,PF00239,PS51736,SM00857,G3DSA:3.40.50.1390, PTHR30461
MNLAKNITMIPTRRMVGTQKPAEKTQKLRVAAYARVSTEFEEQESSYDVQVEHYTTYIKSNPEWELVEIYADDGISATSTTKREAFNRMIQDAKDGKIDMILTKSISRFSRNTVDCLKYTRELKALNIAVFFEKENINTLDAKGEVLMTIMAALAQQESESLSANVRLGNQFRNQQGKVQINHNRFLGYTKDEEGNLVIVPEEAKIVRRIYAEYMDGSSFLQIKRSLEKDGILNGAHNKKWHESNIRQILTNEKYIGDALLQKTFTLNTLEKKRVANNGIAPKYYVEGSHEAIIDRDVFLRVQAEISRRANILNGGKKRIYSSKYALSSMVFCGHCGDIFRRIKWNNRGCKSTVWRCVSRVLKKTSRIDCPARTIREEDLQAAVLTAINDTFNKKDEIIPTLMEIIQDVIDENSQESVEQLDIKIKDLQIRLLEVGKEQKMIDEIGEEIIALRKEKHDIMTEAAKNIELQERINDMFSFLQEQTQAITEYSDTLVRRLIEKITIYDNKAVVEFKSGLQSEVEI

SEQ ID NO: 11540 - protein, 522 aa, Unknown
  Description of Unknown: Integrase A108 sequence
  PF07508,SSF53041,PS51737,cd00338,PF00239,SM00857,G3DSA:3.40.50 .1390,PTHR30461
MAQPLRALVGARVSVVQGPQKVSHIAQQETGAKWVAEQGHTVVGSFKDLDVSATVSPFERPDLGPWLSPELEGEWDILVFSKIDRMFRSTRDCVKFAEWAEAHGKILVFAEDSMTLNYRDKDRSGSLESMMSELFIYIGSFFAQLELNRFKSRARDSHRVLRGMDRWASGVPPLGFRIVDHPSGKGKGLDTDPEGKAILEDMAAKLLDGWSFIRIAQDLNQRKVLTNMDKAKIAKGKPPHPNPWTVNTVIESLTSPRTQGIKMTKHGTRGGSKIGTTVLDAEGNPIRLAPPTFDPATWKQIQEAAARRQGNRRSKTYTANPMLGVGYCGACGASLAQQFTHRKLADGTEVTYRTYRCGRTPLNCNGISMRGDEADGLLEQLFLEQYGSQPVTEKVFVPGEDHSEELEQVRATIDRLRRESDAGLIATAEDERIYFERMKSLIDRRTRLEAQPRRASGWVTQETDKTNADEWAKASTPDERRRLLMKQGIRFELVRGKPDPEVRLFTPGEIPEGEPLPEPSPR

SEQ ID NO: 11541 - protein, 522 aa, Unknown
  Description of Unknown: Integrase A109 sequence
  PF07508,SSF53041,PS51737,cd00338,PTHR30461:SF3, PF00239,PS51736,SM00857,G3DSA:3.40.50.1390,PTHR30461
MTCVFVVCLVNHRGLSGVRYKPMRALVVIRLSRVTDATTSPERQLESCQQLCAQRGWDVVGVAEDLDVSGAVDPFDRKRRPNLARWLAFEEQPFDVIVAYRVDRLTRSIRHLQQLVHWAEDHKKLVVSATEAHFDTTTPFAAVVIALMGTVAQMELEAIKERNRSAAHFNIRAGKYRGSLPPWGYLPTRVEGEWRLVPDPVQRERILEVYHRVVDNHEPLHLVAHDLNRRGVLSPKDYFAKLQGREPQGREWSATALKRSLISEAMLGYATLNGKTVRDDDGAPLVRAAPILTREQLEALRAELVKTDRTKPAVSTPSLLLRVLFCAVCGEPAYKFAGGGRKHPRYRCRSMGFPKHCGNGTVAMAEWDAFCEEQVLDLLGDAERLEKVWVAGSDSAVELAEVNAELVDLTSLIGSPAYRVGSPQREALEARIAALATRQEELEGLEARPSGWEWRETGQRFGDWWREQDTAGKNTWLRSMNVRLTFDVRGGLTRTIDFGDLQEYEQHLRLGSVVERLHTGMS

SEQ ID NO: 11542 - protein, 522 aa, Unknown
  Description of Unknown: Integrase A110 sequence
  PF07508,SSF53041,PS51737,cd00338,PF00239,SM00857, G3DSA:3.40.50.1390,PTHR30461
MAQPLRALVGARVSVVQGPQKVSHIAQQETGAKWVAEQGHTVVGSFKDLDVSATVSPFERPDLGPWLSPELEGEWDILVFSKIDRMFRSTRDCVKFAEWAEAHGKILVFAEDNMTLNYRDKDRSGSLESMMSELFIYIGSFFAQLELNRFKSRARDSHRVLRGMDRWASGVPPLGFRIVDHPSGKGKGLDTDPEGKAILEDMAAKLLDGWSFIRIAQDLNQRKVLTNMDKAKIAKGKPPHPNPWTVNTVIESLTSPRTQGIKMTKHGTRGGSKIGTTVLDAEGNPIRLAPPTFDPATWKQIQEAAARRQGNRRSKTYTANPMLGVGYCGACGASLAQQFTHRKLADGTEVTYRTYRCGRTPLNCNGISMRGDEADGLLEQLFLEQYGSQPVTEKVFVPGEDHSEELEQVRATIDRLRRESDAGLIATAEDERIYFERMKSLIDRRTRLEAQPRRASGWVTQETDKTNADEWAKASTPDERRRLLMKQGIRFELVRGKPDPEVRLFTPGEIPEGEPLPEPSPR

SEQ ID NO: 11543 - protein, 522 aa, Unknown
  Description of Unknown: Integrase A111 sequence
  PF07508,SSF53041,PS51737,cd00338,PF00239, SM00857,G3DSA:3.40.50.1390,PTHR30461
MAQPLRALVGARVSVVQGPQKVSHIAQQETGAKWVAEQGHTVVGSFKDLDVSATVSPFERPDLGPWLSPELEGEWDILVFSKIDRMFRSTRDCVKFAEWAEAHGKILVFAEDNMTLNYRDKDRSGSLESMMSELFIYIGSFFAQLELNRFKSRARDSHRVLRGMDRWASGVPPLGFRIVDHPSGKGKGLDTDPEGKAILEDMAAKLLDGWSFIRIAQDLNQRKVLTNMDKAKIAKGKPPHPNPWTVNTVIESLTSPRTQGIKMTKHGTRGGSKIGTTVLDAEGNPIRLAPPTFDPATWKQIQEAAARRQGNRRSKTYTANPMLGVGHCGACGASLAQQFTHRKLADGTEVTYRTYRCGRTPLNCNGISMRGDEADGLLEQLFLEQYGSQPVTEKVFVPGEDHSEELEQVRATIDRLRRESDAGLIATAEDERIYFERMKSLIDRRTRLEAQPRRASGWVTQETDKTNADEWTKASTPDERRRLLMKQGIRFELVRGKPDPEVRLFTPGEIPEGEPLPEPSPR

SEQ ID NO: 11544 - protein, 522 aa, Unknown
  Description of Unknown: Integrase A112 sequence
  PF07508,SSF53041,PS51737,cd00338,PTHR30461:SF3,PF00239,PS51736, SM00857,G3DSA:3.40.50.1390,PTHR30461
MTCVFVVCLVNHRGLSGVRYKPMRALVVIRLSRVTDATTSPERQLESCQQLCAQRGWEVVGVAEDLDVSGAVDPFDRKRRPNLARWLAFEEQPFDVIVAYRVDRLTRSIRHLQQLVHWAEDHKKLVVSATEAHFDTTTPFAAVVIALMGTVAQMELEAIKERNRSAAHFNIRAGKYRGSLPPWGYLPTRVDGEWRLVPDPVQRERILEVYHRVVDNHEPLHLVAHDLNRRGVLSPKDYFAKLQGREPQGREWSATALKRSLISEAMLGYATLNGKTVRDDDGAPLVRAEPILTREQLEALRAELVKTDRTKPAVSTPSLLLRVLFCAVCGEPAYKFAGGGRKHPRYRCRSMGFPKHCGNGTVAMAEWDAFCEEQVLDLLGDSERLEKVWVAGSDSAVELAEVNAELVDLTSLIGSPAYRAGSPQREALDARIAALAARQEELEGLEARPSGWEWRETGQRFGDWWREQDTAAKNTWLRSMNVRLTFDVRGGLTRTIDFGDLQEYEQHLRLGSVVERLHTGMS

SEQ ID NO: 11545 - protein, 522 aa, Unknown
  Description of Unknown: Integrase A113 sequence
  PF07508,SSF53041,PS51737,cd00338,PTHR30461:SF3, PF00239,PS51736,SM00857,G3DSA:3.40.50.1390,PTHR30461
MMTCVFVVCLVNHRGLSGVRYKPMRALVVIRLSRVTDATTSPERQLESCQQLCAQRGWDVVGVAEDLDVSGAVDPFDRKRRPNLARWLSFEDQPFDVIVAYRVDRLTRSIRHLQQLVHWAEDHKKLVVSATEAHFDTTTPFAAVVIALMGTVAQMELEAIKERNRSAAHFNIRAGKYRGSLPPWGYLPTRVDGEWRLVPDPVQRERILEVYHRVVDNHEPLHLVAHDLNRRGVLSPKDYFAQLQGREPQGRAWSATALKRSLISEAMLGYTTLNGKTVRDDDGAPLVRAEPILTREQLEALRAELVKTDRTKPAVSAPSLLLRVLFCAVCGEPAYKFDAGRKIPRYRCRSFGFAQRCGNGTIPIAEWDAFCEEQVLDLLGDSERLEKVWVAGSDSAVELAEVNAELVDLTSLIGSPAYRVGSPQREALDSRIAALAARQEELEGLEARPSGWEWRETGQRFGDWWREQDIAAKNTWLRSMNVRLTFDVRGGLTRTIDFGDLQEYEQHLRLGSVVERLHTGMS

SEQ ID NO: 11546 - protein, 522 aa, Unknown
  Description of Unknown: Integrase A114 sequence
  PF07508,SSF53041,PS51737,cd00338,PTHR30461:SF3,PF00239, PS51736,SM00857,G3DSA:3.40.50.1390,PTHR30461
MTCVFVVCLVNHRGLSGVRYKPMRALVVIRLSRVTDATTSPERQLESCQQLCAQRGWDVVGVAEDLDVSGAVDPFDRKRRPNLARWLAFEEQPFDVIVAYRVDRLTRSIRHLQQLVHWAEDHKKLVVSATEAHFDTTTPFAAVVIALMGTVAQMELEAIKERNRSAAHFNIRAGKYRGSLPPWGYLPTRVDGEWRLVPDPVQRERILEVYHRVVDNHEPLHLVAHDLNQRGLPSPKDYFAKLQGREPKGREWSATALKRSLISEAMLGYATLNGKTVRDDDGAPLVRAEPILTREQLEALRAELVKTDRTKPAVSTPSLLLRVLFCAVCGEPAYKFAGGQRKNPRYRCRSMGFPKHCGNGTVAMAEWDAFCEEQVLDLLGGSERLEKVWVSGSDSAVELAEVNAELVDLTSLIGSPAYRVGSPQREALDARIAALAARQEELEGLEARPSGWEWRETGQRFGDWWREQDIAAKNTWLRSMNVRLTFDVRGGLTRTIDFGDLQEYEQHLRLGSVVERLHTGMS

SEQ ID NO: 11547 - protein, 522 aa, Unknown
  Description of Unknown: Integrase A115 sequence
  PF07508,SSF53041,PS51737,cd00338,PTHR30461:SF3, PF00239,PS51736,SM00857,G3DSA:3.40.50.1390,PTHR30461
MTCVFVVCLVNHRGLSGVRYKPMRALVVIRLSRVTDATTSPERQLESCQQLCAQRGWDVVGVAEDLDVSGAVDPFDRKRRPNLARWLAFEEQPFDVIVAYRVDRLTRSIRHLQQLVHWAEDHKKLVVSATEAHFDTTTPFAAVVIALMGTVAQMELEAIKERSRSAAHFNIRAGKYRGSLPPWGYLPTRVDGEWRLVPDPVQRERILEVYHRVVDNHEPLHLVAHDLNQRGLPSPKDYFAKLQGREPKGREWSATALKRSLISEAMLGYATLNGKTVRDDDGAPLVRAEPILTREQLEALRAELVKTDRTKPAVSTPSLLLRVLFCAVCGEPAYKFAGGQRKNPRYRCRSMGFPKHCGNGTVAMAEWDAFCEEQVLDLLGGSERLEKVWVSGSDSAVELAEVNAELVDLTSLIGSPAYRVGSPQREALDARIAALAARQEELEGLEARPSGWEWRETGQRFGDWWREQDIAAKNTWLRSMNVRLTFDVRGGLTRTIDFGDLQEYEQHLRLGSVVERLHTGMS
